United States Patent Application Publication US 2008/0256662 A1 - sequence listing, part 4

SEQ ID NO: 27573 - DNA, 269 bp, Glycine max
  unsure (1)..(269): unsure at all n locations; Clone ID: 701058973H1
cataggcttcgtgttccttatttaggtgacgaattgcatcacactggttggaattcatgcagctcttgccatggagacccctcggcagaccgacgatttctcatcgcacctgcactcgtttcaggtcgcatatatgtggttgatgtgaaaacaaatccaagggctccatctttgcacaaagttgttgagcctgccgatatcatacagaagactggattagcttatccacacacatctcancntntngntcnggtgacanaaggntctca

SEQ ID NO: 27574 - DNA, 272 bp, Glycine max
  unsure (1)..(272): unsure at all n locations; Clone ID: 701058974H1
cgagtcttatgatgggctccattgtgggaactcaataattctaatcactttgaggcgcgatgagttaaaatgattttgaaaacaattgagtagttgtgtgtattgcataggtcaaactccagtgacacatatatgattttaaatgtctgtcttaatgagatgattaatcatatgaacataacntattagtattattactgtgtnatatgtatatgatgcatgangcatgataatgtgttgtcttgggattatgaaagtgtatgaactctgtg

SEQ ID NO: 27575 - DNA, 245 bp, Glycine max
  unsure (1)..(245): unsure at all n locations; Clone ID: 701058975H1
cctggcatcggatccagatccaaatccagtttaacaaagaaaatgcagtacaagaacctggnccgatcgggactgaaggtgagccagctctcctacggggcgtgggtgagcttcggtaaccagctagacgtgaaggaggccaaggccctcctccagtgctgccgcgaccacggcgtgaacttcttcgacaacgccgaggtctacgccaacggccgcgccgaggaaatcatgggccaggccatccg

SEQ ID NO: 27576 - DNA, 273 bp, Glycine max
  Clone ID: 701058976H1
cgaactgttgtttggtctcttctctcttatccatggcatcaacgtttctcaccctaccaactcccttcctacacaaaaccaatgccatcagtttctctaacaagagaccctcatttttgcagaggagctctctgaagattcatgcaattaccaaaaaatgggaacccacaaaggttgtgcctcaggctgatagagttcttattcgtttggaggagctttcagataaaacagttggtggagttttgctgcctaaatcagctgttaaatttgagc

SEQ ID NO: 27577 - DNA, 280 bp, Glycine max
  Clone ID: 701058979H1
gcatggagtcctcaaagatctatgcttacctcttcctctgcatgatctttctctcttccgccactcccattctcggttgtggctactgtggcaaaccccccaaaaagcacaagcctggtaaaacaccaaagacacccaaaacacccgttgttaagccaccagtcaccatccctcccattaatgttcctcccgttgttcttccaccaatagtgaagcccccaggtattctccctccaattccaattattaacccaccaaccacaccagggaagggagggaa

SEQ ID NO: 27578 - DNA, 280 bp, Glycine max
  unsure (1)..(280): unsure at all n locations; Clone ID: 701058980H1
tgggagtcacgagagcagcaaggggaagtcacaagantcacaagaatggagannggttcgggcaagctgagcaggaagaaaagtggtgntggaaacggacaggttctagacggttctaatattatggagttggttggaaaccagcaagttttcaccaccttcgtggaccataagtttcacgagttagacacagacaaagatggcaaactctctgtcaaagagctccagcctgctgttgctgacataggagctgctcttggtttgcctgctcacggcacta

SEQ ID NO: 27579 - DNA, 242 bp, Glycine max
  unsure (1)..(242): unsure at all n locations; Clone ID: 701058981H1
gattcgattctctctgcactcacttctagggttttctctgcgctataagcaatcatggcggatgaaacaccaaatgagatgaaggaggaggttccagaaattgttccttttgatcctaccnnnnnnnnnnnnnnnnnnnnnnttacaattgtagatcctgctgatgaacctgtggagaaattggctgagaagacagaaaacctctcagtttccgagggggttgagactgcatttactggttt

SEQ ID NO: 27580 - DNA, 278 bp, Glycine max
  Clone ID: 701058982H1
aaacatccaatcccaacccatctttctctttttctcactctctcccccccaaaccctagctttcaccatgcggttccaatcgctctaaccctaactccctctctccatcaccgatcttcgatccgcaccgccgttcctttgaatcgcttcagattctccgctgcttccaccaggaggaggagtttttcgcgattcgcgctcgaagcttccgttgccgccgatcgaagagattcgctccgaatcccaacgccctgccgtcaagtttttcgccgaagtaa

SEQ ID NO: 27581 - DNA, 272 bp, Glycine max
  unsure (1)..(272): unsure at all n locations; Clone ID: 701058985H1
ctcaagagagtagtatcctatccacaagacaagcaagtncaaagtacttaaagcaatggacatggtgctccaaaatctagataantaacttaattgaattgaaacatgagtgagaanagtaaaaccctgcgtttcggcatcttaggctgcgccaacatcgccaganaagtngctcgagccattgctctcgctccgaacgccactctctgcgccatcgcgagccgttccagagagaaggcggagaagttcgccgccgagaacgggtttccggc

SEQ ID NO: 27582 - DNA, 269 bp, Glycine max
  unsure (1)..(269): unsure at all n locations; Clone ID: 701058986H1
gcaactatgagcaaggattatctaatcatactttcnctccttctttccacggtgcttgcaannnnnnnnnnnnnnnnnnnnnnnnnnnncctctatcttgggaagggcttctcccatcgcaaattgtctcccagttatcacattcacaaaaccattgacgnatcctatgcagttatcttcgatgctggtagcacgggaagccgtgtacatgtctatcgttttaaccaacaattagatctccttcgcattggccaagaccttgagttgtt

SEQ ID NO: 27583 - DNA, 269 bp, Glycine max
  unsure (1)..(269): unsure at all n locations; Clone ID: 701058987H1
agcagcagcatatttagatcccttattgttgagtggtgtgaganatggtgtcctctcagttttctgcttttactttggctggctacnaaccgtctcagactcagttactctttcctgcanagcttgttgatactgtgaacacagagcatattgagctggatttctctgatgtctttggtcctgttacgttagatttgaataacattgattccactancagtgngncggnngaagaagtgaacgngctggnttatgatgacccaccagtg

SEQ ID NO: 27584 - DNA, 236 bp, Glycine max
  unsure (1)..(236): unsure at all n locations; Clone ID: 701058988H1
ctgnnaatnatgaagtnngacataacnagtgangngactggtgnancagcagaaactggagcccatgatagtgncagaangnngcatcgngaaagngctttgagttcaagaaatgnaaatgggtacggctncacattngcngctgcnnctacgaccgaagctcaancatgtagcccaaaacgtctncacaaaaagagaannaatggtcacgatacnnacaactacacaccaaacac

SEQ ID NO: 27585 - DNA, 271 bp, Glycine max
  unsure (1)..(271): unsure at all n locations; Clone ID: 701058989H1
aggagatagtgaaagancttcttcctctaattcgagtgtacaaggatggcagcgtgnagcgtcttctaagctctgaaaacgtggcagctccccctgaagatccccaaactggagtctcatccaaagacatagtcatcgcagacaacccctacgtctccgctcgcattttccttcccaaatcccaccacactaacaacaaactccccatcttcctctacttccacggtggcgcctttnncgtcgaatccgcttctcctttttcgtccaccgc

SEQ ID NO: 27586 - DNA, 255 bp, Glycine max
  unsure (1)..(255): unsure at all n locations; Clone ID: 701058990H1
caaggttccacaaaatntatctnntagtttgtggaactcttcctcatatnaatnaccanagaaaatnaaaatngaaaanataaacantaaggnanaaanngantgtggaccctgaagagncaaccatcattaaagagctgaagaagcctgtngnnganaaagaagntncagggaatgntatatgagggccgnacgnacngccncggaggggaaccagaaaatcatgttaacaaaataatctggaacncnaatgta

SEQ ID NO: 27587 - DNA, 275 bp, Glycine max
  unsure (1)..(275): unsure at all n locations; Clone ID: 701058991H1
cccccggtgggtgacatgaacgacttgaggaagaagagaaaagccgcagggcaagantgagagccgaaacttctcatggaatcgcaaacggatctgcagaaccgacnccggaatcttcattatcggatcctccaacgtcggcaaacgcaccctcctatcccgattgacctctgttgatgttgatgatgcttttgattcggcttctcaagtgaatgtccangggtggactatcaacaataagtactacactgctgatgtttctctttggatggctc

SEQ ID NO: 27588 - DNA, 274 bp, Glycine max
  unsure (1)..(274): unsure at all n locations; Clone ID: 701058992H1
aaattagcctcacaaaagcaaagatcaaacaaaccaaggacgagaacacgatgttgcttgaacttgcacttggtttattggttttggctctgtttctgcacttgcgtcccacacccactgcaaaatccaaaagcacttcgccanctcccaaacccaccaagcccaaagcctcgtcttcccttcataggacaccttcatctcttaaaagacaaacttctccactacgcactcatcgacctctccaaaaaacatggtcccttattctctctctact

SEQ ID NO: 27589 - DNA, 273 bp, Glycine max
  unsure (1)..(273): unsure at all n locations; Clone ID: 701058993H1
gtgaggctgctgctgaagaaactaagaaaagtaaccatgtgcagagaaaacttgaganacgccaganagatcgtaatcttgactcccacattgaagagcaatttggtggtgggcgattgttggcctgtatttcttctcgtcccggacaatgtggcagggctgatgggtacattcttgaaggtaaggagctggagttttacatgaagaaactccagaggaagaagggaaagggtgctgcttaattttagtgttttctaaacttctatttggctt

SEQ ID NO: 27590 - DNA, 276 bp, Glycine max
  Clone ID: 701058994H1
tctctctctcgctcttcttctcatccagcaccgagtcacagactcaccgatcttccgattccctttcgtcttggtttatgagctcgaaggagagacccactcttggtggcacgcggattaagacccgcaaacggaatattgctgcgccgctggaccctgcagcattctcggatgcagtggtccagatttatttggataatgctggtgatctggaacttattgctaagagcattgaatcttcagaccttaacttttcaagatacggcgatacctttt

SEQ ID NO: 27591 - DNA, 281 bp, Glycine max
  unsure (1)..(281): unsure at all n locations; Clone ID: 701058995H1
cacagacanaactgagantgagtgagancagaancaaggaacgtagcaacaatnggtccagcggcaaagacgacnnacgatgcgttcganctctcaggcatcgtcacgtgcgtnccccgnagaaaccaaccccgtcatcgagtgcttggaccgcttaaganaccttgaaaccgaaccggnccaaaacctaatcgcgcaaggtttaacaccctccacgagttgtgcgcaantccaaattctgattcaaattcaaatgtggctattgcaaccaaaaacggcgc

SEQ ID NO: 27592 - DNA, 282 bp, Glycine max
  unsure (1)..(282): unsure at all n locations; Clone ID: 701058996H1
cncganccgcctagggacaaggtgnncatacaaggngatgganatgtgaaaggagcgtatatnactgaggctgatgtgggaacttttaccatcgaagcagcanatgaccctagagccttgaacaaagccgtgcacataagactcccaaacaattatntgtccttaaatgatatcatctctntgngggaganaaanattgggnaaactcnngaganaatttatgtntcagaagaagaagttcttaagcaaattaaggagacttctttcccaaataattatctt

SEQ ID NO: 27593 - DNA, 265 bp, Glycine max
  unsure (1)..(265): unsure at all n locations; Clone ID: 701059001H1
tcacttttctactttgagtcttcttgatccttcttttnctccttgaactcaaacatgggcagatgaggtggttctggtagatttcttgccaagtccatttgggatgagggtcaggattgcacttgctgaaaagggtatcaaatatgagtacaaagaagaggacttgaggaacaagagtcctcttctcctccaaatgaacccggttcacaagaagattccggttctcatccacaatggcanacccatttgtgaatcctcattgctg

SEQ ID NO: 27594 - DNA, 260 bp, Glycine max
  Clone ID: 701059002H1
ggccattgccttcttattgggtggaaagggacaccaattaactctgtttctgtctggaaattcctttgatggaaagtgcaacaaggttttaaaaatcagtccataaccacgattttggtcgtagcgttaaggatctttggctctatgtggccataacctacaatgttatgaatcgagacaaaaccgtgactggaatttaaaatcttaaagttttctttcatgttgttcctaatcaatgtgtgtatcatctctgtgcagtt

SEQ ID NO: 27595 - DNA, 260 bp, Glycine max
  Clone ID: 701059003H1
ctttcttgagttgagttaacagcatggagagggaggaagatgttaaggttggagcacagaaattctcagagaggcaagcattggggacaggagctcagggtgacaaggactacaaggaggcaccaccagcacccttgtttgagccaggggagttaaagtcatggtctttttacagagctgggattgcagagtttgtggccacattcttgttcctctacatcactgtcttgactgtcatgggtgtcaacagggcacccaac

SEQ ID NO: 27596 - DNA, 253 bp, Glycine max
  unsure (1)..(253): unsure at all n locations; Clone ID: 701059004H1
gaaagggtagactcaagtaaagtagaatatatcaccaccaagaaaattgaaangttgatggaagtacaccatncanctgcatgctgccgaagcatcgaagccaccccctggaccaagaatgccagatggaacacgtggcttcgcaataggacgangtcggtttcctgtccctgcttcgaattagcaaaacttggacgccacaaatgagggattgtatttagcagtattatgtgtccgangctttagtgatgta

SEQ ID NO: 27597 - DNA, 256 bp, Glycine max
  unsure (1)..(256): unsure at all n locations; Clone ID: 701059005H1
tgggatctaatttgcaaaaaactagcaaaagaacaaaaagtcatacttgactcatctcattttaaaaatccaaattaaatatgaactttttttttggtccggcctatggtaacttgtaacatgtatcgagtcggataactcgttttgttacatgtaaaaatagtgtaaatctatacttaaactttaatttccactcaacaaaatcangttcaacttaaacaagtctagactaacaactattttttatgtgatagta

SEQ ID NO: 27598 - DNA, 258 bp, Glycine max
  unsure (1)..(258): unsure at all n locations; Clone ID: 701059006H1
gcattttcagaggaacaatggcgggtagggtttcgncgtgcttcttcttcgtgnttgctctttctctccttnttnctttggcagatcnccgctgaggaatcatcggagaaagagtncgtactcacattggatcantctaantttcacgncactgtnagcnagcacgatttcatcgtcgtcgagttctacgctccatggtgtgnccactgtaagaagcttgctcccgagtatgagaaagctgcttctatctgagtagtc

SEQ ID NO: 27599 - DNA, 260 bp, Glycine max
  unsure (1)..(260): unsure at all n locations; Clone ID: 701059007H1
aaggagttgcacntcaacnaagannanaaacgcaattaagaagntccanagcggngtgaacaagntcgnggaacctngttgnngtcacgnttggttcccaagggaagaaatgttgttctcgagagnaagtatggctcgccgaaaatcgttaangacggtgtcactgtcgctaaagaggttgagttggaggatcccgttgagaatattggtgccaagttggtgagacaagcggctgncaagacaaacgacttgctggtgat

SEQ ID NO: 27600 - DNA, 258 bp, Glycine max
  unsure (1)..(258): unsure at all n locations; Clone ID: 701059008H1
cttcttctcttgcggctagngttttagcgcanttncttctagattnnaggaagatgggtaagnnaaaggttcacatcagtattgtggtcattggccatgtcgactctgggaaatccactaccactggtcacctgatttacaagcttggaggcattgacaagcgtgttattgagaggtttgagaaggaagctgctgagatgaacaagaggtctttcaagtatgcctgggtgctggacaaacttaaggctggcgtgaaag

SEQ ID NO: 27601 - DNA, 262 bp, Glycine max
  unsure (1)..(262): unsure at all n locations; Clone ID: 701059009H1
ttatattcgcgttgcgatctattccaattccatgacgacaccaccgncnttcctcctcagcttcgcactcgcaatttcgcctattcaaaccnnnnnnnnnnnnnnnnnnnnnnngttccctttcaccttcagcaacccgcaaccactcactacgctgcgccctacgtcgccgccccctccgtgcaaatccccgctcctcccgtcgtcggccccattgctcccgcgccggttcccggcgtgtactccgccgtgcgcaatatca

SEQ ID NO: 27602 - DNA, 260 bp, Glycine max
  Clone ID: 701059010H1
cgcattgcttcgcctcacagcagcagctgcagcagcaatggctcccaaacgaggtggaaaggctccggcttcttgccgctaagaagaagcctgagaaggtcacgaatccgttgttcgagaagcgtccgaagcagttcggaatcggaggggcgttgcctccgaagagagacttgactaggttcgtgaagtggccaaagaatgttcaaattcagaggaagaagaggattctgaagcagaggttgaaggttccccagctttga

SEQ ID NO: 27603 - DNA, 256 bp, Glycine max
  unsure (1)..(256): unsure at all n locations; Clone ID: 701059011H1
gatacttcacatctgaagcgcatcatgaggttcctggtgcaaagaaagatattcanaggcgacgggtgcagcaggggctattctcaatcagctctgtctcgtcgattgatgagaaacggcgaacacagcatggctagttttctcttgctggagagtagtcctgtaatgctggcaccttggcacagtctgagtgctcgcgtcatggccaatggcaacccctcatttgcaaaggctcacggtgaagacggtggcgcta

SEQ ID NO: 27604 - DNA, 258 bp, Glycine max
  unsure (1)..(258): unsure at all n locations; Clone ID: 701059012H1
tcgctctcttctcnnccaaatgcgncantccaagntgggtaggactctgtaggctganaaaganaacactgcataccgttggaaagaaggatgctgctggccatgttncttaatctagttcttgctgcctttgtcttcttgagttntatcagagacgggagtgcagggatcactagctctttcattcggtcagagtggccggcagttgacatcccccttgatcntgaagcatttgcagttccaaagggtataatgcac

SEQ ID NO: 27605 - DNA, 261 bp, Glycine max
  unsure (1)..(261): unsure at all n locations; Clone ID: 701059014H1
cttccactctacccgtttactccaacccctcttcccaaaacctctaatttctctcttcatctccttccaatggcttccattcccacactctcttcaancctacgtacactctctgctcactccttatcccattcaaaccccaacaaccactgcactctccctcccacatctctcttcggcaccaggatcaccctcctacgcgccacctcatcgtctcattccctccccaacaccaattgccgtgcaacctcgccaccgtgt

SEQ ID NO: 27606 - DNA, 262 bp, Glycine max
  unsure (1)..(262): unsure at all n locations; Clone ID: 701059015H1
gnctgtancaggacccagatananacancagtctcaganntggctantagtgaagcacacncagtgcattgtgantcnaccctttatgtgtggntnnataaattgnttgaataangaaatcttcaatgancggccattttctccggananncctcagactcaagatcgctgctttcntcttcatcgcagncntcntcttctacttnggcaagnactngtccgatggctagnagcagctcgtcttcttcacccagcgatccga

SEQ ID NO: 27607 - DNA, 259 bp, Glycine max
  unsure (1)..(259): unsure at all n locations; Clone ID: 701059016H1
tgctgtgctgaagattggtcccaacgagccatctgagctggctatccatgagaatgcctatggcttggccagatacncnctcatatgccaggagaatggcctggttcccattgttgagcctgagatccttgttgatggatctcatgacattcacaagtgtgctgccgtcaccgagcgtgtccttgcagcatgctacaaggctttgaatgatcaccacgtccttcttgagggtaccctattgaagccaaaatggtcaccc

SEQ ID NO: 27608 - DNA, 260 bp, Glycine max
  unsure (1)..(260): unsure at all n locations; Clone ID: 701059018H1
gaacaattccggtccgaagagaaaaaaggatgacatattaagaacaagctctgttcanccattttggaaagaagaagcaaagtagcttccctcagccaaaacctgcaaaacctctacctgacatcatcagtcagagtggccaccagcatgccatagtgtatgtggagggagataagtattatggagccaaggcaaccataaacgtttgggacccaaaaattcaacaacccaatgaatttagcctttctcaatgtggattt

SEQ ID NO: 27609 - DNA, 259 bp, Glycine max
  Clone ID: 701059019H1
ggcggattagagaagcagattcaagaattagttgaagccattgttttgcccatgacccacaaggagcggttccaaaagttaggagttcgtcctcccaagggagtgctgttgtatggacctccagggactgggaaaacattgatggctcgtgcctgtgcagcacagacaaatgccacttttctgaaattggctggcccctcaactggtccagatgttcattggagatggagcaaaacttgttcgtgacgccttcaactag

SEQ ID NO: 27610 - DNA, 258 bp, Glycine max
  unsure (1)..(258): unsure at all n locations; Clone ID: 701059020H1
tgcctaaccattaaaacacacactctctctcaccaaattcttattagaacgaaaaaagaaaagaaaaganaaaagagcgatttttccctcaccaaagaagaaccaaaacaatggcggatcaactcaccgatgaacagatctccgagttcaaggaagccttcagcttgttcgataaggacggcgatggttgcatcacaaccaaggagcttggaactgttatgcgttcattggggcaaaacccaactgaggagaactcca

SEQ ID NO: 27611 - DNA, 257 bp, Glycine max
  unsure (1)..(257): unsure at all n locations; Clone ID: 701059021H1
ctgatggagtgttcttcgctgaactgaacgaggttctgacaagggagttagccgaggacggatactccggcgtggaagttanggttacgccgatgcgcaccgaaatcatcatcagagccaccagaacccaagccgttctcggtgagaagggaaggagaatcagggaacttacctcggtggttcagaagaggttcaagtttcccgagaacagtgttgaactttatgctgaaaaggtcaacaataggggctttgcgcta

SEQ ID NO: 27612 - DNA, 258 bp, Glycine max
  unsure (1)..(258): unsure at all n locations; Clone ID: 701059022H1
ctttcatttctacatccctggctctgctccgtcgatgacgatggcntttagggtgcgaaaccctgacctccgctttctcattcttctctctctcttgtccatcacttccgccaaggtcttcttccaggagcgtttcgatgacggatggggaaatcgttgggttaaatcagattggaaaaaagatgagaacctggctggggagtggaaccacacctctggccaatggaatggagacgctaacgacaaaggtattcaaac

SEQ ID NO: 27613 - DNA, 259 bp, Glycine max
  unsure (1)..(259): unsure at all n locations; Clone ID: 701059024H1
ctttctcctctgtntctctctctctgctgtgcattcnggtggcatcacagagagagacacagttgagtnagccaccaccttctccaattcatctactttctctccaattcttcaaaagggttgtctccaattcttcnaaagggtgaaactttgaaggagtaaagatggttggtgctataaaagcagcgattggagacgcagtgttgactttcatgtgggtgttctgttcctctgtgttgggaattgcttcgggtacata

SEQ ID NO: 27614 - DNA, 260 bp, Glycine max
  unsure (1)..(260): unsure at all n locations; Clone ID: 701059025H1
caactcatcacttactggaagccttgttgtgagtaagagaaaaggcttcctgcaccgagcacaccaacttgatacctctgattctttctttgcttagaattccacanaatatncagnancgtctttncaatcactccccacctttggaattcaagggtttgancaaggaggaggaagactcattgctagggcaagtggaaatatggaggtacatgacatgcttcacggactccgtggccttgaaagctgtcatagagctt

SEQ ID NO: 27615 - DNA, 263 bp, Glycine max
  unsure (1)..(263): unsure at all n locations; Clone ID: 701059026H1
accgttccncttctttttctctctcctagaatcnngnctntacnctgctcctctntcncatgctctcggaantttgngtcagagctnctaaagcctttagaattgncgggaacntttttggtcgnccgccgaggatcgcaatnnctccaaatcgtcgtcactngtcgcntagtncggttctaactgcatgaactggttcgggaagctggattcatcatcgtcgaacttgaanttcaatcacttcgttacttgtctgttgattt

SEQ ID NO: 27616 - DNA, 78 bp, Glycine max
  Clone ID: 701059028H1
gaaaactgcaagtgaaagctggagcttttgcttcaatcacatttgactatttcactgattagaacaggcaaagatgtc

SEQ ID NO: 27617 - DNA, 262 bp, Glycine max
  unsure (1)..(262): unsure at all n locations; Clone ID: 701059030H1
gtgaactgaaagggtgggtggtgtgattgagtatgagcatgaattctctcctagcaagcacgcgtgntctnctnctncattatancaacagtctngcanctggggactcagagcaaggccattnncntttcatctcctccaattccaagtcgtctgcctttcnattgggntgcntattgttcctctggcccttcanccaatgaatcaganccanaccattcttctagacgaaacctttcattctcaagtcanacccccaaaa

SEQ ID NO: 27618 - DNA, 261 bp, Glycine max
  unsure (1)..(261): unsure at all n locations; Clone ID: 701059032H1
agctattggagcagttgcctgctttgcagcagctgctgtatcgacttgttggttgtcggccagaaggagcagctgttagcaattatgtgntacnatatgctcttgccctggtactgaagganagctttaagatttattgtgctattaatgatggcattatcaatcttgttgataagttttttgagatgcccggacatgaagctattaaagcccttgatgcctataaacgtgcgggtcagcaggcagcaagtctatctgatt

SEQ ID NO: 27619 - DNA, 263 bp, Glycine max
  unsure (1)..(263): unsure at all n locations; Clone ID: 701059033H1
gtgagcacagttcagttgcacacaccttctctgtncttcttcttcttcgatgttcaattanaataacnnnaantcgtgtcatgtaaanaccccactccaattncgccctttcanagtcanaacacncatgcattgtccactntcacatagccgcgatcacaggatacgacaccgtttcggnctagggtttannctccaccactatngccatcannngcgncaatntcnnatggttcgatggccttttcttgtnctgctcgcca

SEQ ID NO: 27620 - DNA, 234 bp, Glycine max
  Clone ID: 701059034H1
gtgttcttcgtcgcaaattcaaaggaggatctctcttgcggtttctctaggttttcgctatggcgtcgaagcgaattttgaaggagcttaaggatttgcagaaggatcctccaacatcttgcagtgccggtcctgttgttgctgaagatatgttccattggcaagctacaattatgggtcctccagacagtccctatgcaggaggtgttttcctagtgaccattcatttccctc

SEQ ID NO: 27621 - DNA, 255 bp, Glycine max
  unsure (1)..(255): unsure at all n locations; Clone ID: 701059035H1
attacatcttgcttgcactcttcaccgtgtcgatcagttccaccatcggagtcacntcgtggccaacaccgncgggaaaattgtgcttgaggctttgattttnacctccgctgtggtttcatctcttactggctatgccttttgggcgtccaagangggcaaggattttagcttccttggcccaatattgttcacctccctcatnactctcatcctcactggcatgatgcagatgttcttccctctggacctact

SEQ ID NO: 27622 - DNA, 254 bp, Glycine max
  Clone ID: 701059037H1
ctgaacccattcctgaagctaacgatgaacctgttaaagtggtagttgggaacagtcttgaggacattgttttcaaatctgggaagaatgttctgctggagttttatgctccctggtgtggtcattgcaaacagttggctccaatattggacgaagttgctatctcatatcaaagtgatgctgatgttgttattgcaaaactggatgcaactgccaacgatatcccaagtgaaacctttgatgtcaaggttatc

SEQ ID NO: 27623 - DNA, 259 bp, Glycine max
  unsure (1)..(259): unsure at all n locations; Clone ID: 701059039H1
cttcttcaaatttntttctggtgnttctacaacctgtcctaactccncaaccctcttcctcttaatnaatctattnccgcnttatcctcctctgaacctcaaacaccaaaanaaagcattacaattctcaatttcacataaacaccagaantgataaaaacacataacaaaaaaaaanagttagtttttccngtntcttttaaaatnncctcgttcannttttatcattnccttcaaatttttnanttcaaaaatangg

SEQ ID NO: 27624 - DNA, 257 bp, Glycine max
  unsure (1)..(257): unsure at all n locations; Clone ID: 701059040H1
ttttcgtttctatcatacccacttcgccttctccgtttctcactagactcacatcgcgcnttccattttcgctgcattccctctgcnttctccaangaggaaactcatgtcgcacactcttgcacgtnccactcttggtctcacacacccttctaatatcgnnacccccaagatctcttttggtgctaaggatgttgatgtgacggaatggaaaggggacattctggcagtgggtgttacggaaaaagtttggctag

SEQ ID NO: 27625 - DNA, 263 bp, Glycine max
  unsure (1)..(263): unsure at all n locations; Clone ID: 701059041H1
canancttctgcttttgtgatgnaactanngagctgacgaggcctaaacctctgtgctgctgctctccaccctttttggngcagatcttgancttgagctcgcattttcatannnaaccagcaccaagaaatgnaacataccatgtnacctgccattggatctgtnttccctcgtggtgtctttgccgcactcttgctcatgttactgttttctttctccacatncacntcnatagaagcctatgatccacttgatcctaccg

SEQ ID NO: 27626 - DNA, 75 bp, Glycine max
  unsure (1)..(75): unsure at all n locations; Clone ID: 701059043H1
gncatctanaatgngactaagntgagaggnggatttntgancccagtttacggtctatgctttnnagcagaaggt

SEQ ID NO: 27627 - DNA, 257 bp, Glycine max
  unsure (1)..(257): unsure at all n locations; Clone ID: 701059047H1
ataactagaaacagtgtgatgaaaatgaaggtccttgtnttcttcgttgctacaattttngtagcatggcaatgccatgcgtacgatatgttccctctccgaatgaacactggctatggtgcccgtactccggaggtgaaatgcgcaagtnggaggcttgctgtggaagcacacaacatctttggctttgagaccattcctgaagagtgcgttgaagcaacaaaggaatacatccatggcgaacaatatagatcaga

SEQ ID NO: 27628 - DNA, 260 bp, Glycine max
  unsure (1)..(260): unsure at all n locations; Clone ID: 701059049H1
agaaacagtgtgatganaatgaaggnccttgttttcttcgttgctacaattttngtagcatgcgcaatgccatgcgtacgatatgttccctctccgaatgaacactggctatggtgcccgtactccggaggtgaaatgcgncagttggaggcttgctgtggaaccacacaacatctttggctttgagaccattcctgaagagtgcgttgaagcaacaaaggaatacatccatggcgaacaatatagatcagactccaaaa

SEQ ID NO: 27629 - DNA, 257 bp, Glycine max
  unsure (1)..(257): unsure at all n locations; Clone ID: 701059050H1
gctagggtccccaagaaggtcttgcagttcgctggaatcgatgacgtcttcacttcctccaggggttccaccaaaaccctcggaaatttcgtcaaggctacttttgactgtttgcngaaaacctacggttttctaacacctgaattctggaaggagactcggttctccaaatcaccattccaagagtacactgatctattggcaaagccaacagggaaggcccttatcctcgaggaggaaagggtggagcttgagtt

SEQ ID NO: 27630 - DNA, 262 bp, Glycine max
  unsure (1)..(262): unsure at all n locations; Clone ID: 701059052H1
gttcatnattncttccancaaattatancngttcttagagaanaaatggcangngaggtggtngtagnaagnaagtaggctntnaantctganagtgnactaacaatagccatgtgtcagtcanaggggaaaattgnnagaaaagagtaccaattggtcacttttgancttccctacttggcctttnacnacanccngaagcnctgttttacaagggtgangatttcgagggcatggtccannaactcnaagtggacttggt

SEQ ID NO: 27631 - DNA, 254 bp, Glycine max
  Clone ID: 701059053H1
ccgtgaactcgaagtgatccactccaggtgggccatgctcggagccttgggctgcgtcttcccggagttgctgtcccgcaacggggtgaagttcggagaagccgtgtggttcaaggccgggtcccagatcttcagcgagggtgggctcgactacttgggcaacccaagcctgatccacgcccagagcatcctcgccatctgggccacacaagttatcctaatgggtgccgttgaaggttaccgtatgctggtgg

SEQ ID NO: 27632 - DNA, 255 bp, Glycine max
  unsure (1)..(255): unsure at all n locations; Clone ID: 701059054H1
ggagtatccgaattcttacgtgttcgagatcgacatgccgggtttgaaatctggggacataaaggttcaagttgaagacganaacctgcttctgatatgtggggaacgaaagagggacgaagagaaagaaggggcgaagtatttgagaatggagagaagggttgggaagttaatgcgcaagtttgtgctgcctgagaatgccaacactgatgcaatctctgctgtgtgccaagatggtgtgcttaggtaaccgtg

SEQ ID NO: 27633 - DNA, 60 bp, Glycine max
  unsure (1)..(60): unsure at all n locations; Clone ID: 701059055H1
gtattttcagaggaanaatgnatgggtagggtttcgaagtgtttgtncttngngtntgna

SEQ ID NO: 27634 - DNA, 256 bp, Glycine max
  unsure (1)..(256): unsure at all n locations; Clone ID: 701059056H1
accctactcattctccatacctcaacgaagangttaaaganacggcaacactttgctgtccgccttgaccgagcagagcttcgtcttgggccctcgattttgnccctaaagtactctcagtcacaacagacacnnnnnnnnnnnnnnnnnnnnnnaatggcaccgaagcagaccaaggctgagaagaagatcgcttacgatgcgaantgtgcgacctaatggaggagtacggccagatcctcgttgtgatccgata

SEQ ID NO: 27635 - DNA, 256 bp, Glycine max
  unsure (1)..(256): unsure at all n locations; Clone ID: 701059057H1
ggacacacagttcacanaataataacatcttcattcgtttacccacttttctntacgaccttattccttcgattctgtcttagaatgacgaattcactatctccctgaaaccatgnctgtgagggacagtcatcatcattgagccttacccagaactaaaaaagcaatctttatcacatatcacaattcacaaagcttctgtggtngatgggtagaaggggaatccaactgtttgatgagaaaagagtgttttttt

SEQ ID NO: 27636 - DNA, 257 bp, Glycine max
  unsure (1)..(257): unsure at all n locations; Clone ID: 701059058H1
cttcctcaccgattgctagantggaatttcgatgctcagtcatctncttttaccattctcttctctcttgctcttgcaggagagagccatgtccatgcatcgctacctgaggaagattattgggaagctgtttggccaaacactcccattcccactgcactgcgagagcttctaaagcctctccctgcaggtgttgaaatcgatgaactccctaagcaaattgatgatacacagtacccaaaaacattcttctataa

SEQ ID NO: 27637 - DNA, 256 bp, Glycine max
  unsure (1)..(256): unsure at all n locations; Clone ID: 701059059H1
ggattggactctgttgaggcctcgcgncacaatggactatgaaattgacttttccttctcagaaactaatagaagatcctccatggatgattctcacgccaaggtgaatgacaaccttcctgttagtcctgtgaaaaccaatgtgagaaaaagccaagtttctggaacaagaagttctggaaaagatgaaaagtcaaaagtgttgcgtgattactctgggaagagcaagcctgaaatcatgtcgagggccagaaag

SEQ ID NO: 27638 - DNA, 258 bp, Glycine max
  unsure (1)..(258): unsure at all n locations; Clone ID: 701059062H1
ggattggactctgttgaggcctcgcggacaatggactatgaaattgacttttccttctcagaaactaatagaagatcctccatggatgatttnccacgccaaggtgaatgacaaccttcctgttagtcctgtgaaaaccaatgtgagaaaaagccaagtttctggaacaagaagttctggaaaagatgaaaagtcaaaagtgttgcgtgattactctgggaagagcaagcctgaaatcatgtcgagggcagaaagcca

SEQ ID NO: 27639 - DNA, 260 bp, Glycine max
  unsure (1)..(260): unsure at all n locations; Clone ID: 701059064H1
cttccttgagcatccagcagcaacaaacaagaggggtttgccttgngccgtttgtnttgttttcgggacgaagaanaagatggtgtcaggttctggaatctgcgcaaagcgggtggtggtggacgcgcgccaccacatgctgggtcgtctagcctccatcgtggcgaaggagcttctgaacggccagaaagtggtggtcgttcgctgtgaagagatttgcatctcgggcgggctggtgaggcagaagatgaatacttgag

SEQ ID NO: 27640 - DNA, 142 bp, Glycine max
  unsure (1)..(142): unsure at all n locations; Clone ID: 701059065H1
gtgacgcagcatatanccagatannatatgattaacaaggcagatgtaaggaagtttaancttanattanggtatnacttgtcgttgtatcagaatttttcttgagcagaattgaaggattactagtctattagtgattntg

SEQ ID NO: 27641 - DNA, 254 bp, Glycine max
  Clone ID: 701059066H1
acttctgctacttcctactccaaccgcacttctgctccgcaattatcatgggcaaggtcaagatcggaatcaacggatttggaagaattggccgtttggtagccagagtggctctgcagagagacgatgttgaactcgttgccgttaacgaccctttcatcaccaccgattacatgacatacatgtttaaatacgacagtgttcatggacactggaagcatcacgatgtcaccgttaaggacgagagacccttc

SEQ ID NO: 27642 - DNA, 253 bp, Glycine max
  unsure (1)..(253): unsure at all n locations; Clone ID: 701059067H1
aggctggcttccacacatgggagcagttaattctcaaggatccacatcttatcactccaaatgcactttcatacaaatcagcaatgagagagaatctgttgaggcagggatacagaattgttggaatcattggagaccaatggagcgatctgcttggagaccacagaggcgaaagcaggacctttaagnctcctaatcccatgtactacattgagtagtaccttcacctctctcaacaatctantagagtttg

SEQ ID NO: 27643 - DNA, 252 bp, Glycine max
  unsure (1)..(252): unsure at all n locations; Clone ID: 701059068H1
acngatctcagttcttcattngcacggagaagacagagtngtcgacgganagcatgtcgtagttcggacaggtcancnaatgattgaacgttgtcaaggancatcgagaaggtcggatccagctccggcaggacctccaagcccgttgtcatcgccaactgcggtcaactctcttagncgacgtnganccgcngctttaatctctgaatctgtgttatttctttcggtgtcgtttttgcctttntttctctt

SEQ ID NO: 27644 - DNA, 252 bp, Glycine max
  unsure (1)..(252): unsure at all n locations; Clone ID: 701059069H1
tcatgataacacnattttcaaaaccacacattccaccagcatntctccnagnncgngaacggatttgtnatggatngtggagtttctgaatggcatcgtgaagcccgtngctgccaccgccgtcgtgcttctggccgtgctcttgtcctttatgcagaaactgggactcgagggtgacatggtgtatgccatgttcagagcatttcttcagctttctattattgggtttgtnttgcagttcatttcaaccaa

SEQ ID NO: 27645 - DNA, 252 bp, Glycine max
  unsure (1)..(252): unsure at all n locations; Clone ID: 701059070H1
ttatcttctagtatttttcaagtaacttncggtttcaaacctaggaagttggaagtcatggcagcaacattgntgngcagcaacaagttctggcactcttaaagcaactcctttcctaggccaaggcaagggtgccaatgccaatgctcttagggatgttgtttccatgggaactgggaagtacaccatgggcaatgatttgtggtatggaccagacagagtgaaatacttgggacccttttcgctcagacc

SEQ ID NO: 27646 - DNA, 254 bp, Glycine max
  Clone ID: 701059071H1
gctctcccaacaagagagcgaacgagcccattcctgtttctccaccaccgaacacacacacgccctttgcttccttcctcacctcgcgctaacctgcaccccccttcttatcctgcgcaccccttctttatccaattctttcctcagattcggagcaccgcgcgcgccaccattgggaaaagaggttccggtgctgggggcctagggttagggtttctgagagatgtgggatgctccatgcattgagagcctta

SEQ ID NO: 27647 - DNA, 252 bp, Glycine max
  Clone ID: 701059072H1
tttggttattctctatttgtgtgctcagtatggtgggaatcttttcgttgattacagggagaccgggatgtagtggattcggatcttcctcaactgctgaacaggttatcgaaggaattgatgccagcaacctcactgcaatcatcacaggaggagccagtggcatagggttggagacagcacgtgttctggcaattcgaaaggcccatgtcataattgctgccagaaacatggagtctgcaaggaagcgaa

SEQ ID NO: 27648 - DNA, 253 bp, Glycine max
  unsure (1)..(253): unsure at all n locations; Clone ID: 701059073H1
tttcggccagtggacagatgctagcagaaaaacatataatctagtggatgccctgactagacacactggcacaggtgtatccaaaatcctggactactatattggtgtctttgcataaccaaggcatgtggaacttgaggtctgcaatatgggaaaggcaatatcttnggccccagttctatcttagagtgtggaatgcacagaaaagccttgctaatgaatatgacattcccaataatgttctgtttgtggc

SEQ ID NO: 27649 - DNA, 253 bp, Glycine max
  Clone ID: 701059074H1
ttttggctttggctttccaatcctcctgatttcctcttctacgattctaaaatatcgcgaatggcatccaagagaatactgaaggagctcaaggacttacagagagatccaccaacttcatgcagtgcaggccctgtgggcgaggacatgttccattggcaagcaaccatcattggtccaaatgacagtccctatgctggtggtgttttccttgtgaccatccatttccctcccgattatcccttcaaacctc

SEQ ID NO: 27650 - DNA, 255 bp, Glycine max
  unsure (1)..(255): unsure at all n locations; Clone ID: 701059075H1
cgctgttattactagaattgcattnccacaggcttaagggcagctatgaagatgtaccanaaacaaaaagtggttaaattagagccttagacatgaagtagagacagtgtgattttgtttgcatagattgtncttgtgagattttatagttatatatttcgcgagtcctttatttgtttaggtttgcttagtctgagccaaaataatttggtggataaaaatgcgcttctaattcatgttatttgcattttttca

SEQ ID NO: 27651 - DNA, 256 bp, Glycine max
  unsure (1)..(256): unsure at all n locations; Clone ID: 701059076H1
aaattgatacatagctgagagcatcaaggaatcgaagantagaagattcatttnnnattnncntttngatanggaagctgatgtttcgattatgtnngtnggcgttttcananccctannttggagaaatcccaatttactccttcngtctttctgcttnggatgtttttcaaccaaaaaattgtgcttttcaaatcttttgctctgatgggtacttcaaatcttctntngtntttctctctgatgngcctgtgtg

SEQ ID NO: 27652 - DNA, 233 bp, Glycine max
  unsure (1)..(233): unsure at all n locations; Clone ID: 701059079H1
aatactcacacataaaggaataganaaaaaaacttctntttcctttcaacgatcttcttcntcgaaatcagaaagagggcactttctcttgctttttttttcatcatntcagtttgaaagattctctaaggccanagaactcatcatcaggaatgaggccaccaccaactctcaacattttcccatctcaacctatgcacgcagtgacaccatccaattccangttaacatgg

SEQ ID NO: 27653 - DNA, 260 bp, Glycine max
  unsure (1)..(260): unsure at all n locations; Clone ID: 701059081H1
gtccagcttctctcanaagcgccanaagaacactagcttctctcctggctcagaaacatcttccatgactgtgctgttcagagttgtgatggcttcactgttgctggactccacaagaaggagcttgtctgagaaggnaacagatagaagctttgggttgagaaatttcaggtacattgagaccatcaaagaagctttggaaagggaatgcccaggagttgtttcctgtgctgatatcctcgttctctctgcagagatgg

SEQ ID NO: 27654 - DNA, 254 bp, Glycine max
  Clone ID: 701059082H1
cgaggaataaaggcagctctattttgagccaagtgaaacatctatcttcctgtctaagttctttgaataaaagtctgaatgtgtcatctctatgctacaatgtttatgattcagatcaggttgattctatttgtttgatggccatcttgcacgtcctgatcttattgtgttcaagtgacggacaaatccaaacaggaaagagagatttgaaatgtaaatgccaagtaaatgtgaaaagtacagtccatttttag

SEQ ID NO: 27655 - DNA, 253 bp, Glycine max
  unsure (1)..(253): unsure at all n locations; Clone ID: 701059083H1
aatcttctganagngtttngttnnaagnagtnaagatgtttcntngcgggcaaaagggtcatnagtnaaaggggnntatggtggttatgcagnagnatgtgttggatatcaacngcatcaccagtgttggagggancgttgagcagggnttaggcttcataggcagtgcagtcgntgcacttactttcatgcanntagnaaaatctncatccagttgattagtgctannaaggctgatggtgngaaggannna

SEQ ID NO: 27656 - DNA, 208 bp, Glycine max
  Clone ID: 701059084H1
cggctgtgggggatgatattgagccttactatgtgaggtttcaaaaagtctccatctttggtcaagacaagaaacaaccttttagcattttgtaggttggtttgtgcctgtaataggtagatgcgggtcatgactcggaataatgagctactagaatgcaatgcaactgtttccttggtgtgcctgtgtgaaagaatcgaataacaag

SEQ ID NO: 27657 - DNA, 254 bp, Glycine max
  unsure (1)..(254): unsure at all n locations; Clone ID: 701059085H1
ggtgaggctgctgctgaagaaactaagangagtaaccatgtgcagagaaaacttgagaaacgccaganagattctaatcttgagntcccacattgaanagcaatttggtggtgggcgattgtncagcctgtatttctnctcgtgcgcgganaatgtggcagggctgatgggtacattcttgaaggtaaggagctggagttttacatgaagaaactccagaggaanaagggaaagggtgctgcttaatttagtgt

SEQ ID NO: 27658 - DNA, 254 bp, Glycine max
  unsure (1)..(254): unsure at all n locations; Clone ID: 701059086H1
catttcagcagantgattcncnttcactacaatgccatcatcactatcctcttttcctccatatggttcctattctgctcccttcttgtactctcatgtgtgatttgttctagtagtgctcagggaccaccttcacctggctactaccccagttccaaaattagtcctgttagtttttatcaagggtttagaaacctatggggacctcagcatcagaggctagaccaaggctcattgacaatctggttgactct

SEQ ID NO: 27659 - DNA, 253 bp, Glycine max
  unsure (1)..(253): unsure at all n locations; Clone ID: 701059087H1
ggagagagctcgtaagangaaagaagaggaagagaagagaatggagagggaaagagaaaaggagagaattcgcattggcaaggagttgctggaagcaaagaggattgaagctgacaatgagaggnaacggttgttggccttgngaaaagcagagaaagaggaagagaaaagtgctagggagaaaatcaagcaaaagttggaagaagacaaggcggaaagaaggcggagacttggattgcctccaaggaaccct

SEQ ID NO: 27660 - DNA, 257 bp, Glycine max
  unsure (1)..(257): unsure at all n locations; Clone ID: 701059088H1
ccactccaaacccaccacancancattattcncgatctcattctctaanctttcantctgcctntagncatcnctcnacgttgnncatcatcgtagatgaaccaacacntctagtctctcttactttataaccatgtaaaaatgagtcacctaatgaaaaattagtagcttcttgttgtgcttttnattttgtttgtgttgagataaatttgtttgtgtgtttggtattgttttgtgtttnatgaattattgatggg

SEQ ID NO: 27661 - DNA, 263 bp, Glycine max
  unsure (1)..(263): unsure at all n locations; Clone ID: 701059089H1
tagtanacagtgtngnntnaatgacangtccangtttttttcgttgccacaagtttggnagcatggcgntgcnatgcgtatgagatgttganntgctccgaattgaactactgagctatggngcccgtacncacggaggtgaaattgcgcaagttggangcttgtgtggaagcacncaacatctttggcgttgagaccattcctcgaagagtgcgtcggaagcaacaaaggaatacatccatggcgaacaatangatcnnnct

SEQ ID NO: 27662 - DNA, 253 bp, Glycine max
  unsure (1)..(253): unsure at all n locations; Clone ID: 701059090H1
cgcacaagggtatctccatcttgtggacttggatctagctgagatggatattaagaaagcccttgagattganccagacaacagggatgnnaagatggagtacaaaattttgaagcagaaagtgagnnaataccacaagaaggacgcacaattttacagcagcatatttgcaaaaatgcataaactagagcaagcaagaacagcaacagcaaagcaggagcctgtgccaatgactattgacagcganttaaat

SEQ ID NO: 27663 - DNA, 253 bp, Glycine max
  unsure (1)..(253): unsure at all n locations; Clone ID: 701059091H1
gaaanngcgtcttcataaacgcngcccaaaacctcctcatacccttttattcattccattcgtttctagggtcttcttttctntgccgagaaaatgagagagtgcatttcgatccacattggccaggccggtatccaggttggaaacgcctgctgggaactctattgccttgaacacggcattcagcccgatggacagatgccgagtgacaagaccgttggcggaggagacgacgccttcaacacatttttca

SEQ ID NO: 27664 - DNA, 255 bp, Glycine max
  unsure (1)..(255): unsure at all n locations; Clone ID: 701059093H1
gcggcaaagaagatgccgccaacaactttgcccgtggccatnataccattgggaaagagattgttgatctgtgcttggancgcatcagaaagcttgctgacaattgcactggactccaagggtttttggtcttcaatgccgttngtggaggaactggttctggacttggttcccttctcttggagcgtctctccgttgattatggcaagaaatcaaagcttggtttcacagtctacccctctcctcaggtgtcca

SEQ ID NO: 27665 - DNA, 253 bp, Glycine max
  unsure (1)..(253): unsure at all n locations; Clone ID: 701059094H1
atccatcattgactatcaagtnttatgagagaactcctgagcagcaatcatcattgggataccttgttggttccactcacattgnannccgncatnatcaagcaccagaaaggggagaagtgactgctgancaagtnaggaganaacctcatgggtcaataggggcaacagctggtcatcgagccattgcacagagtaacagttcngaaattgctgaagccttatttcgatatactgcnccagaaaggtgatg

SEQ ID NO: 27666 - DNA, 256 bp, Glycine max
  unsure (1)..(256): unsure at all n locations; Clone ID: 701059095H1
aanagtgtgaactgcaaanggcttctccagcctagtttgttctcagatcttcttcttccatggaccagtacgnnangagtgnagaagatangcgagggaacatacggcgtcgtttacaaggctcgcgancgcgccaccaatgagacaatcgctctgaagaagattcgcctcgagcaggaggacgaaggcgttcccagcaccgccattcgcgagatttctcttctcaaagagatgcagcataggaacatgttaggtt

SEQ ID NO: 27667 - DNA, 260 bp, Glycine max
  unsure (1)..(260): unsure at all n locations; Clone ID: 701059096H1
tcntcctctaaancctaaacaactctttctcntcttccttcggctcgttgttctcnctcgcgtagatcgncaatngcngatgncagagacgtttgctttccangctgagatcanncanntcctcagtctcatcatcaanacnttctantccaacaaggagattttccttcgtgaactcatcagcaacgcctccgatgctttggacaagattcgatttgagagtttgacagataagagcnagctcgatgcnagccagagnt

SEQ ID NO: 27668 - DNA, 295 bp, Glycine max
  Clone ID: 701059101H1
gctcaatatcatctccattctctctctcttactcactcaatcccacgccaaaatacccggcgtctattccggtgggccatggcaaagcgctcacgccactttctacggtggcagcgacgcctcaggaactatgggaggagcgtgtgggtacgggaacctatattcccaaggctacggtgtgaacactgcggcactaagcactgctttgttcaacaacggtttcagctgtggagcgtgtttcgaaatcaaatgcacggatgacccgaaatggtgcaaccccggtaacccttccatc

SEQ ID NO: 27669 - DNA, 292 bp, Glycine max
  Clone ID: 701059102H1
aaaaagaagaagcgccaatggccaagggtcgcaaattccccaccacgacccgaaccgaccgcttcttgggaatgggaacctactcctcccaagcctccgccgccacagacctgtcggagttccgggaagaggacgtgtggtccacgtcggaagaccgtgacagagatgtgaatgcctaccccggcgagtgggaggcactcgcgccgccgcgtcgtcggagcagcagggagctgcaggggcaccgccacgtggggggtttgtcccttgcgttcgaggatgggtccggtggtgt

SEQ ID NO: 27670 - DNA, 291 bp, Glycine max
  unsure (1)..(291): unsure at all n locations; Clone ID: 701059103H1
tttactgcttgaggctgtcaagtaccccagtgccaccttatagtaatatgtggaattcttgtatatacactagttttgatgtgttctcctcttggagtagtgctgattggagctgcattaatcgattttnttgtngctgatttcaattggtctgcggcagtatagaagaaatcaacgatgcattggtgtttacctggcttgatggggtgactgaatatgcctttagaagttttaggattatttctaaatgtgttcctacatgcaggtccctaaagcttacttcctgcttct

SEQ ID NO: 27671 - DNA, 294 bp, Glycine max
  unsure (1)..(294): unsure at all n locations; Clone ID: 701059105H1
caagagcaggctgctcgtgcattggctaacttagctggcccatggagatagtaacagtaacaatgccgctgttggacaagaagcaggtgctcttgaggctctcgttcaacttactcgctctccccatgagggtgtcaggcaagaggctgctggtgcactttngaatttgtcatttgacgatagaaatcgagaggccattgctgcagctggagnnnttcaggccttggttgctcttgcccaagcttgtgctaatgcctcccctggacttcaagagagggctgctggtgctctgtt

SEQ ID NO: 27672 - DNA, 292 bp, Glycine max
  unsure (1)..(292): unsure at all n locations; Clone ID: 701059106H1
cccaattgcaacatactaagngggttggctggtttagatctgagcaacancttttaattttctacttgcttgantttnattggaagccatggattgttcatcatggattaacacttccttggatctcaacattaatccccgcagagttcatgaagaagttcccaaggaggtagaaagcgagcttttctcttgggaatgaccaagtttaacgtggaagaagagtctatagtgacttggaggaggaactgaagcgggtgactgcagaaaacaagaagtggccgaaatgctctca

SEQ ID NO: 27673 - DNA, 294 bp, Glycine max
  unsure (1)..(294): unsure at all n locations; Clone ID: 701059107H1
cgttgatcgagataactagaaacagtgtgatgaaaatgaaggtccttgttttcttcgttgctacaatnttngtagcatggcaatgccatgcgtacgatatgttccctctccgaatgaacactggctatggtgcccgtactccggaggtgaaatgcgcaagttggaggcttgctgtggaagcacacaacatctctggctttgagaccattcctgaagagtgcgttgaagcaacaaaggaatacatccatggcgaacaatatagatcagactcccaaacagttaaccaacaagctt

SEQ ID NO: 27674 - DNA, 296 bp, Glycine max
  unsure (1)..(296): unsure at all n locations; Clone ID: 701059108H1
cttntgagagtgtgtgnnngaannngcaaagatgtttcctttcgggcaaaagggtcaaaagataaaggggactatggtggttatgcagaagantgngttgganatcnacagcancngcagtgttggagggatngntgaccagggnttatgcttcataggcngtgcagtcgatgcacttactnttgcagccancaaaatcncnagccagttgatttagtgctaccaaggcttancgtgggaaagganaattgggaaatagtacaaaatntaagaggaaagnttaanattancaacct

SEQ ID NO: 27675 - DNA, 295 bp, Glycine max
  unsure (1)..(295): unsure at all n locations; Clone ID: 701059110H1
cggacgagaaggtggaacaataatacnccagananagtacttgatttctagggtttgaagcacttccccaagtcgtggctggaaaacaagggaaganaaatgagcgaaagcacagagacccagaagcgccaagctgctgattcagagagcaaggagaatgctgttgcttccanganaccanaggtcnaatcttgtggaacgggtaccgatggtaatgccgtaaagaaacccatctgtcctcattgnagctgatgccagctggaagataagggcgccaggcacaccatggaggatg

SEQ ID NO: 27676 - DNA, 286 bp, Glycine max
  unsure (1)..(286): unsure at all n locations; Clone ID: 701059112H1
ctggtgtnanatctgtacccgcctagccattgatttggaaaagtccaagcttcaaagatgagnaagcttcanagtnatgctcttagagaagctatctcangnatcatgactgantccaaggaaaagaacaggaaatttgtggagaccattgaactccanattgggctgaaaaactatgatccccaganggacnagcgttgtagtggctctgttaagttggctcacattcctcgccccaagatgaaagatttgtatgcttggagatgcccaacacgtgaagaggtgg

SEQ ID NO: 27677 - DNA, 288 bp, Glycine max
  Clone ID: 701059113H1
gcctctagttctctcactttaactattttcataaaccaaagattaaaagggtcactcctttctttttttacatagttacataacatgtcttcctcagagggtgcctttgaattgggaagtgagttctcagaagccaacaatgttcttctcatgtctctaatggaagaaacacaagaagaagagtactatggcgatgagagacttgtgagcatgattcagtcattggaggcagagatcactgacactgaaataggtcaaatgtatgagatgggacacgtgggatggtca

SEQ ID NO: 27678 - DNA, 291 bp, Glycine max
  unsure (1)..(291): unsure at all n locations; Clone ID: 701059114H1
caaccaaagacagcacatgggagtagaagctgtgtnctgagttgcaaagccatcatcaatccaatcttgtgttactataagtatttaacagcatagacacacaccctttggttctggccaccctcaggtgtgaatacaataccttagcatganattcaactttgtgggactacatgttgaagcttgattggtgaacgagatctgatctcttgatccacaaaaccatggctgaaaaggtgaccatcatgaaactcaaggttgaccttgagtgtgagacatgctacaagaagg

SEQ ID NO: 27679 - DNA, 295 bp, Glycine max
  unsure (1)..(295): unsure at all n locations; Clone ID: 701059115H1
gngagagagagggatttggaactttggatatctatagcgaaagcgtgacaccaccaaaaaccgaactgttcccagatctctctctcactcttccaacaatcgaaatccaaaaccctaccgacaccacactcaatcgaaattcttcattctcttctcatcgatggggcagaagtctctgatctacgcgttcgtgtcgcggggaacagngattctcgcggagtacaccgaattcagcgggaaacttcaatcnatcgccttccagtgccttcagaagctccctgccaccaacaacang

SEQ ID NO: 27680 - DNA, 294 bp, Glycine max
  unsure (1)..(294): unsure at all n locations; Clone ID: 701059116H1
cccgaagcagccatggggatcgatctcaaggccggaggtaagagcaaaaagaccaaaagaacagcacccaagtccaatgatatctatctcaagctcttggtcaagctttatcgcttccttgttcggagaactggcagcaacttcaatgctgttatacttaagagattgttcatgagcaaggttaacaaacccccattgtctttgtcaaggttgattaagtatacgaaggggaaggaagataagattgcagtggtggtggggtctataaccgatgntatcgtgtttatgaagttc

SEQ ID NO: 27681 - DNA, 293 bp, Glycine max
  Clone ID: 701059118H1
catgactatatataggctaattctctctaacagaatgcatgaaattctatccaaatccataaggaatctaatagaaatctaataacgatattctgttatgcaggatctgtgctagcaagatttgaggctggtattcaaaagctttcttccaattctaccctcctgctacacgtaatcagccagcaacagtcctcatacccgctgccgtagcaaaaacatgaaaaggggatgttcccaaatcagttccactactactactcctccatcgccctgtcttctgcctggacagggga

SEQ ID NO: 27682 - DNA, 290 bp, Glycine max
  Clone ID: 701059120H1
caggagtgggaagttggcgagtggagcaattgcgaatctggtggacgaggttggaggtgctgtcatccatgaagagggtctccccatgaatgtttccgttgacatgtctatttcttttctctcatctgtgagagttggcgatgaactagaaattacttctaggttgttaggaaggaaaggaggttattctgggactattgttcttcttaaaaacaaagcaactggagaattgatagcggaaggtcgtcattcactatttggtagacataacagcaaaatgtaattcgata

SEQ ID NO: 27683 - DNA, 296 bp, Glycine max
  unsure (1)..(296): unsure at all n locations; Clone ID: 701059121H1
tctaatatccacacatttccacattacnataaatacccnacacattttagttttttcatgtacccattcgcgtgcgatagaattttctagagcgagagatttcggcgtaatgggtccaaacgcggcggcngcgaaacaagcggagaaactccgaattgacggcaacacttacttcaaaaaagaccgtttcggtgccgccatcgacgcttacaccgaggcgattacgctgtgccctaatgtcccggtttattggacgaatcgcgcgctgtgccatctcaagcgcaatgattaggagt

SEQ ID NO: 27684 - DNA, 112 bp, Glycine max
  unsure (1)..(112): unsure at all n locations; Clone ID: 701059122H1
gacccataganaagcccccaaattaatcaatcaaccatggtttgcttcacattacaaatttcanttgttttgctacttttgctatatgcaatgacattccacacaacanacg

SEQ ID NO: 27685 - DNA, 291 bp, Glycine max
  unsure (1)..(291): unsure at all n locations; Clone ID: 701059123H1
attttagaagaataccccctcttttgctgcatcagaggagttgtaaattaagagcatggctgcacaagctcttgtatcatcatcttctcttaccttctcagcggaggctgcaagacaaagtcttggaccaagatcactccaatctccatttggcttctccagaaaagcctcctttcttgttaaggcagctgctaccccccctgtcaagcaaggatcagacagacctttgtggtttgcatcaaagcaaagtctttcttacttggatggcagcttncgggtgatatggnttgt

SEQ ID NO: 27686 - DNA, 294 bp, Glycine max
  unsure (1)..(294): unsure at all n locations; Clone ID: 701059124H1
antttgtngtgagctataagctagtttatcgtgaggagaatatgaagttgtgtgttntnncntgttgctgcagtagtnttngtagcatggccatgccatggcgcaggctaccaaaggttccctctccgaatganaactggctatggtgagcgttcttcggaggtaaaatgcgcaagtnttaggcttgctgtggaagcacacaacatccgagcnnttaanacccattcngaagagtgcgttgaaccagcacaggactacatnaatggcgaacaatttagatccagactctnaaac

SEQ ID NO: 27687 - DNA, 290 bp, Glycine max
  unsure (1)..(290): unsure at all n locations; Clone ID: 701059125H1
gttctctgtcactgctgcgtctctcgtaaccatgcctaagcaaatccacgagattaaggatttccttctcactgctagaangaaggacgcaaggtcggtgaagatcaagaggagcaganatgtggttaagttcaaggtcagatgctcgaagtacctctacacactttgtgtgtttgacccagagaaagctgataaattgaagcaatctcttcctccaggtttgagtgttccaagacctgtaaaggtacagggcgagagaccaagaagnagcaattcattgattcttctga

SEQ ID NO: 27688 - DNA, 287 bp, Glycine max
  unsure (1)..(287): unsure at all n locations; Clone ID: 701059126H1
cggacaganggtggaacaataatacaccaganagagtacttgatttctagggtttgaagcacttccccaagtcgtggctggaaaacaagggaagaaaaatgagcgaaagcacagagacccagaagcgccaagctgctgattcagagagcaaggagaatgctgttgcttccaaganaccaaaggtcgaatctgtggaacgggtaccgatggtantgccgtaaagaaaccatctttcctcattgaagctgatgcagctgaagataagggcgccaggcacaccatggagg

SEQ ID NO: 27689 - DNA, 284 bp, Glycine max
  unsure (1)..(284): unsure at all n locations; Clone ID: 701059127H1
ctgaaaagaagggtttgtaaganaaagaanaaagangcgcaagangagtggtagggtttctgggaaggtgaagtggttcaacgatcagaaggggtttggattcataacccntgacgatggcagcnaggnactcttcgttcaccaatctcagatcaaatctgacggtttccgaagcctagctgaaggagagtccgttgagttcgctattgaatctgaatctgacggacgcgccaaggctnntgatgtcactggccccgacggcgccagntccagggaaccagacg

SEQ ID NO: 27690 - DNA, 285 bp, Glycine max
  unsure (1)..(285): unsure at all n locations; Clone ID: 701059128H1
gaagtgatgccatacttctgggtgctgagactggaacgtgggntgtaccctattgagannatttctactgttggcagaatttgttctgaggctgagaaagttttcaatcaagacctttattttaagaggacagtcaagtatgttggagaacccatgacccacttggaatctattgcatcctctgcggtacgggctgcaattaaggtgaaagcatctattataatttgtttcacttcatcaggaagggctgcaagattgatcgcaaagtataggccaacaatggcc

SEQ ID NO: 27691 - DNA, 292 bp, Glycine max
  unsure (1)..(292): unsure at all n locations; Clone ID: 701059130H1
cttcncccatttctacctcttncttcntcgcctagctagctccagaaaattaggatctgcttcagatctngtgtttccctgtcgcaaatcacgagtccattgaggtgattttgtggatgaacnagnatagatagggcttntgcananctctccaatgtntcntgaaattanatgancatgcgtcgaattcgtatgctgcactcattntccgccgtngtnactctactggttctacgttttctcatgaatccnncttaaatccgggatanattagatctatcactcagttaat

SEQ ID NO: 27692 - DNA, 220 bp, Glycine max
  unsure (1)..(220): unsure at all n locations; Clone ID: 701059131H1
agaagagaatagggttagggttagggttagggttagggtttgattgaggatgccgaagaacaagggaaagggaggtaagaacaggnagaggggaaagaacgaggcngacgacgagaagcgggactggtgttcaaggaggacgggcaggagtacgcgcaggtgctccggatgctggggaacggcgcggtgcgaggcgatgtgcatcgacgggacgaagagg

SEQ ID NO: 27693 - DNA, 291 bp, Glycine max
  unsure (1)..(291): unsure at all n locations; Clone ID: 701059132H1
ctgaagtgaacacaatggagngaagggttggctatgaggtgctggtggctttggtgacccttttggttttctcatttgcttgtgccactgcttcatcatcaggaccaacaaaactccaccaccgtgtggagcaattcaggaggaatctgcttgctaatggccttggtagaactcctccaatggggtggaacagttggaatcatttcagctgtcaaattaacgaaaaaatgatcagaganatgctgatgcccttgtttctactggtcgtccaagcttggatacacttatgtc

SEQ ID NO: 27694 - DNA, 291 bp, Glycine max
  unsure (1)..(291): unsure at all n locations; Clone ID: 701059133H1
ctcgaagcaccggaactctcacaggctgataagaaatatcanccatcatcccaggccattgacaaacctgcagatgatggctacaactggcgtaagtatgggcagaagcaggttaagggtagtgagtatccacgaagctattacaagtgcacacatctgaattgtgttgtgaagaaaaaagttgagcntgcccctgatggtcacatanctgnaattatctataaaggccagcataaccatgaaaagcctcaggcaaataggcgtgccaaagataatagtgattcaaatgga

SEQ ID NO: 27695 - DNA, 292 bp, Glycine max
  unsure (1)..(292): unsure at all n locations; Clone ID: 701059135H1
cnagataactagaaacagtgtgatgaaaatgaaggtccttgtnttcttcgttgctacaattttcgtagcatggcaatgccatgcgtacgatatgttccctctccgaatgancactggctatggtgcccgtactccggangngaaatgcgcaagttggaggcttgctgtggaagcacacaacatctttggctttgagaccattcctgaanagtgcgttgaagcaacaaaggaatacatccatggcgaacaatatagatcagactccaaaacagttaaccaaccaagcttactt

SEQ ID NO: 27696 - DNA, 88 bp, Glycine max
  Clone ID: 701059139H1
aaggctcaatgctcctaagcattggatgcttgacaaactgggtggtgcatttgcgcctaaaccctcatctggaccacacaaatcgagg

SEQ ID NO: 27697 - DNA, 291 bp, Glycine max
  unsure (1)..(291): unsure at all n locations; Clone ID: 701059140H1
caaagatgaagatgatccacgttcttttcctctttgctcttgtctcgttcacttcccatgcttctgtcaatgatttctgtgtagcagacctaaaaggtccanatagcccttcaggctatcagtgcaagccacctaacacagtcacagtggatgactttgtgttctctggctttgtagctggnaacaccacaaacactttcaatgctgcattaacctccgcatttgttactgattttccaggtgtgaatggtcttggtgnatctgtggcacggttagacatagccaaagtgg

SEQ ID NO: 27698 - DNA, 288 bp, Glycine max
  unsure (1)..(288): unsure at all n locations; Clone ID: 701059141H1
cacaccgactcctctgagctggctctttatctatccggagggantttataagctcatgacatacataagggacaactacaataatccaccagtgtacattaccgaaaatggcgttgcggaatcaaagaatgactcacttgcaatcaatgaagcccgaaaggatggtattcgaattagataccatgatggccatctcaaatccctgcttcatgcgatcaaagatagagttaatgtgaagggctactatatatggtcatnttcagatagctttgnatgggatgctggtta

SEQ ID NO: 27699 - DNA, 286 bp, Glycine max
  unsure (1)..(286): unsure at all n locations; Clone ID: 701059142H1
gataaccacagatccatctactccaagtccaaaatcagtcactgtcccacttcttgggagtgcccaagaatctgaagtcgatattgatggccatgatattcatcgtccaagcagcatccgtgctttactttccactccaacacacactgttcatcgcttgtggcgtaagtttgatgatgcnttcatgcgtcctgtttttggtggcaggggttttgttcctanagaacctggctcaccaatgaacgtaatgggccatcaatggcgttgagaaaaaagccaagaaatt

SEQ ID NO: 27700 - DNA, 284 bp, Glycine max
  unsure (1)..(284): unsure at all n locations; Clone ID: 701059143H1
ggccgaaaagttagtgctggtatcagacatggcttccactatgaagcaggttccctctaatttcatcaggccactcggtgaccgtccaaatcttcaaggcgtcgtccaatcctcagatgtttgcattcctctcatcgancctccaagaccttcatggccccaatcgctcccacatcatccaacagattgaccaagcttgccaaaatttatggnttttttcaggtgacaaatcatggagtnccgagggtgtgattganaagataatgaaggtgacaagggagttt

SEQ ID NO: 27701 - DNA, 284 bp, Glycine max
  unsure (1)..(284): unsure at all n locations; Clone ID: 701059144H1
attcgctncgtcnagnttcacagccaagtcgtaaacanggtttcaagggatgganaacatgcagancctctggcaatnnggtgatgaactccgtgggcactnaanagcatcngaggatcacaagtngntaatggtgcctcgaaactggncgaacaganaagnttgangggggagcgtgtgaanaancttgatctttcaangggaccattgaaacaaggnccatggataaaatttgggttccaggangtgnacaaattngtttctcttatcttgagnatgtggat

SEQ ID NO: 27702 - DNA, 289 bp, Glycine max
  unsure (1)..(289): unsure at all n locations; Clone ID: 701059145H1
tgggcttcctccaccgctttcttcacacccctccatgatttcactcaagccagaacaaccccatcaccccctttgcctttcatcaaancctcntttgcttnctccaagtcaancnttttncaccctgccctttccctacanacctcttccaactttcccaggctttttggnaagcctaagtttttctctgtncatgcaaggggctgccacagaaaaaaccatgtatgaagtttactgtcaaggatatggacagaaaggatgtttctcttagcaagtttaaggggaaggt

SEQ ID NO: 27703 - DNA, 290 bp, Glycine max
  unsure (1)..(290): unsure at all n locations; Clone ID: 701059147H1
tgagctataagctagtttatcgtgaggagaatatgaagttgtttgtnttctttgttgctgcagtagtnttngtagcatggccatgccatggcgcaggctaccaaaggttccctctccgaatgaaaactggctatggtgagcgttcttcggaggtaaaatgcgcaagttttaggcttgctgtggaagcacacaacatccgagagntaaaaccattcctgaagagtgcgttgacccaacaaaggactacatnaatggcgaacaatttagatcagactctaaaacagttaacc

SEQ ID NO: 27704 - DNA, 293 bp, Glycine max
  unsure (1)..(293): unsure at all n locations; Clone ID: 701059148H1
tcccttgtncgtttcactctcacaatggactccctctctctcttctgcaccggnnnccttctccgccggcggnctntactggttccgtctgnnttctgggcnccgccgagcagaagggcaaacgcgccaccgatctatccggcggctccatctccgccgagaaagtccaagacaactacaagcngtactggtcttcttccgncgccccaaggagatcgagaccgccgacaaanttcccgacttcgtcgacaccttctacaatctagtcaccgacatctacgagtggggctngg

SEQ ID NO: 27705 - DNA, 287 bp, Glycine max
  unsure (1)..(287): unsure at all n locations; Clone ID: 701059149H1
gctagctaggttgaaaatagtttggttttgtagtaagtnaggtgaggtgccaaaatggtgaagataactcttggtactttcgatgactcttttggtgttgcctctcttaaggcttatttggcagagttccatgcaactctgattttcgtgttcgctggtgttggttcagccatcgcttacaacgagcttacaaaagatgcagccttggatccaacggggctggtggcagtagctgtggcccatgcatttgcactgtttgtaggtgtctccgtcgcagccaacatctc

SEQ ID NO: 27706 - DNA, 289 bp, Glycine max
  unsure (1)..(289): unsure at all n locations; Clone ID: 701059151H1
gcaggttcgtgctttcccgccgccgctatactgccaccgtctccgccagcgatggcagaagatgattcaaagcctctgaactacatctccgaagtcatactcaagaagaggaaaagcaccgaagcatgggcgttaaggaaaaaagaacagttccagcaaaagaaattccaatccatcagaaagcccgaggatnncatccacgagtatcgcaacaaggaagtggaccttataagaatgaagcggagggtgaagaggaaagtgcctgaagctaactccaacactatgataa

SEQ ID NO: 27707 - DNA, 293 bp, Glycine max
  unsure (1)..(293): unsure at all n locations; Clone ID: 701059152H1
aacaaatcanagccatggccacctccancttctctatngttctctncgtctccctagccttctttgatggtgctacttaccaagggcacantcgaccgataccgtttctttcaccttcaanaagttcaacccagaccanccaaacgttatncncccanaaagatgctagtatttcatcctgtggggtgttacgactcacctggagttggnagcaacggcgtgcccanctcgggatctctcggngcgtgnctttacgctgcccgaaatccagntttgggacagcgaagccggca

SEQ ID NO: 27708 - DNA, 110 bp, Glycine max
  Clone ID: 701059154H1
ggccgctcgcgatctagaacctgaaacttgggtgcgattccttcactcacaacaacaacacatcactatggctcttctgagtcgagcctcttcacgcttccctcagctgg

SEQ ID NO: 27709 - DNA, 283 bp, Glycine max
  unsure (1)..(283): unsure at all n locations; Clone ID: 701059157H1
caagattgagtaataagatggggttggangccgcagtggaggcagcggcggaattccttaacaaggcagtgaaaccagtgctggtaggtggtcctaaactgagggtggcaacagcatctgatgcctttgtcgaactggctgatgcgtgtggttatgcgcttgctgngatgccgtcggctaaagggcaggttccagagcaccatccccattttatcggaacttattggggtgctgtgagcactgccttctgtgtgagattgtggatctgcggatgcatacttgt

SEQ ID NO: 27710 - DNA, 292 bp, Glycine max
  unsure (1)..(292): unsure at all n locations; Clone ID: 701059164H1
ctgnactcnatcaaacacaaaatggaaaanaatgtggggattctcgccattgacatctacttccctcgcgcttgcnttcagcaggaagcattggagactcatgatggtgccagtaaagggaagtanaccattggacttggccaagactgcatgtcattctgtaccgaagtagaagatgtcatctcaatgagttngacagtngttacttctcttcttgagaagtatgggattgatctaaacaaatcggtcgtctggnagttggnagcgagaccgtgatagacanaagncaatt

SEQ ID NO: 27711 - DNA, 285 bp, Glycine max
  unsure (1)..(285): unsure at all n locations; Clone ID: 701059166H1
tgactcgttcttcttcgtcgttatcntcttcttttgtngtttgtntgtttgttttttctctcacctgaaaatgtcttgnctgcggtggtaactgtggttgcggaagcgnctgcaagtgcggcaacggctgcggaggctgcaagatntanccagacttgagctacaccgagtcaaccaccaccganancttggtcatgggagtggcaccagttaaggctcaattcgagagtgctgaaatgggtgttcccgctgagaacgatggctgcaaatgtggagtaactgcac

SEQ ID NO: 27712 - DNA, 287 bp, Glycine max
  unsure (1)..(287): unsure at all n locations; Clone ID: 701059168H1
cgggatctcagttcttcatttgcacggagaagacagagtggctcgacggaaagcatgtcgtgttcggacaggtcatcgaaggattgaacgttgtcaaggacatcganaaggtcggatccagctccggcaggacctccaagcccgttgtcatcgccaactgccgtcaactctcttagacgacgttgacccgcggctttaatctctgaatctgtgttatttctttcggtgtcgtttttgcctttttttngctcttcttttctttctcgtgtcgtcgtttaggggattgt

SEQ ID NO: 27713 - DNA, 289 bp, Glycine max
  unsure (1)..(289): unsure at all n locations; Clone ID: 701059170H1
atttggntattctctatttgtgtgctcagtatggtgggaatcttttcgttgattacagggagaccgggatgtagtggattcggatcttcctcaactgctgaacaggttagccaaggaattgatgccagcaacctcactgcaatcatcacangaggagccagtggcatagggttggagacagcacgtgttctggcaattcgaaaggcccatgtcataattgctgccagaaacatggagtctgcaaaggaagcgaaacaactcatacttgaggaagacgagtcagctcgtg

SEQ ID NO: 27714 - DNA, 292 bp, Glycine max
  unsure (1)..(292): unsure at all n locations; Clone ID: 701059171H1
caggagtgttatcngcgaaggaggcattcgagaancttgaaaaggtgggagaagggacatatgggaaggtgtacagagcaagagagaaggcaactgggaagatcgtggctctgaagaagactcgtctccacgaggacgaagaaggtgtccctcccaccactctccgtgaggtttccattctgcgaatgctctctcgcgatccccatgttcggtaggttaatggatgtcaaaccagggtcagaacaagggagggnagacagtgctctacttggnatntgangtacatggacac

SEQ ID NO: 27715 - DNA, 287 bp, Glycine max
  unsure (1)..(287): unsure at all n locations; Clone ID: 701059172H1
gaatctcaagattctaagagagattttnctgctctttgaagaagggtgtttgcttgattttggagatgtcgctgctctcagatctcatcaaccttaacctctcagacactactgaganggtgatcgcagagtacatatggatcggtggatcaggaatggacctgaggagcaaagcaaggacttctcccaggaccagttagcgagccttcnaagctncccaagtggaactatgatggttccagcacaggccaagctctggagaagacatgaaatgattatatacccac

SEQ ID NO: 27716 - DNA, 283 bp, Glycine max
  unsure (1)..(283): unsure at all n locations; Clone ID: 701059173H1
tccgtgctatagcgcaaggntgttctgagtacaatattactgttgttgttaancgagaggnttgtataaaggctttacgagctgtccattccagatttnatctctcaagaaccaccatagcaatgggcattattggacctggattaattgggagcacactacttgaccagctanaggatcaggcctcaaccctgaaagaagaattcancattgatttgcgtgtaatgggcatacttggttcaaagtcaatgctcttagtgatgttggcattgacttnncctag

SEQ ID NO: 27717 - DNA, 276 bp, Glycine max
  unsure (1)..(276): unsure at all n locations; Clone ID: 701059174H1
gtggcaataagaagtacagtgacaagaagaaagcgatgggcagaactgaatccactgtacccatatttaatatggaagacatagaggagggtgttgaaggttatgatgatgaaaggacactacttatgtctcaaaagagcttggagangcgttttggtcagtctccagtttttattgctgccactttcatggagcagggtggcattccaccttcaacaaacccncgcaattcttcttaaggaagcgatccatgtcatcagctgtggttacgnagat

SEQ ID NO: 27718 - DNA, 228 bp, Glycine max
  unsure (1)..(228): unsure at all n locations; Clone ID: 701059175H1
cttcttctacattagttctngtnntncattattcattctcagnttcttntcttctggggggcaaaaggggtcacttttcagatccgagattgagctccgttacccatcatcatcatggagctcctcgggtacctgaatcagggtcacccttctanaggaacaacactngnattactcttncattggtgctttcgacactngtgtcttccccacttgcacacagccnnc

SEQ ID NO: 27719 - DNA, 281 bp, Glycine max
  unsure (1)..(281): unsure at all n locations; Clone ID: 701059176H1
ctcactttctcgcagaaacgtattgtttttctctctttccgcggccnagatctgagcagtttggaaaccctaactggctctcaccaacgacatcaccactctctccgatcaactacctctttcgtcgccctaagtcatggcaggaattgcacccgagggatcacagtttgatgctcgtcaatatgataccaagacgaatgagctgcttacgtccgatggtcaggatttcttcacatctacgatgaggttatgacagttttgatgctatggggttgcaagag

SEQ ID NO: 27720 - DNA, 274 bp, Glycine max
  unsure (1)..(274): unsure at all n locations; Clone ID: 701059177H1
tagaaacagtgtgatgaaaatgaaggtccttgtnttcttcgttgctacaattttngtngcatggcaatgccatgcgtacgatatgttccctctccgaatgaacactggctatggtgcccgtactccggaggtgaaatgcgcaagtnggaggcttgctgtggaagcacacaacatctttggctttgagaccattcctgaagantgcgttgaagcaacaaaggaatacatccatgggcgaacaatatagatcagactccaaaacagttaaccaaca

SEQ ID NO: 27721 - DNA, 287 bp, Glycine max
  unsure (1)..(287): unsure at all n locations; Clone ID: 701059178H1
ananatcanagccatggccacctccaacttctctattgtnctctccgtctcnctagcctnctttttggtgctacttaccanggcacactcganngataccgtnnctttcancttnaanaagttcaagccagtcnaancaaacnttatgctccanaaagatgctagtatttcatcntccggggtgttacaactcaccanagttggcagcancggcgtggccagtcgggatctctcggtcgtgccctttanggctgccncnatccagatttgggacagcgaaaccggca

SEQ ID NO: 27722 - DNA, 293 bp, Glycine max
  unsure (1)..(293): unsure at all n locations; Clone ID: 701059180H1
ctttttcccagtccaagnagcctcnaattcgngccactctcttcaaaatggccgttagcttctcaaatctccacacngantcaggtcncaagtccctcgacgacttcctctctgggaanggtctagcgtttctggggatcagttcacaaaggacgacatcaaagtgtatggttgctgttttggagaagccangtgactcttttccccaatgctgccaagtggtacgaggttgtctcatctcagnttgctgcaagcttccccggcaatgctcanggggtgagattcagtggcaa

SEQ ID NO: 27723 - DNA, 288 bp, Glycine max
  unsure (1)..(288): unsure at all n locations; Clone ID: 701059181H1
catgcgacaagtggatatgacataantgaagctgtgccttttgttgagtggggaccaaagggaggaaagacaacacgatctcatgctggaacattgacatttaaccgaaacagcatgtgtggtgaacctgcacgaactgttngttggcgtgaccctggtttttatacacacaagtttctnaaaagaactgtggccaaattttaaggtacacttacaagttgggggcagatgctgtctaanggttcttatgtatggagtaagaagcatcattcaagggatcccatatcc

SEQ ID NO: 27724 - DNA, 287 bp, Glycine max
  unsure (1)..(287): unsure at all n locations; Clone ID: 701059182H1
cgagctgggtcttaaattagactaatttcaacctaatcgtattctcggttcggtctttgtttctttatactagtaagtagcaagtgaagttgaagttgcagttgcgggaaagacgcaggtggtgaaatcctgtcaccaaaatgagagcnctgcttctgctcaaaggaactcagtgtaaaagtttccaggcgtaattgtctctcgtgtttctgttcaactctagtnttgattagtgattgcgccatgcctatttttgtaccanaggcanccgctgtgaatggaatgat

SEQ ID NO: 27725 - DNA, 284 bp, Glycine max
  unsure (1)..(284): unsure at all n locations; Clone ID: 701059183H1
gaaattgtgaaggaagtctcttcctacttgaagaaggttggntacaacccagacaagattccatttgtgcccatctctggtttcgagggtgacaacatgattgagaggtccaccaaccttgactggnacaagggaccaactctccttgaggctcttgaccaaatcaatgagcccaagaggccctcagacaagccactcaggcttccattgcaggatgtctacaaaattggtggtattggtaccgtgccagtgggacgtgttgagactggtgtcgtgaagcccgg

SEQ ID NO: 27726 - DNA, 285 bp, Glycine max
  unsure (1)..(285): unsure at all n locations; Clone ID: 701059184H1
aagancaagtagttganaactaagaaggagaagcaaatggcttcctcaatgatcncttccccagctgttaccactgtcaaccgtgccggtgccggcatggttgctccattcactggcctcaagtccatggctggcttccccaccaggaagaccaacaatgacattacctccattgctagcaacggtggaagagtgcaatgcatgcaggtgtggccaccagttggcaagaagaagtttgagactcttcctacctgccagaccttgatgatgcacaattggcaaagg

SEQ ID NO: 27727 - DNA, 289 bp, Glycine max
  unsure (1)..(289): unsure at all n locations; Clone ID: 701059185H1
ctgcccttgtttccaatctctacttcatctcccagctgctccaccgtnagtacagcggaaacttcttcgtagatctattgggaaaatggaaggaatctgaatatggaggtggtcagtctgttcctgttggtggcattgcatactatatcactgcaccatccagcttagctgatatggcagccaatcctttccatgctctgttctatcttgtgtttatgctttcagcctgtgccttgttctctaaaacatggattgaagtctctggttcatctgtaaagatgntgccaag

SEQ ID NO: 27728 - DNA, 288 bp, Glycine max
  unsure (1)..(288): unsure at all n locations; Clone ID: 701059186H1
aagaactcaaggggatgaagggattggtaaggttcctgaagatgttgtgatagagatattggtgagagggggaataagggagtgggagcagatatcatgcgtgaagaagcagtgggcatctcttntccgctgcgattgcgaatgcttcngcgcaagctgcactttccttctattatccacaccaacttcccactccctccccctccaacatggcctgttcctttacccaacaactccaagaggagattcattgcttatatattngtcaacacatcttggctccgatcc

SEQ ID NO: 27729 - DNA, 284 bp, Glycine max
  unsure (1)..(284): unsure at all n locations; Clone ID: 701059187H1
caaggctatagaatatgacaatttcatcgagtgttgtcttactgttaagggactgactgacaaattcaaagaaaaggatactgcgtattctggctctgcaaccttcacctatgaatcgtttatgctgacagtcctgccattcctaatagcttaggaaattaatggtgtgtgtgtggntggtagggtttgtaaatggccaggctgtatttggtttgaaaatgtgtggtcgaatacttactattgccagctttaatatgctagtactccctgttgttttactctat

SEQ ID NO: 27730 - DNA, 289 bp, Glycine max
  unsure (1)..(289): unsure at all n locations; Clone ID: 701059188H1
acttaatcgatcatcacttcacttcactaatacatcatggcagacgagacccagancaagtatgagagctctgaggttgaggtccaggatcgtggtgtttttgactttctcggtaagaaaaaggatgaagaagacaagcctcatcctcaggaggaggtcatcgccaccgagtttcaaaaagtcactgtctcagaccaaggagagaacaagcacagcctcttagaaaagcttcaccgatctgacagcagcttctagctcttcaagtgaggagganggagaagatggagng

SEQ ID NO: 27731 - DNA, 283 bp, Glycine max
  unsure (1)..(283): unsure at all n locations; Clone ID: 701059189H1
actanaataggccaatggttaagtcttctnanatgtgtactactattantgcaganagaaggggntcctgtgggaatcacttttgttgaaaatgcagtggcaaaaggggctgtgtgtttggatgggagtgctccagcttaccacttcnataagggatctggangcnaggttaacaactggatagttcnccttngaggnngtatgntggtgcaacaacgttactanttgcctttcccgtaggacactngattaggttccactaatnaaatggatanataacttt

SEQ ID NO: 27732 - DNA, 282 bp, Glycine max
  unsure (1)..(282): unsure at all n locations; Clone ID: 701059190H1
gttctctctaatctctctcactacaatggagactccatcatccacagcaagaagaatcacaagatcccanatcgcctccaacaacaacatccccgtttcaagaaaaaanaacgaggactgctcagaaaagagcgtttcaaaaacgcggcaganaagcagcgtgcaacagcaggaacggtgtgcgctggtcgacatatcgaacgattcaccgatcgcggggctggcgaacgggaaggacatcattgagacgccgttgtcgtcgatggcgaagaagaagatggt

SEQ ID NO: 27733 - DNA, 280 bp, Glycine max
  unsure (1)..(280): unsure at all n locations; Clone ID: 701059191H1
tgagcgtaggttggaagcagagagatggaaggttgggacccgaatacgaantcgacgctgacacagatccctctgctgacgacgaaggcgggtccacgagacggagcggcatggacgcagaggcttaaggaagagtacaaggctctgatagcgtacacncagatgaacaagtccaacgacaacgattggttccgtatctccgccgccaatccggaaggcactcgctggaccggtaaatgctggtacgttcacaactcctcangtacgaattcgactccca

SEQ ID NO: 27734 - DNA, 287 bp, Glycine max
  unsure (1)..(287): unsure at all n locations; Clone ID: 701059193H1
cgttgcgttgattgattggtatgaagtccttgactttttttcttcttgctattctcacacatacncatctactccttccctcatggctgancaatcttccaactccatttacgatttcactgtcaaggacatcagtggaaatgatgtgagtctgaatgattacagcgggaaggttctactgattgtgaatgtcgcctctcaatgtggtttgacacaggcaaattacaaannattggantgtattgtacgagaagtncaagaatcngggatttgaaatcttgggcatt

SEQ ID NO: 27735 - DNA, 286 bp, Glycine max
  unsure (1)..(286): unsure at all n locations; Clone ID: 701059194H1
ccattctccatctcagaatggagaatgcnagantaagccagtngttgatccttctggtgtgtgcnctgctgttgctgntatcagaagcttcctatgtgccaatcactattgtncagaacgcggtagcaaaaggagctgtttgtttggatgggagtccaccagcttatcattttgataggggatttggatcagggattaacaantggttggttgcatttgagggaggaggatggtgcaacaatgtcatacttggcctgctcgcaagaccaatcgtttaggttcatct

SEQ ID NO: 27736 - DNA, 287 bp, Glycine max
  unsure (1)..(287): unsure at all n locations; Clone ID: 701059195H1
caccctccaccggtccatcctaaacataatagcgtagaacannaaagcatcacaaaaatggaagctagcaattnatagntgttctgtttttgtgaacccccaccatcaaaaaaaaatattagcgtcnnnnnnnnnnnnnnnnnnnnnnccnctcgcgaccttcgtttttctcttttgccttctcggagttaatttcaggaggttgcagcganangatggcgcaaggcatggcgagtaaccgaaancggnacccttgcgcgcnagaagcgcgcaaggtgatggtggtg

SEQ ID NO: 27737 - DNA, 293 bp, Glycine max
  unsure (1)..(293): unsure at all n locations; Clone ID: 701059201H1
cgcgacttgatgtggataacatgtcctatgaggagctattggctctggaagaacgcattggaaatgtgagcactggattaagtgaggagattgtatcgaaacttttgaanaaagaagaagtattcagctgaaccagattctcagcatgaggcagaaccatgctgtgtttgtcaggaggagtataaagatggggntgatttaggatcactggattgtgggcatgattaccatagagattgtattaaacagtngctaatgcataagaatttgtgtcccatttgtaagacaacggg

SEQ ID NO: 27738 - DNA, 287 bp, Glycine max
  Clone ID: 701059202H1
ttctcccatttcctctcagaaccctcgatcactcccacgcgctcctatatcctctccttcaccgtcgctctctccaacgatcacaacaacatcgtcatcccatggcaaacgccgcatctggtatggcagtccatgatgactgcaagttaaggtttttggagctgaagacaaagaggacacaccgtttcatagtttttaagattgaggagcagcagaagcaggtcattgtggagaagcttggtgagccagcccaaggctatgaagatttcactgccagccttcctgct

SEQ ID NO: 27739 - DNA, 285 bp, Glycine max
  unsure (1)..(285): unsure at all n locations; Clone ID: 701059203H1
taatctttcaatccatttaattgggcaaaanannntnttggacaatattcgattgctaggatctggaaacaagttggatgatataaggaatttagaaactggacttgaagatggtggaactgttcaatcagcaaagcctttctgagcattgaatacctgaattataaatttctatcatttgtggctatttattgtgcctgcagatttatctgtcataaagtaggtaaatatctgacatggtgaaatatttagagtttttagttctagtctcaaggatcttaaata

SEQ ID NO: 27740 - DNA, 286 bp, Glycine max
  unsure (1)..(286): unsure at all n locations; Clone ID: 701059204H1
aagaagaagaaaattgagggaggatgtggctcgagattatcttcggtttggtcatttacagattgttccggcgcttcttctacgacgacgacgttttggacatcgaaggatcggattcttctgntcttttctccgtcgcggataggcttaaaaaactttacggagcaaatgtgtatgtgggtcttcggattcccgatgccgatactgcttctcgacagagcattgatatggttcttctcactaaacaagagctatgggtgatatctgtgaaaaacttctctgggaa

SEQ ID NO: 27741 - DNA, 137 bp, Glycine max
  unsure (1)..(137): unsure at all n locations; Clone ID: 701059205H1
gcgatggctccgtagaggactgcctcaacgttcaccacttggactcacagcttcccaccatctccagcacccacttccgcagaatccttgccggagtcatcaatcctgtgactgcacttacgantaatcccgccact

SEQ ID NO: 27742 - DNA, 288 bp, Glycine max
  unsure (1)..(288): unsure at all n locations; Clone ID: 701059206H1
gcagaacaaaaccaaaaccagacaactgaagctggaaggcaccaagaggttggccacaagagccttctccagagtgatgctctttaccagtatattctggagaccagtgtctacccaagagaacctgaatccatgaaagaactgagagagttgacagcaanacacccatggaacatcatgacaacctctgcagacgaanggcaattcttgaacatggntccctaagctcatcaaatgccaagaacaccatggaaattggtgtctacactggatnttcacttcttggcc

SEQ ID NO: 27743 - DNA, 283 bp, Glycine max
  unsure (1)..(283): unsure at all n locations; Clone ID: 701059208H1
ggacaagcttgtggtgttgaagctaaatggaggcttgggcacaactatgggttgcactggtcctaaatctgtaattgaagttcgtgatgggttgacatttctagatttaattgtgatccagattgagaatctcaattccaaatatggaagcaatgttcctttgcttttgatgaattcattcaacactcatgatgacactcaaaagattgttgaaaaataccaaaactccantattgagattcatacttttaaccagagccagtatcctcgattggttgctgag

SEQ ID NO: 27744 - DNA, 284 bp, Glycine max
  unsure (1)..(284): unsure at all n locations; Clone ID: 701059209H1
ctgatagagtgcatggaaccaagctgcatcaaggtgaagactggcatcacaacgagacagtcaagcactggacttataccatagatggtaaggttacaacatgtctggagagtattgaatccattgatgaacagagcaaaacaatcacctacaagctcttcagtggtgacattnatcataattataagaactttaagttcatctttcaagccnttgatgataatgatcatggcggtactattatcaaatggaccgttgaatacgagaggcttcgtgaggaggtt

SEQ ID NO: 27745 - DNA, 282 bp, Glycine max
  Clone ID: 701059210H1
ccaagatgaagatgattcactttcttttcctctttgctcttgtctcgttcacttcccatgcttctgtcaatgatttctgtgtagcagacctaaaaggtccagatagcccttcaggctatcagtgcaagccacctaacacagtcacagtggatgactttgtgttctctggctttgtagctggaaacaccacaaacactttcaatgctgcattaacctccgcatttgttactgattttccaggtgtgaatggtcttggtgtatctgcggcacggttagacatag

SEQ ID NO: 27746 - DNA, 283 bp, Glycine max
  unsure (1)..(283): unsure at all n locations; Clone ID: 701059211H1
aacaagctagctattagttcgattttgtagtaagtgaggtgccaatatggtgaagatagctcttggtactttggatcncctcttttagcgctgcctctcttaaggcttatttcgcagagttccacgcaactctgattntccgtgttcgctggtgttggatcagccatcgcttacaacgagcttacaaaagatgcagccttggatccaacggggctggtggcagtagctgtggcacatgcatttgcactgtttgtaggtgtctccgtcgccgccaacatctcag

SEQ ID NO: 27747 - DNA, 281 bp, Glycine max
  unsure (1)..(281): unsure at all n locations; Clone ID: 701059212H1
aaaggtgaagtttgccagaaacaagatgggaaggaaccattttcagcagcaacactgtgctgatgggagcatgtggatggagagtcagggtcagcaacagagctatgccttccaagaagagtcttggagccctgataacaactatggccacaaccacaagcaattcccaggcatgcnnnnnnnnnnnnnnnnnnnnnnnnnnnnnnnnnggcttggtgcttttgctgctgtggactctgacttctcaatgcaaaaacatcatcatgggcatggcaacggcg

SEQ ID NO: 27748 - DNA, 280 bp, Glycine max
  Clone ID: 701059213H1
tcacttgtcaggcgcggcagccttgctctccaccacgattccacgacctccacgccaccacggtcccagtcggcgccggtgcagtgcggagtcgcgacctcgctcccgtcgtcactcacagtcgctggcgatttgggttgggttgggttgtgagaacgggtaaaatggaggcagaggtggtggaggcagagcttgtgttgccaagctacctcagtttcaagagagttcaaatgtatgagaaatacccaaaaggccaagccagaggcaggcattggaaaca

SEQ ID NO: 27749 - DNA, 281 bp, Glycine max
  Clone ID: 701059214H1
gcggcagtacttcggctccatcttcttcgatctctcaaactctatcggcgcagaaccaatcctatatcactatggggaagacacatggaatgggagctgcccgcaagctgaagtctcaccgtaggagacaaaggtgggctgacaagtcatacaaaaagtctcatcttggaaatgaatggaagaagccttttgctggttcatcccatgcaaagggtattgttcttgaaaagataggtattgaggctaagcagcccaactctgccattcgaaaatgtgccagg

SEQ ID NO: 27750 - DNA, 282 bp, Glycine max
  unsure (1)..(282): unsure at all n locations; Clone ID: 701059215H1
tggtaagatgtgcaattgtacatatagctcttaatgtttgctttgactttgtttcataggctcctttttgattacgaaaatgtggaaganaacgggttttgaagaagaagcagttcaattgatcaactcagatttcagggacctaagtctagctgctaatagactcgcccatcatgccatcaaacttggtggcattggctttggagcctcttttttcggattgtttgctgccattgctgctatttatctgttgattttggatcgtacaaactggaaaacaaa

SEQ ID NO: 27751 - DNA, 98 bp, Glycine max
  unsure (1)..(98): unsure at all n locations; Clone ID: 701059216H1
tgaaaacancgcaccagttctgagctgagctanctagggtttcctctctccctcgtncttcttcacttcccacacaacatacnnctnncngcancang

SEQ ID NO: 27752 - DNA, 281 bp, Glycine max
  unsure (1)..(281): unsure at all n locations; Clone ID: 701059217H1
agnatngtnaacaccatgganaggggaggaagatgttaaggttggaggcacanaaattctcggagaggcaagcactgggtacaggagctaagagtgacaaggactacaaggaggcaccaccagcacccttgtttgagccaggggagttaaagtcatggtctttttacagagctgggatcgcagagtttgtggccacattcttgttcctctacatcactgtcttgactgtcanngggtgtcaacagggcacccaacangtgctcttctgttggcattcaagg

SEQ ID NO: 27753 - DNA, 263 bp, Glycine max
  unsure (1)..(263): unsure at all n locations; Clone ID: 701059218H1
tggcgtcggggtggggaatcacaggaaacaaaggtcgctgctacgatttctggatggatttcagcgagtgcatgtctcgctgccgagagcccaaggactgtgctcttctccgcgaagactacctcgagtgcctccaccattccaaggagtttcaacgacgaaaccgaatttacaaggaggagcagcgcaaactaagggctgcttccaggaaagnccaggaggatggggttaatgaacatcatcattagcacctgnagttaatt

SEQ ID NO: 27754 - DNA, 284 bp, Glycine max
  Clone ID: 701059219H1
cgacagcatcaagcaaccaacacaaactgatttctcatttcgtagcatcaaccgctaactatccagatactaattttcgctttggtttggttcaattctgtccgcagacatggttttcaggccaatgagtggtaattggttagcactgttaagaaacagttatggaggtaaagccgcgtacgcaacctcaacagcaccaaagatgaaagcgtatgcagctgcggctgattacggacacaagcaacaacatgggaagtcggccaaacgggactttgtggcaattt

SEQ ID NO: 27755 - DNA, 284 bp, Glycine max
  Clone ID: 701059220H1
cttccattctatcgtcactcattcccaaacgaaacgaaacgcagcgtttcttcagattcagacccaaactcatggcaaatacgttgcggttatacttgacctgcattcggaacacgctcgaggccgcaatgtgcctccagaactttccgtgtcaagaagtcgaaaggcataacaagcccgaggttgaactcaagaccagccccgaactcctgctcaatcccgttttgatatgccgaaatgaggctgaaaaatgcttaatagaaacatctatcaattcattgcgg

SEQ ID NO: 27756 - DNA, 283 bp, Glycine max
  unsure (1)..(283): unsure at all n locations; Clone ID: 701059221H1
aaggagaaggtgtgggatccatgatgatggatattgaacaagaagatgacactgacactgacgctaaaacttcaacatcaagcattcactacccaacgacacacggtggaataacagaggggttccagcaacactgcttgttaccaaagcttcctcacaacacctcaactcccattacatggacccgctgaaatttgttttgttttttattttgatagtatataccactattttctttgctgttaagcaaggttttctccnatttgggnataaagggnactag

SEQ ID NO: 27757 - DNA, 286 bp, Glycine max
  unsure (1)..(286): unsure at all n locations; Clone ID: 701059222H1
cgagggtttggntttctcttcctcccttggagaaaaagaagagccaccgctgcgacgccgttacgtgcatttttgangtgccgctgtcatgtttgggcgtggtggaccaaggaggatcgataactccaaatattatgatattctcgggatttccaaaaatgccagtgnaagatgaaatcaagaaggcctatagaaaggcggctatgaagaaccatccagataagggaggagatcctgaaaagtttaaggagttaggtcaagcatatgnagttttaagtgntcctga

SEQ ID NO: 27758 - DNA, 282 bp, Glycine max
  unsure (1)..(282): unsure at all n locations; Clone ID: 701059223H1
ctaactttcacacgcagcggcttcttcttccgttttcctgaatncntgtgaacaatggcgacgtacgctgcgatgaaacccaccaagccagggttggaggagtcccaggaacagatccataagataaggatcaccctttcttccaagcacgtcaaaaacctcgagaaggtttgtgcggacttggttcgtggtgcaaaggacaagcgcctcagggttaagggacctgttaggatgcccactaaggttcttcacatcactaccaggaagtccccctgtggtgaa

SEQ ID NO: 27759 - DNA, 285 bp, Glycine max
  unsure (1)..(285): unsure at all n locations; Clone ID: 701059224H1
cttgtctctgccaccaaggagggtctcaaacttgacgagagtgnangatgagaagnagaagcaagaggagttgaaggagaagtttgacaacctatgcaaggtgatcaaggatgttttgggtgacaaggttgagaaggttgtagtctctgaccgtgttgttgattcaccatgctgtctggtgactggagaatacggttggactgcaaacatggaaaggatcatcaaagcttcaagccctaagggacaacagcatgggcaggatacatgtcaagcaagaagacaatg

SEQ ID NO: 27760 - DNA, 280 bp, Glycine max
  unsure (1)..(280): unsure at all n locations; Clone ID: 701059225H1
gagataactagaaacagtgtgatgaaaatgaaggtccttgttttcttcgttgctacaattttngtagcatggcaatgccatgcgtacgatatgttccctctccgaatgaacactggctntggtgcccgtactccggaggtgaaatgcgcaagttggaggcttgctgtggaagcacacaacatctttggctttgagaccattcctgaagagtgcgttgaagcaacaaaggaatacatccatggcgaacaatatagatcagactccaaaacagttaaccaac

SEQ ID NO: 27761 - DNA, 282 bp, Glycine max
  Clone ID: 701059226H1
caacaatggtgccgcaacccattttgcatctaacccttttgtcattaataatctctctgaccacttctttccttggtcgatgccgccgatcccacatttggcttcacccctcttggattatctagtagctcaaacttgcaaatccaaaagccttacgacgttgcagtcaacgagcgctacagcttttcaaatggagtgcacagattttgggtatactccacggacaagcctcatatgcaagggcagcaatacgaagccacgaactgagattcgtatcgctgg

SEQ ID NO: 27762 - DNA, 275 bp, Glycine max
  unsure (1)..(275): unsure at all n locations; Clone ID: 701059228H1
ggtaggaggcatagaactccatgcctgttctgtcatgtaaaaatggtggaatgtcaggggtaatactggaactttgggggaattatggaatttgagtgagtgattgattggcattgcctcctgagatagatgtgccctactccttcttcttctgtacttttcccctaatatcaaaaagttaaatgaaatctacagataagctgtagagttttgtaatgcctctacttttttcctaaattgttgttantatgtatatggaaatataagtgaaagta

SEQ ID NO: 27763 - DNA, 279 bp, Glycine max
  unsure (1)..(279): unsure at all n locations; Clone ID: 701059229H1
gattnataggcccaagagcaaagaaactaanaagattttgagcanaatggcattcacacaatgcntnntnangnancatgccctcancagtccaaccagagntagntnacagcgcttagttgtgagcaccaaacgaaaccacattgtttgcaaggcanaaaagcaggttgtccaagagggtgaggacantantaacattgtctntngcaggttggccctcactgttctnattggtgntgctgctgttggctctaaggttgcacctgctgatgctgccta

SEQ ID NO: 27764 - DNA, 282 bp, Glycine max
  unsure (1)..(282): unsure at all n locations; Clone ID: 701059230H1
gttcaggaccagtcacagttactccattaccacaacggtcctcttctatacggcaaaatccgccgngaacctaancctggtatggtcacttcaaaccatcccaaaaggccatcatnaccgntttcgttacctcactgtcatccccatcgtctcagagcagccagccatctgttgccacgtggtggaaaaccacggagaagtactaccacctgagtcccaagaacaagaaggctgcttcttctctttctctatcactgggcgatcagtttctcgacgagggtt

SEQ ID NO: 27765 - DNA, 280 bp, Glycine max
  Clone ID: 701059231H1
ctcgatctcttgggctcgtcgaattcgaaatctgatctccgacgattgatcccggtagaggctagtacactctccaatctgcaaaaatgcctctcagactcgaaatcaagcgcaagttgcgcaaagatcagagagagtgaaatgtgtggatctacatccaacagagccatggattctggctagtttatactctggaactgtctgtatctggaactaccagtctcagaccatggcaaaatcttttgaggttaccgagttaccagttagatcggccaagttt

SEQ ID NO: 27766 - DNA, 290 bp, Glycine max
  unsure (1)..(290): unsure at all n locations; Clone ID: 701059232H1
ctcgtttgattggacctctctttctctgggagtatcntcccctttatttcntcgtcctccaaacttccaaagccgtttccaagtgtaatggattcgagttccattaacagcaacagtaaggagataaccatggagattccaagcttggttcgactttacaaggatggcaccattgaacgcctccaaaacttcaccaattgtgccacccacgcttcaagatncaacttcttncaaagacgtcgtcatctctggtgaccccctcatctctgctcggtctttccttccaaaac

SEQ ID NO: 27767 - DNA, 283 bp, Glycine max
  Clone ID: 701059233H1
agtcatttgatgaactctgcaaggtcatcaaggacattctgggagacaaagtggagaaggttgttgtctctgacagaattgttgattccccttgctgtttggtgactggtgaatatggatggagtgcaaacatggagaggatcatgaaggcacaggctctgagagacagcagcatgagtggctacatgtctagcaagaagacgatggagatcaaccctgacaatggtatcatggaggagttgaggaagagggctgaagctgataagaatgacaagtctgttaa

SEQ ID NO: 27768 - DNA, 279 bp, Glycine max
  unsure (1)..(279): unsure at all n locations; Clone ID: 701059238H1
ttggactgagtcatctagtccaaatgtgagangcccaccagnacttcctttcagattgtctcaattagatgnaaaactcaaagttggatacaagtcaacaactgctgggaaatttactgatgctcttcgcacttttgtcaatattcttcatacaattccnttgantgtngttgagtcaaggagagatgttgatgaactgaaagaattgattatcatagtgaaagagtatgtcttgggtctgcagatggagcnganaataagggnaattnaggacaatcc

SEQ ID NO: 27769 - DNA, 278 bp, Glycine max
  Clone ID: 701059239H1
tttgttgtgagctataagctagtttatcgtgaggagaatatgaagttgtttgttcttctttgttgctgcagtagttttggtagcatggccatgccatggcgcaggctaccaaaggttccctctccgaatgaaaactggctatggtgagcgttcttcggaggtaaaatgcgcaagttttaggcttgctgtggaagcacacaacatccgagcccttaaaaccattcctgaagagtgcgttgaaccaacaaaggactacattaatggcgaacaatttagat

SEQ ID NO: 27770 - DNA, 276 bp, Glycine max
  Clone ID: 701059241H1
gcatctcgtatctgtctgctacgtacgttggtggaacgaaaagatgatgaaggtgtggaactggtaccaaaattgcctttctgttcatccagtaaagacccaagccatcagttctgccattctctggggcgttggatatctttcagctcagtacatcactcattcagctgcaaaaaaaccccttcaactatctgattcagatgctaaatttacgataaactggaatcgcttggttgttacaagtatgtttggattcggtttcgttggaccagtggg

SEQ ID NO: 27771 - DNA, 125 bp, Glycine max
  unsure (1)..(125): unsure at all n locations; Clone ID: 701059245H1
ctcntcttcaacaacccgncntntgnnctgtggcaantnntcttgaaaggagggaacaacaatggtgangtctataaactttctcctngttntggtctggagctagncttgntgcccttatgnga

SEQ ID NO: 27772 - DNA, 279 bp, Glycine max
  unsure (1)..(279): unsure at all n locations; Clone ID: 701059247H1
gnaatctcgcaacgttatcactaatgtnattnttgctgcnctacgtaagacacgaganaagagaagagaaaagctattgtgatttgtgagtnatatgagtatgtctattatgcatgcnatgtcaatcagaagcagcgctttcttttgctttcaaataaattgctccgattcaaagcaaggccgtggttttggagaaaacactancagtaacaggattaagcaaagcaagggatcagcaaataaacagtctcgccctctatcttctcaggcaccccgttt

SEQ ID NO: 27773 - DNA, 274 bp, Glycine max
  Clone ID: 701059254H1
aagaagaagaaaattgagggaggatgtggctcgagattatcttcggtttggtcatttacagattgttccggcgcttcttgctacgacgacgacgttttggacatcgaaggatcggattcttctgctcttttctccgtcgcggataggctaaaaaactttacggagcaaatgtgtatgtgggtcttcggattcccgatgccgatactgcttctcgacagagcattgatatggttcttctcactaaacaagagctatgggtgatatctgtgaaaaa

SEQ ID NO: 27774 - DNA, 276 bp, Glycine max
  unsure (1)..(276): unsure at all n locations; Clone ID: 701059255H1
ctcgtttgattggacctctctttctctggagtatcctcccctttntttcctcgtcctccaaactccaaagccgtttccaagtgtaatggattcgagttccattaacagcaacagtaaggagataaccatggagattccaagcttggttcgactttacaaggatggcaccattgaacgcctccaaaactcaccaattgtgccacccacgcttcaagatccaacttcttccaaagacgtcgtcatctctggtgaccccctcatctctgctcgtctttt

SEQ ID NO: 27775 - DNA, 275 bp, Glycine max
  unsure (1)..(275): unsure at all n locations; Clone ID: 701059256H1
ccaaaacccaaccaattaggcaataggaacatggtttctcgtcaganaattgagttgaccggaggagttacaggtaggtagctgagcgcaaggcatagaaattgctcttaattaacgtaatgtatatcagaaacctgctgtagtgtgctgtgcgtagtaattcaaaatttgtggtaaagcaaatggcgaaagttttccgtgattttcggtttcttctcttgattgcagctggcgtcttcatctatatccagatgaggctttcgcaacacnatcag

SEQ ID NO: 27776 - DNA, 274 bp, Glycine max
  unsure (1)..(274): unsure at all n locations; Clone ID: 701059257H1
ctcaactgaaagtgcagtgtgtgaaggtagggttttagaaactgatcctacggcatgttcatgtttttggttagcagagtaactaaggattcaatttcacgcaacagncnngnangntgcttcagnagctntctntagtcnactggntttnggangtcctattgaatngctacntnggnctaattgcatttatccaaactgattgggntggatcatttntcagaactcaantcaagagcagtggggcattgtgttgatttncattttttagtna

SEQ ID NO: 27777 - DNA, 271 bp, Glycine max
  unsure (1)..(271): unsure at all n locations; Clone ID: 701059258H1
aactagacaagagatacctgatcctgttgctggatttggtgaacctggtggtcctccaacgcaatttantttcccttcagttcccattggttctggtagtgatcttgttcctgggcctgctgctggagtgtttccttcaaggggtggtcatggcattggtggaagcatgcttgtagggcctaatgacccccgttggtttggtggtgttggtggtattggtggagatcctgcttttcctggaggattgccgggtgttcctcccggtgcgcga

SEQ ID NO: 27778 - DNA, 271 bp, Glycine max
  unsure (1)..(271): unsure at all n locations; Clone ID: 701059260H1
tgaggtgaggtgccaaaatggtgaagatanctcttggtactttcgatgactcttttggtgttgcctctcttanggcttatttggcagagttccatgcaactctgatttnccgtgttcgctggtgttggttcagccatcgcttacaacgagcttacaaaagatgcagccttggatccaacggggctggtggcagtagctgtggcccatgcatttgcactgtttgtaggtgtctccgtcgcagccaacatctcgggtggccatttgaacccag

SEQ ID NO: 27779 - DNA, 280 bp, Glycine max
  unsure (1)..(280): unsure at all n locations; Clone ID: 701059264H1
gcacttggaanatatgtatcatngtcnaagancnattngatgttnnaanangagattgaacagggnagannaaggactttgacagaatctatgattatgatgtctataatgatttgggcaatccagatggtggtgatcctcgcccaatccttgggtgggtctagcatctatccctaccctcgcagggttagaacaaggaagagataggaccaggacagattcccaacagtgagnnacccggcgaggttatgttccaagagatggaaattttggtcacttg

SEQ ID NO: 27780 - DNA, 248 bp, Glycine max
  unsure (1)..(248): unsure at all n locations; Clone ID: 701059265H1
gcctcgccgactcggttgctatcagcgagtgagagtgagtgagtggttctcttgcagcaacaaggtttagtgacaccaaacagacgggaaatgggtcgtggggtcagtgctggtggtggacagagttccttggattatctctttggcagtggggtacctgccagcagtgcaaatggtgctcgcactcaaaatgcaagtnctccttcaccaccggttgataagcaaagtccagcaccagcaccagcacc

SEQ ID NO: 27781 - DNA, 274 bp, Glycine max
  unsure (1)..(274): unsure at all n locations; Clone ID: 701059266H1
aaganaagaccatcaaagtttcacttcagccttatccggtttagggtttcggtttttgacccaacctttgacgtatcgaaaccttaagtttcggatcaggtctgagcaatctggttggtagaacctttggtcttagagagtcaagttttatgtctgaattagacgatcaaattcctactgccttcgatcctttngctgatgcaaatgctgatgactcgggtgctgggtcaaaggagtatgtgcatattcgcgtacagcagcgaaatggaaggaa

SEQ ID NO: 27782 - DNA, 177 bp, Glycine max
  Clone ID: 701059267H1
cagccaaagaagagaacgttcaagaagttcagcttcaggggggtggatctggacgcgcttctggacatgtccactgacgaactcgtgaagatgttcagtgctcgcgcacgcagaaggttccagagaggtctcaccagaaagcccatggccttgattaaaaagctccgcaaagcgaaa

SEQ ID NO: 27783 - DNA, 167 bp, Glycine max
  Clone ID: 701059268H1
ttttgtgcatttttgctgatactaacattggcctatttattgcctccttcttggctcaccgagccatacattgaatcacatactctattctgtgtaacatttgctatgaaataatcagcaaaggtgtaaagtttgtaccatattgaatacaaacttcaaaatacata

SEQ ID NO: 27784 - DNA, 218 bp, Glycine max
  unsure (1)..(218): unsure at all n locations; Clone ID: 701059270H1
aagaatcgcnananagcatcngccgcggcggtgttagtgtaggcggatccntggcggtcgcctgnatcccctctnctgttangtcggtgttcgnnangcnntccgctcggttcgcctgangaagcgaatggggttggaagaatgnggaggtctttgaaaagaggagcaggggattcanaggatcncgttgcgngtnnanagacanacaggtcnactat

SEQ ID NO: 27785 - DNA, 273 bp, Glycine max
  Clone ID: 701059271H1
cacactctttgtgaaaaaggggagtttcttattctttctagacgcttccattgatcggcgatttcttagacatggcggagcatcacgaacacgaggaagtgaagggtgagtccttgttggagaagatttctgggaagatccacgaccacgattcgtcatcttcgtcggattccgacaacgagaaaaccagcgcttctgactccttgaagtcaaaggttttcaggcttttcggcagagaaaagcccattcaccatgttcttggtggcggaaaac

SEQ ID NO: 27786 - DNA, 274 bp, Glycine max
  unsure (1)..(274): unsure at all n locations; Clone ID: 701059272H1
tcctaaaacatctcaatgggttcttcttctattacaacatcgnttngaancatgaccatggctgcgatcgtgctcctgttcacggtctttgnccgtttcctccgccctagacatgtcgataatctcgtacgacagcgcccacgcggacaaggccgccacgttgcgcaccnaggaggagctgatgtccatgtacgagcagtggctcgtgaagcacgggaaggtgtacaacgcgctcggcgagaaggagaagcgcttccagatcttcaaggacaac

SEQ ID NO: 27787 - DNA, 272 bp, Glycine max
  Clone ID: 701059273H1
cgaaaggccatattcaaagccctggagaatctgaagggtaatgcaaataaaggaaaccttgccatcactaattacaaagactaccaaaccatggcattggtaaacttgttaaaagaagctgaagtgatcactttttccacgtttgagtcattgctgaatttcttttctgggtcaacacaagcaaaacgaattagcagctgggctttggtttcaaagctgatgcacaacaaaagggtaggctacgcacaaggagcagatgagaatgagtttgc

SEQ ID NO: 27788 - DNA, 272 bp, Glycine max
  Clone ID: 701059274H1
cttgtggctgctataagtattgtagtgaggtgcttcctcatcttgcccgtgtgtgtgagagagttagagaatgggaaattgccaagccgttgacactgcaactctagtgattcagcaacccaatgggaaagtagaaaggttgtattggcctgtgagtgctagtgaagtgatgaagaccaaccctgatcactatgttgctcttcttatctccaccacattgtgctcatccaaggacaatgaaaattgctcgagtaagagtgacaataccacca

SEQ ID NO: 27789 - DNA, 276 bp, Glycine max
  unsure (1)..(276): unsure at all n locations; Clone ID: 701059275H1
aacaagancaagaagnacaagcaaganaagangnnatnntannnttaggatgcttnaacctcaancgattctctcacttcccatgccncnccctntctagcancctctgcgntncgatttactaaaggttgcatctcatagattcgctttatcagcgactaaaacacagcaatcttcagtnnctaagccanaatccacntccaccgctataattgaaatagntaaccgagccagtgtcataaggcaactggcacaactgtttgatttgtctctgag

SEQ ID NO: 27790 - DNA, 271 bp, Glycine max
  Clone ID: 701059276H1
aaaggctctctcacgcagtcgcagtgagtgaaaaggaaaaccctaattgcggtattctcagtgccttcgagagaaagaaaaaatggcagataatcttgttctccgtggcaccatgcgcgcccacaccgacgttgtgacggcgattgccactcccatcgacaactccgacatgatcgtcaccgcctcacgcgacaaatccatcatcctctggcatcttaccaaggaggacaagacttacggtgtcccccgccgccgcctcaccggccattct

SEQ ID NO: 27791 - DNA, 267 bp, Glycine max
  unsure (1)..(267): unsure at all n locations; Clone ID: 701059277H1
tttgttgtgagctataagctagtttatcgtgaggngaatatgaagttgtttgtnttctttnttgctgcagtagtnttggtagcatggccatgccatggcgcaggctaccaaaggttccctctccgaatgaaaactggctatggtgagcgttcttcggaggtaaaatgcgcaagtnttaggcttgctgtggaagcacacaacatccgagcnttaaaaccattcctgaagagtgcgttgaaccaacaaaggactacattaatggcgaac

SEQ ID NO: 27792 - DNA, 271 bp, Glycine max
  Clone ID: 701059278H1
caagaaccattcgggatagccgtgaagttcaaagcaagtttcccttttatgtcgagtcgcattgcaatgactgcatcggattttgtctttcttggcttcatcaaggtctcgcaaagaacgaggtcgcatccctgaggcagtttttgaaaccattgcatggattattctactacaaaatccttccttccaagcatagtttcttgcccctgaaattcacagaggataatatggcagcattcttcaagtctcgggagcggtttctttcaaagaa

SEQ ID NO: 27793 - DNA, 272 bp, Glycine max
  Clone ID: 701059279H1
cctcgctccgcaccagtttcaccgcacgaatatcttgttgtttggagcgatccgagaaaaactctgtaaacatgttggtttaccaggacctccttacaggtgatgagcttctctctgactccttccgttacaaggaaattgagaatggaatgctgtgggaagttgaggggaagtgggttgttaaaggagcagttgatgtagacattggtgcaaacccttctgctgagggtggaggagaagatgagggagttgatgatgcagctgttaaggtt

SEQ ID NO: 27794 - DNA, 275 bp, Glycine max
  unsure (1)..(275): unsure at all n locations; Clone ID: 701059280H1
gtgcttgtggactcaacaccagggaatcaagctgaaaaggacgctattccaaatcttacactccgaggctttcgctcattgaagcaataancaggcttgttgaagctgantgccctggtgtagtctcttgtgctgatatcttgnctttgactgccagagactctattcatgccactggtggaccctattggaatgttccaacaggacgaagggatgggttcatctctagagcagcagatccgttacgcagccttcctgctccttttcacaacctc

SEQ ID NO: 27795 - DNA, 275 bp, Glycine max
  unsure (1)..(275): unsure at all n locations; Clone ID: 701059281H1
agagaaagtttgtggcggatggagtgttcttcgccgaactgaacgagtttctgacacgtgagntggcggaggacggttactccggcgtggaggttagggttacgccgatgcgcaccgagattatcatcagagccaccagaacccaagccgttctcggtgacaaggnaaggagaattagggaacttacctcagtggtgcagaagaggttcaaatttcccgagaacagtgtcgagctttatgctgagaaggtcaacaacagaggcctctgtgccatt

SEQ ID NO: 27796 - DNA, 271 bp, Glycine max
  unsure (1)..(271): unsure at all n locations; Clone ID: 701059282H1
tttggtttgggtggggtattgcagcgngtcagcgagtcaagttgacgttggacattgacgttggagtcgagttgtgccctaattggctaattcagaaagaattgaattcggggaagagattcacaattctcatctcattgattgcttaccatcaattaggattaggaaggaacgcaaaatcatcaaatcaaataanagnattaatcatgaggagtgggaaaaagtctattcacgcgatcacgacatgggtgcggcggcagccccaaaggtg

SEQ ID NO: 27797 - DNA, 273 bp, Glycine max
  Clone ID: 701059283H1
cttgtctgcgttctcaaacgttgttgcttgctgctgctgcatagacgatcgaaagcatgacaacatcattgtccagcatccttttcaagggaattgcagctcgttctttcaccgcccctctaactaggtcctgttatcatggaatgagatactttgctactgtatcaaatgatcctgacacacatgatgacttcaagccagctaataaacttgagaattccaacatttctttggctgatgttattgagcaggatgtcaaggataatcctgtta

SEQ ID NO: 27798 - DNA, 255 bp, Glycine max
  unsure (1)..(255): unsure at all n locations; Clone ID: 701059285H1
gtttggncaaacacttctgcagaaaacncgcagccattgagaancnntcttcagctctcggattacgttccttgcaaaattcgtgccaagcggggctgtgccantcaccctagaagcattgcagagagggttagaagaactaaaattagtgagcgaatgaggaagctacaagatctggtccccaacatggatnagcaaacaaacacagcagacatgttggacttggctgttgagtacattaaagacttcaaaacc

SEQ ID NO: 27799 - DNA, 270 bp, Glycine max
  unsure (1)..(270): unsure at all n locations; Clone ID: 701059286H1
gaatatcgatttcaattccgccactgaatttcgnnaccagaaaaccattccaacnaagaagatgaacctcgaagaagagggttagttacttctgagtgagtgagtgagttagtggttcctctgangaacggtgaggaccttcaatttctcaagttctcaaccgttcgttttctctttcgttcccctaaccgccgtggangggacaatctgtttcctccgccgccgtcgctagccgtcgcgaganggaccaaggccaccgctccgtcaact

SEQ ID NO: 27800 - DNA, 270 bp, Glycine max
  unsure (1)..(270): unsure at all n locations; Clone ID: 701059289H1
gtaccgtacccgtgagccatgcaccgacagtnggattacatctcttanttttgtccgtggaaggagctttttccggtaaatatttctaaaaacatgatttaatgcattncttaccgggaccagctttttcctgccagatctagccaaatgcattttcctgtaaaaagatcacaaatatgacaatgttgcattcaattttccctaaacaatataaaaaggtcagagtgggactcgctaagttagtagttcgacaatggcggaggtagggtt

SEQ ID NO: 27801 - DNA, 267 bp, Glycine max
  unsure (1)..(267): unsure at all n locations; Clone ID: 701059291H1
ttgatcgagataactagaaacagtgtgatgaaaatgaaggtccttgttttcttcgttgctacaattttngtagcatggcaatgccatgcgtacgatatgttccctctccgaatgaacactggctatggtgcccgtactccggaggtgaaatgcgcaagttggaggcttgctgtggaagcacacaacatctntggctttgagaccattcctgaagagtgcgttgaagcaacaaaggaatacatccatggcgaacaatatagatcagac

SEQ ID NO: 27802 - DNA, 207 bp, Glycine max
  unsure (1)..(207): unsure at all n locations; Clone ID: 701059293H1
caaaactaggttcttgatcggcggtggtcaattttcattgctctttgtttttgatgagtactgtnttttgttttgatggtaagaagagtctgcagatatttcgaatttcacaagcagctatagggttttagtccatttcctttgctgctgagggatgttttaagttgcatttaatttataacgaagtttataaactgtttatggttt

SEQ ID NO: 27803 - DNA, 270 bp, Glycine max
  unsure (1)..(270): unsure at all n locations; Clone ID: 701059294H1
gancaagttccccaaagatgctgaattaattgttgtatgccacaagggactgancatcanttgctgcctgtgaactgctgtataatgctggctataaaaatctgttttgggttcaaggaggatatgaagctgctgaagaagaggatctcattgtagagggcccaatgcctctcaagtttgctggaattggtggcgtttcagaattccttggttggactgatcaacaaagagcagctgcagccaaggaaggntggggatatagattagtgt

SEQ ID NO: 27804 - DNA, 272 bp, Glycine max
  unsure (1)..(272): unsure at all n locations; Clone ID: 701059295H1
cgatcacaaaaatggcggcgaaacttcaaatatttacgggattgccccccgcgccatttcaatcttcttnctcctccactctctgcgtactcaagaagcctctcactacctccttcttcggcaccgcgcgagtggaagttctgaaacttagagtgatgaggattgtgaagcctacgcgtggcggaggtgctctcggtgctcgcatgaacctctttgacaggttcgccagagttgtgaagtcgtacgcaaacgctgtcttaagttcgtttgaa

SEQ ID NO: 27805 - DNA, 279 bp, Glycine max
  unsure (1)..(279): unsure at all n locations; Clone ID: 701059296H1
cgnaaggccatattcaaagccctggaagatctcgaagggtaangcacctnaaggnaaactngncatcactaattacaagagactaccagaccatggcattggtaaacttgttagaaanaagctgaagtgatcactttttccacggttgagtcattgctgaatttcttttccgggtcaacacaagcanaacganttagcagctgggctttggtttcaaagctgatgcacaacaanagggtaggctacgcncaaggagcagatganaatgggttgcnaaag

SEQ ID NO: 27806 - DNA, 270 bp, Glycine max
  unsure (1)..(270): unsure at all n locations; Clone ID: 701059301H1
ttgaaagtaattggtaagctgcaagatggtactttgtttttgaaaaagggccatgacgatgaaggagagctgtttgaattcaaaactgatgaggagcaagtaattgatgggcttgacagagctgtgttgactatgaagaagggtgagatagcattgttgattataggacctgaatatgcttttggttcatcagagtcctcagctggnacttgcagtggttccacctaactccacagtatattacgaggttgagctagtatcatttgagaa

SEQ ID NO: 27807 - DNA, 270 bp, Glycine max
  unsure (1)..(270): unsure at all n locations; Clone ID: 701059302H1
tnnatagtagtagcagcatattcaagatnncatagttgtaatnatagtgttttcnnccgcgcatcactctttctttcgctntctctctcttcctcgttcgcttctctccccgaaatggagcagtctntgctgagaggcgaaagcagtgacccagagtaaccggtcgcggggaatattccggngctccgatgctatcacctacggctccaactacgagaaagccgctgcgttcatcgatctggctgaagatggtgttggtctccctgagga

SEQ ID NO: 27808 - DNA, 266 bp, Glycine max
  Clone ID: 701059303H1
tttttcgtgcctcaaatctttacaatcgataaccacacccatcgcctttattcagaatgtcggaatcaccattcagaccacgagaaaagcttgctgagaagcaaaaatattttcagagtatccacaggcatacctacttgaagggacccatggataagattacatccgtggccataccactggctttggctgcaacgtcaatttacatgattggacgagggatctataatatgtcgcatggaattggaaagaaagaataacctggg

SEQ ID NO: 27809 - DNA, 265 bp, Glycine max
  unsure (1)..(265): unsure at all n locations; Clone ID: 701059304H1
gttactgctgctcttttctcttttcttttctctttagttctctcttcccctnnnnnnnnnnnnnnnnnnnnnnnnngagcttgtttaagcttttcttccattaacatattatcacaatgtgtggtattcttgctgttcttggttgttctgatgactctcgagccaaaagggtccgcgtgcttgagctctctcgcagattgaagcaccgtggccctgactggagtgggctccatcaacatggtgactgctttttggcacatcaacg

SEQ ID NO: 27810 - DNA, 263 bp, Glycine max
  unsure (1)..(263): unsure at all n locations; Clone ID: 701059305H1
gttcggtgagcggggttggacatgtacaaacattaagtggttccggacagcttcataacaataatttcagatcctttccacctagtgggataattnntagattgaacactcctgctggtttgaatgtgcatggatttcctctggagtacttcaattgagtcaatcacaaaatttaaacaatgccaatgatcatcataaattccagtcagtcattgttcctgttaatcagaatggtgttcaggaatgacagtgtctgtaggctt

SEQ ID NO: 27811 - DNA, 268 bp, Glycine max
  unsure (1)..(268): unsure at all n locations; Clone ID: 701059306H1
cacgaactcgccgagtcgaagtgagtcagtctgactcggcggcgattctgttctccnccgggaaccacggnnccgcgtgaagggcgtgctccttacgcaccgcaacttcatcgcgctgattggagggttctatcaccttagaatggtggtggatgatgatccgcacccggtgtcgttgttcacgctcccgctgttccacgtgttcgggttctntatgctggttagggccatcgccgtcggagagacgcttgtgttcatgcataggttt

SEQ ID NO: 27812 - DNA, 269 bp, Glycine max
  unsure (1)..(269): unsure at all n locations; Clone ID: 701059307H1
aaaacatctccagtgggttcttcttcttctattacaacaacgtccgnaagaccatgaccatggccatggccacgatcctgctcctgttacacggtcttcgcggtttcatcggccctagacatgtcgataatctcgtacgacaacgcccacgccgccacgtcgcgcaggacagaggagctgatgtccatgtacgagcagtggctagtaaagcacggcaaggtgtacaacgcgctcggagagaaggagaagaggttccagatcttcaagga

SEQ ID NO: 27813 - DNA, 267 bp, Glycine max
  Clone ID: 701059308H1
gtttcgtggcagtggcgagtgaagaagctatgcctgatgagtgagtcatttttttctctctggtgggtcccatcctcttctgctctgagaacctttataagtgttatatgagtcattgagaagtgaccccaggaaaaagaaaagaaaagaaaaacttcacttcacttgcatgccaaatgagaacaacctcttcttagaataatttcctcggtgtttaagccttgtcgatttccgaacaccaatccgagttaattaaacaatgagagt

SEQ ID NO: 27814 - DNA, 264 bp, Glycine max
  Clone ID: 701059309H1
ttggagactgtttccaaggagtggggaattgaggctatgccaacctttctgttcttgaaagaaggcaagctggtggacaaggttgtgggtgccaagaaagaggagctgcaattgacaatagccaaacatgccgcaattgctgctgcttgaagtgccatatgaatatgttaagaataatagactattgtcttcgagtcagtttgcttttattactattaatctgttattgggtctgtttgcatgatttcagaacggatttagagt

SEQ ID NO: 27815 - DNA, 263 bp, Glycine max
  unsure (1)..(263): unsure at all n locations; Clone ID: 701059310H1
ggttttcaatttcgattcattcgttaataattaaagatgtttgggagggcaccgaagaagagcgataatacgaggtactacgaaatcctcggcgtctcgaagaacgcttcgcaggatgatctgaaganggcttacaagaaagccgccatcaagaatcaccctgacaagggcggtgatcccgagaagtttaaagagctggcacaagcatatgaggttctgagtgaccctgagaagcgtgagatatatgatcagtatggtgaaga

SEQ ID NO: 27816 - DNA, 263 bp, Glycine max
  unsure (1)..(263): unsure at all n locations; Clone ID: 701059311H1
cgccgttgccaaaaaatagatacttgtttcttattcacgtagtattttaatacttagtcaaacacgatagcatgaacccaaaatttttgacaattgtttctcaacaagagagattttgattttagcagaaaagcaatggcaagtgcgntgggtagcagagttgaatctgttcgaaactctcacttactaagcttttcgctcaactccattagatccttgagttcttcttcttcatccgccgtttcttctgctcagaaccctaa

SEQ ID NO: 27817 - DNA, 259 bp, Glycine max
  Clone ID: 701059315H1
aaggaggagcacagcactacacagctccgaaataggagggggagaaattttgtatgcgttggatttcgtagatctgaataaatgacaaatgtatcattcaaagaattttcctagtgcaagtttaattggagttaattcattagttcatggtcagcacatagattgtggtggcagcacaatggatcctggcagtggaggaaacagtcttggcaacaactctaatctcgcttcaaaacaacgtttacggtggacacatgaa

SEQ ID NO: 27818 - DNA, 262 bp, Glycine max
  unsure (1)..(262): unsure at all n locations; Clone ID: 701059316H1
aaatttgaattggtgtcaggttatttgagtacctatccgacaattctctaaacttccctgttattcaccatattcagttcccaaatgggattcacagagatgacttgntaattggtgctggttctgatgctggagcccttctggtggatgggcttggagatggacttcttttggaagcgccagacaaggattttgaatttattagaaacacttctttcaatttgttgcaaggctgcagaatgagaaatacaaagacagagtt

SEQ ID NO: 27819 - DNA, 263 bp, Glycine max
  unsure (1)..(263): unsure at all n locations; Clone ID: 701059317H1
gnctcggttgctatcagcgagtgagagtgagtgagtggttctcttnccangcaacaaggtttanngacaccaaacagacgggaaatgggtcgtggggtcagtgctggtggtggacagagttccttggattatctctttggcagtggggtacctgccagcagtgcaaatggtgctcgcactcaaaatgcaagtgctccttcaccaccggttgataagcaaagtccagcaccagcaccagcaccagcacctgcacctgcagcagc

SEQ ID NO: 27820 - DNA, 264 bp, Glycine max
  unsure (1)..(264): unsure at all n locations; Clone ID: 701059318H1
caactccaaggcgaccagcgcaagancgtatcccatttcctcgttcaggccggtcttgtccggaaggaccaggtcaagattcatggtttttgatttaacgattggtcttgtttatnnnnnnnnnnnnnnnnnnnnnnnttgaagttgttgagttttgaaaagtttggattgtctcttttgtttgatgagtggtgttggaataagtttggtttggttttccaatttttaatgattggatttcatggatgttgttagtgaacttga

SEQ ID NO: 27821 - DNA, 266 bp, Glycine max
  unsure (1)..(266): unsure at all n locations; Clone ID: 701059319H1
gctagtttatcgtgaggagaatatgaagttgtttgtnttctttgttgctgcagtagttttngtagcatggccatgccatggcgcaggctaccaaaggttccctctccgaatgaaaactggctatggtgagcgttcttcggaggtaaaatgcgcaagttttaggcttgctgtggaagcacacaacatccgagcgnttaaaaccattccctgaagagtgcgttgaaccaacaaaggactacattaatggcgaacaatttagatcagac

SEQ ID NO: 27822 - DNA, 265 bp, Glycine max
  unsure (1)..(265): unsure at all n locations; Clone ID: 701059320H1
ctcttctcttgcggctagngttttagcgcanttccttctagatttaaggnagatgggtaaggnaaaggttcacatcagtattgtggtcattggccatgtcgactctgggaaatccactaccactggtcacctgatttacaagcttggaggcattgacaagcgtgntattgagaggtttganaaggaagctgctgagatgaacaagaggtctttcaagtatgcctgggtgctggacaaacttaaggctgagcgtgaaagaggaatc

SEQ ID NO: 27823 - DNA, 265 bp, Glycine max
  unsure (1)..(265): unsure at all n locations; Clone ID: 701059321H1
cctgaacaaacccacctcaattgcttttgcaattatttttccttttacctctctaatggcactgtccaaagaccaaagaattccacatgattcaagcttncagcagcaaggttcaaaactgtgttttcagtgagactagtgtggagattacctccatgactgttcatagggtcaatgagtaccacaaatctgtgttagaagaggaagatggctcacaaactactaatggtctcagcaatgattcagctgtaacacgttctcctcc

SEQ ID NO: 27824 - DNA, 264 bp, Glycine max
  unsure (1)..(264): unsure at all n locations; Clone ID: 701059322H1
acgacatatttatattcggcatagataacaccgtactctctaatatcccatactatgaaaaacatggatatggggtggaggaatttaatgaaaccttatatgatgaatgggttaacaagggcgacgcaccggcattgccaganactcttaaaaattacaacaagctgttgtctcttggcttcaagattgtattcttgtcaggnagatatcttgacaaaatggccgtaacagaagcaaacctaaagaaggctggcttccacacat

SEQ ID NO: 27825 - DNA, 265 bp, Glycine max
  unsure (1)..(265): unsure at all n locations; Clone ID: 701059324H1
gagtggccaaggaagagaaaaaggagaatacagtctcaagaactacttgcaagtncaaggctgttgttacatccttgaagaaccctgcttggctttgaacatcattagctttagatttatttgatgaaaaagattaataaataggctccaataataaagataattaaattgggtttattccattcaaagtatctgataatgatgaatatgatctattttctttttctgtttttgcccctgcattttatgggtagcgcgaaatata

SEQ ID NO: 27826 - DNA, 259 bp, Glycine max
  unsure (1)..(259): unsure at all n locations; Clone ID: 701059325H1
ggatttggaccagtggatctccaaggtgaaggatggccagcaccttctcgaagaggagcttcaacttctttgcgaatatgttaaagagatcctattgaggagtcaaatgtgcagcctgtcaacagnccagtgacggtttgtggtgatattcatggtcagtttcatgatctaatgaaacttttccagactgggggtcatgtgccggagacaaattacatttttatgggagactttgttgatcggggttacaatagtctga

SEQ ID NO: 27827 - DNA, 261 bp, Glycine max
  Clone ID: 701059326H1
caaacacagagaaagagagtgaataaatccagcattgttctgttctctgcaacattctccactctcaaccatggcttcaaagcttttactcatcactgtcttcgtttttgatttgattgcttttggacttgccgtggctgctgagcagagaagaagcaccgctagtgttgtgacggacaatgaaaagaattataattactgtgtctataactctgatatagcaactggctatggtgttggagcatttttgtttctcttggt

SEQ ID NO: 27828 - DNA, 100 bp, Glycine max
  unsure (1)..(100): unsure at all n locations; Clone ID: 701059327H1
ggaagagatcatataattgctttgcttatnctgncgaggntttgatggaagaacattctcactccattggctgttacccatctccttccagcacaacata

SEQ ID NO: 27829 - DNA, 261 bp, Glycine max
  unsure (1)..(261): unsure at all n locations; Clone ID: 701059329H1
cgaggcgaagagaagagaaaaattaagatggaggggaaggagcaggatgtgtcgctgggngcgaacaagttcccggagagacagccgattgggacggcggcgcagagccaagacgacggcaaggactaccaggagccggcgccggcgccactggtncgacccgacggagtttacgtcatggtcnttttacagagcagggatagcagagtttgtggccacttttctgtttctatacatcactgtcttaancggtncatggga

SEQ ID NO: 27830 - DNA, 241 bp, Glycine max
  Clone ID: 701059330H1
tctcacactttctcccgcgcacgtgcggaatatccactagcttcgtggaggtgacggatcttgacatggttgatgctgccatagtagaagggaaaacaaaagtgctttacttcgaatctgtttccaaccccacccttacggttgcgaacatacctgaactgtgccacatggcacaccggaagggagtgacggtggtggtggacaacacgttcgcgcccatggtgctttcgccagcgcgtct

SEQ ID NO: 27831 - DNA, 262 bp, Glycine max
  unsure (1)..(262): unsure at all n locations; Clone ID: 701059331H1
cagcactgtaacctcacacctctccaaaatccgttccccctttctttcaaacccttttttttttcttccaacaaatcagcgatnnccgacgacgtcggtggtgccggcgaatcggcggcgtgcggcggcgaaccccgccgaggatatggacttcgagacgacggagggcgtgaaggccatcgcgagcttcgaggagatggggatcaaggacgatctgctccgcggaatctaccagtacggcttcgagaagccctcagccatt

SEQ ID NO: 27832 - DNA, 200 bp, Glycine max
  unsure (1)..(200): unsure at all n locations; Clone ID: 701059332H1
tnggaggcgccgcactccactccactccaatcaatcagatactangcgatgncggaggaagcgaaaggtagcaccganaatcttctgtatccgccgagcccccgctgaagcaacaccaaccaaaacccgaaaatgccgctcaggaatacgaagaagaggtcgaagaggaagttgaggaagaagaggtagaggaagaggtc

SEQ ID NO: 27833 - DNA, 267 bp, Glycine max
  unsure (1)..(267): unsure at all n locations; Clone ID: 701059333H1
cgcgtcgctccgcaccagtttcaccgcacgaatatcttnttgtttggagcgatccgagaaaaactctgtaaacatgttggtttaccaggacctccttacaggtgatgagcttctctctgactccttccgttacaaggaaattgagaatggaatgctgtgggaagttgaggggaagtgggttgttaaaggagcagttgatgtagacattggtgcaaacccttctgctgagggtggaggagaagatgagggagttgatgatgcagctgt

SEQ ID NO: 27834 - DNA, 265 bp, Glycine max
  Clone ID: 701059334H1
gaaagatcatgaagccattcaagatactccatatgcatcttcttcattctttactcttattcaatatcatattatgttcttctataccccagcataatcatgcaaacttctgtgggaatatcaaaactcaaacacctttcttggattccaattcttctatgttagacaacatcaccttgtgcatatctcagaatctctacttgagaacatcccttggcctttttcatgtttcatcacttgacaacaatggtagattactaaccat

SEQ ID NO: 27835 - DNA, 265 bp, Glycine max
  unsure (1)..(265): unsure at all n locations; Clone ID: 701059336H1
anactnctnttctttcaggagccaccatggccgagactcggagatcnacgggcaccgttaagtggttcaacgcgcacaaaggtttcggattcataactccccaagatggaaccgatgatctcttcgtgcacttcacttccatccgatccgacggctaccgttctttgtccgacggtcagtccgttgagtttctcctcgattacggcgacgacggccgcaccatggccgtcgacgtcaccttcagccgttagatctcgtcttcccg

SEQ ID NO: 27836 - DNA, 263 bp, Glycine max
  unsure (1)..(263): unsure at all n locations; Clone ID: 701059337H1
ggcatgaaaagtgtacagataattatcactattggcagaacttgaatgaagaccaaactttgtggacagcagggaccctgtcacctggnttnatcaccttctactccacaaccaagacactggacaaatcctggcacgtgcttgggctaggatacaatccaagcattagcatggatgagatcagcaatgctgcagtcattcattacaatggaaacatgaaaccttggcttgatatngctttgaaccaatacaaaaatctttgg

SEQ ID NO: 27837 - DNA, 263 bp, Glycine max
  unsure (1)..(263): unsure at all n locations; Clone ID: 701059339H1
gctcatcaagtccaagaaccaacctaccttttgcaatctcnattcaatggcgtcctctctcattgcgaangcttcctctcctcttccctcctctccaggtccctccttcgccccgccgcttccgcttcccaccgctctttcaacaccaacgccatgcgccagtatgacaaccgcgccgacgaccacagcaccgacatcgatcgtcactccgaacgctctttccctagcactgcgcgccgcgacgatatcttctcagatgtgtt

SEQ ID NO: 27838 - DNA, 260 bp, Glycine max
  unsure (1)..(260): unsure at all n locations; Clone ID: 701059341H1
ganattgcctctttcaagaagcatctgagtgtttactattttgtactatatttatatatagtcactcaagcttctaggatttctgcctgctgcatcaaaatgggaagcaacttgaggtttttgagtctttgcctcttggcattgattgcatcaactcatgctcaacttcagcttggtttttatgctaacagttgcccaaaagcagagcaaattgttttgaaatttgttcatgaccatatccacaatgctccatcactagc

SEQ ID NO: 27839 - DNA, 260 bp, Glycine max
  Clone ID: 701059342H1
agcagcagctttgaacgacgcagaaggttcatccaatctccgaatcctttaatcgcattgcaaccatgtcgaggagaaaggtcagagagccaaaggaggaaaacgtgactcttggcccagctgttagagatggcgaacatgtctttggcgtcgctcgcatatttgcctcctttaatgataccttcattcatgtcactgatctgtctgggagggaaacgcttgtccgcatcactggtggaatgaaggttaaggctgacaga

SEQ ID NO: 27840 - DNA, 260 bp, Glycine max
  unsure (1)..(260): unsure at all n locations; Clone ID: 701059343H1
aannaactctttcttttcttcnttcgctcgttgttctccctcgcgtagatcganaatggcggagacagagacgtttgctttccaggctgagatcaaccagctcctcagtctcatcatcaacaccttctactccaacaaggagngcttccttcgtgaactcatcagcaacgcctccgatgctttggacaagattcgatttgagagtttgacagataagagcaagctcgatgctnnnccagagttgttcattcatattattc

SEQ ID NO: 27841 - DNA, 220 bp, Glycine max
  Clone ID: 701059345H1
accattgttgtattgttgccggcagtggtgtggcgactttgttgttttatttagagtaggtatacgccatgatttaataatttaagtctgagagctttttgttgctaaagagattcaacgatcttataaccgggtttaggttttggccattccattaataatggtcccttttaactgtgtatggtttcacgtaatgtaattgcagggtgttgtacccttc

SEQ ID NO: 27842 - DNA, 258 bp, Glycine max
  unsure (1)..(258): unsure at all n locations; Clone ID: 701059346H1
gcaagtgttgttgctgattcagttcgatccagtcttgtctctttatctctgcagaancctaaaggataggttttttccgggcaccaaaatttgtggggttcatcaaagttcgntcctttctgcaaaataaatttggcccaaaagtataatcaatactttgtatttcattttggataatgattgtggaggacgaaaattgtggtgttggttctgggggaggaggaagatggttgcggggttttggaagcttgattagga

SEQ ID NO: 27843 - DNA, 260 bp, Glycine max
  unsure (1)..(260): unsure at all n locations; Clone ID: 701059347H1
ctgcatttnccagagacgccctgagaganagaattggaaggttgcnacgagtgatgatatacacatattgtgacggtagtgaaatcgaggaaaaagaggtagcaatttgcgagttgcaatgagtaacgaaaaggctccttcatcagcttcttcgagtagctacgagttgancaaaggcatcaatggcctcgacaaggttattcttcgcgacgcacgtggtagctccgctgaggtgtacttgtacggtgctcacgtgactt

SEQ ID NO: 27844 - DNA, 259 bp, Glycine max
  Clone ID: 701059348H1
gaatatgttgctgtggagaatattgaaaacaaatacttacagtgcccccttataacatcgatttgggtctatggaaacagttttgaatctttcttggtggcagtggtggtccctgaaagaaaggcccttgaggattgggcagtgaagcataattctacagatgatttcaaatctttatgtgaaaatccaaaggcaagaaaatacattttggatgagctcaacaacactggtcagaaacaccaacttagaggttttgagc

SEQ ID NO: 27845 - DNA, 259 bp, Glycine max
  unsure (1)..(259): unsure at all n locations; Clone ID: 701059354H1
gtttgttgttgtnactcgttcttcttcctntgttgttctgngtntgtnnttgttttttctctcacctgaaaatgtcttgctgcggtggtaactgtggttgcggaagctcctgcaagtgcggcaacggctgnggagggtaagattttcgttgtaacattgtttttttcttgggaaaatagagtttttccgggaaaatnttctttttggatttttaattgttattatggttacccttttggttcaattgcattcaaaaact

SEQ ID NO: 27846 - DNA, 261 bp, Glycine max
  Clone ID: 701059356H1
cacacactctcatagctgtagcggcgacactaagatcggagaaagaatggcgaaaacgacgtcgttgctgctctttacactgctcctcttcggaaccctagctctcatccaggcgaagaaatcgaaggaggatttgaaggaggtgacccacaaggtttactttgatgttgagattaatggaaaagaagcaggtcgtattgtaatgggtcttatgggaaggctgttccaaaaactgcagaaaacttccgagcactttgcaca

SEQ ID NO: 27847 - DNA, 258 bp, Glycine max
  unsure (1)..(258): unsure at all n locations; Clone ID: 701059358H1
agagtttgttgtgagctataagctagtttatcgtgaggagaatatgaagttgtttgttttctttgttgctgcagtagttttggtagcatggccatgccatggcgcaggctaccaaaggttccctctctnaatganaactggctatggtgagcgttcttcggaggtaaaatgcgcaagttttaggcttgctgtggaagcacacaacatccgagcgnttaaaaccattcctgaagagtgcgttgaaccaacaaaggacta

SEQ ID NO: 27848 - DNA, 256 bp, Glycine max
  unsure (1)..(256): unsure at all n locations; Clone ID: 701059359H1
gtttgtggtctcactagctagaaacnacatcactacacacaaatggcacatactttatccactaatctggctcttaaccttcccacatcgaggtatntccgtccctcgagaccaacccaggtgaagcccatgaaggtcatgatgggtgatgcaagagaaaagctagaacatgtccatgtgcctaaacacaacaagcaccaccagcccctccccaaaaacaaagttgctcctaccccacccgtaggttgtgggatcg

SEQ ID NO: 27849 - DNA, 172 bp, Glycine max
  unsure (1)..(172): unsure at all n locations; Clone ID: 701059360H1
ggcanaatatgaagttgtttgtcttctttgttgctggagtagttttggtagaatggccatgccatggcgcaggctaccaaaggttccctctccgaatganaactggctatggtgagcgttcttcggaggtaaaatgcgcaagttttaggcttgctgtggaagcacacaacat

SEQ ID NO: 27850 - DNA, 255 bp, Glycine max
  unsure (1)..(255): unsure at all n locations; Clone ID: 701059361H1
gccatttatgacatctgcaggcgttcactggncattgagaggccantgctacaccntcncttaatcgtttagtttctcaggtgatatcatcactgactgcttncctgaggtntgatggagccttgaatgttganctcaangaattccagaccaancttgtgcntaccccaggattcattttatgctttcatcttatgctcctgtaatttcagccgagaaggctcaccatgagnagctatcagttggtganatcac

SEQ ID NO: 27851 - DNA, 254 bp, Glycine max
  Clone ID: 701059362H1
caaagattttgtgaattttggtcttgaacactggggttctgacacaaaaggggttgagacaacaaggcggttcttgttggaatggcttagctacactttcaggtatatacctgttggtcttttggatgtggttccacaacgattaaactggcgtccaccatcttactatgggcgtgatgagcttgagacactaatggcctcagactctgctgccgattggatacgaatatcagagatgctacttggcaaggttc

SEQ ID NO: 27852 - DNA, 260 bp, Glycine max
  Clone ID: 701059364H1
ctgatctttcttttgacaccaaaattggggagttaacaaaatccaatgctggactgagcttcaccaaagatgacttgattgcctcattgactctgaatgacaaaggtgatgctttgaatgctgcatattaccatgtagttaaccccttgaccaacactgctgttggtgctgaagtgacccatagattcttcaactaatgagaacactctcactcttggtacccaacatcaattggatccattgaccacattgaaggcacg

SEQ ID NO: 27853 - DNA, 233 bp, Glycine max
  unsure (1)..(233): unsure at all n locations; Clone ID: 701059365H1
attgattagaattgacnaataatgtctggttcngaggacgagggaggagaagagtacctcttcaagatcgtcataatcggagactccgcggtggggaaatcgaacctgctgtcccgctacgcccggaacgagttcaacatgcactccaaggccaccataggcgtcgagttccagactcagtgcttggaaatcgactccaaggaagtcaaggctcagatttgggacancgccgg

SEQ ID NO: 27854 - DNA, 176 bp, Glycine max
  Clone ID: 701059367H1
ctttaatagctctgcaaaatctttagtctgctaaagtagttgtgacgaatctctttttgttggtttagactttgtagtgtgcatgtataagaacttcatatcttgaatacttttaattatatattttgtttgtcggtgtttactgttttttggtattaagattcacgtagttgcgg

SEQ ID NO: 27855 - DNA, 259 bp, Glycine max
  unsure (1)..(259): unsure at all n locations; Clone ID: 701059369H1
gncactctanaganaatggcngtgcctctactctcgaagaagatcgtgaagaagagggtgaagaanntcaagaggcctttgagtgacaggnaaatntctgtcaagaacaaactggcgcagaccaaagggtatcgattcccgtgtnaggagaaagttcaagggatgcactttgatgccaaacattggntatggnncaganaagaagacccgccactatctcccgaatggngcngnaanactgtggnncacaatgtgaagg

SEQ ID NO: 27856 - DNA, 258 bp, Glycine max
  unsure (1)..(258): unsure at all n locations; Clone ID: 701059371H1
agagatccatcgatcaattaatttccaatggccgatcagctcaccgancnaacagatctctgagttcaaggaagcctttagcctcttcgacaaggacggcgatggttgtattaccaccaaggaacttgggactgtgatgcggtcgcttggncagaacccaactgaggctgagctgcaggacatgataaatgaggttgatgctgatgggaatggtaccattgatttcccagaattcctcaatctcatggcgcgcaagat

SEQ ID NO: 27857 - DNA, 88 bp, Glycine max
  unsure (1)..(88): unsure at all n locations; Clone ID: 701059372H1
gcttccgtggcagtggtagttgccaaactagtancaagaagtaagtcacgtttttcctccgttttcattccaccancaacatcancgc

SEQ ID NO: 27858 - DNA, 255 bp, Glycine max
  Clone ID: 701059373H1
aatggttctatttgttgtgtgtctctttctcctttcatcttggtatcgggttgcccggaacagcatatgccaggaggcagcatttatggctcagtggtgcaaacgaagtagacagcaaaactttttcaagagctattcttgccaagagtgctcatatacagacagtggtgtgtattcctgtgttggagggcgtcgttgagttgggcacaaccgataagatcgaagaagacctaaatttcatccaacacataaaga

SEQ ID NO: 27859 - DNA, 257 bp, Glycine max
  unsure (1)..(257): unsure at all n locations; Clone ID: 701059374H1
caacttttcttcattttctctcttcctctcaccgagtcacgnactcgcctcgactcgtacggactccgatcccccccgagtcacactcagccagcaccaccgcccgatccgacgatgtctcgcgcctcttccgccgcctccggcgagatcatgctgttcggggtcagagtcgtcgtcgattcgatgaggaagagcgtcagcatgaacaacctctcacagtacgaacatcctttagacgccaccaccaccaacaacaa

SEQ ID NO: 27860 - DNA, 237 bp, Glycine max
  unsure (1)..(237): unsure at all n locations; Clone ID: 701059375H1
tagaaacagtgtgatgaaaatgaaggtccttgttttcttcgttgctacaattttngtagcatggcaatgccatgcgtaccgatatgttccctctccgaatgaacactggctatggtgcccgtactccggaggtgaaatgcgcaagttggaggcttgctgtggaagcacacaacatctttggctttgagaccattcctgaagagtgcgttgaagcaacaaaggaatacatccatggcg

SEQ ID NO: 27861 - DNA, 254 bp, Glycine max
  unsure (1)..(254): unsure at all n locations; Clone ID: 701059377H1
aanaaatcaaagccatggccanctccaanttgnctattgttctctccgtctccctagccttctttttggtgctacttagcaaggcacactcgaccgataccgtntctttcaccntcaacaagttnaacccagtgcnaaccaancattatgggancaaaaagatgctagtatttcatnctctggggtgttacanancaccaaagttggcagcaacggcgtgcccacctcgggatctctcggtcgtgcnctttacg

SEQ ID NO: 27862 - DNA, 255 bp, Glycine max
  unsure (1)..(255): unsure at all n locations; Clone ID: 701059378H1
ctgaaattttaattgacttttctcccctcataaaaaaaacctaccaatggctcccgcaaaggcagagaagaagcccgcggagaagaagccggcagagaaggccccagcggagaagaagccgaaggggagaagaagatatcgaaggaaggaggaagcgnnnnnnnnnnnnnnnnnnnnnnnnnnagcgttgagacctacaagatctacatcttcaaggtgttgaagcaagtgcaccccgacatcgggatctccagc

SEQ ID NO: 27863 - DNA, 258 bp, Glycine max
  unsure (1)..(258): unsure at all n locations; Clone ID: 701059379H1
caagaacactctcttgaacattcatggatccagtgagcgtgtggggtaacacgcccttggcgacggtggatcccgagatccatgacctcatcgagaaggagaagcaccgccaatgccgcggcatcgngctcatccgcctccgagaacttcacctccttcgcagtcnccgaggcccctcggcagcgcccttcaccaacaaatactccgagggcatgcccggcaaccgctactacggcggcaacgaattcatcgancaga

SEQ ID NO: 27864 - DNA, 256 bp, Glycine max
  unsure (1)..(256): unsure at all n locations; Clone ID: 701059380H1
cgctgagaatccacaagatgctgcagaatctcttattccacttttggaggaagcngaagctgctgttcctcaggagtttcaccccaggacgccagttaaacttggagcaactgcaggtttaaggcaattggaaggggatgcttctgataggatattgcaggcggtcagtgacatgctcaagaacagaagcacactgaacgttggggccgatgcagtttcagtgttgagtggaaaccaagaaggagcttatcaatgg

SEQ ID NO: 27865 - DNA, 257 bp, Glycine max
  Clone ID: 701059383H1
ttaatttgcgtctatattcattttggcatcgaggttgaatctcatcggagagagaaaaaccataaccatgtctggaagaggaaagggaggcaagggtctcggaaagggaggagcgaaacgacaccgtaaggttctgagggataacattcagggcataacgaagcccgcaattcgccgtctcgcgagacgtggcggcgtgaagcgtatcagtggtctcatctacgaagaaacccgcggtgttctcaagatcttcctcg

SEQ ID NO: 27866 - DNA, 258 bp, Glycine max
  unsure (1)..(258): unsure at all n locations; Clone ID: 701059384H1
cttatcctatcggaaatcttactcacagcagagccaccaaatactngtgttgtgtcgattctctgccatccatgatccatcacttacaaactagtactacttgctttcaataaaaacaaaaacacactctttggtgaccacaacaacaataacaatggctgcctcactacaagctgcagctaccttcatgcaacccaccaaggttggcatagcctctcgcaacctcaaatctacacaatgcatttctaaggcttttgg

SEQ ID NO: 27867 - DNA, 258 bp, Glycine max
  Clone ID: 701059386H1
ccaagttcaaagatgaagatgatccacgttcttttcctctttgctcttgtctcgttcacttcccatgcttctgtcaatgatttctgtgtagcagacctaaaaggtccagatagcccttcaggctatcagtgcaagccacctaacacagttcacagtggatgactttgtgttctctggctttgtagctggaaacaccacaaacactttcaatgctgcattaacctccgcatttgttactgattttccaggtgtgaatgg

SEQ ID NO: 27868 - DNA, 258 bp, Glycine max
  unsure (1)..(258): unsure at all n locations; Clone ID: 701059387H1
ctcggttctgccttcacaaaaaaattatcnagatcccctttttctcctaagaaaagccatggctaagggtcccggtctctactctgacatcggcaagaaagccagggatctgctgttcaaggactaccacagtgaccagaagttcaccatcaccacctactcacccactggagttgctataacagcatcaggaaccaggaaaagtgaactgtttgtggctgatgtcaacacccagttgaagaacaaaaacatcactac

SEQ ID NO: 27869 - DNA, 256 bp, Glycine max
  unsure (1)..(256): unsure at all n locations; Clone ID: 701059388H1
ctctttgtcttctctgacacatttggggccttgttgagtgtgtttttgcaaganggtatggcgaaggacgttgaggttgctgagcgtggctccttctctgggaaggactaccaggaccctccaccagcaccactcattgatgctgaggagctcacaaagtggtccttttacagggctcttattgctgagttcattgccactttgctcttcctctacattactgtgctcacagttatagggtacaagcaccanacgg

SEQ ID NO: 27870 - DNA, 255 bp, Glycine max
  Clone ID: 701059389H1
ctattcttacaagttacatccattgagaaacatgaaggtctcccccttagcattttcaatcctttttttgtccttcaccataggactcttcattggcattgcttcagcagcacaagaaccagtgcttgacacctcaggccagaagctgagaacaggtgtcaagtactacattctaccagtcttcagaggcagaggtggaggcctaacagtttcaagcagtggcaacaacacatgccccctctttgtggtgcaaga

SEQ ID NO: 27871 - DNA, 82 bp, Glycine max
  unsure (1)..(82): unsure at all n locations; Clone ID: 701059390H1
cacttgtgttggatgtaatcaagagatcattttatcanataaatnntgccaaatggcatgttcgaagtaaaacnnaaanaaa

SEQ ID NO: 27872 - DNA, 252 bp, Glycine max
  unsure (1)..(252): unsure at all n locations; Clone ID: 701059392H1
ctctttgatacccttttgntctttttggtgctttaatttgcactagcaagggggttggttttatttctgtttgcttgcaacaatggctgtggctaataagttactttctgttttgatcattgccctcattgccatttccatgcttcaaacagtggttatggcatctcatggancatggaggccaccactacaatgacaagaaaaaatatggacctggcagtctcaaaagcttccaatgcccatcacaatgct

SEQ ID NO: 27873 - DNA, 250 bp, Glycine max
  Clone ID: 701059394H1
tcattgctgacctttctgttggtttggctacgggtcaaattaagactggagctccatgcaggtctgagcgtcttgctaaatataaccagctcttgagaattgaggaggagcttggtgctgaagcagtgtacgccggagctaacttccgtacccccgttgaaccctactaaagttttcaagtggaaaaaacctggagatccacacgagtttgagcattgagatttgggtgcgcggtttttggtgtgatata

SEQ ID NO: 27874 - DNA, 255 bp, Glycine max
  Clone ID: 701059396H1
gagattggaccccaggattcagagtttgcgggaagctttgtgactttgcctcactcgccgcatgtcaaccataacaacatcaccagagcttctttcaaattgccattaacgtatcagttgaaagacttgggagtaacaaaagacgatgatagtatttctgtcacactggctcccatatatggagacaagcctgttacaattaaggacgtaaggataaagcgtgtttatcctgaggtagacgatgaataaatctaa

SEQ ID NO: 27875 - DNA, 291 bp, Glycine max
  unsure (1)..(291): unsure at all n locations; Clone ID: 701059401H1
ttaccagtttgcgatctcattacaatctccccagtttctaatctcagctaagaaaaaccaaaagatgtctctgattccaggtttcttcggtggccgaaggagcaacgtgttcgatccattctcactcgacatgtgggatcccttcaaggattttcatgttcccacttcttctgtttctgctgaaaattctgcattcgtgagcactcgtgtggattggaaggagaccccagaggcacacntgttcaaggctgatattccagggctgaagaaagaggaagtcaaggttcagat

SEQ ID NO: 27876 - DNA, 289 bp, Glycine max
  Clone ID: 701059402H1
ctcaaaggcaccaatttcattgctcagagttcccaaattctccccaagagataaaatgtctctaatcccaaacttcttcggtggccggagaaacaatgtgttcgatcctttctcactggacgtgtgggatcccttcaaggattttcctttcccaaatacgctttcttcagcttccttccctgaattttctcgggaaaattcagcatttgtgagcacccgtgtggactggaaggagaccccagaggcgcacgtgttcaaggcagatattccaggactgaagaaggaggaa

SEQ ID NO: 27877 - DNA, 286 bp, Glycine max
  Clone ID: 701059403H1
gctaaattctcaaaggcaccaatttcattgctcagagttcccaaattctccccaagagataaaatgtctctaatcccaaacttcttcggtggccggagaaacaatgtgttcgatcctttctcactggacgtgtgggatcccttcaaggattttcctttcccaaatacgctttcttcagcttccttccctgaattttctcgggaaaattcagcatttgtgagcacccgtgtggactggaaggagaccccagaggcgcacgtgttcaaggcagatattccaggactga

SEQ ID NO: 27878 - DNA, 282 bp, Glycine max
  unsure (1)..(282): unsure at all n locations; Clone ID: 701059404H1
caaaactcaagcattgcatccctcttgatttgtagtttgttttgtgctttagataaaagttctgccaaatcaagaggggttttaagatcatagtgtgtgttttgcaacaatggctaagttctttgctgctatgatcttggcactctttgccatttccatactncaaacantggtaatggctgctaatgaacaaggaggccacttgtatgacaacaagagcaaatatggaagtggaagtgtcaagagttaccaatgcccatcacaatgctcgaggagatgtag

SEQ ID NO: 27879 - DNA, 96 bp, Glycine max
  unsure (1)..(96): unsure at all n locations; Clone ID: 701059405H1
gtaatagcacaacaagatgnnttctaatatccanactctgcttgtgcttgttctggctacattggccatatttatgatcccttccaatgcacaact

SEQ ID NO: 27880 - DNA, 280 bp, Glycine max
  Clone ID: 701059406H1
aaagctgtgcagtgttctgtacatccctcttctactctccgttttaaaagatagcgagagcatggttagagggagaatatatataatcttttataggatcagaggcaatttttaattttcttagcttattcatgtgtaagagatgtaaatgtaatttgtgttgttgctgttactgttctgtttcacgtgtaggtttctgtaatatcttcagtatcactttttactggaaaacatgccttgcaagtgttgatcattactttttatattctgtatgcttatt

SEQ ID NO: 27881 - DNA, 72 bp, Glycine max
  unsure (1)..(72): unsure at all n locations; Clone ID: 701059407H1
cataggtgctcattgatgctcgcnttgtaccctggaattttgtctcagtaacactggtattattatgggtgc

SEQ ID NO: 27882 - DNA, 280 bp, Glycine max
  unsure (1)..(280): unsure at all n locations; Clone ID: 701059408H1
aatgaaagcaataagtccctccttcctctgccttataattcttgtgacccttttngctggtagcattgaaagtgcaccagcaaacgtgaagccaagccattatgctgcacccttcaataggagtgttnttccttctggttttctatttggaataggctctgcagcttaccagatagaaggagcagcagctatagatggcagaggaccaagtatatgggacacctatactaaacagcaaccagggaagatttgggatcatagtgatggaagtctagcaatt

SEQ ID NO: 27883 - DNA, 154 bp, Glycine max
  unsure (1)..(154): unsure at all n locations; Clone ID: 701059409H1
cangnanggaggtattgtgagaaggnagtgcttccattcancgnaatggttgtgttgagtgcaccaacgttggtgtgcancgntcnattcaaagcagnaactganaagggtttaagtnactatgccttcatcgcttattcntttgcagtctcca

SEQ ID NO: 27884 - DNA, 281 bp, Glycine max
  unsure (1)..(281): unsure at all n locations; Clone ID: 701059410H1
cctaagtctttgggaatagtgctgcaatgggcttcaagtcaggaggaggtgacccttttgggagctactggnagcccatttgtgtgcagggttcatattgccctcaagttgaagggagttcaatacaaatatgtcgaagaaaatttgaggaacaagagtgaactgcttctcaaatccaacccagttcacaagaaggttccagtgtttattcacaatgagaagcccatagcagagtctcttgtgattgttgaatacattgatgagacatggaagaacaaccc

SEQ ID NO: 27885 - DNA, 258 bp, Glycine max
  unsure (1)..(258): unsure at all n locations; Clone ID: 701059412H1
ccctctcctgcgagatatgtcgcacccaaaggaatgcgcanccttgctgattctttactacctcatagtcgcttggtnaatgtggtgaggccgtgctggatcagtaaattggagccgttcaatgggatgtggcacttgagtgaaaatggcaagcctcgtggcgagttcgatgccattgttattgcacacaatggaaaatgcgcaaatcgcttgcttatgacatcaggattaccattaattgcaaaacaaatgaagagg

SEQ ID NO: 27886 - DNA, 275 bp, Glycine max
  unsure (1)..(275): unsure at all n locations; Clone ID: 701059413H1
cagttccacagcattagccatncgncactataaataaatagagaacacgcgaaacacctggattcccctccccagacgccgcagagtcagagagagagattcactgaaacagagcgcagaagaaaanccataaactaatccagaaaatgagcagcggcgctggaaaggtggtgtgtgtcaccggcgcttccggttacattgcttcctggatagtcaaattcctcctcaatcgcggctacaccgttaaggccaccgttcgcgacacaagtgatccg

SEQ ID NO: 27887 - DNA, 284 bp, Glycine max
  unsure (1)..(284): unsure at all n locations; Clone ID: 701059415H1
tnacgtcttnncctgtttgcgttanaaattgcattctanaaatcaaaataanttaaacaaancnanagaatagagccgttgatcagggagatggagtgtttgaaaaggtagattaatcatatattacntacgaactataaattgttttacgatcaaaatcatagattcattcgtaggatatcccgagaaacacgcgaacaatgtggtgagtgcatcatgcaagcctctgcaattgtctctgtttctgtctctttcttccctttttcggaagtcancgtcaccgc

SEQ ID NO: 27888 - DNA, 288 bp, Glycine max
  unsure (1)..(288): unsure at all n locations; Clone ID: 701059416H1
ctcagaancaaaattttccaaantcctcaactctncatcagatatcnancttctctgctctccaaantctcgcacctttctgctctgcccttcaatttantcacctctgacaccctcttaattctgcttccagttcctctgagtggtgagtatgatctcttctcactcccacaattcccacattatagtaatcntcatcacctgcttatttcgncataaattctagatcaaactccacaccctgatcctcccttttacttcttatggagcatgtatcaactcaaatga

SEQ ID NO: 27889 - DNA, 202 bp, Glycine max
  unsure (1)..(202): unsure at all n locations; Clone ID: 701059417H1
gtgtagcancaaaaatgtcgaagttaatcttcgtgttccttgcactaattcctcntctcctggcacctcccttctcgccagagaaaccctcagatcggcgcatccncgttttgctcgatgacttcgccatcaaatcctctcactctctcttcttcaactccctcaaatctcgcggcttcgatctccaattccacacaacana

SEQ ID NO: 27890 - DNA, 283 bp, Glycine max
  unsure (1)..(283): unsure at all n locations; Clone ID: 701059419H1
aacagtttctgacaccgaaattcagccacaaagttgaccatcttgggatggatgagaatatcatcatgttccaccatttccccacatngatanaantcggagattccaacaattgaaaactccttatcatctttctcttgcaacatcgtttcgcggttcctttgccgtgatttcaattgttgcataagaaaacatcactcactacttctttcctctcctttttcattcaatttctctgattgacacaattgcngcccagatcagtgattgacccaattgagaa

SEQ ID NO: 27891 - DNA, 217 bp, Glycine max
  unsure (1)..(217): unsure at all n locations; Clone ID: 701059420H1
attgaacgttaagccttcaccagtagtggcagcttttagttccagagggcccaatatggttaccagacagattctgaaaccggacgttattgggcctggggttaacatcttggccgggtggtccgaagcaattgggccatcagggttatccgatgacactcggaaaactcagttcaacntcatgtcaggtacatctatgtcttgtccacacaacatc

SEQ ID NO: 27892 - DNA, 281 bp, Glycine max
  unsure (1)..(281): unsure at all n locations; Clone ID: 701059421H1
ctctgctcgtagggtttctccacctagagggaaatggctcccaaaccgcctagtacgggtctgtttgttggactgaacaagggtcacgtcgtcaccaagaaggaattgcctccacgcccctcagatcgtaaggggaaaacaagcaagagggtgcactttgtgaggnacctcataagagaggtagccggttttgcaccctatgaaaagcgtataactgagttgctgaaggttgggaaggataagagggcactgaaggttgcaaagagaaagctcggaacaca

SEQ ID NO: 27893 - DNA, 279 bp, Glycine max
  unsure (1)..(279): unsure at all n locations; Clone ID: 701059422H1
cttcatcttgttctatctgtgacgagcatcatggcctcaagagcagtgttattgttggctatgtgtgtgcttccggcgatggttgtggccattcgcccagcaaagaaccctttttgcgtgaagggtcgtgtctactgtgacccttgccgtgctggttttgagacctcagctaccacntacattgctggtgctgagattatgttgcaatgcaagagcagggttagcaacgaggttgtgtacacgaagaaggggtacaccgactcaaccggagcatacaca

SEQ ID NO: 27894 - DNA, 282 bp, Glycine max
  unsure (1)..(282): unsure at all n locations; Clone ID: 701059423H1
ctcattaattgcaagaatggcacttcgttgcttggtgatgtccctttctgttctcnaccactcttggtcttgcgagagaaagccatgccagagacgaagatttttggcatgctgtttggccaaacactcccattccaagttcattgcgagatcttctanagcctggccctgcaagtgttgaaatcgntgatcaccctatgcaaattgaagaaacacagtacccgaaaaccttcttctataaagaagnccttcatccaggcaaaacaatgaaagtacaattcc

SEQ ID NO: 27895 - DNA, 184 bp, Glycine max
  unsure (1)..(184): unsure at all n locations; Clone ID: 701059424H1
gattacaccaacgttcactgagtgacattcctccgttttaaantttccaaccgcattccnaatngatcctcangctccggcgacggccaccaccgctcgaagcgccgccgcggaaccctcgcaatctcaacccccaaaaccatcccctcctctccctctccctccaccttccanacaacatacg

SEQ ID NO: 27896 - DNA, 280 bp, Glycine max
  unsure (1)..(280): unsure at all n locations; Clone ID: 701059425H1
ggttaacaagggcgacgcaccggcattgccagagactcttaaaaattacaacaagctgttgtctcttggcttcaagattgtattcttgtcaggaagatatcttgacaaaatggccgtaacagaagcaaacctaaagaaggctggcttccacacatgggagcagtnaattctcaaggatccacatcttatcactccaaatgcactttcatacaaatcagcaatgagagagaatctgttgaggcaggganacagaattgttggaatcattggagaccaatgg

SEQ ID NO: 27897 - DNA, 177 bp, Glycine max
  unsure (1)..(177): unsure at all n locations; Clone ID: 701059426H1
cacgaatttcattgcagagtgtnattttgagtatcaggatnaatggtncgaattgnattggganacgtnncctnnagatggcagnttggttacttngatggaagagaacaaactnccaaactgtgctccantcattctctcgagnagcnggnaaganagtncancatctnnggggta

SEQ ID NO: 27898 - DNA, 281 bp, Glycine max
  unsure (1)..(281): unsure at all n locations; Clone ID: 701059427H1
cattgcggaagcagaagaagcgccgcagctatggtgaagtactccagagaacccgacaatcccaccaagtcctgcaaggccagaggcgctgacctcagagttcattttaagaacactagggagactgcctttgccatcaggaagttgccccttgttaaagntaaacgatacttagaggatgttttggcccacaaacaggctattcctttccgacgcttttgtggtggtgttgggaggacggcccaggctaagaacagacactccaatgggcaaggacgctg

SEQ ID NO: 27899 - DNA, 285 bp, Glycine max
  unsure (1)..(285): unsure at all n locations; Clone ID: 701059430H1
cgaacctgcttttagggctgcaatcataatgttccagagagaatttgccatgagactggttgcttcagcccggtgataaactatattgtcgtctcacggtcaacactcaactacatgcnccgagtcttccacctcctcaaagttggaagaaacaacttcaggccccctcccaaggtggattccacctgtggtgcgaattgagcccaggaaaccccgtattgaagttaagcaaaaggagtgggatgggtttttgcggatttgttttaacaggaagaacaaaacact

SEQ ID NO: 27900 - DNA, 287 bp, Glycine max
  unsure (1)..(287): unsure at all n locations; Clone ID: 701059432H1
atatagttttcctcctagctagatacatgatnaagtcctcctccatngcttcaattgncaaaatgcttgaaggcaaantggcgataatcacaggaggagcaagtggcattngtgncgccancgccaagctattcgtcnaacacggcgccaaantaatnattnccgangtgcaanncgagttaggccagttccactggnaaaaccctcggcacaanaaacattcantacgtccactcgcgacgtaaccagcgactccgacgtcaaaaacgtggtcgaatttgccgtgt

SEQ ID NO: 27901 - DNA, 279 bp, Glycine max
  unsure (1)..(279): unsure at all n locations; Clone ID: 701059436H1
cattactanaaagttagaaaacatggcagcggtggccggagcatcctcgtccgtgattaaggtggctgcactttccggatctttaaggaaaggctcttacaacagagccctcattcgttctgctattgagctaagccaaggtagagttgaaggccttcaaatcgagtacgttgatatttcgcctttgccccttctcaacaccgatcttgaggtgaatgggacctaccccccacaagttgaagcctttcgccagaagattctcgcagctgatagtatcct

SEQ ID NO: 27902 - DNA, 278 bp, Glycine max
  unsure (1)..(278): unsure at all n locations; Clone ID: 701059437H1
gtggttttattcctactcttttgtacaacagtcaggagttgataatcaccacatcgtcggcactcatgctttatatcatggcatcttattatagatacgcggaatgtcttgaagacgaagaaaccatgcatctattcatcatccttttttttttncttttnctttttcctccctttctctngcttttgttcctatngtgaactaaagngttcacttacaaatttngtcaaaagagatgctttttnccttgtttnaatataatatatcagggatagngt

SEQ ID NO: 27903 - DNA, 276 bp, Glycine max
  Clone ID: 701059439H1
cttcctcttgcttgttctcgtcggtgcaactacagcttctggggctgaactatgtgcagacttttactcatgcacctgcccaaacttgttgcctatagtgaagaaaggagtggccaaagccattcagaaagaaccacgcatgggcgcttccttactccgattgcatttccatgactgctttgtaaacggttgtgatgcatctatactgttggatgatacaagcaacttcattggggagcaaacagcagcagctaacaaccaatcagctagagggtt

SEQ ID NO: 27904 - DNA, 277 bp, Glycine max
  Clone ID: 701059440H1
gtttgttgtgagctataagctagtttatcgtgaggagaatatgaagttgtttgttttctttgttgctgcagtagttttggtagcatggccatgccatggcgcaggctaccaaaggttccctctccgaatgaaaactggctatggtgagcgttcttcggaggtaaaatgcgcaagttttaggcttgctgtggaagcacacaacatccgagcctttaaaaccattcctgaagagtgcgttgaaccaacaaaggactacattaatggcgaacaatttaga

SEQ ID NO: 27905 - DNA, 276 bp, Glycine max
  unsure (1)..(276): unsure at all n locations; Clone ID: 701059441H1
caaaaagagagagtggaaaanatggcgcggttgatcacagtggtgtngtgcgcggtggcggtgctattatgcgccgcggccggtgcgtcgtgggtggaggaggcggcgaacccgatacgaatggtgtctggcgtggaggcggaggtggttcgggtgatcggggagtgccggcgtgcgttgaagtttgctaggttcgtgagcaggttcgggaagagttaccaaagcgaggaagagntgaaggagaggtacgagatattctcgcagaatctcaggttc

SEQ ID NO: 27906 - DNA, 279 bp, Glycine max
  unsure (1)..(279): unsure at all n locations; Clone ID: 701059442H1
ganagacgtcagcctcaagnaccaaagtcaacacagccagcatagtggggacattgatagatcaggancccattcgtggcatataagataaacagggtattgatgcccagagagctcttcaaggccagcgacgcggcggatgcacctgcccagtcgccaaagcccgccnnnnnnnnnnnnnnnnnnnnnnncaacagccatgcggcggatgcaccggcggacggaccatccgacgacgacgctgattcggaagatcagaaggctgcggatgaagacagc

SEQ ID NO: 27907 - DNA, 280 bp, Glycine max
  unsure (1)..(280): unsure at all n locations; Clone ID: 701059446H1
attaagttcactgtcgacaagtttcgccccaacactcaactcagctcgctncttgtncttcttctccattatcaaacgaagtatagatatcatatcattgcagcttcattttcatccaccaattaactaacaatggcgcacacatcccttttcactccctcttcctctcttaggttcaaccctcttcttcttacctccacccnnnnnnnnnnnnnnnnnnnncgctccaacaacctttctttccccgctctctccaggaacctaaggaaatcggtagaag

SEQ ID NO: 27908 - DNA, 281 bp, Glycine max
  unsure (1)..(281): unsure at all n locations; Clone ID: 701059447H1
gaaagggataananagatgtgtatcgcggtgttcanntggcagantcatncncaagtaccccttgattctcttagacaacagggacgtcnnnttattcgcggcctacggaacnattgncgtggtgggaagggnaaangatcttgggtggtaaggatgcactgggcggtggaacatngttgggttcganaagagacggtaggatagcgtttcttacaaattttagggaagttgagatgctntcgaatcncaagaccngaggggacttgccccttcgntttct

SEQ ID NO: 27909 - DNA, 282 bp, Glycine max
  Clone ID: 701059448H1
caagttcaaagatgaagatgatccacgttcttttcctctttgctcttgtctcgttcacttcccatgcttctgtcaatgatttctgtgtagcagacctaaaaggtccagatagcccttcaggctatcagtgcaagccacctaacacagtcacagtggatgactttgtgttctctggctttgtagctggaaacaccacaaacactttcaatgctgcattaacctccgcatttgttactgattttccaggtgtgaatggtcttggtgtatctgtggcacggttag

SEQ ID NO: 27910 - DNA, 283 bp, Glycine max
  Clone ID: 701059449H1
ggagtgcagaatcttggagacaaagcagtgatgtgtcataggctaaatttcagaactgcagtattttactgccatgaagtccgtgaaacaacagctttcatggttccattggtggctggtgatggaaccaaaactcaggcacttgctatttgccactcaaatacttctggaatgaatcatcaaatgcttcatcaactttcgggagttgatcctggaactaaccctgtttgccatttcctggaagcaaggccattttatgggtacccaatttatctgtggacac

SEQ ID NO: 27911 - DNA, 282 bp, Glycine max
  unsure (1)..(282): unsure at all n locations; Clone ID: 701059450H1
aacagcgacgatgaaagcaatgacagcaacgacaacgtttgatgtctctgccgcttgcttccgtncccctccttcttgttcaccgaatccatgccacaccagtttttcagttataaactccctgaatcctcacaagggacgacggataagcgttgctgttccacctaagtttccaagcttccggagggaagcagctctgcaggggaatttggaggctgttagagtcccaacttcggtgcctgtgcgtgtagcatacgaacttcttctagctggtcatcgata

SEQ ID NO: 27912 - DNA, 281 bp, Glycine max
  unsure (1)..(281): unsure at all n locations; Clone ID: 701059451H1
ctagctagtcctgattcctagctctataaaaggagaataccataggaattcatcacagacaaacaaacaatttaccancctatacttgttcctttngaaggttagaagtgctacaatacaaacaatggcagctacccaggaagatgtgaagcttttgggtattgtgggaagcccatttgtgtgcagggtccagattgcccttaagttgaagggagttgaatacaaatttttggnaganaatttgggcaacaagagtgatttgcttctcaaatacaaccctg

SEQ ID NO: 27913 - DNA, 279 bp, Glycine max
  unsure (1)..(279): unsure at all n locations; Clone ID: 701059453H1
gtttttttgcagtttcttcgattctctctttctctttctncagaaaaattaaacccattcnnnnnnnnnnnnnnnnnnnnntcatttccaatcacaatggcaganccaactcaccgaagaacagatctcggagttcaaggaagccttcagtttgttcgataaggatggcnatggttgcatcacaacaaaggagcttgggactgttatgcgttcgttgggtcagaatccaacagaggctgagctccaagacatgatcaatgaagtagangctgatgggaa

SEQ ID NO: 27914 - DNA, 276 bp, Glycine max
  Clone ID: 701059455H1
cacagattttgattcgattcgattcgattcagtcgaggttttaagcagcagcaagatgtctgggcgtggaaagggaggaaagggattgggaaaaggaggagcaaaacgacatcgtaaggtgctccgcgacaacattcagggaattacgaagccagcgattcgtcgtttggctcgcaggggtggcgtgaagcgtatcagcggtttgatctacgaggagactcgcggtgttctcaagatcttcttggagaatgtcatccgtgacgccgttacttacac

SEQ ID NO: 27915 - DNA, 277 bp, Glycine max
  Clone ID: 701059458H1
cactaagctaaacaatttcatcaagcctgccatggcttcctcgtgtgcttcctctgccattgcagctgttgccatctccacaccaagttcccagaagaatggatcactcttgggaagcacaaaagcttcttttcttagtgggaggaaactgaaggtgaacagttttacagcaccagttggagcacgatccagcactacagtgtgtgcagttgctgagcctgataggcctctgtggttcccaggcagcacccctcctccatggctagatggcagtttg

SEQ ID NO: 27916 - DNA, 151 bp, Glycine max
  unsure (1)..(151): unsure at all n locations; Clone ID: 701059459H1
atanncntntgatttgtgaaaggagagcaaacatgttgatnaggtntaagagcctanantcancggacaaggttgctggcnagatncatntcngntctggtgtttctggtattaggagttatgaaggagcctactgncagcanacaagata

SEQ ID NO: 27917 - DNA, 283 bp, Glycine max
  unsure (1)..(283): unsure at all n locations; Clone ID: 701059464H1
anaatattaataagcgaatgttgaaccctaactgaggatacactcgcaccggtagctgctgcagccccttgtgagtgagtgttctgaaagatgagaccaattttnatgaaaggtcatgagaggccattgacgttcctgaaatacaacagggacggcgatctcctcttctcctgcgccaaggaccacaacccaaccgtctggtttgccgacaatggcgaacgcttgggcacttatcgcggccacaacggcgccgtttggacctgcgacgtctcaagagattcgg

SEQ ID NO: 27918 - DNA, 264 bp, Glycine max
  unsure (1)..(264): unsure at all n locations; Clone ID: 701059465H1
gcaattgctantatacctgcagcctncagcattctcatcatcanccatcatcttctttccctcnctcttcccaatcccccaatccccaaaatagattaggtcttgtcaaaacacttgctactcctccctctgctctccacatggaccacaaactctcttctcagcctgacgctgtctngcccgagttactgacggagttcatggtggacatgaaatgcgaaggttgtgttaatgctgtcaaaaataagttgaacgagataaatg

SEQ ID NO: 27919 - DNA, 281 bp, Glycine max
  unsure (1)..(281): unsure at all n locations; Clone ID: 701059466H1
ttttaattttttgccctaaaaccctcgctaccgccgtggtggccgccgaagaaggagagtncgagagcgcaatcgagtcttcatcttcgactcaccatgaagctcgtcaggtttttaatgaagttgaacaatgaaaccgtgtcaattgagctcaagaatggcactattgtccatggcaccattacaggtgttgatatcagtatgaacacacatttgaaaacagttaaactaactctgaaagggaaaaatccagtcactctagatcatctcagtgtgagggg

SEQ ID NO: 27920 - DNA, 278 bp, Glycine max
  unsure (1)..(278): unsure at all n locations; Clone ID: 701059467H1
ggtgactgtgctctgctctcatntcantcatattcatttcaatggcaactcaaggtcaagtcattacctgtaaagctgcggtggcctgggnacccaacaagcccttaaccgtccaagacgttcaggttgctccgcctcaggccggcgaggtccgtgtccaaatcctcttcaccgctctctgccacaccgatgcttacacttggggcggcaaggatcccgaaggtctcttcccctgtattctcggccacgaagctgcagggattgtggagagtgttgga

SEQ ID NO: 27921 - DNA, 167 bp, Glycine max
  unsure (1)..(167): unsure at all n locations; Clone ID: 701059468H1
gttacatctaacgggtattacgaagtcaaccgatctaaaaaactaaaactcggatcccctttatgttgtttattttgatttggagtggttccatcgggagtttggatggccaccttgaatgttccccctcttcctccttcaccgagagacgangccacacaacatac

SEQ ID NO: 27922 - DNA, 274 bp, Glycine max
  unsure (1)..(274): unsure at all n locations; Clone ID: 701059471H1
aaaatattctctgtagtcatggtcctgtgttaacttattatgtgattgaatttaatttcagttataagagcaaggctgtcatatatncatataaaaatgattcagcatttttaggagagagactagcangtnttgttattgggtcatttttacagcttccctttgatgctctccacattnttatggctaccctttgatgctcttttgttgatggttttgcattgcattgctgctttactttgttctctaaggtatccttttgcttcactaatat

SEQ ID NO: 27923 - DNA, 273 bp, Glycine max
  unsure (1)..(273): unsure at all n locations; Clone ID: 701059472H1
agagagaaactgataaggcagggatacaacattgttgggatcattggagaccaatggagcgatctcctcggaggccacagaggcnaaagcaggacctttaagcttcctaatcccctgtactacattcagtanttccttcacctctcaacaatctagcttgctcctatctatctatatgtnataagatgcgttcaaataggggcactagcttcactttatgttgtttcagctgtgtgtcaacaagtcatgtaagagacttcactatgttgtttt

SEQ ID NO: 27924 - DNA, 274 bp, Glycine max
  unsure (1)..(274): unsure at all n locations; Clone ID: 701059473H1
tcacactatcctctttcataagaggaagtgcaganattcattgacnttcaaaaacccanaaccctanaaagcgcaagaaaaccnnatccccaaaatatctctcgctctgaaaccgcnatggatttgcagnagagcgagttcgatcgcctcctgttcttcgagcangctcgtaaggccgnagaagccgaatangagaagaaccctctcgacgctgataacttaacaagatggggtggagctttattagagttgtctcagtttcanagtttgcctg

SEQ ID NO: 27925 - DNA, 196 bp, Glycine max
  Clone ID: 701059476H1
gtttccttatctatgttgtacttctgaataacatagactttatgcatgtctatgcgtaattattgcctgaacttctgcactattgtatttggatgctctcggttttcatatcataaagtgtgttctcactttcactttgtatttagttcatcttatgtttaccagtaataataccgaagcgatcgcgtttattact

SEQ ID NO: 27926 - DNA, 273 bp, Glycine max
  unsure (1)..(273): unsure at all n locations; Clone ID: 701059477H1
caaggacatgctttatgatttgttaaattgcatttgggattaataccttgtatgttttttgtaagangaattctcagccaattttaacaaaagatgcaggaatccccagagccaagatcatgaattttgggttggccaacgagtacatgcatctggtgactcacagagaattggtactgttaagtatgtggggcctgtagaaggctattcagatacatgggttggagttgattgggacaacggagaagganaacatgatggctccatcaatgg

SEQ ID NO: 27927 - DNA, 277 bp, Glycine max
  Clone ID: 701059478H1
cgaacctcaacaacgctgaacgcagaaaggggaaaaaggggattagggtttaggaagcagcgacaacaatggatttcacagcggagaagaaggaatcagagagcaacaccgaaaatgctcatccaacaactttagattcttcttctcaattggcatcggcacttgattccagcaacaaagaaatccaagaacgacaagctcgtgaactcaaagccggtcttcaccccctcaagcacaagtttgtcttctggtacacgcgccgaacacctggagttcg

SEQ ID NO: 27928 - DNA, 278 bp, Glycine max
  Clone ID: 701059479H1
aacgctccatactcgatatagcttacaccacttgggccatcaaaccccaaccaattctaaccatttcttttcgttccgatcagtttttcgtctctctctgttttccgaaaccttaatctcttgcccgataagggaaaattatgaatcccgataagttcacccacaagacaaacgaagctctggtgagtgcccacgaaatagcaacaagcaacggtcacgcgcagttcacccctcttcacctggcgtcctctctgatttccgacaaggatggcattttc

SEQ ID NO: 27929 - DNA, 237 bp, Glycine max
  unsure (1)..(237): unsure at all n locations; Clone ID: 701059481H1
atcgcatttttgtatttngtgcatcgaaactttccagaagatgtnggtnncagagcaggaagagagcgagcatcgaaacgcgaacccctccaacgacgcttccgacggcttcgaaaccgccagcnacaccgatctcgccagtnacggcgacgacggtggagccggcagcccggaagaacagaatcacatgcgaacagagtcataccgaacagaatcacaccgaacagagtcacaccg

SEQ ID NO: 27930 - DNA, 278 bp, Glycine max
  unsure (1)..(278): unsure at all n locations; Clone ID: 701059482H1
gtttttcttaagcttgagatcaggaattaatttcagaggttcagagaatggcaacggattcttctaatggtaatggncatcaccaaacaacaacaaagcaacctcctttgccgtctcccctgcgcttttccaaattttttcagtccaacatgagaatcttggttactggaggagctggattcattgggtctcacttagttgacagattgatggaaaatgaaaaaaatgaggtaattgttgctgacaactacttcactggatccaaggacaacctcaaa

SEQ ID NO: 27931 - DNA, 277 bp, Glycine max
  unsure (1)..(277): unsure at all n locations; Clone ID: 701059483H1
gtttgtaccacctaaggcacctcaagatttatatgagagctattataacgcaaacaaatncgaacctgaagttgtatgttagacgtgtgttcatttcagatgaatttaatgaactgttgcccaagtacctaaactttttgctgggtcttgttgattctgacactttgccacttaatgtatcacgagaaatgcttcaacaacatagtagtctgaagacaatcaagaaganacttattaggaaagcccttgatatgatccgcaggattgctgatgagga

SEQ ID NO: 27932 - DNA, 275 bp, Glycine max
  unsure (1)..(275): unsure at all n locations; Clone ID: 701059484H1
gcaagaagtccctcctgaagagttgtaggtgcttcagtgtggaggagtggagcttagaagatggagggctaccggcagtgtcatgctcattgccactgccatcgcctccaccggtagtccctcttgcaaganagattggagcggagttcatagggaccttcatcctcatgttcgcaggcactgccgctgccattgtcaaccaaaagacaaatggctctgagacccttattggntgtgctgccaccactggtctcgccgtcatgatcgtgatcctc

SEQ ID NO: 27933 - DNA, 277 bp, Glycine max
  unsure (1)..(277): unsure at all n locations; Clone ID: 701059487H1
gnangnnctaggattcgcngattgttttgnagcaaagctccaaagangaagaattatgagaanttctatcnggaaggaanagaaggaanttccganaggaaagganaaaaaataggagtccatgagataantcgaacgnaaatcanagaggatagtggacattttcaggaagctttcatgaagcaagtncaaaatctagtcagncnagtatngtngatggggctattnnttacatncttttcgtttggtcctcgtgaagagaagcagattagctttc

SEQ ID NO: 27934 - DNA, 274 bp, Glycine max
  Clone ID: 701059489H1
cttagctttcctttccagttcatacttcatcctattattactttccctctttgcattccaaatggccactgttgaggttgcacagcaaacaccaacaactgtgacagagaatgaaacaacgactgaggtaaccaagattgaggaaactaccccagaacagccagccaccgaggttactgccccagaaacagtcaacgaagaagcaaaagaggaagcagcagttgagactaatgaggcaacagaagttacagaggaagggaaggctgagaaaaca

SEQ ID NO: 27935 - DNA, 255 bp, Glycine max
  unsure (1)..(255): unsure at all n locations; Clone ID: 701059490H1
tagccatagactgaagactgagaagaagaaaagtgaggattgcaacgangtggctcgnagattatcttcggtttggtcatttacaaattgttccgacgcttcttctacgacgacgacgtttnggacattgaaggatccgattcttctgctcttttcttcgtcgcagataggcttaagaaactctacggagcaaatgtgtatgtgggtcttcggattcccgatgccgatactgcttctcgacagagcattgatatg

SEQ ID NO: 27936 - DNA, 275 bp, Glycine max
  Clone ID: 701059491H1
gagaatagagaagagagatggatccagacgcgttggcaaaggcattcgtggagcactactacagcaccttcgacaccaacaggaacggcttagcgaatctctaccaggagggttccatgctcactttcgaagggcagaagatccaaggcgcttacaacatcgttgccaagctcacctccctcccttttcagcagtgccaccacttcaatctccaccgtcgactgccagccctccggcgtcaacgccggcatgctcgtcttcgtcagcggaaactt

SEQ ID NO: 27937 - DNA, 280 bp, Glycine max
  Clone ID: 701059496H1
cgaagagaatggctcccaagggtttaatctttttggctgtgttatgcttctcagcactgtcactgagtcgttgtcttgcggaggataatggacttgttatgaacttctacaaggaatcatgccctcaggctgaagacatcatcaaagaacaagtcaagcttctctacaagcgccacaagaacactgctttctcctggctcagaaacatcttccatgactgtgctgttcagagttgtgatgcttcactgttgctggactccacaagaaggagcttgtctga

SEQ ID NO: 27938 - DNA, 288 bp, Glycine max
  unsure (1)..(288): unsure at all n locations; Clone ID: 701059501H1
cgctaacaagagattcaagaccggcatggctaatgaagaggaacaganaaaccacctcttcggcatcaaagatctcggtcacaagactctccttcagagtgatgcactctatcagtatatacttgaaaccagtgtctatccaaganagcacgagtgcttganaganatacgcaagatgactgcaaaacacccactgaacatcatggcaacaccagcagacgaaggacaacttctgagcatgcttgttaagctcacgaattcaaagaacgccttggaaattggtgtatt

SEQ ID NO: 27939 - DNA, 283 bp, Glycine max
  unsure (1)..(283): unsure at all n locations; Clone ID: 701059502H1
gtggcggcaagcaactccatccgcaatgggaatcgatttgaaggcaggaggtaagtccaagaagaccaagcgaaccgcccccaaatccgatgatatctacctcaagcttctcgtcaagctgtaccgttttcttgttcggaggactgggagtaacttcaatgctgttgtcctcaagcgccttttcatgagcaaggtcaacaagcccccgctatccctctctagattgatccgttacacgnagggaaaggaggataagatagctgtggttgttggtgccgtgacg

SEQ ID NO: 27940 - DNA, 144 bp, Glycine max
  Clone ID: 701059503H1
tttaaggcaagggcattgaagaaagattgtcaaaaacgatagccgatgaggcttggcaacattctctgtagactcaagtttacttagtctgtcactgtattaatcttctgaaaatttatgttatcaaattactcttgctaagat

SEQ ID NO: 27941 - DNA, 277 bp, Glycine max
  unsure (1)..(277): unsure at all n locations; Clone ID: 701059504H1
tctgtgactaacgcgtcctgggtcaccgtgcccctcccttggattccgctggtagtgttttttgtgcaggaaaacagataaagtcggtggctttattggaatatggttgccagttactgttgatatcataatggattccccacaatctgttgtntccacccttcaggagctcagtgttgggtgagagtgagaagnacaagtctgatgttttcccaggaaactctagtcctttttccaaggacattgaagtgaatgggaaggaagttgtcatgtcaaa

SEQ ID NO: 27942 - DNA, 275 bp, Glycine max
  Clone ID: 701059505H1
ttccaaagacccttttgaagtaatcgatggagtttcagtctctttccagattctaccttcttctttccttaaccattctcttccttgcaccctttcacgctcaagctaaaattaaagtcacttactgcgataagaaggcagactatcctgtgaaggtgtctggagttgaaatatcaccagaccctgtggagagtggcaagcctgctacctttaagatctcggctacttctagtaaagctatttatggtggagaagttgtaattggagtttcatac

SEQ ID NO: 27943 - DNA, 275 bp, Glycine max
  Clone ID: 701059506H1
caataagcaagagcaatacactgtggaaggagtgcagaatcttggagacaaagcagtgatgtgtcatgggctaaatttcagaactgcagtattttactgccataaagtccgtgaaacaacagctttcatggttccattggtggctggtgatggaaccaaaactcaggcacttgctgtttgccactcagatacttctggaatgaatcatcacatgcttcatgaactcatgggagttgatcctggaactaaccctgtttgccatttccttggaagca

SEQ ID NO: 27944 - DNA, 275 bp, Glycine max
  unsure (1)..(275): unsure at all n locations; Clone ID: 701059507H1
catagatctggtgcgtagaggctcagatctacggtaccgaggtacaacagagaatcgatgacaagaacgcagatccgacggtagatccagccgantccgcttgttcgatcgctacagacccctgtatcggatcattaagcagcgtgtctcgcgcgttctacacgtgttgccgatntcggatgttgtaaaattagtttatgatgtgaagctatggagtggaaaatatgtggatgtaggagatttcgggatgaatggcctcaaaacgctttgtcgtt

SEQ ID NO: 27945 - DNA, 275 bp, Glycine max
  Clone ID: 701059509H1
gctttcttcaattgaatctgaggagaatgtgaagttaccaatctcagctaaaatcaaacaacaatttggaaaccttttagtcaactccaatttcagagccatattttcaccagcaactcttggagcgattgttggctttattgtaggagtggttccccagatacgtaaattgatgattggcggcgatgcttcacttcatgtgattcaagactctgttaccatggttggtgaagccgccgttccaattataacccttataatgggagcaaacctcc

SEQ ID NO: 27946 - DNA, 270 bp, Glycine max
  unsure (1)..(270): unsure at all n locations; Clone ID: 701059510H1
gagtttgttgtgagctataagctagtttatcgtgaggagaatatgaagttgtttgttttctttgttgctgcagtagttttggtagcatggccatgccatggcgcaggctaccaaaggttccctctccgaatgaaaactggctatggtgagcgttcttcggaggtaaaatgcgcaagttttaggcttgctgtggaagcacacaacatccgagctcttaaaaccattcctgaagagtgcgttgaaccancaaaggactacattaatggcgaa

SEQ ID NO: 27947 - DNA, 268 bp, Glycine max
  unsure (1)..(268): unsure at all n locations; Clone ID: 701059512H1
acaacgagtttatctcttcttctactagagtnctcttttctctgggtagtgtaatatcattaatcaatggctgacgctatctttggataccctttcagacgcttcatctggggtcaccctccaattttcagagaatggtctggctcaatagccctcttagattggctcgaatcacccactgcccacatcttaaaagttaatgttccaggattcagcaaggaagacataaaggtgcagattgaggatgggaatattcttcacatcaaag

SEQ ID NO: 27948 - DNA, 267 bp, Glycine max
  Clone ID: 701059513H1
atttttgcaagtggaagtccattcagtaatgtggatcttggaaatggtcatattggccattgcaaccagggaaacaacatgtacctctttccaggcattggtctcggaactcttctttcaggcgctaggatcgtctctgatggcatgctgcaggctgcagctgagcgtctggctacatacatgagtgaagaggaggtactcaaaggaattattttcccttcaacatccagaattcgagatattacaaagcaggtagccacagctgtt

SEQ ID NO: 27949 - DNA, 250 bp, Glycine max
  unsure (1)..(250): unsure at all n locations; Clone ID: 701059514H1
aacaaatcaaagccatggccaccncccaacttctctattnntctctccgtctccctagccttctttttggtgctacttaccaaggcacactcgaccgataccgtttctttcaccttcaacaagttcaacccagtccaaccaaacattatgctccaaaaagatgctagtatttcatcctctggggtgttacaactcaccaaagttggcagcaacggcgtgcccacctcgggatctctcggtcgtgcccttt

SEQ ID NO: 27950 - DNA, 103 bp, Glycine max
  unsure (1)..(103): unsure at all n locations; Clone ID: 701059515H1
ctggccttttgtnctcgtgtcaatttctaaatccaccaccacaccctactcttcnattctcctattattattatctgccacacccttcactntgcncnccact

SEQ ID NO: 27951 - DNA, 276 bp, Glycine max
  Clone ID: 701059516H1
ttctccgtggcaccatgcgcgcccacaccgacgttgtgacggcgattgccactcccatcgacaactccgacatgatcgtcaccgcctcacgcgacaaatccatcatcctctggcatcttaccaaggaggacaagacttacggtgtcccccgccgccgcctcaccggccattctcattttgtccaggacgtcgtcctctcttctgacggccagtttgccctatccggctcctgggacggcgagctccgcctctgggaccttgctgctggcacctccg

SEQ ID NO: 27952 - DNA, 283 bp, Glycine max
  unsure (1)..(283): unsure at all n locations; Clone ID: 701059517H1
ctctctcncactttgatcactgatctcatctcaattntcagnannctcgacatctgataagccagaagaggtggaaaggggnagcaaggatgaanaagcacaaggaagatgatcaagaggaggggaagggtggattcattgagaaggtgaaggatttcattcatgacattggtgagaagattgaggaagctattgggtttgggncgccgagtgccgatgttactgcgatacacatcccatcaattaatcttcacaaagcagatcttgttgttgatgtgctcat

SEQ ID NO: 27953 - DNA, 279 bp, Glycine max
  Clone ID: 701059518H1
ctgcgaaagtgtttgtttggctcagtttgttgaattcgctggcagctacagctatgatcatcaacagcaccccttttcctctatgatcgattcgattccgtagagtgagaaatcagatcagaataatcatcgatgggtaatttgttcgtgaagaagcccaaggtaacagacgtcgataaagcaattctcgctctcaagacccagagacgcaaactcgcccaatatcaacagaagctagatgctgttattgaagcagaaaagcaagctgcacgagacttg

SEQ ID NO: 27954 - DNA, 277 bp, Glycine max
  unsure (1)..(277): unsure at all n locations; Clone ID: 701059519H1
ctgggctgcaagtnttacttggcatttttcgaccacaaaggggatccaaaagangtgtgtggttctttgcacactggatacttggaactgcggtcacattccttggtgtcctgaatgtatatcttggtttaggagcctaccaccaaaanacatccaaaggcataaaaatttggaacatacttttcactgttcagatatctttgattgtgtttttctaccttttccaagaaaaatgggtgtatatacaaaaccaaggagtggttttgggcaaagaaat

SEQ ID NO: 27955 - DNA, 268 bp, Glycine max
  unsure (1)..(268): unsure at all n locations; Clone ID: 701059522H1
agaagaagaatccaaaagcaatcccatctgtgtgtttgcacatcggaagggagggctatcaaactctaaggattgctctgaatcggtttcgtcttcttcgtttttcttcaaaatcctcgtgacagatctaatctaatcagccttttgggggtgtttcagacattncatgcatatgggtggttgtgttggatgctataaaaggccttcactgagtnncacagtggatgtgccatcaaaagggttggcaacacaaagtaacgtatgagga

SEQ ID NO: 27956 - DNA, 96 bp, Glycine max
  unsure (1)..(96): unsure at all n locations; Clone ID: 701059523H1
cttcttctctcttctctctctgtccgnagatggcttcacgcaggttcgtatcttctctgattcgatcctcccttcgtagatctcaatcgaaaccct

SEQ ID NO: 27957 - DNA, 270 bp, Glycine max
  unsure (1)..(270): unsure at all n locations; Clone ID: 701059525H1
tacattggaaanggttnggatattcaattttacataattaaagataaaatcaacgatagcnatagttttaaaattaaccatcgatttanttgcaactggaacacaggtttctttcaatgaaataatattaatatcaatttaataagctggtaatgtaaaatactgctaatgttaatatgaagtttggatggtcttattggcagaagatgctaggtggtgttcatcaatattctgaaaggtaaaacgattttngtttttaatgataatata

SEQ ID NO: 27958 - DNA, 265 bp, Glycine max
  unsure (1)..(265): unsure at all n locations; Clone ID: 701059526H1
gagtttgttgtgagctataagctagtttatcgtgaggngaatatgaagttgtttgttttctttgttgctgcagtagttttggtagcatggccatgccatggcgcaggctaccaaaggttccctctccgaatgaaaactggctatggtgagcgttcttcggaggtaaaatgcgcaagttttaggctgctgtggaagcacacaacatccgagcgcttaaaaccattccngaagagtgcgttgaaccaacaaaggactacattaatgg

SEQ ID NO: 27959 - DNA, 265 bp, Glycine max
  unsure (1)..(265): unsure at all n locations; Clone ID: 701059527H1
tttatcataaaattaaaaatagtacaatccatcaatctgtttganttgaattgaaacttttggagagagaaaagaaaacaaaaacaaaacatcaatctgcattttggcattgggctcttcttgtttagtttgtttgttccaatccaacgttgnnnnnnnnnnnnnnnnnnnnnnnnnntgggaagaataggaatagcattgggaatcaatcagcgaccccatgagacctcagagaacgtcgatccacgccgtcacgacatgggtg

SEQ ID NO: 27960 - DNA, 89 bp, Glycine max
  unsure (1)..(89): unsure at all n locations; Clone ID: 701059529H1
angatccanntggctgcgacccttttccagggattgggagttgtgaccccatcattctacttcttcccanacaacatacgagancnnaa

SEQ ID NO: 27961 - DNA, 267 bp, Glycine max
  unsure (1)..(267): unsure at all n locations; Clone ID: 701059530H1
gagatgcacgtgncccttgcctgngnttganagcttgtggtgtnncttttcacaanatnatganaaagacataaatctcctaataaacttgtgctttcatgntggagctaaatatggggagaagttgactaanaaggttacccatttgttgtgtaaattcaccaatgggcccaagncatgaggctgcttntaaatgggggattcaatcggttacatctgaatggatatttgaatgtgtcaagcagaatggagttgtggccattgatc

SEQ ID NO: 27962 - DNA, 278 bp, Glycine max
  unsure (1)..(278): unsure at all n locations; Clone ID: 701059533H1
tgaccacactatttcttgtntgtntggtaattgcatttactatggcagaagagattacatcgagcgcaacatcagagttttgcttgataatggagtgggagaaacaaacattgcaagattgcttcggaaccgttgtagggcggttttcacctctgatattcttaaggtggtggaggaagtaaaggatctggggtttgatcctcaaaatcagcttttgttacagcattgcttgccctaaaaagtatgagtcaaacctcgtggaaggagaaagttggcgt

SEQ ID NO: 27963 - DNA, 271 bp, Glycine max
  unsure (1)..(271): unsure at all n locations; Clone ID: 701059540H1
cgatcggcaggcagtgatagcaaagagaagatcatttcataatcagactcacctaactccgccatggctgctgttccctctactttcgctctaaccaaatctgcattgtccataaacaagctggaccactctctggtcaagatcaaaccatacagcttctctctgaatctaaaccgtctagggaggatggaaacatctttaaccaganggcctctaacaattcaagccacatatagtgatggtggaaggcccagcagtgctagtgtatttg

SEQ ID NO: 27964 - DNA, 266 bp, Glycine max
  unsure (1)..(266): unsure at all n locations; Clone ID: 701059542H1
ctctaagactatcagcaagctggcacatccaaatgctccccttggntatgggttgtgtttcctgaaccttgcttttgatggatttaccaatgcaacccaggattctttaaaagcaaggtatccaaaaacaagtgcttgggatattatgctgggcatgaatttatggggaaccatatataatatgatttacatgtttggatggccccatgccagtggatttgaggcagttcgcttttgccaacatcatccngaggcagcatgggata

SEQ ID NO: 27965 - DNA, 272 bp, Glycine max
  Clone ID: 701059548H1
actgcggagagagaaattgagtttccgagataaccagttttctctttgattcatcaatggcaactgcgaggaccgtgaaggatgtttcgcctcacgatttcgtgaaggcttatgcttcccacctcaagcgttccggcaagatggagcttcctgagtggaccgatattgtaaaaacagcaaaatttaaggagttggctccatatgatcctgactggtactacattagggctgcctcaatggcaagaaagatctatttgagaggtggtcttggt

SEQ ID NO: 27966 - DNA, 278 bp, Glycine max
  unsure (1)..(278): unsure at all n locations; Clone ID: 701059549H1
canaaaagtgaganacacgaacctcaaacctcagacagaaccaaaaacacacttcttctcttcttccattctctaacgctatcagcatcaacacagtgtcacatccattaacgtgctatggtgtttagttaggaaacaccggtggtaaaattgtacgaagcagaaagaacatggctccgtctagcaaggctgagaaaaaggctgccgtggatgcagctgcatggatgttcaatgttgttacatctgttggaatcatcattgtaaacaaagctttgatg

SEQ ID NO: 27967 - DNA, 272 bp, Glycine max
  unsure (1)..(272): unsure at all n locations; Clone ID: 701059550H1
accctaacccgcttcgaaccgtggcttcctcaggctcgcagaacctctctcgaagaaaacnnnnnnnnnnnnnnnnnnnnnnnnctcaacaaacacccgggtcgacccggatcgtttaccgagaatctcggatcccatcggaatccganttcccgatctggcagcagaactggttcatcgcattgctcttcgtcatggctctcggattcttcgccctcgccattttcctcttcctcactctcgactncnccatcgctccttcttccaccgcc

SEQ ID NO: 27968 - DNA, 267 bp, Glycine max
  unsure (1)..(267): unsure at all n locations; Clone ID: 701059553H1
gcaagantttccattgcatgcaaagcaaatacgcattatattactagttttaatttgttttgtcgtttgcttctttctttgattaatgatgactagctttaaggttgcatgtntggttgcnatgatgtncatggttgtngccatgagtgttacacccatggcacaggccgcaatcacgtgcgggcaggtcgccggcgacgtgtctccgtgcctcagttatcttcgaagcggcggaaaaccgtcggacgcctgctgcaacggagtgat

SEQ ID NO: 27969 - DNA, 266 bp, Glycine max
  unsure (1)..(266): unsure at all n locations; Clone ID: 701059555H1
gttgagtaatataatgtggagtacattgctggaggtactgcactaaatttggagtattggatttcagataattgctttaatatttaatatcataaacaaacttaataaaaccagcagtggaagtgcatgtntcataatgacagcttctacatttttcttattgtgtgatggcaggtgccactcagaattcaatcaaggttgctcaanggatgctccaagttcctggtgcaacaagttacatgggtggcataggaaaggataagttt

SEQ ID NO: 27970 - DNA, 267 bp, Glycine max
  unsure (1)..(267): unsure at all n locations; Clone ID: 701059556H1
ttgattctttccaaatctggaatcatgcgtgctttaggtgaaggtgttcgtgtgcagacaaaaaagangaggaaaataagagaaaaatacattttgtgacaactataatcaactgatatttgaatactaattaacagtgttaattttaaactaacagaataccaacttgaataattttaaaaagataaagaacttttcaaaaataaaganataaagtgaaaaaganaaanaaaactaaatagttcatttggccattctaaaattatt

SEQ ID NO: 27971 - DNA, 264 bp, Glycine max
  unsure (1)..(264): unsure at all n locations; Clone ID: 701059557H1
ttgcgctcacatcgtgttctctgcggcgcgagctagctagggtttagaacctcgcagttacagaaaacatggcgactgtngtgccaacctccgaagaagacgctgcactctccgtcgttcgattcgcctctgaacttgcctgggccgatgccggtcccgaggttgctgagccccaagttagcagactctgcgtggaggctgaagaattcattgttatgggaaagtggttggagctagcatcattgatgattacctctgctgaat

SEQ ID NO: 27972 - DNA, 262 bp, Glycine max
  unsure (1)..(262): unsure at all n locations; Clone ID: 701059558H1
gaacaatggcgggtagggtttcgacgtgcttcttcttcgtgtttgctctttctctccttcttccttttcagatctccgctgaggaatcatcggagaaagagttcgtactcacattggatcactctaactttcacgacactgtcagcaagcacgatttcatcgtcgtcgagttctacgctccatggtgtgnccactgtaagaagcttgctcccgagtatgaganagctgcttctatcttgagtagtcatgatcctccggttgt

SEQ ID NO: 27973 - DNA, 261 bp, Glycine max
  unsure (1)..(261): unsure at all n locations; Clone ID: 701059559H1
tgagtttgttgatcgagataactagaaacagtgtgatgaaaatgaaggtccttgttttcttcgttgctacaattttngtagcatggcaatgccatgcgtacgatatgttccctctccgaatgaacactggctatggtgcccgtactccggaggtgncaatgcgcaagttggaggcttgctgtggaagcacacaacatctttggctntgagaccattcctgaagagtgcgttgaagcaacaaaggaatacatccatggcgaa

SEQ ID NO: 27974 - DNA, 261 bp, Glycine max
  unsure (1)..(261): unsure at all n locations; Clone ID: 701059561H1
gtttgttgtgagctataagctagtttatcgtgaggngaatatgaagttgtttgtcttctttgttgctgcagtagttntggtagcatggccatgccatggcgcaggctaccaaaggttccctctccgaatgaaaactggctatggtgagcgttcttcggaggtaaaatgcgcaagttttaggcttgctgtggaagcacacaacatccgagctcttaaaaccattcctgaagagtgcgttgaaccaacaaaggactacattaa

SEQ ID NO: 27975 - DNA, 267 bp, Glycine max
  unsure (1)..(267): unsure at all n locations; Clone ID: 701059563H1
cttaatcgatcancacttcacttcactaatacatcatggcagacgagacccagaacaagtatgagagctctgaggttgaggtccaggatcgtggtgtttttgactttctcggtaagaaaaaggatgaagaagacaagcctcatcctcaggaggnggtcatcgccaccgagtttcaaaaagtcactgtctcagaccaaggagagaacaagcacagcctcttagaaaagcttcaccgatctgacagcagctctagctcttcaagtgagg

SEQ ID NO: 27976 - DNA, 270 bp, Glycine max
  unsure (1)..(270): unsure at all n locations; Clone ID: 701059564H1
ctcttttggacaatggaangtggagtacccttccttgactgtctcntgcaaaacactcttagaagcatttgctcatttcccacttcttcaacttcttccaagtgggtgtatgcagtcttctggaggatagtacctcgaaactttcctccgcctaggtgggaatttggaggaacagctcttgatcgctcaaagggaaacaaaagaaactggatcctgtatgggaagatggtttctgcgattttnatgaatgtgaacaagggaggaatggat

SEQ ID NO: 27977 - DNA, 270 bp, Glycine max
  Clone ID: 701059566H1
ttttaattctcagatccaagcttgggagacagagaaagagaaagagaatggacgccattgattctgtgttcgatccgctgagagaattcgcaaaggacagcgtgaggctcgtgaagcgctgccacaaacccgatcgcaaagaattctccaaggttgccgtccgtactgcaattggtttcgtcgtgatgggattcgtcggtttcttcgtgaagctcattttcattccaattaacaacatcattgtcggatctggttaggatgaagggaact

SEQ ID NO: 27978 - DNA, 268 bp, Glycine max
  unsure (1)..(268): unsure at all n locations; Clone ID: 701059567H1
tgaaattacataggatttatagggtcatcaagaactcttcagcatcacaaaaggtgntttataatcaaaaagcaagggacagacacacagaagttgttatcttgaatnagaaaacatgatgctaagaagntcttcaacaccagttcttgganccctcctctcttccttcacagatagccctgganaacaatatncantnagaaacctgtcatgcactgaaacactttccaccaaccanngtcagtgggnattatnaggngcntacttt

SEQ ID NO: 27979 - DNA, 269 bp, Glycine max
  unsure (1)..(269): unsure at all n locations; Clone ID: 701059568H1
ctgaaatcngaagctaacttangggaaatgagatggcnaatggcaacactagtcatcgcttcaagctcttgcttttnccttctaactctgnactcntcantcgcngngattntcttcgaagagagattcgaagatggatggaagagccgttgggtgctatccgattggaaaagcnagtgaaggaaaagcgggtaccttcaagcacacagcaggaaaatggtctggggatcctgatgacaaaggtcttcagacatataatgncgccaagc

SEQ ID NO: 27980 - DNA, 265 bp, Glycine max
  Clone ID: 701059570H1
ctcattgctttcaattttccaataccttttctgagtaccaaaacagaaggcatatccgcacatacacattccaacgtacaaaatgaggcactttttagtactagtaccactgatcttgcttgtttttgctggtttcccatccaaagcaaaagggtctctgctaccattcacaaatcatccaaataccctcttggctgatctatggtctaatcatttccctgatccatttcgcgtgttagagcaaatcccatttggggttgacaaa

SEQ ID NO: 27981 - DNA, 265 bp, Glycine max
  unsure (1)..(265): unsure at all n locations; Clone ID: 701059571H1
gctgtctgctgttagatctgtacccgcctagccattgatttggaaaagtccaacttcaaggatgagtaagcttcagagtgatgctctaagagaagctatctcaggaatcatggctgattccaaggaaaagaacaggaaatttgtggagaccattgaactccaaattgggttgaaaaattatgatccccagaaggacaagcgtttcagtggctctgttaagttgcctcatantcctcgccccaagatgaagatttgtatgcttgga

SEQ ID NO: 27982 - DNA, 264 bp, Glycine max
  Clone ID: 701059572H1
gagggtccaccagtgaacttcaaacatccaataaataaattgaatccagagaaaaatggggtggcaaagggacctactaagttttataacccagagatccatgctgctgcattctgtctgccttcttttgtggacaaggttgattgatccaacagacattcataaatgactcggtagcattaaggaattgctgttagttaccctttgtttttgctgtgtcgttctgcatatttatgatattatccttttattatgttatttagt

SEQ ID NO: 27983 - DNA, 261 bp, Glycine max
  unsure (1)..(261): unsure at all n locations; Clone ID: 701059574H1
ctagagagggcaaaagatcatctatctttctgcttcaaatcttcacgctcatcatttacaataaatatgtgggaaattgatagcacagtaaaaaaaggaaggcgcaagacaccaggtactgctgggaacaaaaaatcccttgaggttaacttacctgaaagttctcgaaaatttattacttgcattcgaaagtatttgcngttttatctcaaactattggaagagactggagatagatgtattctcgaacgtcatatgttg

SEQ ID NO: 27984 - DNA, 261 bp, Glycine max
  unsure (1)..(261): unsure at all n locations; Clone ID: 701059575H1
ctctattctctaacatnacaatttcaattgtctttnttttacataatcatggccatgaaacgtgctgttcaatccctgcttgcctcatcttccaccctcaccaggaantcntcatgcctcaggaganaaaaagaagattgtaggggtgttctacnaagggaatgagtatgcttcgaatcccaattttgtgggatgtgttgaaagagcattgggtatacgtgagtggttggaatcacagggtcaccagtacatagtcactgt

SEQ ID NO: 27985 - DNA, 256 bp, Glycine max
  unsure (1)..(256): unsure at all n locations; Clone ID: 701059577H1
aggcattgattctggttggggggtttggaacaaggctgaggccactgacactcagttttcctaagcctcttnttgattttgctaacaaacctatgattctgcatcagatagaggcccttaaggccattggagttactgaggtggtgctagccatcaactaccaaccagaggttatgttgaatttcttgaaggattttgaaacaaagctcggcatcaagatcacatgttctcaggaaactgaaccatngggaacagc

SEQ ID NO: 27986 - DNA, 260 bp, Glycine max
  unsure (1)..(260): unsure at all n locations; Clone ID: 701059578H1
tcgagtaaggnattatctgtcaatttacattcgaaagggttaggctattgaattttaaataattacagataaaataatcgatagctttgattttaaaaattaatcataatcatcggttaggttgcaacataatacttaattcgcttaattntttaactgcgcctcagagtattcataacatattctattaaattaataagctggtgatgtaattaatattaatatgtagtnttggcaatcttattggcagaagatgctag

SEQ ID NO: 27987 - DNA, 264 bp, Glycine max
  Clone ID: 701059579H1
gaacggggaaacagaacgggacctagaagctggcgaaacggagcaggaccagaaacctgcgaaaccatacgaggagaagatcttggtgatcatggccgggcaagagaagccaacattcttagcaactccgagtgtttcgagttgcagcactagcaggtcctcttccttcggcgacaacaccagcacgtgcacctgcgaggagaaccgaaaatcgcttgaaatggcacaggctgggactgggaccaccgaaaccgcacactcctc

SEQ ID NO: 27988 - DNA, 270 bp, Glycine max
  Clone ID: 701059580H1
gggcaaatgccaagtgacaaaacagttggcggaggtgatgatgctttcaacactttcttcagtgagactggtgctggaaagcacgtgccacgtgccgtctttgtagatcttgagcccactgttattgatgaagtgaggaccggaacttaccgccagcttttccacccagagcagctccgcagcggcaaagaagatgccgccaacaactttgcccgtggtcattataccattgggaaagagatcgttgatctgtgcttggaccgcatcaga

SEQ ID NO: 27989 - DNA, 269 bp, Glycine max
  Clone ID: 701059581H1
gtactcagatttagccttggctttggacaagctctttggttcctatggaatggtggaggccttgaagaatgcggacaattctgaacacgttcccatttatgaggacaaagatggtgactggatgcttgttggagatgtcccttgggaaatgtttatggagtcatgcaagaggctgaggattatgaagaggtcagatgccaagggcttcggtttgcaaccaaaaggatctctgaagggattcatagaaagcgcggcaaagtgaaacatta

SEQ ID NO: 27990 - DNA, 267 bp, Glycine max
  unsure (1)..(267): unsure at all n locations; Clone ID: 701059582H1
caaattacatagcctcagtaatctgagagagaaacaaaaacaatgaaggtttccattgccaagttccactcccttcccctatgttttttccttctcttggccttcaacacaaaacccctcctagcagcagaaccagagccagtggttgataagcaagggaaccctttggagccaggagtagggtactacgtgtggccactttgggctgatgaaggaggcctcacactaggccaaacaaggaacangacatgccctctttatgttatc

SEQ ID NO: 27991 - DNA, 265 bp, Glycine max
  unsure (1)..(265): unsure at all n locations; Clone ID: 701059583H1
tcataagtgaccaaaaaagacaacctttggggaatcataaaattcttcagaatggctcgcacaattacaattgcagcaatgtgtcttcttctctcattagtgtccctctgtgtcaccaccaacgcattaatgccatncacacgtagcaccctctgggacatgatgctccaatccgaggacccatttggaatcttggaacagaacccattcaacaacatacccaacatcagaggaggagccgagactctcgccctggcacgtgcgg

SEQ ID NO: 27992 - DNA, 263 bp, Glycine max
  unsure (1)..(263): unsure at all n locations; Clone ID: 701059584H1
gtcatgctttattggtggggagnggatgtagtcatgtatgtagttacaatattacattcgtacattgaattttagtcaaaaaagattatccacattttcagtgcttgaattcagaatcagagggtaaaagctgagttaattgctcagtaagcattttttccngaactgttaaacatgtgtcttctctttgttgaaattggttttngattttgtntttgtagtccactggtccgtttgatgtgattttctggattctagagatt

SEQ ID NO: 27993 - DNA, 263 bp, Glycine max
  unsure (1)..(263): unsure at all n locations; Clone ID: 701059585H1
ccccttcccaatctcaaacggcaaaggtgccacatacatttcctgcttctcacctgatatttttccaatttgtntaatcttcctttcttttctctaccnnnnnnnnnnnnnnnnnnnnnncctccttttttccttcttctaccagcttctagaacaaggatgtgcccatttcctgcttacttgaatctcaaacacaaaactgaatctttgacaacaatttcaagattttcccaccaacccaccacagcaaagcacctggtcgc

SEQ ID NO: 27994 - DNA, 262 bp, Glycine max
  Clone ID: 701059586H1
ctacaaggctttgaatgatcaccatgtccttcttgagggtaccctattgaagccaaacatggtcacccctggatcccaatctgctaaggtttcccctcaggtggttgccgagcacactgtcagagcccttcagagaaccgtgcctgctgcagttcctgctgtcgttttcttgtctggtggccagagtgaggaggaggcatccgtcaacctcaacgccattaaccaggtcaatgggaagaagccatggtcactctctttctcc

SEQ ID NO: 27995 - DNA, 261 bp, Glycine max
  unsure (1)..(261): unsure at all n locations; Clone ID: 701059587H1
acctggccacatggccagcagttgtccaaatgagggcatttgccacacctgtggtaaagctggacaccgtgctagggaatgctcagcccctccaatgcctccaggggacttgaggttgtgcaacaactgttntaagcaggggcacattgccgcggaatgtacgaatgagaaggcttgcaacaactgtaggaagacaggccacttggcacgtgattgtcctaacgatccaatttgtaatttgtgcaatgtttctgggcatgt

SEQ ID NO: 27996 - DNA, 262 bp, Glycine max
  unsure (1)..(262): unsure at all n locations; Clone ID: 701059588H1
ctggtaaggntgcttcgatcaggctcagatnagcacngttgttggtgctttaaatgctcttttagtgtnggnaaatgntgacggaactagtgcagaagctatggctnaaantggtgctatagaggctctcttggagctcctacgatctcatcagtgtgaggnaactgctgcaagacttttagaagtattgctgaacnatgtgaagattcgagaaacgaaagtaanaaantcagctatcgtaccattatcccagtatctttgg

SEQ ID NO: 27997 - DNA, 262 bp, Glycine max
  unsure (1)..(262): unsure at all n locations; Clone ID: 701059589H1
cagaaaacgggggtgattggttactcatcattctccattctacgcatacncantatnnngcttttctctctcaaacatccgttatggcccttcgctccgattcgnngccgttattcccgccgccgtcgatctcgacggcacgaaacctgagacgaacaactccatttctcagttatttgcttatattttgagaggagcacaaggaaccgttttgtactaaagagcnagtgagagggggagatgaaataagttcttacagaag

SEQ ID NO: 27998 - DNA, 258 bp, Glycine max
  Clone ID: 701059590H1
ttggctgttttgaacattcacccaatttgcagagttccaagttatatacatacactgcataattaagagaaaatgtctctgattccaagtttcttcggtggccgaaggagcagtgttttcgaccctttctccctcgatgtgtgggagccctttaaggattttccatttcccagttctctttctgctgaaaattcagcctttgtgagcacacgagtggattggaaggagacaccagaagcacacgtgttcaaggctgat

SEQ ID NO: 27999 - DNA, 256 bp, Glycine max
  Clone ID: 701059591H1
gcagttaatagcaatttcgataagaaaagttccaaaattcagctaagagaaaatgtctctcattccaaacattttcggtggccgtaggagcaatgtgttcgatcccttcaaggattttcctttcccaaattccgtctctacttccttccctgagttttctcgggaaaattctgcgtttgtgagcactcgtgtggattggaaggagaccccagaggcgcacgtgttcaaggccgatattcccgggctgaagaaggag

SEQ ID NO: 28000 - DNA, 257 bp, Glycine max
  Clone ID: 701059592H1
ctgcgaaaacccccaactccaacctctgttcatcgtctaccgcgctttcttttcaaccagaactatgattaagctttttaaagtaaaggaaaagcagagagaacttgcagaaaatgcaagtggcggaccacctgttaagaagcaaagtgctggagagttgcgtcttcacaaagatataagtgagctgaatctaccaaaatcatgtaccatgcaattccccaatggcaaagatgatctgatgaactttgaagtttcaa

SEQ ID NO: 28001 - DNA, 258 bp, Glycine max
  unsure (1)..(258): unsure at all n locations; Clone ID: 701059593H1
cagaaagagatactcggaaaaagaaactgcatcgctcacgcacgcgttaacattaccacgttcttagttacagcacttctgctatcctnnccgtcttcaatttccctttggatttcattcattaggtgagtacgtacgattacgatggattcgagttcggagcatcaagaattcgattatttgtttaagttgttgatgattggagactctggggttggcaagagtagtcttcttctcagtttcacctccgatgctttt

SEQ ID NO: 28002 - DNA, 259 bp, Glycine max
  unsure (1)..(259): unsure at all n locations; Clone ID: 701059594H1
cgaccattagcactctaatggctccaacaaatgtcacatgcttcagagaagaaaatgaatccgagaaaggggaggaaataacaatagaagaagacaagctaagtcaagaatgtaaggngttgatactctctcttcctagggagagaggttggagaacacgttatatatatctatttcaaggattttggtgccagccattggaaatccaagcaataatcacttttcagaagcacttccaagctaaagacagtgatgttat

SEQ ID NO: 28003 - DNA, 264 bp, Glycine max
  Clone ID: 701059595H1
tcgaggttgggcaaacaactggaattgcagagaaaatgaacagcgccatcttcaaagcttcaaacagcaacaatctccattcctctctcagggccgcactcttccattccacctctcccttgcaacgtaaacgccgcaatcattgggactccagagggagcaaccatacctcgagaaggtttagaagggtgcaagcgaaacacagagtaatgaacagtatcaatgattatgcagaatccctgtttcagagctggaagcaaggta

SEQ ID NO: 28004 - DNA, 256 bp, Glycine max
  unsure (1)..(256): unsure at all n locations; Clone ID: 701059596H1
accaatcactacttattcaatccaaggatggcttccgccggcgatcttttcaggcatggtttgccggaagttggtggtgccgggaagttacacgtgcttgctgttgatgacagccacgtggaccgcaaggtgatcgagcggttgctcaaaatctcgtcttgcaaagtgacggtggtggaaagtggtagcagggctctacagtatctggggttggatggagaaaaaagttccattggttttgaaagtgtggatgtna

SEQ ID NO: 28005 - DNA, 283 bp, Glycine max
  unsure (1)..(283): unsure at all n locations; Clone ID: 701059601H1
acctaaacccctcgttngtggtagcggctgtgacagactcagaggcggacaaggagaatgggaaggtcgagaagaaagtacaagcaatcgagaaccaaggtccgtgtgggactccctaagaagaaccctaggcttttcaaaccctctttctccgttccacccaagctcttgcgaaccctcgccgaagagccccaatgggacgaccaaggcaccgttaacagcaatatcctccttcggcttctctnccgaccctaattccttcaangagcttctcccgatctca

SEQ ID NO: 28006 - DNA, 281 bp, Glycine max
  unsure (1)..(281): unsure at all n locations; Clone ID: 701059603H1
gngacgttgaggatgttgacgaggacaaggagaaggattccaaganaaagaagaagatcaaggaggtgtctcatgagtggcaactcancaacaagcagnaaccaatttggctgcgaaaccagaagagatcaccaaggatgaatacgcttctttctacaagagcctcaccaatgactgggaagaacacttggctgtgaaacatttctctgttgagggccagcttgagttcaaggccattctctttgtgccaaagagggcaccctttgatttgtttgacacca

SEQ ID NO: 28007 - DNA, 280 bp, Glycine max
  unsure (1)..(280): unsure at all n locations; Clone ID: 701059604H1
agangagaggagagaagagaggaagtttngnngtttgnatctatagantagaatcaaancaanttgaaagaagatcgatcgatcgatcgatggctctggtcggagttgaagtgaagctgcggcgganggcgcaccggaggaganttgctccnccaagcccaccaagncagggcganggcctccgccactactattctcacaacatccacgagcatcagcnccttctccgtcaaaagacgcatancctcaaccgtcttgaggctcagagaaacgagtcatt

SEQ ID NO: 28008 - DNA, 276 bp, Glycine max
  unsure (1)..(276): unsure at all n locations; Clone ID: 701059605H1
aatanagtgatggtcnatanagcatttngtacatctagtgatctcttcattgatganagattganaatcgcattagatggcatcattgtcattancatggaaatatttcgccctaagttntagatggttcggctgaaaacaccttgaaagggaagataaggattaccacgagatgcttatggcttgacaaggggaaactgatggatgcactctacaaagctgcccgtncagctnctttcaagctgccctgtaaagagtccacttgctcacatcgaa

SEQ ID NO: 28009 - DNA, 276 bp, Glycine max
  unsure (1)..(276): unsure at all n locations; Clone ID: 701059606H1
gctcctttccctctctaataagggttcctctttccttctctagcacaatttacaatctcaatggctggaatttgctgtggtgttgttggagaaggtgacactccggctccactcgagcccantcctcgcccctccaggcgccggagtttggacatcttacctttaaaatatatcgccgacatgcccatgccgccgccggangtttacggaagcgtcccaagctcaacctcagggactgcgataacgcaattgaaaattgcgacgaatccactggac

SEQ ID NO: 28010 - DNA, 274 bp, Glycine max
  unsure (1)..(274): unsure at all n locations; Clone ID: 701059607H1
tccaattctctacncttcantattcctnatttttggcgaagtcgtattgactattgangatggccattgacgacctctgcggcgatnctnaagctgaaactccgctgctatcggaacgctatacggcgtcgtcaacttcaagggcctccccgtcctacgatctacctctggtggttggnaagctgctgccttcattatanctgtggaagtggctganagatttgcntactatggaatcaactcgaacctgataaattattngacggggccantt

SEQ ID NO: 28011 - DNA, 275 bp, Glycine max
  Clone ID: 701059608H1
cttttgcgcgtgtgcattcctcttcccttcaaagctagcactttaccccaccaccacaacaaccccttttgctcccacgtgcacagagtcaaacccaaagctctttttttctctcaaacccacaacaacaaaaacagagcttctctgttttctccattcccaaaacacaaaataaaataaaaaaggaatctttttcacgcataattctgctgaatttcggaacagaaaatgggtgctggtgagtactacaagatcctcaaggtgaaccgcaatgc

SEQ ID NO: 28012 - DNA, 272 bp, Glycine max
  unsure (1)..(272): unsure at all n locations; Clone ID: 701059609H1
gtttcataggctcctttttgattacgaaaatgtggaagagaacgggttttgaagaagaagcagttcaattgatcaactcagatttcagggacctaagtctagctgctaatagatcgcccatcatgccatcanacttggtggcattggctttggagcctcttttttcggattgtttgctgccattgctgctatttatctgttgattttggatcgtacaaactggaaaacaaatattctcacagcactactcattccatacattttcttcagct

SEQ ID NO: 28013 - DNA, 251 bp, Glycine max
  unsure (1)..(251): unsure at all n locations; Clone ID: 701059610H1
ggcgtcttgtatactgacaaggatacctttaggtcgcaggnctgtaaaaacccagatggacgcttgctggcctatctgtgagagaggatgctgttgtaacatatttggtcgttgggatggccttgaacctgagcttgctgcagttgcaacaggttcgcacattgatgctataccttactcgggaaaatatgatggagttgttggtgttttaggtgctattgaagccatcagagtcctgaaaaggtctggtt

SEQ ID NO: 28014 - DNA, 270 bp, Glycine max
  unsure (1)..(270): unsure at all n locations; Clone ID: 701059611H1
aagatggagatgtatcagatctggagcaggagaatagcgttgggagcgttcgcgtttgtncctgcttttcctatcggcctcagcagacgacgtcgttgtgctctctgaagataacttcgagaaggaagttggtcaggacagaggagctctcgttgagttctatgctccttggtgtggacactgcaaaaagcttgctccagaatatgaaaagctggtagcagcttcaagaaagccaaatctgttttaatcggcaaggttgactgtgatgag

SEQ ID NO: 28015 - DNA, 223 bp, Glycine max
  unsure (1)..(223): unsure at all n locations; Clone ID: 701059612H1
cgctataccagcagcagcattttcttttccattncccaacatcaacagcaaaacaaangatcatcatcatgcatgtcgttttcgtttttcaaggctttgaggcctaaaacgccgcaagaggtggccaagtccatcaaggagagtctcatggccctcgataccaaaaccgttgttgaagttaaagcccttgagaaggtttagaggaagttgaaaagaatttgta

SEQ ID NO: 28016 - DNA, 275 bp, Glycine max
  unsure (1)..(275): unsure at all n locations; Clone ID: 701059613H1
cacgaatttcattgcagagtgttattttgagtatcagcatcaatggctccaattgcantgggaaacgtgattccagacggcattttggcttacttggatgaagaaaacaaaccccaactgtctccattcactctctcgccaccggcaagaaagtcatcatctttggggttcccggtgccttcactcctacttgcagcttgaagcacgttcctggcttcattgagagagcagaagagctgaaagggaagggtgtggacgaaataatctgtatcagt

SEQ ID NO: 28017 - DNA, 277 bp, Glycine max
  unsure (1)..(277): unsure at all n locations; Clone ID: 701059614H1
gtaggtctgtgtccaggtctctctcaatatcaagatccagaagccgttcaaggagtttatcaagagatgcagaaaatccaggaaacaatttgtatgtgacaggattgtctcctaggttaccaagagagaactggagaaacattttgctgctgaaggaaaagtgatagatgtccatctggtagttgatccttggacaagggaatcccgtgggtntggctttgtgacaatggagactcttgaggaggctgaacgatgtgtaaagtatctgaatcgctct

SEQ ID NO: 28018 - DNA, 284 bp, Glycine max
  unsure (1)..(284): unsure at all n locations; Clone ID: 701059615H1
gnaaaatccacttcattttcattntcacttccattttcggattttccatccgaaatcaaaatctcttagttctgtctctactcntctttcnctctcttccattctatctatccattcntgtccatcgccgacaagcgccaatnccctccatttcaaagcaaacccctttctcttctcggctgntgctttgaacttgaaaggtgctgaactattttccattctcttttgcaaatttacatctgttctgcaaatactttcttcaggaccttgcatttgagaaatgt

SEQ ID NO: 28019 - DNA, 288 bp, Glycine max
  unsure (1)..(288): unsure at all n locations; Clone ID: 701059616H1
gagataactagaaacagtgtgatgaaaatgaaggtccttgttttcttcgttggctacaattttngtagcatggcaatgccatgcgtacgatatgttccctctccgaatgaacnctggctatgtgcccgtactccggaggtgaaatgcgcaagttggaggcttgctgtggaagcacacaacatctttggctttgagaccattcctgaagatgcgttgaagcaacaaaggaatacatccatggcgaacaatatagatcagactccaaaacagttaaccaacaagcttact

SEQ ID NO: 28020 - DNA, 280 bp, Glycine max
  unsure (1)..(280): unsure at all n locations; Clone ID: 701059617H1
cggaatcagctagaattttctaataatngccaaanacgttgagcaggttacagagcaaggtgaatactccgcgaaggattaccatgacccacctccggcgccgttgatcgacccagtgagctcactaagtggtccttgtacagagccgccatagctgagttcatagcaacactccttttcctttacatcaccgtgttgaccattantggctacaagagacagngtgacancaaaatccccggtaacaccgagtgccacggcgttggcatttngggccncc

SEQ ID NO: 28021 - DNA, 278 bp, Glycine max
  Clone ID: 701059618H1
atttgctcccagcactgagcttaaccgagcttcacaaagatgaatcgggaaaaattgatgaagatggccggttcggttagaactgggggaaagggcaccgtgagaagaaagaagaggctgtccacaagacaacaaccacagatgacaaaaggcttcagagcaccctgaagagaataggggtgaatgccatcccggctattgaggaggtcaatatctttaaggatgacgtagttatccagtttctaaatcccaaagttcaagcatccttgctgctaata

SEQ ID NO: 28022 - DNA, 280 bp, Glycine max
  unsure (1)..(280): unsure at all n locations; Clone ID: 701059619H1
ctaaaatcagctctgaaattngtgttcaggcaaccgntgcaaagtggttcaacctcttgcacaacacaacttncatcacgttcaaaatcttactgatagaattcatggaaccgagctgcatcatggtgaagactggcatcacaatgagtcggtcaagcactggacttataccatagatggcaaggttacaacttgcaaggagagtattgaatccgtngatgaagagaacaaaacaatcaactacaagctcttcgatggagacattnntaatcagtttaag

SEQ ID NO: 28023 - DNA, 275 bp, Glycine max
  unsure (1)..(275): unsure at all n locations; Clone ID: 701059620H1
cggaaattctgaatcttgcaagcaaacctagtgctttggnganaccgnatgggtctcacactgctgttgttggtggtggtcagactgcctgggatatgctcaatgatgaaaagtttcttcttacattaccacatcttgtgcagatctggataacatccttggtggaggaattaagtgcaaagaagtcactgaaataggattcaacttgcggtaaatgttcagattccacaagaatatggtggcctaggtgggaaggcaatatacatcgacacagt

SEQ ID NO: 28024 - DNA, 265 bp, Glycine max
  Clone ID: 701059621H1
atcgatccctttggggagataagaaaatgtggcttgtgcagctctcaaccccatttctgaacggccatggccatggctccagccttctctggaaacccagttcggggtgactcagacccactgggccccgccgagtttgctgcctcaaatcaatgcgatgaagacgatgcagggaaaagtggtgtgctccacgaacgacaagacggtggcagtggaggtggtgcggctggcccctcacccaaagtacaagaggcgcgtgaggaag

SEQ ID NO: 28025 - DNA, 273 bp, Glycine max
  Clone ID: 701059623H1
caaactccatttctcactcgccgtcgtctcttccgtctagggtttctcctcttcacaaaaatggttgccgcaaaaaaaactaagaagacccatgagagcatcaacaacaggctcgctctcgtcatgaagagtggcaaattcaccctcggttacaagaccgttctcaaatctcttaggagctccaaagggaaattgattatcattgctaacaactgcccccctttgaggaagtcagagattgaatactatgctatgttggcaaaggttggggtt

SEQ ID NO: 28026 - DNA, 272 bp, Glycine max
  Clone ID: 701059624H1
tgagtctctgtccgaagccacttgagagaaaatggcggtgcctctgctctcaaagaagatcgtgaagaagagggtaaagaagttcaagaggcctcagagtgacaggaaaatttccgtcaagactaactggcgcagaccaaagggtatcgattctcgtgttaggagaaagttcaagggatgcactttgatgccaaacattggttatggttcagacaagaagacccgccactatctccctaatggtttcaagaaatttgttgttcacaatgtga

SEQ ID NO: 28027 - DNA, 268 bp, Glycine max
  unsure (1)..(268): unsure at all n locations; Clone ID: 701059625H1
cagatgcangtnaattacttgaaatgtgaaatttggcaggtcatggatgtgttgttgttgttattatnatgtgttctcttggttggtttgccaaacctggctatagtaganagtcgcagggctcccgttctggactactttgagtantgtgctatgagctgcagagcttacagtgcctcgttggaagaatttggaggggttggtgatggaacaactttgaacactaaagcctttcaggctgccatagagaatctgagtcagtatgcag

SEQ ID NO: 28028 - DNA, 267 bp, Glycine max
  Clone ID: 701059626H1
gctacaatatcctctctttttctcttcgcactctccctcatggcaaggttgagaggctctatggtctcgcccctgttgctaagtacttggtcaggaacgaagatggtgtcccattgctgctctcaacctcatgaaccaggacaaaatcctcatggaaagctggtactatttgaaagatgcagtccttgaagggggtattccatttaacaaagcatatggaatgacagcctttgaataccatggaacggatccaaggtttaacaaggt

SEQ ID NO: 28029 - DNA, 193 bp, Glycine max
  Clone ID: 701059629H1
gtatgagagtggattagttgattatagtgttatatatagcgtccctcctttgctttccgagtttccgtgcagagggatccttctcagtgctgcgacgaacacgacgtcgtgatggatttttcaaaaggatagccggatatctagggtttggaaaccacgaacacgattccaaggatgaggcccgcgatggtca

SEQ ID NO: 28030 - DNA, 276 bp, Glycine max
  unsure (1)..(276): unsure at all n locations; Clone ID: 701059631H1
aacgaagtaaatgggtcggcttaatctcctacttgtgtggtcactctctttaanacttttccttaattatctacacccaacctctgcccagctcagtccaaaccactatgctaacattgccccaaccttgaaagcatcgttagacaagccgttactaataagttccaacaaacctttgtcacgtcccagccacccttcgcctattctttcacgattgcnttgtccaggtgtgatgctccgttttgatgcatccaccggaaataaccaggcagagag

SEQ ID NO: 28031 - DNA, 285 bp, Glycine max
  Clone ID: 701059632H1
tcacagacaaagtgctgttattactagaattgcattatacaggcttaagtgcagctatgaagaagtacccaaaaaaagtggttaaattagagccttagaaattaagtagacagtgtgatttgtttgcatagattgttttgtgagattttatagttatatatttcgtgagtccttttattttaggtttgcttagtctgagcccaataatgtggtggataaaaatgcgcttctaattcatgttatttgtcattttttcaccaagaaatgaattttatttaccataaa

SEQ ID NO: 28032 - DNA, 277 bp, Glycine max
  unsure (1)..(277): unsure at all n locations; Clone ID: 701059634H1
gtcccaagaccattnangtacgtngctctaacatatgaccacagaattattgatggaagagaggctgtgnnctntctgcgacgcatcaaagatattgtggaggatcctncgtagcttctgctcgacatatgaagtgaacctctaatnttaaatggagtaaatnaaacctcaaaattcanataccataatgggtacccttntgtctaggnnttgaatngcggctgnccgtaatttataatctgtaatgagcaaactcnntaggatcatatcccaattt

SEQ ID NO: 28033 - DNA, 272 bp, Glycine max
  unsure (1)..(272): unsure at all n locations; Clone ID: 701059637H1
atcgagataactagaaacagtgctgatgaaaatgaaggtccttgttttctncgttgctacaattttngtagcatggcaatgccatgcgtacgatatgttccctctccgaataanactggctatggtgcccgtactccggaggtgaaatgcgcaagttggaggcttgctgtggaagcacacaacatctttggctttgagaccattcctgangagtgcgttgaagcaacaaaggaatncatccatggcgaacaatatngatcagactccaaaac

SEQ ID NO: 28034 - DNA, 273 bp, Glycine max
  unsure (1)..(273): unsure at all n locations; Clone ID: 701059638H1
anaatattccgaangtcatgttccatngcngntcanatccagatagcccagacgtggntnttcgcgtcatctnagaatgctggtagttgtnactntcacatcnctgacgtgatttctgacttctcaacanagaattgagttgatggggggnaacaattctaaggaggataataacnattggaggncagaattcatctgtgcgttcaagttcctctncgtcgtctnggggtncatatcctgacccccaatcaggttatgggcactggggtnact

SEQ ID NO: 28035 - DNA, 266 bp, Glycine max
  Clone ID: 701059640H1
gaaccgtgttctctaatcttgtaattttctgtgtcgcttcgtggttcattcttctgcgttcttgtgatctgttctattttggagtacttacaacactcctttgcaagttaattaattaaagaggctaatcaattttcaattggactgcagcagatggctgaggagggttgcagggttactctaaatgtttatgacttgagccaaggactagcacggcagctttcaatgtcctttttggggaaagctattgaaggcatatggcacac

SEQ ID NO: 28036 - DNA, 268 bp, Glycine max
  unsure (1)..(268): unsure at all n locations; Clone ID: 701059641H1
ggagataactagaaacagtgtgatgaaaatgaaggtccttgttttcttcgttgctacaattttngtagcatggcaatgccatgcgtacgatatgttccctctccgaatgaacactggctatggtgcccgtactccggaggtgaaatgcgcaagttggaggcttgctgtggaagcacacaacatctttggctttgagaccattccngaagagtgcgttgaagcaacaaaggaatacatccatggcgaacaatatagatcagactccaaa

SEQ ID NO: 28037 - DNA, 264 bp, Glycine max
  Clone ID: 701059642H1
gaaaaacttcttctggctacaagaacccaaagccctcgtgtcagtatggatttctctaacggggtaagtaaaaaaatgtcagcctggggtatggtgatcgtaactgcggcctccgaggggaaattagaactttccaaaattttggactaccacttcggatataagaggtgaaagaatatgcatgcttgtgagcatggctgagaatgagttgatgatatcagctcagaaggcagtagattacaccttctccattagttggtgaaa

SEQ ID NO: 28038 - DNA, 267 bp, Glycine max
  unsure (1)..(267): unsure at all n locations; Clone ID: 701059643H1
gagagactntaanagcagatcttcattttctatgcacagggaaaccacttggnncaacatggattagagaaactcttctaaagaatgacttggatgctgatggaaggatcaaggtcgatgagcacttgagagtgaagggcaagancaacatttttgcaattggagatattacagatgttcaaganatcaaacaagggatgtatgcnagtgctcatgctcaagtggttgccaagaacctgaagctattgatanagggaggaggcaaag

SEQ ID NO: 28039 - DNA, 278 bp, Glycine max
  Clone ID: 701059647H1
gtacagtgtacagggatttataggcagagatagttgcgtaatatgaacgcatctgagaagcagttgattttccgatcagaaaatctgaatcatgtcgtggcaagcgtacgtggatgatcacctgctgtgtgaaatcgaaggtaaccacctcactcacgccgctattatcggccacgacggcagcgtttgggctcagagcgccaacttccctcagttcaaagctgaggaaataactgctatcatgaatgactttaacgagcctggatcacttgctccaa

SEQ ID NO: 28040 - DNA, 279 bp, Glycine max
  unsure (1)..(279): unsure at all n locations; Clone ID: 701059648H1
ggagagactcaaaaggggcaactaggtttgatggcctccattcatgaataatatgtcattgtattcctttttggttcacattattttntagcttaaatttgataaagcatctttttctttgttgggctgccaacacaagtcattccctatatgtttttnatttaattattggcacagcgagctttcttatgtaacccccaaaaaatattgctgaggttagcctaatttgtttcacgaatattcttttcatattatgagttggataatttcttatcaaaa

SEQ ID NO: 28041 - DNA, 257 bp, Glycine max
  unsure (1)..(257): unsure at all n locations; Clone ID: 701059649H1
ttattagtaattgtnttgtgttgtgttgagcagagagaaggatcaanacaggataananngacaganggaatagggttagggntagggtnacggtaggttnaggatgccgaagnacaagggaaagggaggtaagaacaggaagaggggaaagaacgaggcggacgacgagaagcgagagctggtgttcaaggaggacgggcaggagtacgcgcaggtgctccggatgctgggtaacgggcggtgcgaggcgatgtgc

SEQ ID NO: 28042 - DNA, 271 bp, Glycine max
  unsure (1)..(271): unsure at all n locations; Clone ID: 701059650H1
ttcacttggcaaccatcccagtaacaggcactggcattaaccctgctaggagtctaggagctgctgtcatgtacaaccaacagaaggcctgggatgaccattggatctttgggttggaccatttattggagcagccattgcagccttctaccaccaattcatcttgagagcaggtgctgctaaggctcttggatcattcaggagcaaccccgctatttgagtcaatttaatntcttcttcatgatgagttcaaaatgaagaggagttataa

SEQ ID NO: 28043 - DNA, 267 bp, Glycine max
  Clone ID: 701059655H1
ctcataacacaaagcacaaagcaaagctcatccttgagttaaaaaatggcagcagcttcttccatggctctctcatccccatccttggctggcaaggccgtgaagctgggcccatcagccccagaagtgggaagggtgagcatgaggaagaccgtcaccaagcaggtctcctcaggaagcccatggtacggcccagaccgagtcaagtacttgggcccattctctggcgagcccccgtcctacctaaccggtgagttcccaggcgac

SEQ ID NO: 28044 - DNA, 265 bp, Glycine max
  Clone ID: 701059656H1
gtgacctctcctttcttgagatcaccaaagggtcatatgaaggaggaaagcctgatgcatctttttcgtttaaggatgaggactttgttaaggttgccttagggaagatgaatccgcagattgctttcatgaggggtgcgatgaagattaagggaagtttgagtgctgctcagaaatttactccggatatcttcccaaagccttctaagctgtgagctgagatttctgcaactacctgcacaaggttgctagaattatcgtttgg

SEQ ID NO: 28045 - DNA, 167 bp, Glycine max
  unsure (1)..(167): unsure at all n locations; Clone ID: 701059657H1
gatgccaacagattgangatacatatatttcangatcataaaccattgcattggcaagacaaatggtttatgatcatgaaatatatgtatctaccgatgatgccaaagattgaagatattctgttgattgttgaagctgattatgtgtagccccctccttagccgac

SEQ ID NO: 28046 - DNA, 274 bp, Glycine max
  unsure (1)..(274): unsure at all n locations; Clone ID: 701059662H1
caaaaatggtgaagtttctgaaaccaaacaaagccgtcatcgtccttcagngacgctacgccggcaaaaaagccgtgatagtgcgaaccttcgatgaaggcacgcgcgagncccctacgggcactgcttggtggcagggataaagaagtaccctgcgaaggtgatcaagaaggattcggccaagaagacggccaagaantcgcgtgtgaaggcgttcgtgaagctcgtgaaattaccagcacctcatgcccacgcgctacacgctcgatgtcga

SEQ ID NO: 28047 - DNA, 277 bp, Glycine max
  unsure (1)..(277): unsure at all n locations; Clone ID: 701059663H1
cagatagagagagacatgatgtcaacttccggcgccggcaggtacatggcttttccgccgtctccgtccgcgcctccgtcgccgcacctctccggtcttcgctccactccccttccgacccggacaaatatctagctgagttgttgggagaacgtaacaagcttagtcccttcatggctgtgcttcctcactgctttcgattntttaaccaagaaattttgcgtgtaaccacgctgatggggaatgcatcagttttaggtcaaagtgggcttgaaca

SEQ ID NO: 28048 - DNA, 284 bp, Glycine max
  unsure (1)..(284): unsure at all n locations; Clone ID: 701059664H1
gacagttgatagagatgttggncaagaccgacaactcatgttagtgaattaatttantcactatantaactgcctaantgccancttcagtgacattctcccggcgtttngatcgatcntgancncaattcncatctacacacatatncacaatgctaagtcgtaaacgactcatcgtgtcgctctctctcgccactctccttctcttctcctccctttccctcactctctgcganaaaatcccccctcaaaacgacaacaacaacgatgacgagaagatctca

SEQ ID NO: 28049 - DNA, 269 bp, Glycine max
  unsure (1)..(269): unsure at all n locations; Clone ID: 701059666H1
gttagttattgctgtcttctttttgtgtgtgccaacaacacagaaagagagagaaagacatggctctgaaccaatcaaaggccgtgttgttgagggtgagtttggtgtggtggcgctgtgtatanccaggatacatagtgggtccccctctctactggcatttcgttgcagtnaacaaccactctncatcttctacttgtgcnccctgcatctgcgatgctcttnacaacccattctttctattccacaaggacttagcaanacttcct

SEQ ID NO: 28050 - DNA, 269 bp, Glycine max
  unsure (1)..(269): unsure at all n locations; Clone ID: 701059667H1
gacagagaagagaatggacgctattgattctgtgttcgatccgctcagggaattcgccaaggacagcgtcangctcgtcaagcgatgccacaagcccgatcgcaaagaattctccaaggttgctgtgcgtaccgcgatcggtttcgttgtgatgggattcgtgggttttttcgttaagctcatcttcattccaattaacaacatcatcgtcggatctggttaggatgaggggaatcgcaatcgcctcaggaattcaagttatcaaacaa

SEQ ID NO: 28051 - DNA, 265 bp, Glycine max
  unsure (1)..(265): unsure at all n locations; Clone ID: 701059670H1
caaagattttgtgaatntnggnctggaacactggggttctgacacaaaaggggttnagacaacaangcggttcttgttggaatggcttagctacactttacaggtaatacctgttggtcttttggatntggttccacaacgattaaactgnccgtccaccatcttactatggncgtgatgagcttgagacactaatggcctcagactctgctgccgattggatacgaatatcagagatgctacttgncaaggttccanatggctt

SEQ ID NO: 28052 - DNA, 266 bp, Glycine max
  unsure (1)..(266): unsure at all n locations; Clone ID: 701059671H1
cttgtacgcttttnctttccgtttgtntttcccaaattcatctccncaatttaagcctctgaatgccattccactaagaagaacnnnnnnnnnnnnnnnnnnnnnnnnnnnnngttaaatttccccgagaaagaacaaggaccagagcaacccttgatgatgttgaaacagaccaactttcctcaatcccacttgttgaaaatgagaaagccaaaaaggatgtagaggaaagtgtgaaagtgttaaaagatgcagctaagacaaga

SEQ ID NO: 28053 - DNA, 264 bp, Glycine max
  Clone ID: 701059672H1
gaaagaagcatattcctgagtcaaatagttctgtccatatagaatttgtgaagtgagagtccaacctttcattttcaattttcaaagatgcctcgtggaacacttgaagttgttctgatcagcgccaaaggaatcgatgacaatgattttctctccagcatagatccttatgtgattctcacatacagggcacaggagaaaaagagcactgtgcaagaagatgctggatccaagccacaatggaatgagagctttcttttcact

SEQ ID NO: 28054 - DNA, 260 bp, Glycine max
  unsure (1)..(260): unsure at all n locations; Clone ID: 701059673H1
ttgagaaggggttttagaagtccacatttttcagatttgattcgcgttcctcttctctcttctcancatcaatggcgacccccattcctcccnnnnnnnnnnnnnnnnnnnnnnnnnnnnnnnnnnnaaggtcgattacttgaaccttccatgtccgattcccttcgaagagctccatcgcgaantatgatgtctttgaagccagatctttttgagggcatgcgttttgatttcaccaagatgctcaatcagaagttctc

SEQ ID NO: 28055 - DNA, 260 bp, Glycine max
  unsure (1)..(260): unsure at all n locations; Clone ID: 701059674H1
ctctcgttnattcggatctagantcttttttcactcttcagttctcgttgttgttcttcgctttcctgaaactagggntttcaatttcgattcattcgttaanattaaagatgtttgggagggcaccgaagaagagcgataatacgaggtactacgaaatcctcggcgtctcgaagaacgcttcgcaggatgatctgaaganggcttacaagaaagccgccatcaagaatcaccctgacaagggcggtgatcccgagaag

SEQ ID NO: 28056 - DNA, 149 bp, Glycine max
  unsure (1)..(149): unsure at all n locations; Clone ID: 701059675H1
tggggtcttgctatctggttcctcttggtgctttttancganagngacatggacactatactaagtgacaacgttgttcctcatnttggcatgctccatcatgatgttcttcgttcactgcatgcaagaatcagaagaaaatcaaacta

SEQ ID NO: 28057 - DNA, 263 bp, Glycine max
  unsure (1)..(263): unsure at all n locations; Clone ID: 701059676H1
cttcgtgttgtagctagctcctcgaaaatgcnggcacgcctcgccgcgagtcgcttcaacgagatccgtcagnttttccgtcagccttctagggctttctcgacgctccgaactaccaccttgacacaccggacaacaaccctaaacttccatgggaattcaccgaggccaatcaagcaaaggttaaggagattttgtctcactatccatccaactataagcantctgctacaattcctcttttggatcttgcccagcagcag

SEQ ID NO: 28058 - DNA, 269 bp, Glycine max
  unsure (1)..(269): unsure at all n locations; Clone ID: 701059678H1
cttaaaccctagcccctcttctcttcattcttcactcaggaaacaacgcataatggccttctgtaataaggttggaaatgtcttgaggcagggtgctgctcgcagcacacaagcacctgtttcatccatgcttaattacattcgctgcatgtcttcaagcaagctttttattggaggcctttcatatggagttgacgatcagtctcttaaggatgcatttcctggcttggagatgtggttgatnaaaaanttaacactgacaganactc

SEQ ID NO: 28059 - DNA, 266 bp, Glycine max
  Clone ID: 701059682H1
tcatggccacctctgctattcagcaatcagcattcgcaggtcaaactgctctgaagcagctcaatgagttggtccgcaagaccggtggcgccggcaaaggtcgcccaacatgcgccgtaccgtcaagagtgctcctcagagcatttggtatggccctgatcgtcccaagtacctgggtccattctcagagcagattccgtcatacctgaccggagaattccccggtgactacggatgggacactgctggactatcagctgacccgg

SEQ ID NO: 28060 - DNA, 266 bp, Glycine max
  unsure (1)..(266): unsure at all n locations; Clone ID: 701059683H1
ctagagtnngaaaganaaatggagggaaaagaggaagatgtttccttgggagctaacaaattctcagagaggnaaccgattggaactgcggctcagagccaagacgatggnaaggantacacagagccacccccggctccacttttcgagccctccgaactcacttcttggtccttctaccganccggaatagccgagtttgtagccacttttctctttctctacataaccatcttagccgtcatgggtgtcaataggtccagctc

SEQ ID NO: 28061 - DNA, 264 bp, Glycine max
  unsure (1)..(264): unsure at all n locations; Clone ID: 701059684H1
ctgccgccaccaagaggcatagctgaagaatactgtganacanagaaaaatgttaggaaaagagtgctacacaaacccgccatcaatcctaaattcctctagtgggttggccatgttatcaatatcggtggtgttaattcttacgtcactggttcccctctctccatcctcgccataattctagtctctgatatttttggatttaaaccaccacttttaaggaacattgcagacaaggttgcagctactgggtattatgtcgtg

SEQ ID NO: 28062 - DNA, 262 bp, Glycine max
  Clone ID: 701059685H1
ctctcttcatcactctctgtgtcgctccgtttcaatggctcagcaagacgctcaaaacggcgggtcggagaatgccgctgctgctgctacggtgtcgtttgtcctgtgaagccgcagctcctcgtcgaagctcccaaagccaacgacgccattctgttcttcaaggctgcgtttggcgctgaggaagttggccgtacgctcaaccctaagcgcaaagctgagcacgagctccctctcatactctccgcagaactcaaaatcg

SEQ ID NO: 28063 - DNA, 260 bp, Glycine max
  unsure (1)..(260): unsure at all n locations; Clone ID: 701059686H1
gtcttcaacttcacccattcatacgtggtgttgttactgctgctcttttctcttttcttttctctttagttctctcttcccctttctttttctttntcttctacttctgagcttgtttaagcttttcttccattaacatatnatcatnatgtgtggtattcttgctgttcttggttgttctgatgactctcgagccaaaagggtccgcgtgcttgagctctctcgcagattgaagcaccgtggccctgactggagtgggc

SEQ ID NO: 28064 - DNA, 260 bp, Glycine max
  unsure (1)..(260): unsure at all n locations; Clone ID: 701059687H1
aagaatatctgatgtgataganaaaggaggaacgcagaccgaggcgtttccanttcgaaagggaaatgaaagtntccttgttggtgaagggtaggtgagaganacgaaaggggtgtgtgttgggttgaataggtatagataggatcaatgagcaacaacaacgcaggaaaggtggtgtgtgtgacgggtgcttctggtttcatagcttcatggatcgtcaaattccttctccaacgtggttacactgtcagggccaccgt

SEQ ID NO: 28065 - DNA, 241 bp, Glycine max
  unsure (1)..(241): unsure at all n locations; Clone ID: 701059688H1
gcattgaattttgnngtgataactcancatcatatcaaaatncttgggcaagatagggagcttanttaangtcctaattaaggatcatggaatcccaaacacagtctgagcncaccagttgtagacttcaccanccaaaaatctgaaaccgggtactgatgcatgggtttcagcttctcaagtagtgcgtggtgcattgaggatcatggtggtttcttggcactctatgataagtcagttt

SEQ ID NO: 28066 - DNA, 259 bp, Glycine max
  unsure (1)..(259): unsure at all n locations; Clone ID: 701059689H1
ctcaacggagccctctcttcaggtcaccatctagactgcaatcatggctgatggactacagcatccatgcagttgttcagaagcnagctggacagtcttaccggtgtccaggcttagccccaactttaactctaggaattattctgcaactggttcttacgtcaatggcggaatgcactcgcctgggttggctgttgtgtcacctgtatctccagttactgtgcatgctccagcagagaaaggagtgagtggatttcta

SEQ ID NO: 28067 - DNA, 260 bp, Glycine max
  unsure (1)..(260): unsure at all n locations; Clone ID: 701059690H1
cgcagtcctccgcggaggaaggctccggcaactccgccaccgccggcacggagtggaacgttctccgcaaagtcccatgccgccctcctcggacccctcctgggacgccatacagcgctgcggtggcgccaccctggcactcggcgacctccgctttgtgcagcgcgtggggagcggtgacatcggaagcgtctacttggtggagctcaagggctccaacggttgccnctttgcggccaaggtgatggacaagaaggaat

SEQ ID NO: 28068 - DNA, 260 bp, Glycine max
  unsure (1)..(260): unsure at all n locations; Clone ID: 701059692H1
cacctttgttcactcttcttctcttgcggctagggttttagcgcanttcttctagntttaaggnagatgggtaaggaaaaggttcacatcagtatngtggtcttggccatgtcgactctgggaaatccactaccactggtcacctgatttacaagcttggaggcattgacaagcgtgttattgagaggttgagaaggaagctgctgagatgaacaagaggtctttcaagtatgcctgggtgctggacaaacttaaggctg

SEQ ID NO: 28069 - DNA, 264 bp, Glycine max
  unsure (1)..(264): unsure at all n locations; Clone ID: 701059693H1
gagaaggtgcntgacattggagggncgggaagagagtgcttggtggtggtgttttgaattgaaaaacgagaggntatcgcagatttttttcttatcgttttcttcatttgttaaaatcatcggtgaatttcgttttattttcgaaattgtttcggtttgaatgcatgcatttgatttatggntttggaaccntctggcgattcggtgaantgctgcaagcactntggatgcgggtntagtgattgncccatggcagcttcatct

SEQ ID NO: 28070 - DNA, 269 bp, Glycine max
  unsure (1)..(269): unsure at all n locations; Clone ID: 701059694H1
agtcactctncctgcanaacccngatctntagacaatatgggaagcactggtttgctacatttgatatggnttgtcattgctttagtaagtgtgtcgcttgtgcnagcagaagatgcgtataagtatttcacatggacggngactnatgggactctttatcccttggctagtccccagcaggttattcttatcaatggtcagtttcctgggcctagacttgactnggtaactaatgaaaatgtaattctcaacnttatcaacangctgg

SEQ ID NO: 28071 - DNA, 273 bp, Glycine max
  unsure (1)..(273): unsure at all n locations; Clone ID: 701059695H1
gcaagaatggcacttcgttgcttggtgatgtccctttctgttctcttcactcttggtcttgcgagagaaagccatgccagagacgaagatttttggcatgctgtttggcaaacactcccattccaagttcattgcgagatcttctaaagcctggccctgcaagtgttgaaatcgatgatcaccctatgcaaattgaagaaacacagtacccgaaaaccttcttctataangaagaccttcatccaggcaaaacaatgaaagtacaattcagca

SEQ ID NO: 28072 - DNA, 276 bp, Glycine max
  Clone ID: 701059696H1
cagattcgtcgagaaagagaaaagagaaaagaagaatgggcgattaccatttcgtgtacaaggatttagaaggggcttctactcaatgggacgatattcaaagaaagctcgaaatttgcctccaaaggcacccgctttcaagcccccactttcacccctgcctctgatgatcaacccaaagacaaaacatggatcgattccaaaacctccgaggaatcgaagacctcgaagacaacctccgatgatgatcgcttcctccaagaatacaggaagaag

SEQ ID NO: 28073 - DNA, 259 bp, Glycine max
  unsure (1)..(259): unsure at all n locations; Clone ID: 701059701H1
caccgaccgccactgcntccagaacgaacccaaattcatgtccctcctctctcctcaccccaacntcntcnnaatcttncntgtcttcgaggacgaccantatctctccntcgtantgganntctgccagccccacacgcttttcgaccgcntgntccatgctcccttctcggagtcccaggccgcntccctcatcaagaancttctcgaagccgtcgcccactgccaccgcctcggcgtcgcccaccgcgacattaag

SEQ ID NO: 28074 - DNA, 251 bp, Glycine max
  unsure (1)..(251): unsure at all n locations; Clone ID: 701059702H1
ttntcaantccanntccaattccanttccanttcccaatcttctcaaaccctanttcctcatcttganaatgagaganntcttgcacntccagggagggcaatgcgggaaccagntcggagcgaagttctgggaggtgatatgcgacgagcacggcntcgaccacaccggaaagtacagtggcgactctgaactccanttggaacgcatcnntgtttnttacaacgaagcgagtngcggaaggtacgttcc

SEQ ID NO: 28075 - DNA, 252 bp, Glycine max
  unsure (1)..(252): unsure at all n locations; Clone ID: 701059703H1
tcttctgtcntgtcagantntgntttggcagcagagggagntctgttcaaagctcctgaacctattattgaagagccantcatggatatggatcccntgacagccaccatctccatgntatcttgtggggaagatgtctcctcacagggactaaantccactgntnttgatnttcttcaaaatgatcagtttctgcatgaggtgttctntgantgtgaaaaggntctcttagaaaaggcagcantagagccc

SEQ ID NO: 28076 - DNA, 250 bp, Glycine max
  unsure (1)..(250): unsure at all n locations; Clone ID: 701059705H1
cccgcctcctcctcctcgcnccgccgcacttcggtgacgacggaagacacgtcganttggtcctccgtggaatagtcctcgtttccccgtttggaatantttccatcacttttcgttgctttcgttttgttcgaggttgggaggagaaantgaagcaagtagtaggaatggtggtttccantaagntgcagaaatcagttgtggtggcagtggatagacttttctntcacaaagtctntgatcgttntgt

SEQ ID NO: 28077 - DNA, 251 bp, Glycine max
  unsure (1)..(251): unsure at all n locations; Clone ID: 701059706H1
cangntctgantgagantctgaagantgtctcaaaggagaagaccctccttaaggatcctgccaagccaccggctaaggctcaagtggttggttggccaccagtgaggtcatacaggaagaacatgntggcagtacaaaangttagcactgaggatgtggcagagaagacaacaagcagcactgctanttctggggcntttgtcnaggtttccatggatggagcaccttacctgcgcaangtggacctcac

SEQ ID NO: 28078 - DNA, 215 bp, Glycine max
  unsure (1)..(215): unsure at all n locations; Clone ID: 701059707H1
ttcttttccccactccatttttgnccanttgttactcacacgggtcttgctccttttgctcccacaacttcggtttctgtgcctgattctacttccacgggctggtggaagtgcaaagttttgttttttngctccantcagaagtgggtttttgctgtggcttcttcnntctcaacatcaaagccaccatcataggttgttggtacccaaaactc

SEQ ID NO: 28079 - DNA, 251 bp, Glycine max
  unsure (1)..(251): unsure at all n locations; Clone ID: 701059708H1
cgcagagcccagaaaagaagctctttctctctaacaacaatgcctcccactgacggagacttggntcttaggccaccttctcantcttccttcacagccggcgactacacgttcgccgatgcggacaatttggagcattgcgctaagtatntcaaccaatcgctcgtcacgtttggtttcccggcttcgctcgntctcttcgcaantgaccccgtttcanttgcgaggncttgcaattgcntttacgtctt

SEQ ID NO: 28080 - DNA, 249 bp, Glycine max
  unsure (1)..(249): unsure at all n locations; Clone ID: 701059709H1
tntgaagttgtttgtnttctttgttgctgcagtagtnttngtagcatggccatgccatggcgcaggctaccaaaggttccctctccgantgaaaactggntatggtgagcgttcttcggaggtaaaatgcgcaagttttaggcttgctgtggaagcacacnacatcncagcctttaaaaccattcctgaagagtgcgttgaaccaacaaaggactacnttantggcgaacaatttagntcagnctctac

SEQ ID NO: 28081 - DNA, 248 bp, Glycine max
  unsure (1)..(248): unsure at all n locations; Clone ID: 701059710H1
gcaaaaagaaagantcccaggcgaggagaaagatggaggggaaggagcaggatgtgtcgttgggagcgaacaagttccccgagagacagccgattgggacggcggcgcagagccaagacgacggcaaggactaccaggagccggcgccggcgccgctggttgacccgacggagtttacgtcatggtcgttttacagagcagggntagcagagtttgtggccacttttctgtttctctacntcaccgtc

SEQ ID NO: 28082 - DNA, 246 bp, Glycine max
  Clone ID: 701059711H1
aacccccaaaacaaaaacaaaaaaaatgatgatcaacaaaacgctttttctcacttatgtctacttgttcatctacatcctgctctcttccggcgtcattttgtacaataagtgggttctgtcgccaaaatacttcaactttccccttcccataacgctcacgatgattcacatggccttttctggggcagtcgcatttttccttgttcgggtctttaagattgtgactcctgtcaaaatgacatt

SEQ ID NO: 28083 - DNA, 246 bp, Glycine max
  unsure (1)..(246): unsure at all n locations; Clone ID: 701059712H1
ccgagantnntgaagggttgttacttgggatctgtagggatggacgaagantgannttgaaaagtgaaaagtagagatggaagaagaaaaagcagcggcatactacgacgagctgagccgtaatgncgaggnagccgcgaggttcaagcaaggtctcggcttttcctcttccgcgccaaacgacgaccttccaaaaccctcctccttcctctccnnnttcgtcaaagcctcctccactgcgccttc

SEQ ID NO: 28084 - DNA, 243 bp, Glycine max
  unsure (1)..(243): unsure at all n locations; Clone ID: 701059713H1
gttgacacgtcccgtttatcttccacactcagttcccacctttccacctttccttctcagtcacacacactcacaccgagttgtgtcgagttgtgtcaagtgtgaactcaaaacatctctctcantctctctccctgtttaggttttgttttggagtggtgttgctatctctatagctccatgaantttttctgacacaacccaacccaagaggaggagggggatgaggaagaagatcgaaga

SEQ ID NO: 28085 - DNA, 244 bp, Glycine max
  unsure (1)..(244): unsure at all n locations; Clone ID: 701059714H1
cnaggccctcatgttcttcaatgcccaacgatcggggaagttgcccaancatnacaatgtttcgtggaggggaaactcgggaatgcaagntgggaagtcttcagatcattctgctgcgnttaaggntctggtgggtgggtactatgatgccggggatgctatcaagtttaactttcctgcttcgttttccnttactatgttgagttggagtgtgnttgagtntngtgcaaaatatgaggctgct

SEQ ID NO: 28086 - DNA, 244 bp, Glycine max
  unsure (1)..(244): unsure at all n locations; Clone ID: 701059715H1
agantggctcccaagggtttaacctttctggctgtgttaatatgcgtttcagcactgtcactgagtccttctgttgcgggggaagggcaaaataatggccttgttatgaacttnnacaaggantcatgccctcaggctgaagacatcatcacagaacaagtcaagcttctctacaagcgccacaagaacactgctttctcctggctcaggaacatcttccntgactgtgctgttcagagttgtg

SEQ ID NO: 28087 - DNA, 245 bp, Glycine max
  unsure (1)..(245): unsure at all n locations; Clone ID: 701059716H1
caagttcaaagatgaagatgatccacgttcttttcctctttgctcttgtctcgttcacttcccatgcttctgtcantgntttctgtgtagcagacctaaaaggtccagatagcccttcaggctatcagtgcaagccacctaacacagtcacagtggatgactttgtgttctctggctttgtagctggaaacaccacaaacnnttcnatgctgcattaacctccgcattgttactgattttccagg

SEQ ID NO: 28088 - DNA, 203 bp, Glycine max
  unsure (1)..(203): unsure at all n locations; Clone ID: 701059717H1
gatgacntanattcctagnttntgtnagttttgtcgatnattttcctttatntttgttatgagntgnttttgaagcttgaacagcacnttttgtttcgtatantntgtttcaagttanttgngttacttgggnattttttttgncntnntaaaaagtccaacntacccctttttcttctnccaccaanttcaccgtcntcttc

SEQ ID NO: 28089 - DNA, 252 bp, Glycine max
  unsure (1)..(252): unsure at all n locations; Clone ID: 701059718H1
ggggtttgaggnaactgagttnaggcttggactgcctggaaacggaggcactgaagaagtgctcntcaggaagaggggtttctctgagnctgaaactggtcntgnagntgagtctgccaccactgtggntttgntgcttnntctttcttctaaggaggccgcaaccannnnnnnnnnnnnnnnnnnnnnaantgntnagcacaagactttgcctaaggagaagacccttctgccagcagntcctgctaagcc

SEQ ID NO: 28090 - DNA, 251 bp, Glycine max
  unsure (1)..(251): unsure at all n locations; Clone ID: 701059719H1
tgagggtccctggacctctnatcctcttnttttcgacaactcatacttcacggagttgttgagtggtgagaaggaaggtctccttcagctacnttctgacaaggctcttttgtctgaccctgtnttccgccctctngttgatanntntgcancggacgangatgccttctttgctgnttacgctgaggctcaccaaaagctttccgngcttgggtttgctgntgcctaancaacgtttaggggnttgttgt

SEQ ID NO: 28091 - DNA, 250 bp, Glycine max
  unsure (1)..(250): unsure at all n locations; Clone ID: 701059720H1
tggntnctgagggttacagcgacggangtnntggcaacactgcaggggctantcaaacaaaaaggaaaagatgccgagagnggaacactgaccactggtatgactcttnttcactgttgcatcttgacgaacaaaagagttgtgttggattaganttatacttttggtgttatcactgtgcaatgatgtcaactagatcattgagtatggtactatggtcttgataagttgntnttntcctnttacttat

SEQ ID NO: 28092 - DNA, 230 bp, Glycine max
  unsure (1)..(230): unsure at all n locations; Clone ID: 701059721H1
ttcagantaacaataaagggtggatgangatccagaggttcttggccacactggccataactgtctccatactcttgggaaatggaaaccccgttcagtgcttcgacggcggtagccaccaaaaacagcaacacagtttgtgtgaagagctcnttntcccctacggttacccctgctccgagcntacgnttcaaacgaaggntggtntcttgttaggtcttcaacgtgtc

SEQ ID NO: 28093 - DNA, 250 bp, Glycine max
  unsure (1)..(250): unsure at all n locations; Clone ID: 701059722H1
gtgaagntggggtcagaggtgtctaaacatntggngcgaaganagacantccanacanagaagaagattctgtccgatctgaanagcagcggagnagactaccctggctccgactaccgtccccaagacagaaaaaactggntgtcccatctcgaccctcagaaactccgcntcnnccaantcgtctggcccggcacccacgantccgcaaccaacanaattggnntccctctcntcantcgnccttcgt

SEQ ID NO: 28094 - DNA, 250 bp, Glycine max
  unsure (1)..(250): unsure at all n locations; Clone ID: 701059723H1
ccccaactgggtntcacanagtttccaanttgaacgcaaaaacggaantttcttcctcaaatgccttctgggtcgctcttctttgcatccagnttacgaagtttttggtcgccagtctgtgattcaagtgctattttagcntttttttttttncctggacggtgngggtcaacttgcatgcncatnttagtgaaaaaccncaatangggggatggatctaagtccctcgccganacactggcgaaatggt

SEQ ID NO: 28095 - DNA, 248 bp, Glycine max
  unsure (1)..(248): unsure at all n locations; Clone ID: 701059724H1
aagagtnagagtatgggaggctcatggtcatggcagctcacatgtgccctcttgntactcttctccgccgtagtcaccgccactgaccanattgtgggtgcnaatcgtggctngaaccctggctttaactnnnntctttgggccaacaaccacactttctatgttggcgntcttntctcattcaggtancaaaaganncantacantgtgtttgangtgaaccaaactgggtntgacaactgcactnc

SEQ ID NO: 28096 - DNA, 249 bp, Glycine max
  unsure (1)..(249): unsure at all n locations; Clone ID: 701059725H1
tggtgttagatctgtacccgcctagccattgntttggaaaagtccaagcttcaaagatgagtaagcttcagagtgatgctcttagagaagctntctcaggantcntgactgattccaaggaaaagaacaggaantttgtggagaccattgaactccaaattgggctgaaaaactntgntccccagaaggacaagcgttttngtggctctgttaagttgcctcacnttcctcgccccaagatgaagnttt

SEQ ID NO: 28097 - DNA, 245 bp, Glycine max
  unsure (1)..(245): unsure at all n locations; Clone ID: 701059726H1
gnnggcgtcttcatnaacgcctttcttctccgtttccgtttcctcgttcgaattcgctttttgntctgcgaaaatgagagagtgcatctcgatccacnttggtcaggctggtatccaggtcggaantgcttgctgggagctctactgcctcgagcacggcatcgggcccgatgggcaaatgccaagtgacaagacagttggcggtggtgatgntgctttcnntactttcttcagcgngnctggtg

SEQ ID NO: 28098 - DNA, 246 bp, Glycine max
  unsure (1)..(246): unsure at all n locations; Clone ID: 701059728H1
cgatnatagaaacagtgtgatganaatgaaggtccttgttttcttcgttgctacaattttngtagcatggcaatgccatgcgtacgatcatgctccctctccgantgaacactgggctatggtgcccgtactccggaggtgaaatgcgcaagttggaggcttgctgtggaagcacacaacatctttggctttgagaccattcctgaagagtgcgttgaagcaacaaaggantacatccatggcgag

SEQ ID NO: 28099 - DNA, 244 bp, Glycine max
  unsure (1)..(244): unsure at all n locations; Clone ID: 701059729H1
tntcttcaaacactcttctatnttcctagtnctttgaagagntnttgaaataaacaacaatggccaattccatgagntttttcctgnttctttcttttctagcttttgctcccttgtgcctctgtcactataaccaagagggttacntctaccctcagttttatgactnttcatgcccacaagctcaacatnttgtcaagtctgtccttgctaagtatgttgcagagcaacctcgattggcggt

SEQ ID NO: 28100 - DNA, 206 bp, Glycine max
  unsure (1)..(206): unsure at all n locations; Clone ID: 701059731H1
tggggcgcaagaacacanttttcttggcnttggttgttactttgatcactaaggagacaatggcagaacaacatgtagttggtggaagccaaggttgggatgaatcaacagacttcanttcttgggtttcaggccaaacatttaaggttggcgatcaacttgttttcaagtactcttctttgcatagtgtggttgaactaggtagt

SEQ ID NO: 28101 - DNA, 246 bp, Glycine max
  unsure (1)..(246): unsure at all n locations; Clone ID: 701059732H1
gttcttaaantccacatggcaganttcactgcagntttgcaaagtcttagatttcctttcttagatnttgacaacatggaaatgcagaacttgatgatgccttctcctgtgaaagnttnttaggttctccagaagctgantttgcaggaaacttggaagaganttttcctgatcacaatgangttccngttttagttcctattnttnnttcagtnnaaaatgaantccntgaaggtcaaaanctga

SEQ ID NO: 28102 - DNA, 253 bp, Glycine max
  unsure (1)..(253): unsure at all n locations; Clone ID: 701059733H1
gttcntnctcanttctcctcccggagaantccantacgttgccaaanntgtgnantccnttctcaacaacgacgntttgtacaaggaagccgcttccgaggcttttctnttttncancaaatcgnanttgntttcccttccaatgtccaaccgaagcggagacgtactggttacttcttttggtgagnttgagggtantgcntttcttgnacctaggactgcgcaagtagcacttgttgntcntgttnaacaa

SEQ ID NO: 28103 - DNA, 250 bp, Glycine max
  unsure (1)..(250): unsure at all n locations; Clone ID: 701059734H1
ttttgctcttgnttataagtngtctgatccctgacccattatctaggtctccttttctgcagtcatgaaaataatgggttttttgggctttgaaaatggagataanttnttggataagtggttacagggatgttttgttcaaattcntttgctatntcttnatgaagggaatatagggtcatnagtgctgttcaaatgctagtcttactgtttacaggagaagacactggctaacttccagaatgtgctt

SEQ ID NO: 28104 - DNA, 248 bp, Glycine max
  unsure (1)..(248): unsure at all n locations; Clone ID: 701059735H1
ttctacacatccctngctnngtcgttccgtcgttgacgatggcgtttcgggtgcgaancctgacctccgctctctctttnttctctctctcttgtccatcgcttccgccantgtcttcttcgaanagcgtttcgatgacgggtgggaaaatcgntgggttaaatcagattggaaaaaagatgagaacgtggctgnggagtgtaaccacacntctggtcnatggantggagacgntaatgacaaatgtt

SEQ ID NO: 28105 - DNA, 244 bp, Glycine max
  unsure (1)..(244): unsure at all n locations; Clone ID: 701059737H1
cnggcttccccttcaggntgtgtacaagnttggnggtattggnactgtgccagtnggacgtgttgagaccggtgtcttgaagcctggaatggtggtgacttttgcaccaactggactgacaactgaagtcaagtctgtggagatgcaccatgaatctcttacagaggcacatcctggtgacaatgtgggattcantgttnagaatgttgctgttaaggatttgaagcgtggttatgttgcctca

SEQ ID NO: 28106 - DNA, 245 bp, Glycine max
  unsure (1)..(245): unsure at all n locations; Clone ID: 701059739H1
gaacaactgantcattcaaaggatcctgatggctttaaagagtatnttcaaccgntgcttaagcaacaactacgtantgctaggctctagttcattttgtggctatgntgctctctttgcntccaagaaacttatccactattctaatgcaagtatgcaactgttaataaagttgtgtggaacgntaaataaanttgcttgagtacntacgantgggnntttgttacccagctnntttccatcgc

SEQ ID NO: 28107 - DNA, 202 bp, Glycine max
  unsure (1)..(202): unsure at all n locations; Clone ID: 701059740H1
ggnntctgaagcactgatntggggtgacaaactcatnctgaagggnttgtcnttccgtggttttcntggagcactaccggaaganaggnagctaggccagaagttcgtggtagatgttgatgcatggatggatctnaaagcagctggcaaatctgntcncttntcngatncanttagttacacngntntatntgntntngct

SEQ ID NO: 28108 - DNA, 208 bp, Glycine max
  unsure (1)..(208): unsure at all n locations; Clone ID: 701059741H1
gcgtccatggagttttggggtgttgaggtgaaaagtggngaatctctcaaggttgatccgggagatgacaagattatccacctttcaaatgcntgcctgggggatgtcactaaggataaagaaggtctaccagtagccctgtatgtcaagtttggtaaccaaaagcttgtacttggnacgctttcttctgaagcttttcctcagatnt

SEQ ID NO: 28109 - DNA, 221 bp, Glycine max
  unsure (1)..(221): unsure at all n locations; Clone ID: 701059742H1
aantctcanttcactcattcatttcccctttcttctctttctcantttcgctttgtnttgtcttcanttcagtaaaccgcaccaattccgatggcggcgtcgcggcggctccgggacctccaatcccaaccggcgaacaanatntgcgtcgactgttcccagaagaacccgcaatgggcctcggtttcctacggcgtcttcntgtgcctggagtgctccgg

SEQ ID NO: 28110 - DNA, 244 bp, Glycine max
  unsure (1)..(244): unsure at all n locations; Clone ID: 701059743H1
ctcttcttctcttggcggcnngggttttagcgcanttgcttctagntttaaggnanatgggtaaggnaaaggttcacatcagtattgtggtcattggccatgtcgactctgggaaatccactaccactggtcacctgatttacaagcttggaggcnttgacaagcgtgttnttgagaggtttgagaangaagctgctgagntgaacaagnggtctttcnagtatgcctgggtgctggacaaact

SEQ ID NO: 28111 - DNA, 241 bp, Glycine max
  unsure (1)..(241): unsure at all n locations; Clone ID: 701059744H1
gctactggnngtnngtttgctgggnntttggcatctggtggggctgctggggcttcttccctcttatttgtctattctttggnttatgcccgtactcgtttagcaaacgatgcanaggctgcaaagaagggtggcgataggcagtttaatggcttggttgatgtttacaggaaaaccatcaagtctgatggtgttgctggcctttatcgtgggttcaacatctcatgtgttgganttatag

SEQ ID NO: 28112 - DNA, 109 bp, Glycine max
  unsure (1)..(109): unsure at all n locations; Clone ID: 701059745H1
cgaagtctgccccntctcgccgccacaaganaccccntcaaccactnttccnttnnnnttcttgcgacgtcctntggntacgcctccccccagtggagcgtctgttntt

SEQ ID NO: 28113 - DNA, 242 bp, Glycine max
  unsure (1)..(242): unsure at all n locations; Clone ID: 701059746H1
caagnntggcacttcgttgcttggtgntgtccctttctgttctcttcactcttggtcttgcgagagaaagccatgccaganacgaagatttttggcatgctgtttggccaaacactcccattccaagttcnttgcgagatcttctaaagcctggccctgcaagtnttgaaancgntgatcaccctatgcaanttgaagaaacacagtacccgaaaaccttcttctatnaagnagaccttcat

SEQ ID NO: 28114 - DNA, 65 bp, Glycine max
  unsure (1)..(65): unsure at all n locations; Clone ID: 701059747H1
aatatatnccanattgggttggggtttaatgcnatttcccagggcnaacgcngaacggtcnnttt

SEQ ID NO: 28115 - DNA, 242 bp, Glycine max
  unsure (1)..(242): unsure at all n locations; Clone ID: 701059748H1
tnttcntaaacgnctttcttctccgnttccgttnnctcgttcgnattcgctttttgntctgcgnaaattagagagttcatntcgatgccacattggtcaggntggtatccaggtcggaaattcntggtgggagctctactgtctcgagcncggcatcnggcccgatgtgcnnatgccaagtgacantncagntggcggtggtgatgtgctttcantntttcttcagtgannntggtgctggt

SEQ ID NO: 28116 - DNA, 251 bp, Glycine max
  unsure (1)..(251): unsure at all n locations; Clone ID: 701059749H1
taagctagtttntcgtgaggngantntgaagttgtttgtcttctttgttgctgcagtagttttggtagcntggccntgccatggcgcaggctaccaaaggttccctctccgantganaactggctatggtgagcgttcttcggaggtaaaatgcgcaagttttaggcttgctgtggaagcacacaacatccgagcctttanaaccattcctgaacagtgcgttgaaccaacaaaggactacnttnntggcg

SEQ ID NO: 28117 - DNA, 218 bp, Glycine max
  unsure (1)..(218): unsure at all n locations; Clone ID: 701059750H1
anggtttccgtttctctctctgctntttntgatcactctctnacgcgcttctgtcaccanatcaagtgcttccgtctnttcnccttcttntctgattgganggnttcgtgtggtcggagatggtggtttcggggccaatcacgccggggcaggtgtctttcttggctgggggttnttccagtttttgtttcntggntatatttcngagtacttagant

SEQ ID NO: 28118 - DNA, 248 bp, Glycine max
  unsure (1)..(248): unsure at all n locations; Clone ID: 701059751H1
gaggatccggggcaagaaagccaaggtgaatttcccggatgagccttcaggcgctgctgcttcctcaaaacgcctcaaggtgantccagaggctcagccaatgaangaaaatctgaacaccgtgaagccgaaaatgaaccagatgttcnnttttggtcacaatctggagggctactacagcccantagatcaggtggaacagaaaccactggttaaccagtntgttaaccctgccccgttccctggag

SEQ ID NO: 28119 - DNA, 247 bp, Glycine max
  unsure (1)..(247): unsure at all n locations; Clone ID: 701059752H1
gaaaaaaaaagagtttccggcnttattccatcntgaacgctcttcccattcttctcttcttcctcttcgtttcggcattagtttntgcgaagaaaactggcgatgtgacggagttgcaaattggcgtgaagcataaaccagcatcatgtgaagttctggcacacaaaggtgacagagtcaaagtacactatcggggaaaactcnctgatggnactgttttcgnttctagctttgaaagaantantcc

SEQ ID NO: 28120 - DNA, 246 bp, Glycine max
  unsure (1)..(246): unsure at all n locations; Clone ID: 701059754H1
cngntttctttacaaagttantacaaagagtttctccaaagagttaccagcaggcttttggggaagtttatgtgacacaaaagtttctagagaatttttgcngggatcaggttcgtttcctggcaaggtcttttggtgtccctggaaatcatcttggacaacaaagtcntggttttcgttggccatatggtcccgtggccattattactccttttanttttcccttggagattcctgtccttcant

SEQ ID NO: 28121 - DNA, 245 bp, Glycine max
  unsure (1)..(245): unsure at all n locations; Clone ID: 701059755H1
ttgatgagaagcntttttcaccttggnnttcntcantgtcttcgaaagtaggttgtctgtagcaaaggagtgattgtgantgcttattttnttttctntgtntcctttttcagagttcacnttttttttggccttcggaacattantgtgantgtctatagctacatgtatcgagnattttntntnagnttgtcagttcgcactcnnnttntcnnnttttngtttattcatgnntcacttgcccg

SEQ ID NO: 28122 - DNA, 247 bp, Glycine max
  unsure (1)..(247): unsure at all n locations; Clone ID: 701059756H1
tttcttctcctctctctctctcctagggttagggttttctctcttcatcactctctgtgtcgctccgtttcantggntcagcaagacgctcaaaacggcgggtcggagaatgccgctgntgctgctacggtgtcgtttgtcgctgtgaagccgcagctcctcgtcgaagctcccaaagccaacgacgccattntgttnttcnaggctgcgtttggcgntgaggaagttggccgtacgctcaacccta

SEQ ID NO: 28123 - DNA, 244 bp, Glycine max
  unsure (1)..(244): unsure at all n locations; Clone ID: 701059757H1
ggattagagggtcgccacgtttagcaataaccaaaccctctctnctcttttttcttctcnttctcttcgctagggttttagcttcttcctcttcacttcgttctttttcgcctctacantgagcaacgacaaggacacnttcaacgtcgccgatctcacttctgntctcaacgaggacaatagagcagaccttgtcnntgctcttnagagcaagatacagagtttggctggacaacactcggat

SEQ ID NO: 28124 - DNA, 244 bp, Glycine max
  unsure (1)..(244): unsure at all n locations; Clone ID: 701059758H1
cctggggctgaacacaaggaaaaggcttctccagaaaccattgccaaatntactctaaccatgcttagaagaagagttcctcctgctgtccctggaatcatgtttttgtctggtggacaatccgaagtggaagcaacactanatctaaatgccatgaaccaaagtcccaacccatggcatgtttctttctcatatgcacgggctcttcagaacactgtgcttaagacatggcaaggacaccctg

SEQ ID NO: 28125 - DNA, 219 bp, Glycine max
  unsure (1)..(219): unsure at all n locations; Clone ID: 701059762H1
gctttagcaanttccanttcccanttcccanttcgaaacccttattcctttcaaagaaccaaattgagtgntcgtgatggcaccaaaggcagagaagaagccagcggagaagaagcccgcggaggagaagaagtcgacggtgggagacaaggctccggcggagaagaagccaaaggccggaaagaagcttccgaaggagggaggcgccggcggagaagg

SEQ ID NO: 28126 - DNA, 244 bp, Glycine max
  unsure (1)..(244): unsure at all n locations; Clone ID: 701059763H1
cnccgccactcccgccggcctcatctccgcttccatcgcccatgntttcgccctcttcgtcgccgtctccntcggcgccaacatctccggcggccacgtcaaccccgccgtcaccttcggcgccttcgtgggcggcaacatcacnttactccgcggcntcgtctacgtcntcgcccagctcctcggctccnncgtggcctccctcctcntcgccttcgtcantgcctcccctgttccagcnttc

SEQ ID NO: 28127 - DNA, 249 bp, Glycine max
  unsure (1)..(249): unsure at all n locations; Clone ID: 701059766H1
caaggacaganggncagtgagagtggantgcttcatgaaaganagcagccccaatatctgggtgaggcctntcagtggactcncaatggtggttgaccttgaactcntgaagatcgttcngtatcacgacggtggcnttataccagtaccaactgccgacaacactgantaccgcttttcacatcagaacccaccattcggtccaagacaacntngtctagcaacccntcaaccacagggtccaggctt

SEQ ID NO: 28128 - DNA, 245 bp, Glycine max
  unsure (1)..(245): unsure at all n locations; Clone ID: 701059767H1
gangccctatctgccgcaacgcgacgcgacttcctccgacgacgcgagccgagtgctnataaaaggaatagtagtaagcacattcntctcccctagatatgaactcanttgcaaggcgtttatcaagnttattcagacnttcaggtttcacgcctgaacccttcantaatggccatcatcaaatgcagaagcttcagcantgcagaggcntaagagtgaaggtcataggtgggaacttggaagca

SEQ ID NO: 28129 - DNA, 245 bp, Glycine max
  unsure (1)..(245): unsure at all n locations; Clone ID: 701059768H1
ctccatgcttctgtgctcgcccttgtattccttcttgtcatactatttcaggaaggattggtaacatgtatgaagaatgaagacggatcagaagaatggggatntgtgcaagtnagaccaaaagcccacttgttctggtggctttacagaagtccatacagagtggngaatccctccaagccttggccaatcnttctctggcttcagggaggaccaggctcttcaggagttgggtttggaaattt

SEQ ID NO: 28130 - DNA, 244 bp, Glycine max
  unsure (1)..(244): unsure at all n locations; Clone ID: 701059769H1
cttntctcgttgattcggntctagngtcttttttcactcttcagnnctcgttgttgttcttcgctttcctgaaactagggttttcaatttcgattcnttcgttaataattaaagatgtttggnagggcaccgaagaagagcgatantacgaggtactacgaantcctcggcgtctcgaagaacgcttcgcaggatgatctgaaganggcttacaaganagccgccatcnagantcaccctgaca

SEQ ID NO: 28131 - DNA, 245 bp, Glycine max
  unsure (1)..(245): unsure at all n locations; Clone ID: 701059770H1
cgtgactgcacagaggtatcgantnaagtcaaaagtcggantggtttcactctgatcaaactgaggaatcgaggaaggaagggttaggattagggtaaggattgggaagccataggagaagagaacaagaggaagaagaggtcanttcaaaatgccggaagaggntttggtggacatcaantttaggttgtacgatggttccgntntcggacccttcaggtantcctccgccgccaccgtcgatt

SEQ ID NO: 28132 - DNA, 245 bp, Glycine max
  unsure (1)..(245): unsure at all n locations; Clone ID: 701059771H1
gngcaaaganccaagagggtgcanttacntgagctgaaagangtaacgcaaaagcccctttnttttttatggttagaacttagaagctgnttgtgacaatggatgctcgtggagaagggtcttctacttcttactacaacgttcttggtgttagctcagattctaacgtggatgagnttagacgtgcttataggnagctggctntgcantggcntcctgataagtgcaccaggtcgccttctttt

SEQ ID NO: 28133 - DNA, 243 bp, Glycine max
  unsure (1)..(243): unsure at all n locations; Clone ID: 701059772H1
gcgtaagggcgcanagcacccaaccgtgaagagagactccatggccgagtgcaccgtccccaagtgggcccaaaaaaccgtcagcttgccccctctccggcgcggctgtcntnttgtcncttccaagntagtgaaggnanttgagcaagacntctccggnttcnagtgtggcctagctcntctcttcttgcagcacaccagtgcttctcttnccntcantgngnnttntgnctcagntgttcg

SEQ ID NO: 28134 - DNA, 244 bp, Glycine max
  unsure (1)..(244): unsure at all n locations; Clone ID: 701059773H1
cngtgnttcaccgatctgatantcgnttgantttagggtttggnagntggcgtcgagtgtgttgaagagcctcctcctgagnttttcctcatcgaggaacacgacgaccaccagaagtttcagcctcgttacccctcaaatcagcaaccacaccgccaagtggntgcaggntacaagcnaganntctccgntggagctgnttnntgaagttcctccanttaaggttgaaagcaggatngttgct

SEQ ID NO: 28135 - DNA, 242 bp, Glycine max
  unsure (1)..(242): unsure at all n locations; Clone ID: 701059774H1
tttcacattcctttggtgcntccttcgtagatcccactctctctggcttcttcgctttncctcactctcagatggctgcganttttgggantatcttgtttacgtcgtctcagtctagctcacaggttcatggggccactgnttctgtccaggttgcagtgtgttctctttgtcaaaaggccctatcacctgataatgagatggcaagcgntcttgctagcngtggtgtgtgcggtgattgt

SEQ ID NO: 28136 - DNA, 242 bp, Glycine max
  unsure (1)..(242): unsure at all n locations; Clone ID: 701059775H1
gngaantcntcagcattcacataggtcaggccgggatccaggttggcaactcctggctgggaactctantgcctggaacatggcatccagcccgatggcatgntgccaagtgactcctccttcggtgtagcccacgacgccttcancaccttcttcagcgaaaccggatccggcaagcacgtccctcgcgccgtcttcgtcgntctcgagcccaccgtcntcgacgaagtccgttgtggcac

SEQ ID NO: 28137 - DNA, 219 bp, Glycine max
  unsure (1)..(219): unsure at all n locations; Clone ID: 701059776H1
ctttntttacaacaacantggcttctgtgcctcaaccaaaantctcccttctnaccttnttcttcttctcgtccttcaccatcnttgcgcntgcanttgttcctcaaaacgaaaccttcnantttgagaantcaggtgaacttggaccctncatcgttgagtncggtgcngnttncagantgntnngcntcttcnnntctccnttccnagttggtttct

SEQ ID NO: 28138 - DNA, 239 bp, Glycine max
  unsure (1)..(239): unsure at all n locations; Clone ID: 701059777H1
gtnacgcctgctcgcattgaggagcatggttttgagagcaccacnntttcagacntcttgantgntaaaggcaagggtgctgatggctcctggctttggtgcaccacagatgatactgtttacgatgctgttaantcaatgacccanaacnatgttggngctttggttgntgtganatctgacgcnaataangcaattgcaggaattnttnctganagannttncttaagaaagatcnt

SEQ ID NO: 28139 - DNA, 230 bp, Glycine max
  unsure (1)..(230): unsure at all n locations; Clone ID: 701059778H1
tttcaaaatggctaggggactaaagangcntttganaaggctcantgctccnaagcnttggatgcttgacaaactgggtggtgcatttgcgcctnaaccctcntctggaccacacaaatcgagggantgcctccccctcattcttnttctgcnaaaccggctgaagtntgctctgacntaccgtgaagtcnttgctnttctgntgcagcgccntgttcttgttgntggcc

SEQ ID NO: 28140 - DNA, 241 bp, Glycine max
  unsure (1)..(241): unsure at all n locations; Clone ID: 701059779H1
cgaaactcgtttttgcanttgccagatctcttcattcanttacaacagcagaagaaacngaagnttctagagagaaagaaatagggaattgaagatgggttgcagaaaangggantcaatcacagagaatcacacttcgtcatcntcntcttcttntgattcactcagtgaagccttgcttttcaccaccatgtgcatcgttggccaccccgtcgntgttcacgttaaggatggctctgtc

SEQ ID NO: 28141 - DNA, 241 bp, Glycine max
  unsure (1)..(241): unsure at all n locations; Clone ID: 701059780H1
gtctttcntccccaatcaganagaaaagttagggttcacnnnttttccttttccttttgnttgcgnntctgantcaantnntcantcntccnttcnttattcatcatgtcgtcggcgaagaaaatcacgcncaagagttcggacggcgaggntttcgaggtggaggangcggtggcgctggagtcgcagacgataaagcacntgntcgaggacgantgcgccgacagcggcatncctctgc

SEQ ID NO: 28142 - DNA, 252 bp, Glycine max
  unsure (1)..(252): unsure at all n locations; Clone ID: 701059781H1
cntttccctcctttctccanttaacanactctgncannntcntttnntttttntctctttcttttgatccgttntacgcaggaatgaacaatcatnactcggatcccgactcgttcttcgagcccgagtcaccaantcatggcgcgggcacttacgcacnacctatcactaatcctnatcctcatcgtcgccgtcgccggcgacgccaatntcntncgaaacngccaccacggctctcgncctgccatgctt

SEQ ID NO: 28143 - DNA, 243 bp, Glycine max
  unsure (1)..(243): unsure at all n locations; Clone ID: 701059783H1
tttagggtttcggttctctaccctatctttcacgtatcgaaaccttaantttacgatcaggtctgagcaatctggttggtagaacctttggtcttagtgagtcaagttttatgtcngaattagacgatcaaattcctactgccttcgntccttttgctgatgcaaatgctgatgactcgggtgctgggtcaaaggagtatgtgcatattcgtgtacagcagcgaaatggtaggaaaagcctga

SEQ ID NO: 28144 - DNA, 244 bp, Glycine max
  unsure (1)..(244): unsure at all n locations; Clone ID: 701059784H1
cgaggngaaagntggaggggaaggngcaggntgtgtcgttgggagcgaacaagntccccgagagacagccgattgggacggcggcgcagagccaagacgacggcaaggactaccaggagccggcgccggcgccgctggttgacccgacggagtttacgtcntggtcgttttacagagcagggntagcagagtttgtggccacttttctgtttctctacntcaccgtcttaaccgttatgggagt

SEQ ID NO: 28145 - DNA, 244 bp, Glycine max
  unsure (1)..(244): unsure at all n locations; Clone ID: 701059785H1
aacacaacaaaactctccanttctgaagnttttcttntctcttgtctttganactagaagctccgtgattgntcaatggcgacaaaaganggcaaagccataggcntagacctcggcacgacctacagctgcgtgggcgtgtggcaaaacgaccgcgttgagatcntccccaacgaccaaggcaaccgaaccaccccctcctntgtcgccttcaccgacaccgagaggctcntcggagacgccg

SEQ ID NO: 28146 - DNA, 241 bp, Glycine max
  unsure (1)..(241): unsure at all n locations; Clone ID: 701059786H1
gctcttntnactttagagtccttttaccttggttctgatccagtcatatatcccccacgttcgttcgttcattcttcggtttctccgaatctgattgctgatttgggaaaatgctcctgggattctcaacgttagcgttgttggtgtgtttctcatgttgttggttattagtgttgggcgagggtgaaacggcgtcgtgttcgaacatagtggcgttggggcaccgcaccgacaacatatc

SEQ ID NO: 28147 - DNA, 244 bp, Glycine max
  unsure (1)..(244): unsure at all n locations; Clone ID: 701059787H1
cagttntctagntantcttcatctaaacatanaaatcactttcccctgntagnttctcgctagtacantcatagaatccgagtttttgtgggttgcattgttgtgagaagatgagaagagttggtggtgatgttttgaacgtggatttggctgctgcagtgaacaacctcttcantcttcctgaaactatggagaagttcntgtttccttcttctcgtgctcatgatcaccaccatgaaaccag

SEQ ID NO: 28148 - DNA, 245 bp, Glycine max
  unsure (1)..(245): unsure at all n locations; Clone ID: 701059788H1
gagagagagggagtcagagaaaccctaggtaanaagnanagntgccggctggtcatggtttganntcccgcaccagagnttccttctctcgtcctttcaggaagaagggaaccatcgccctcaccacatacctgagaacctaccacgtcggcgantatgttgacgtcaaggttaacggtgccgttcacaagggaatgccccacaaattctaccatggccgcaccggacgcgtctggaatgtcacc

SEQ ID NO: 28149 - DNA, 243 bp, Glycine max
  unsure (1)..(243): unsure at all n locations; Clone ID: 701059790H1
gttggtacgaaaantgtcgaagctgntcttcgtgttcctttcgnttnttcctcttctctgcaccnnccttctccccagagagaccctcagntcgacgcgtcctcgttttgctcgntganttcgccntcanntcntctcnttntctcttcttcaantccctcaaatctcgcggcttcgntctccnnttccacntcgcagacgaccnncaaattgcgctccagagatacggccagtncctctacg

SEQ ID NO: 28150 - DNA, 238 bp, Glycine max
  unsure (1)..(238): unsure at all n locations; Clone ID: 701059791H1
gaagtttacgggctccgggaagatgaaacgctgcgttctgatgntcacggattctgcgatttacatcgttgaccctgaggtggacgcgctgaagcggagaatagtgcttgcggcggtggagagggtttgtctgagtgaactgagtgataattttttcgcggtgattgttccgtcggagtatgntttgctcatggctagtactcggaagacggagattgtcacggtgctggtcgaggct

SEQ ID NO: 28151 - DNA, 240 bp, Glycine max
  unsure (1)..(240): unsure at all n locations; Clone ID: 701059792H1
tnaaganggtttttttagtntngttaacagcatggagagggaggaagatgttaaggttggagcacaganattctcggagaggcaagcactgggtacaggagctaagagtgacaaggactacaaggaggcaccaccagcacccttgtttgagccaggggagttaaagtcatggtctttttacagagctgggatcgcagagtttgtggccacnttcttgttcntctacatcnctgtcttgnc

SEQ ID NO: 28152 - DNA, 240 bp, Glycine max
  unsure (1)..(240): unsure at all n locations; Clone ID: 701059793H1
ctccatttctcactcgccgtcgtctcttccgtctagggtttctcctcttcacnaaaatggttgccgcaaaaaaaactaagaagacccatgagagcatcaacaacaggctcgctctcgtcatgaagagtggcaanttcaccctcggttacaagaccgttctcaaatctcttaggagctccaaagggaaattgnttntcnttgctaacaactgcccccctttgaggaagtcagagattgaat

SEQ ID NO: 28153 - DNA, 238 bp, Glycine max
  unsure (1)..(238): unsure at all n locations; Clone ID: 701059795H1
tttatgcaggtaaaccctgntgatgttgtgtttgggggatgggatntcagtaacttgaacctggcagatgccatggccagggccaaggtgtttgatatcgacctgcagaaacagttgaggccttacatggantctatggttccactccccggantctatgaccccgntttcattgctgccaaccaaggagaccgtgccaacaacgtgatcaagggcacaaagaaagaacaagttcaac

SEQ ID NO: 28154 - DNA, 245 bp, Glycine max
  unsure (1)..(245): unsure at all n locations; Clone ID: 701059796H1
gagataactagaaacagtgtgntgaaaatgaaggtccttgttttcttcgttgntananttttngtagcatggcaatgccatgcgtacgntatgtaccctctccgantgaacactggntatggtgcccgtactccggaggtgaaatgcgcaagttggaggcttgctgtggaagcacacanacatntttggctttgagacnattcntgaagagtgcgttgaagcaacaaaggantacatcncatggc

SEQ ID NO: 28155 - DNA, 228 bp, Glycine max
  unsure (1)..(228): unsure at all n locations; Clone ID: 701059804H1
ctctctttgatacccttntgttctttttggtgctttnntttccantagcaagggggttggtntnatttntgtntggttgcaacaatggntgtggnnaagaagttactttntgnnttnatcattgccntcattggcatttccatgcttcanacagtggntatggcntctnatngacatggaggccaccactncaatgaccaanagnanatatggncctgggcagtctna

SEQ ID NO: 28156 - DNA, 272 bp, Glycine max
  unsure (1)..(272): unsure at all n locations; Clone ID: 701059805H1
accaatttaggttctcttaaaacaaaggcccctcaaaccactttccccanactctttnagtgtgtcgtatcntttcctctctttctccacaattaggtcttggaccgacccttttgtgtaagtgcaatggccatggctaagcttgtatgtgttctgcttctggcattccttggcatttccatgatcacanctcaagttatggcaanagnctctgcctatcanttggatggaaggagttatggantgggantctanngantcnnagtgccctt

SEQ ID NO: 28157 - DNA, 276 bp, Glycine max
  unsure (1)..(276): unsure at all n locations; Clone ID: 701059806H1
tttggtgccagccattggaaatccaagcaataatcacttttcagaagcacttccaagctaaagacagtgntgttattgtggccacaattccaaaatcaggtaccacttggctgaaagctctcacctttgccattgtcaatcgccatactcatagtatcactacatcaatgtcatcacatcctttgcttacttctaatcctcatgnacttgtnncctttcatagnatacaccgtttatggtaatgcccctagccangttccaaacctatccancntg

SEQ ID NO: 28158 - DNA, 278 bp, Glycine max
  unsure (1)..(278): unsure at all n locations; Clone ID: 701059808H1
cttcactcttcttctcttgcggctagggttttagcgcacttcttnctagatttaaggaagatgggtaagganaangttcacatcagtattgtggtcattggncatgtcgactcttggaaatccactaccactggtgcacctgatttacaagnttgcgaggcattgacaagcgtgttnttgagaggtttganaaggaagctgctgagatgaacaagaggtctttcaagtatgcctgggtnctncgacanacttaacgcngaccntcaaanaggantcac

SEQ ID NO: 28159 - DNA, 279 bp, Glycine max
  unsure (1)..(279): unsure at all n locations; Clone ID: 701059809H1
cctcttcccaatagacatgggttgtttcatggcatgtnttgntctatccaacaanananagcgtagaaagnctatctacaaagtccctagctggacaccanaaatatngaaattatgaagctcttgccataaccgnnaaattcactatccctgattctgatttcagnggnagagatgangttaaggagcagnntagtgttaaaagcaagaagaaganagttaccttcaatttgaatgtacaggtatatgagccaaaccccacagcttatcaggtattgc

SEQ ID NO: 28160 - DNA, 279 bp, Glycine max
  Clone ID: 701059810H1
attttccctcactttctcgctccccaaacgcccctgctctctcctccaatggccgaccagctcaccgacgaccagatcgccgagttcaaggaggccttcagcctcttcgacaaggacggcgatggttgcattactaccaaggaacttgggactgttatgaggtcacttggtcaaaacccaactgaggcagaactgcaggatatgataaacgaggttgatgctgatggcaacggaaccatcgatttcccagagttcctcaacctgatggctcgcaagatg

SEQ ID NO: 28161 - DNA, 278 bp, Glycine max
  unsure (1)..(278): unsure at all n locations; Clone ID: 701059811H1
ccctaaccacaatcatgcaagactttttgnanctcccttcgccgctccttggttttccgccccggcggtgacgattcacctttngccggaatcgccaacaagctcggctccgccattcgcaaatcgcgaatcgccctcgaacctcctcctccgatacggtggcgcaagggcgagttgatcggttccggcggcttcggtcacgtctacatgngaatgaacctcgactccggggagcttattgccatcaaacaggttttaattgcacctggtagcgtatt

SEQ ID NO: 28162 - DNA, 277 bp, Glycine max
  unsure (1)..(277): unsure at all n locations; Clone ID: 701059812H1
tataagctagtttatcgtgaggagaatatgaagttgtttgncnttctttgttgctgcagtagttttggtagcatggccatgccatggngcaggctaccaaaggttccctctccgaatgaaaactggctatggtgagcgttcttcggaggtaaaatgcgcaagttttaggcttgnngtggaagcanacaacannccgagcntttaaancnatgcctgaagagtgcgttgaaccaacaaaggactacnttaatgggcgaacaatttagatcagnctcta

SEQ ID NO: 28163 - DNA, 278 bp, Glycine max
  unsure (1)..(278): unsure at all n locations; Clone ID: 701059813H1
tcganccgtgaaaaacccaaagtgnttctctcctctgtcttnttctctctcttgctancccttttggctagttcgcantgctgcaagtgcaactccaagaagcgcagtgccaagccaccatgtttcaacattcaacagaagcctntttccttccacttntctctttggaattggntcttctgcttaccaggcaganggagcagcaagtntngatgggagaggaccaaccatatggganacctgcanctagacaggtactgaaaagatttgggatcata

SEQ ID NO: 28164 - DNA, 277 bp, Glycine max
  unsure (1)..(277): unsure at all n locations; Clone ID: 701059814H1
aattatcaaaggtgaaacgaagaagccctaactacgcacgcattcgtgagaaaactcaatattcgtcgctcatggcactnctcttctcgtctcttttccaaatccaaattgatctatggcagtcaaatacttctacaaaaggagcatgctattccagttcgtcactttgctaaagagtctgcccctcctgcccttaagggagacgagatgctgaagaacatttttgtggaggtgaagaacaaatttgagaccgccataggaatattaaagaaggaga

SEQ ID NO: 28165 - DNA, 278 bp, Glycine max
  unsure (1)..(278): unsure at all n locations; Clone ID: 701059815H1
atctctatcgagtaaattaactatgaagcctaccctactattatccctttccttcctgcctctcctttgctttcctggctctttcagaagatgttgaacaagttgtggacataagtggcaaccccattttcccaggtggcacatattacattatgccatcaacttggggcgctgccggtggtggattgaaactaggccggacaggaaactcaaactgcccagttactgttttgcaagnttactcagaaatcttccgtggcacaccagtcaaattcagc

SEQ ID NO: 28166 - DNA, 280 bp, Glycine max
  unsure (1)..(280): unsure at all n locations; Clone ID: 701059816H1
ctccacaggaagaagcatattcctgagtcaaatagttctgtccatatagaatttgtgaagtgagagtccaacctttcattttcaattttcaaagatgcctcgtggaacacttgaagttgttctgatcagcgccaaaggaatcgatgacaatgattttctctccagcatagatccttatgtgattctcacatacagggcacaggagaaaaagagcactgtgcaagaagatgctggatccaagccacaatggaatgagagcttncttttcactgnctctgac

SEQ ID NO: 28167 - DNA, 274 bp, Glycine max
  unsure (1)..(274): unsure at all n locations; Clone ID: 701059817H1
ggcctntcaagaagatgaaaaacctcanaacacttattattaganatgganaattttccaaaggtcccaaataacttgagttgganggcttatccaagaagtttgtgaatctaacagttttgaattttggccggtgcgnatctttanttncacaaatancngatgtgtctggtctcccaaatttggnggaacttttatttgaattttgtaagaatttaactacagtncacggttccattgattacttggncaaacttnaaatattgagtgcttt

SEQ ID NO: 28168 - DNA, 278 bp, Glycine max
  unsure (1)..(278): unsure at all n locations; Clone ID: 701059818H1
gtggaattcgcggatctcctaacnaaacacaaccctnaattatctngcaaccgntctcactntcaccacgccgcgacganccctcatnagcacctacgtgcaatcccgcgcctcntncagccantaatctgaaantnctccagnntccctanagtgganncacccacacccgaccagtancaatccttcatngccttcgtctnnctccacatcnggaatcaganacaccaggtcnagaaggtgctncttcaagctcagaaaanangagtcaaatccgt

SEQ ID NO: 28169 - DNA, 271 bp, Glycine max
  unsure (1)..(271): unsure at all n locations; Clone ID: 701059819H1
gcagaaagcaagctcatcctagagttttaaaaatggcagcagcctcctccatggctctctcttccccatccntggntggcnangccgtnaagctgggcccatcagcccccgaagtcgggagggtcagcatgaggaagaccgtcaccaagcaggcctcttccggaagcccattgtacggcccagaccgngtcaagtattgggccatttctctggcgagccgcctcctaacctcactggcganttcccagggtgataggcttggggcactgtt

SEQ ID NO: 28170 - DNA, 270 bp, Glycine max
  unsure (1)..(270): unsure at all n locations; Clone ID: 701059820H1
tcagctggacattcagttctcaaaccttgatgaactacaagtgaactacaataatgatcgttcaagggacttcacaaaccctaatctgcctacagagcagaaaggtcgatcttcacaacctggatatggtgatgcagcaggcatgtattctggagccagggcaggtgggttctctcagatggccaatgctgcggnaattgcagctgcctttgggggaggtttgcctcctggcataactggaacaaatgaaaggtgtacagttcttgttgc

SEQ ID NO: 28171 - DNA, 272 bp, Glycine max
  unsure (1)..(272): unsure at all n locations; Clone ID: 701059821H1
aagcaaganattaccattactggtgctagcaccttgccttcagatgaggtggagagaatggtaaacgaagctgagaaattttcaaaggaagacaaagaaaagagggatgccattgacacaaagaaccaggcagattctgtggtgtaccagacagaaaagcaattgaaagancttggagacaaggttcctggccctgtaaaagagaaggttgaagcaaaactaggggagcttaaagatgcaattnctgggggttcaacccaagctattaagga

SEQ ID NO: 28172 - DNA, 275 bp, Glycine max
  unsure (1)..(275): unsure at all n locations; Clone ID: 701059822H1
ctggtttggtcccatatgatggccaggttcatctccaacaagnccgaagacccacttactccgtcactccgaatncggcgaagggggtgatagtgtgccatcgccaccaatcctcggaagcaacgaaggcgaagtgggtggagatcgatggagtgaagctgttggaggagcacgtccagcgtgttatggtgaagaaggccacacccgattggcttcccttcctccccggttcctccttctgggtcccacctcctccttccccctttcttcacaaa

SEQ ID NO: 28173 - DNA, 272 bp, Glycine max
  unsure (1)..(272): unsure at all n locations; Clone ID: 701059823H1
cggcattgcgcttcacaaattctcagnctacgacttgggtgttggatttcattaagttgtgataaacatgggaaaagactcaaagccaaaggagtccggaggcaagggaaaggggaaacaggctgcaagtggaagtgatgagaatgcttctaagggaaaaggaaaaggtgggaaaggtggagatgggcttggtacttgcacctatgtcaaagctaggcatatcctatgtgagaaacaaggtaagatcaatgaagcctacaagaagctgcagg

SEQ ID NO: 28174 - DNA, 274 bp, Glycine max
  unsure (1)..(274): unsure at all n locations; Clone ID: 701059824H1
ggcaatttgggatcctaatgtaaccgatgatcatctgaggcaagttttcagccagtatggagaattagttcatgtgaagattccanccaggcaagcgatgtgggtttgtccaatttgcagacaggagctgtgctgaagaggcccttcgggtgttgaatgggacgctgttgggtggacaaaatgtgcgtctttcatggggncgcagtccttcaaacaaacaggctcaggcagatccaaaccagtggaatggtgctgctggtgctggttctggtgg

SEQ ID NO: 28175 - DNA, 275 bp, Glycine max
  unsure (1)..(275): unsure at all n locations; Clone ID: 701059825H1
attcctgaagagtgcgtttaagcaacaaaggaatacatccatggcgaacaatatagatcagactccanaacagttaaccaacaagcttactttnatgncagagacctcgaagtccatcccaaggacacatttgtgttcagtatagatggcaccgtactctntaatattccatactacaanaaacatcgatatggggtggaganattnnactcgnccttgtatgatgaatggggttaacaagggcaatgcaccggcactgcccgagactcttaaga

SEQ ID NO: 28176 - DNA, 279 bp, Glycine max
  unsure (1)..(279): unsure at all n locations; Clone ID: 701059827H1
aagtagttgagaactaagaaggagaagcaaatgggcttcctcaatgatctcttccccagctgttacnactgttcaaccgtgccggtgccggcatggttgctccattcactggcctcaagtccntggctggcttccccannagaaagaccaacaatgacattncctcccantgntagcaacggtggaagantgcaatgcatgcaggtgtggccaccagttgcncaagaagaagtttgngactctttcctacctggccagacctttntgatgcacnantgg

SEQ ID NO: 28177 - DNA, 276 bp, Glycine max
  unsure (1)..(276): unsure at all n locations; Clone ID: 701059829H1
ctgaggcactgaaagtgtgatatggcaagantcatttcctcttcctgcgcacgcctcgcaatgcgcctgcttctnccaccaccaccncagncaccgcgttcnccgtcactttacccaaaccctcatcactctccctctcatcgcgtcgattcntcttccctctctcccatgncatcgtccctccctcnacccgcgtcgccggaatccggtgccgcgttaaccgcgccggagactcggcgtactcancgctgantcggggtcgtcgtcttcgtcgnt

SEQ ID NO: 28178 - DNA, 276 bp, Glycine max
  unsure (1)..(276): unsure at all n locations; Clone ID: 701059830H1
cgcagttccttgatctctcctctcaagatgcagatnttcgtgaaaactttgaccggcaagaccatcanccttgaggtggaatcctccgacaccattgagcaacgtaaaagctaagattcaagacaaggaagggatcccacctgaccagcagagncttatctttgcgggtaaanaacttgaggatggtcgcanccttgccgattanaacatccgagaggaatcnccnctncatctcnntgcttcgcnnagggtggngccacagttcttggtnaagtt

SEQ ID NO: 28179 - DNA, 276 bp, Glycine max
  unsure (1)..(276): unsure at all n locations; Clone ID: 701059832H1
gctcttcaaaacccaaacanccaaccgtactgcacaactccaccactgtgcaatggccgacgaggaacctgttgatcagaaganatatcttgaagagtcttgcnaaccaaaatgtgtaaaaccattactagaataccaggcgtgcattaaaaggntacatngtgatgaatctgggcagaaacnctgcnctggacaatattttgattattggtcttgtattgacanatgtgttgcaccgaagctnttcaccagactgaagtaaatcgggaggntttc

SEQ ID NO: 28180 - DNA, 127 bp, Glycine max
  unsure (1)..(127): unsure at all n locations; Clone ID: 701059836H1
anacactctcatagctgtagcggcgacactaanatcggagaaanantggcgaaaacnacgtcgctggctgctctttananngctcctcttgcgganccctagctctnatccangcgangaaatcgnc

SEQ ID NO: 28181 - DNA, 269 bp, Glycine max
  unsure (1)..(269): unsure at all n locations; Clone ID: 701059838H1
gctcctccttcatctttctttgtcaatatcaacaccatcatctccaacaccaacaaaatctttccaatttaggaaactcttctctcagccttccttccccttctctcttttccaaaactaatggaaggttctgtccttgaacgtcttgattttgggaagatgggatacgggtgcaagcattatagaagaagatgcaggattagagcaccatgttgcaatgngctctacttttgccgtcattgtcataagnggcaacgagcatgctgagc

SEQ ID NO: 28182 - DNA, 273 bp, Glycine max
  unsure (1)..(273): unsure at all n locations; Clone ID: 701059839H1
agtnctctgagttgttttgtgaganagcacatagcatagcaaggaaggagtattacaaccgaaancctnaagaaaaaaagagtanaggnagaaaaaacacctgcaancaccaacgatgggtgtggattactacaagatcttgcaggttgataggagcgccaaagacgacgacttgaagaaggcctataggnnacttgctatgaaatggcaccctgataagancccnancaacngtaaggaagctgtcnctngggttaaatcagatttccgnnc

SEQ ID NO: 28183 - DNA, 276 bp, Glycine max
  unsure (1)..(276): unsure at all n locations; Clone ID: 701059840H1
gnttcaccgctantccctgttgcnacctcctccgacgcccacgcgccaaanccgcgggtgctgccantttatgacatctgtagncntntcagcactanaatcagcagcggnatgataanctatntcgcctanaccaaaaacgacacgcnaatgctgcctgcttcgnnggnttnatctacgtggngtacttntccgtcgacttctnnccaccagcannanaacccaagtgcgcgtgggctccacgtcgtgaaactcgngtcgtgggcgttgntgagt

SEQ ID NO: 28184 - DNA, 272 bp, Glycine max
  unsure (1)..(272): unsure at all n locations; Clone ID: 701059841H1
tngccagtgttctgatagcttgaccactactgatactgaaaatcttagttctgaagcaggtgttcagattgtggagagcttctcagcatgcagtgttgantctgtccaacctcctaaggctgattctccacccagcagtgtgtcaacaaatggggtntcatctccttcagtggctgcaagctcagactcatctgatgttgctgcttccaagtctcccagtcaggaacaagtttcagccaccanagagaaaaatggggatgtcaaagatngtg

SEQ ID NO: 28185 - DNA, 92 bp, Glycine max
  unsure (1)..(92): unsure at all n locations; Clone ID: 701059842H1
ggaagagcgtcgcagtcgcaaccctaatcagaagnagcgcagtttcancgagtgtgnttnatcagcnatgggtggtatgcacagacgnngtg

SEQ ID NO: 28186 - DNA, 265 bp, Glycine max
  unsure (1)..(265): unsure at all n locations; Clone ID: 701059843H1
ctggcattattattctcttccccttaatttctatnnccaatccctcagcaacacgcagcaaatgggtcggcttaatctccgacttgtgtggtcactctcattaacactgtccctttatnatctacacccantctctgctcagctcagtccnaaccactatgctaaaacatgccccaatcttgaaagcatcgttagacaggccgttaccaagaagttccaacaaacctttgtcaccgtcccagccacccttcgtctcttctttcat

SEQ ID NO: 28187 - DNA, 272 bp, Glycine max
  unsure (1)..(272): unsure at all n locations; Clone ID: 701059844H1
ttttccctattctttttgagtgccgagcaaaaccctaatcgagttcgattgcaacacacctccgttgctgtattccaccttctccgacgaatggcaaccaaacctcttacaaccgaagctattgcgcttacagaaaagaagatggacatgacattagatgacataatcanaatgtctaaaaatacgaagaataagaagccaagaagggttctgaacaaaagtcaaaagttttcanataattttactcaagataagtctgcaaaggtccaacg

SEQ ID NO: 28188 - DNA, 274 bp, Glycine max
  unsure (1)..(274): unsure at all n locations; Clone ID: 701059845H1
ctttataccgattcgcttacttttcttctcctccttcctccaattttcgtttcccgaaatacccttcgaaacacgttaaattgctnctttgctgccactctcattcgcaacgatggaagctcctccagaaggttatcgcaggaacgttggtatctgtctcatgagcaatcacaaaaagattttnncngcttcgaggctcgacattcccaattcttggcaaatncctcagggtggtattgatgaaggtgaggatccaagaaatgcagccatcagg

SEQ ID NO: 28189 - DNA, 273 bp, Glycine max
  unsure (1)..(273): unsure at all n locations; Clone ID: 701059846H1
cgcaacaaaaagaaagaatcccaggcgaggagaaagatggangggaaggagcaggatgtgtcgttgggagcgaacaagttccccgagagacagccgattgggacggcngcgcanagccaagacgacggcaaggactaccangagccggcgccggcgccgctggttgacccgacggagtttacgtcatggtcgttttacagagcagggatagcagagtttgtggccacttttctgtttctctacatcaccgtcttaaccgttatcggagtcgcc

SEQ ID NO: 28190 - DNA, 274 bp, Glycine max
  unsure (1)..(274): unsure at all n locations; Clone ID: 701059847H1
cactacattaatattcccttgggtttcattaattgtnacatttagctttttcttattgaaccgtgtcaatngccgctactatgaaggctttagcttttntcgctttgcttgtaaccattaatgcaatagtgtgtganagtagagtggcgaganaggaccttggattggaccttggtggggtgggaattggggtgggtgctggggttggactangccttggtggtgggggtggtgctggttctggtgcaggtgccaggcnctggcncnggctnct

SEQ ID NO: 28191 - DNA, 266 bp, Glycine max
  unsure (1)..(266): unsure at all n locations; Clone ID: 701059849H1
ttttcttcagaaatttgccatcgttgagagaagcgtgaganccttagtcgttcaagatgagagctaagtggaagaagaagcgcatgaggaggttgaagaggaagcgccgaaagatgngacaaagatctaagtaggtgctgagcaggagttgagatgagctttccatctgctaccagcctcatgacattttaggctgtnatggctcttatgatcttgaggtctagtcgctaggggagttcactcttgacttagtttgcttactggnc

SEQ ID NO: 28192 - DNA, 267 bp, Glycine max
  unsure (1)..(267): unsure at all n locations; Clone ID: 701059850H1
caaaaagcttgctcagaggaagcactttccttctgtaaactggcttatttcttattcagaatactcaacggcacttgaaaccttttatgagcaatttgatccaggattttatcaacattaggacaaaggctcgtgaagttctgcaaagggaanatgacctgaatgaanttgtncagcttgtgggcaaggatgtttagcncaaggngataagatcaccttagagnttgcaaagcttttcagagaggattatcttgctcaaaatgcctt

SEQ ID NO: 28193 - DNA, 269 bp, Glycine max
  unsure (1)..(269): unsure at all n locations; Clone ID: 701059852H1
agagggcaagttgaagggaattcttggttacactgaagatgatgtggtctccactgactttatcggcgatagcagattcaagtatttttgatgcaaaggctggaattgcattgnataagaactttgtgaagcttgtttcttggtacgacaacgagtggggatacagctcacgtgtcattgatcttcttgtattcgttgccaaganctctctttaaggtgttacttcaaagtagcttgtcttcacattattaccgtatgtttatgtttag

SEQ ID NO: 28194 - DNA, 270 bp, Glycine max
  unsure (1)..(270): unsure at all n locations; Clone ID: 701059853H1
ttagcacttcttcttttcacactgccgctgcaacaatggcttcagagnagaaactttcgaacccaatgagggagataaaagtgcagaagctcgttctcaatatctctgttggcgagagtggagatcgttntcaccagagccgccaaggtgttngaacaacttagtggccaaaccccagtgttttccaaagcaaggtacactgttcgttccttngggattaganganatgngnagattgcntggctatgtcactntcanaggtgncaaggc

SEQ ID NO: 28195 - DNA, 270 bp, Glycine max
  unsure (1)..(270): unsure at all n locations; Clone ID: 701059854H1
cactacattaatattcccttgggtttcattaattgtgacatttagccttttttattgaaccgtgtcaatggccgctactatgaaggctttagcttttgttgctttgcttgtcaccattaatgcaatantgtgtgaaagtagagtggcgaganaggaccttggnttggaccttggtggggtgggaattggggtgggtnctggggttngactaggcccttnngnggtggggntnngtgctggtnctggtgcaggtgcagggctctggctctg

SEQ ID NO: 28196 - DNA, 268 bp, Glycine max
  unsure (1)..(268): unsure at all n locations; Clone ID: 701059855H1
cttctganantgtttggntganagtagcaaagatgtttcctttcnggcaaaagggtcaaaagataaaggggactatggtggttatncagaanaatgtgttggatatcaacagcatcaccagtgttgganggatcgttgaccaaggcttaggcttcataggcagtgcagtcgatgcacttacttttgcagccaccaaaatctccatccagttgattagtgctaccaaggctgatggtggganangaanaattggnaagagtacnaattt

SEQ ID NO: 28197 - DNA, 271 bp, Glycine max
  unsure (1)..(271): unsure at all n locations; Clone ID: 701059857H1
gagataactagaaacagtgtgatgaaaatgaaggtccttgttttcttcgttgctacaattttngtagcatggcaatgccatgcgtatcgatatgttccctctccgaatgaacactggctatggtgcccgtactccggaggtgaaatgcgcaagttggaggcttgctgtggaagnacacaacatctttggctttgagaccataccctgaagagtgcgttgaagcaacaaaggaatacatccatggcgaacaatatagatcagactccaaaac

SEQ ID NO: 28198 - DNA, 274 bp, Glycine max
  unsure (1)..(274): unsure at all n locations; Clone ID: 701059859H1
caaaaaccctaggtagagagctcttcctccctttctcacagcaatggccgcngcagcacgccctcttcgtcaccgtgcaggccctcganggtgacatggcaaccgatgcctccnctaccgttnccatccctgangtcatgaaggcctctatccgccccgacatcgtcaatttcgtacactcgaacattcccaagaacagccnccagccatanancgtcagtgcgtcgcgctggtcaccagacctccgccgaatcntggggtaccggccgagccg

SEQ ID NO: 28199 - DNA, 271 bp, Glycine max
  Clone ID: 701059862H1
cacaaacactttcaatgctgcattaacctccgcatttgttactgattttccaggtgtgaatggtcttggtgtatctgtggcacggttagacatagccaaaggtggatcaatcccaatgcacacacaccctgctgccactgaacttctaataatggtggaaggtcaaatcactgctggttttatgaccccaactgcactttataccaagacactgaaacctggagatattatggtttttccacaaggacagttgcattttcaggttaattct

SEQ ID NO: 28200 - DNA, 274 bp, Glycine max
  unsure (1)..(274): unsure at all n locations; Clone ID: 701059863H1
ggatggagaaggtggtatgtgtgaccggcggcagggctgcattggttcatggctcgtccatctcctcttggatcgcggctacaccgttcacgccaccgtccaaaacctcaacgatgaagccgagacgaagcatcttcaatccctcgacggagcgtccacgcgcctccgcctcttccagatggatctcctccgccacgacaccgtcctccccgccgtgcgtggctggcgccggcgtctnccacctcggcctctccctgcattgtngacnaagtcc

SEQ ID NO: 28201 - DNA, 279 bp, Glycine max
  unsure (1)..(279): unsure at all n locations; Clone ID: 701059864H1
ctactcatcactcactccaaacccaccacaccaccattattcacatctcattctctancctttcactattcccctntcattcacttctctagctagtttcctcatcatcgtagaagnaccaatacttgtactctctcttactttttaaccaggtagaatgattcacctaaggnnaaattagtagcttctngttgtggctttttatttggnctngtttggtgtagagataaatncggttgggattggtcgtggggtttaggagtngttttgaggggggga

SEQ ID NO: 28202 - DNA, 270 bp, Glycine max
  unsure (1)..(270): unsure at all n locations; Clone ID: 701059865H1
ccaattccgaancaaaaactaccttcacatccacaaacnacacctccncccataaatanaagtaacctccctcatggaagagctctcagcggggcctctcgtccccgccgtcgtcaaacctgaaccgtccaaaggcgcctccgccgctgcctccggcggcacgttcccggcctccacgtcggagccggacaaggacttcctctgtccgatttgcatgcagatcatcaaggacccgttcctcaccgcntgcggccncagcttctgctacat

SEQ ID NO: 28203 - DNA, 271 bp, Glycine max
  unsure (1)..(271): unsure at all n locations; Clone ID: 701059867H1
tctgaatctgataggaaaaaaacaanaaggcgcagatgggtancacangtttctcatggaaattggcggatncattccaaagctttccanngggnaatactgnggctgnggtggtgttggatgnatngggaaaagncacacccaataattacnactngcatccccnaggctgaaacaccctgnatggattctcttaaaaagggtgtccctgaacngnnnagattgnttngngctcatggtnccgctgtagngccnttccaagnnangnttt

SEQ ID NO: 28204 - DNA, 271 bp, Glycine max
  unsure (1)..(271): unsure at all n locations; Clone ID: 701059868H1
ccaacccaatcttcaccttcgcccacaacaaatcccattcctgcatctcctccttgcagcatcgntgcaaactttactttccatttgtgtccgtcctccccgagaaaaanatggcgaacgcagnatctggnatggccgtccatgatgagngnaagctaaagtttgtggagctcaatgggaanangnngtaccggtttntggtttctnagagtgnggatnagcangcagnnngttntngtgnannnnctgggtggnncntcgcnnattngta

SEQ ID NO: 28205 - DNA, 267 bp, Glycine max
  unsure (1)..(267): unsure at all n locations; Clone ID: 701059869H1
cttcttactccttacaagatgggcaaattcaatctgtcccatagagttgttttggcaccgctggaccagacagangtcttacgacaacgtcccacaaccccatgccatcctctacnactcccagagaacttccaacggaggccttctcattactgaagccactggcgtctctgananggctcanggctntccgcaaacccctggcatatggactaaagnccatgttcaagcttggaaacccattgtcgntgccgtccacgccaaagg

SEQ ID NO: 28206 - DNA, 265 bp, Glycine max
  unsure (1)..(265): unsure at all n locations; Clone ID: 701059870H1
gatagctagaagcaataagatgaaaatgaaagtgcttgttttgtttgttgctacagttttggtagcatntgaatgncatgggctcagnctaccagaagttccctctccanatgaaaactgggtttggtgggcaatacagnaatgaggtggcatgtgccagttggaggcttgncgtggaagcaancaacgtagtcaagtggcnaactgttcctgcancttgcggagagtacntagctgactacgttctaggagaccaatatanatc

SEQ ID NO: 28207 - DNA, 267 bp, Glycine max
  unsure (1)..(267): unsure at all n locations; Clone ID: 701059871H1
gatcgagataactagaaacagtgtgatgaaaatgaaggtccttgttttcttcgttgctacaattttggtagcatggcaatgccatgcgtacgatatgttccctctccgaatgaacactggctatggtgcccgtactccggaggtgaaatgcgcaagttggaggcttgctgtggaagcacacaacatctttggctttgagaccattcctnaagagtgcgttgaagcaacaaaggaatacatccatggcgaacaatatagatcagactc

SEQ ID NO: 28208 - DNA, 269 bp, Glycine max
  unsure (1)..(269): unsure at all n locations; Clone ID: 701059872H1
angagttcttgcactcnttggancaattcctcgttttgacattnattcccagaaaacttttnnacacannanattattananatacnagaattcnaattttncttcacaangannacaacacaaacatgaagantcgcanctctgcnaaaatntctgcaacatggnttnnaattttntntgtcttttccttgattattggtatgctcgtcacaagcaggatgtgggacccaccagantcaaacgggttggttgttgcgnagatcagcgg

SEQ ID NO: 28209 - DNA, 262 bp, Glycine max
  unsure (1)..(262): unsure at all n locations; Clone ID: 701059873H1
ctttttcgtcgttcacttcagaatcctaaaacaaagtctataaaagggananaaaataaataataaacagcgaagttacgaagattctgtagagaagaagagcaatggcgtccaacgattccgattcgcagatgaagatcgtacatggcgatgctggttacatacttgaagacgttcctcacttcgccgactaacatccaaatcttcctacatatccgaatccnccttcgatccaatcctgcttactcggttgttaagcagt

SEQ ID NO: 28210 - DNA, 271 bp, Glycine max
  unsure (1)..(271): unsure at all n locations; Clone ID: 701059874H1
attttctcctcacacagcaggaacacaatggattcttcttcatcagcaagtgtttgtcagcatgccaaggttgttccaaaacaatatgacatcttccatgcaggaaggtacccttcatctcgcaggactcattcctcttcctcctcttgttcatcactttcaccctcctcttcctcctttgaatcattctttttccctgaggatccacttcttngtcctgnatccccttcttagattctnaggtgtnccattttcttgggaatacttgcct

SEQ ID NO: 28211 - DNA, 269 bp, Glycine max
  unsure (1)..(269): unsure at all n locations; Clone ID: 701059875H1
gttgatcgagataactagaaacagtgtgatgaaaatgaaggtccttgttttcttcgttgctacanttttggtagcatggcaatgccatgcgtacgatatgttccctctccgaatgaacactggctatggtgcccgtactccggaggtgaaatgcgcaagttggaggcttgctgtggaagcacacaacatctttggctttgagaccattcctgaacgagtgcgttgaagcaacaaaggaatacatccatggcgaacaatatagatcagac

SEQ ID NO: 28212 - DNA, 270 bp, Glycine max
  unsure (1)..(270): unsure at all n locations; Clone ID: 701059876H1
cttgttcacccttccccttctccttacttctcactctctttccancaacactccctttcnctttccccttacccttccttctgtgtgtgatgatgtagatagagaataaaaagagaccagtgtgcagtgagaaagaggttggtcacttcttgtgtggctttgttttgttctttgtgttggaatttgttgatgggtgaagagggagaagaggtgtcaagagataaggaacagcaacacatgggagtttatggaaatgagtggttgtttagt

SEQ ID NO: 28213 - DNA, 270 bp, Glycine max
  unsure (1)..(270): unsure at all n locations; Clone ID: 701059878H1
tttcatccaatatcacagaatcacaatagcttttctctccgtgtagactcatccaaacaaacactgtaaaaaccgcaagaactctctatcactttgccacccttcattcataaacactttccattattctatgaactcaaactcaaaacaatgaccantttttctctctactctcatttcctttcctccaagaactctattttccatgnccccttcaaaggaaacaacaacaccaagcaattcactttttccaaagccgcaaatctcttg

SEQ ID NO: 28214 - DNA, 197 bp, Glycine max
  unsure (1)..(197): unsure at all n locations; Clone ID: 701059879H1
caacattgttgcacttaatttgtaatcacttatgtattaataaaaagggtccacactaaagtgagagccttattttggctgtagtgtagcccatgcgtgtgtattggttttaattgatcaaaagtgtgttttaatctctcttaccatatgaatatcaaaatttgttcttcattggtgttggattccaaaaaanaaaa

SEQ ID NO: 28215 - DNA, 269 bp, Glycine max
  unsure (1)..(269): unsure at all n locations; Clone ID: 701059880H1
aatggaaaagctccatgcttctgtgctcgcccttgtattccttcttgtcatactatttcaggaaggattggtaacatgtatgaagaatgaagacggatcagaagaatggggatatgtgcaagttagaccaaaagcccacttgttctggtggctttacagaantccatacagagtggagaatccctccaagccttggccaatcattctctggcttcagggaggaccaggctcttcaggagttgggtttggaaattttggagaggttggtc

SEQ ID NO: 28216 - DNA, 266 bp, Glycine max
  unsure (1)..(266): unsure at all n locations; Clone ID: 701059882H1
cctggtcttactgtgtggtgactgtgctctgctctcatctcattcatattcatttcaatgggcaactcaaggtcaagtgcattacctgcaaagctgcggtggcctgggaacccaacaagcccttaaccgtccaagacgttcaggttgctccgcctcaggccggcgaggtccgtgtccaaatcctcttcacngntctctgccacaccgntgcttacacttggggcggcaaggatcccgaaggnctcttcccctgtattctcggncac

SEQ ID NO: 28217 - DNA, 266 bp, Glycine max
  unsure (1)..(266): unsure at all n locations; Clone ID: 701059883H1
attttagtcaatttcagacttgtagtgtttttggtgtaattgttnntaaaatgtcctttntgctttaatcattcgctaatagacaaggctgctgtngagcnaacaaaattgcaccctttttgtgctggtttttcttcccttgtgtgactgttatatcntgattcagtgtcatgcaccnggtggaatgttcatttgctcataattgcatgcatggnttantcaggcncggaattnncctcagcncaatngtaacntgtncagtnanc

SEQ ID NO: 28218 - DNA, 266 bp, Glycine max
  unsure (1)..(266): unsure at all n locations; Clone ID: 701059885H1
gtcaccaagaaattaaaagagcatcatcaccgttgaagctaaacgtgttgtgtgtgtgaagaacaaaacaacatcctctgcacacacacacanacatcattattttttttcttactcttcgaaccactaaaaaaaatgtttgatccacgaagaaaccaanccacaatttcgtttccattgtccaatgaaataggacaaatnactcatggttatgacacatggggtgccacaaacactgnttttatggcatcaaagaaaccaccaaa

SEQ ID NO: 28219 - DNA, 266 bp, Glycine max
  unsure (1)..(266): unsure at all n locations; Clone ID: 701059886H1
ccggcaatgcagacgctacttctgccggcaacacgcgccggcagcttcacggcagttcctgctgtcagcctccgncgtcgcctcccnttccactncctcaaccatttctcagcccgaattccttacccctcactccttctcaatcgggntcgttcatcttcctcttttagttcctccatngctcgtcaaccatggaagaagcttcccttcaccgcaagcgcttcttcgcaagtgtctccggnattcactccctccaacgangaatc

SEQ ID NO: 28220 - DNA, 266 bp, Glycine max
  unsure (1)..(266): unsure at all n locations; Clone ID: 701059887H1
gttattagggtttttgagtgcggcggtccaaacactcttctctgcagcttttgcctacaactncccttcaccatggctgaacaaaccgagaaagcttttctgaagcaaccaaaagtgtttctcagcacaaagaagactgggaagggaaagagacctggaaaaggtgggaaccgcttttggaagtccattgggcttggatttaagactcccagggaagccatcgaaggaacctatattgacaagaagtgccccttcactggcaatgt

SEQ ID NO: 28221 - DNA, 265 bp, Glycine max
  unsure (1)..(265): unsure at all n locations; Clone ID: 701059888H1
aatccaaaccgatctgttctnncttaatttcctttctgcntgcctttnaaccgcttcatcntttggttgtcantttctgagaattttccatttgggggangagggnctctctttggcactttccatacttgttgatcttgcnngtgtgtcactgtttcacccttngtnttctantcnaacttctncacaagnggagttagtaatcttctggctatcaaatcactgtgtggttgttgaactattattattcagagncngcnanttt

SEQ ID NO: 28222 - DNA, 257 bp, Glycine max
  unsure (1)..(257): unsure at all n locations; Clone ID: 701059889H1
cttccttccttctccttctctctgagaacaacaccccacactcctctgctctnctctccgcttcnttctcttctcacacctncatggcncacanttcccntncctccgccgatgccggcatggangctgtncagcgccgtctcatgttngaagacgnatgcattttggtggatgacgntgancgtgtggttggtcatgattcanaatacaatggtcagttgatggaaaagnttgaagntgagaattgtgcatagagc

SEQ ID NO: 28223 - DNA, 266 bp, Glycine max
  Clone ID: 701059890H1
aggcagcaaacatgatgaagaagattggccttcttgaagctgcaaaacggaagttcttgggggaagggttgggggcttgctccattgaggaactgcaatggatagaacaacagttggagaggagtttaagtaatgttagaacaagaaagatccaggttttcaaggaacaaatcgagcaactaaaagaaaaggaaaaagtcctacttgatgaaaatgtcaagctcactgaaaatcgcaggctctctgagaagcatggaatcaatcta

SEQ ID NO: 28224 - DNA, 268 bp, Glycine max
  unsure (1)..(268): unsure at all n locations; Clone ID: 701059894H1
ccaatggcgaggatcaaggttnacgagctgaggcagnagacnaacgctgatctgntnantcaactgaangacctgaaggcngacntgncttgnttngtgttgctaaggtcaccggtggtgcccctaacaagctttccaagataaangnggttaggttgancattgcccaggttttgacggtgatttctcacaagcanaaggctgcgttgaggnatgcctacaaggataagangtncttgtnctctcgatctcngcccnaagaaganca

SEQ ID NO: 28225 - DNA, 272 bp, Glycine max
  unsure (1)..(272): unsure at all n locations; Clone ID: 701059895H1
tcagaccgaactcaacactcgcagcaccgccatgagtgccgccacttcctnccacncttctccaccgtcaccgatgccaatcttcactccagatttcattctcgtcttgttncattcactcatcatttctcactttctcaacccaaanggatttcttcaatcagatgncaatcaattaataccgataagaagaaatcaagtagaaatctgctggacaatgcaagtnacctcctcacggacttattaagtggtggaggtatagggtctangcc

SEQ ID NO: 28226 - DNA, 269 bp, Glycine max
  unsure (1)..(269): unsure at all n locations; Clone ID: 701059896H1
aaanaaaagaccttttaagataacagacatgttgaagttatgataacccaactcaaaaaatttcttctngtaaaatgctacaaagaatagttttaaaatatacattatactttaactaatattgactttttttcattanaaaattaaccttttgtctttcaattcagccgaagaaataaaacgtggattgaactgtacaaaaaaaatcttgtgaagaataaacgtaaaatggtcagtatacatntttttnatggtaataataggnngnc

SEQ ID NO: 28227 - DNA, 163 bp, Glycine max
  unsure (1)..(163): unsure at all n locations; Clone ID: 701059901H1
cacaccgacgtggctgttctcttggacaacgaagccatctacgacatctgtaggagatctctcgacatcgagaggcccacctacaccaacctcaacaggctcatttcccagatcatttcgtcgctaaccacttccttgaggtttganggcgccnccnatgggg

SEQ ID NO: 28228 - DNA, 276 bp, Glycine max
  unsure (1)..(276): unsure at all n locations; Clone ID: 701059903H1
tctgactcagaaattccacaatcaataaggtgaaattaattgccacttctttgatctcgtgtccttttttctgatataacagattcaagctagctgaagaagctggaaatggttccaaggtcactagtaccaccacctcctccacttcccaaattctcaagaccaaaagcagaagagagtgtcacaaaccgagaaattgccaagtnttggaggcaaaagaggatcgtggaggaggaccacctcctgctgctatcaaagctgcagctagactccgtg

SEQ ID NO: 28229 - DNA, 273 bp, Glycine max
  Clone ID: 701059904H1
cataggggtggtgcatcggatggaagacgaggatctgtgggtgtcattctgttttacggagaggctatggctttgtaaggcatgggaaatggaatgggttaggccatttaaagtgggggacaaggtaaggatcagagacggactggtgaccccacgatggggatggggaatggagacacatgcaagcaagggacaggttgtaggggtagatgcaaatggaaaactgagaataaaattccggtggagggaagggaggccctggataggagaccc

SEQ ID NO: 28230 - DNA, 272 bp, Glycine max
  unsure (1)..(272): unsure at all n locations; Clone ID: 701059905H1
ctaatccagtttcgttcttcgcccgacacattttttttctccgatctcctattcctcctcctatttttgttactcgannnnnnnnnnnnnnnnnnnnnnnncctctctatgggttaaagttaaatctgaatccgaatatgatctaatcattttcattttaggtctttctgatttggttttcggtgttgaattgagcgcggtggttgtgtttaggtttcgttttgttgggcgtgtgagtcgtagggggggtttcgaagagcatagaataatgc

SEQ ID NO: 28231 - DNA, 156 bp, Glycine max
  Clone ID: 701059906H1
gaagagaaaagagagagaagggtaaggtaaccctagagtggtgaatcgaatctgcaaagatggaagctgtttctcgaagaagaggtggaggcattttcgaaagcctctacaaggtcgttatgcgtcgcaactctgtctacgttaccttcgtcattc

SEQ ID NO: 28232 - DNA, 156 bp, Glycine max
  Clone ID: 701059907H1
gttcaaattttaggagcggagaatccagagaaagagagatgtctggtatcgcccgtggacgtcttgccgaggagcgaaagtcatggcgcaaaaaccaccctcatggtttcgttgccaagcccgagactctccctgatgccaccgttaatttgatgg

SEQ ID NO: 28233 - DNA, 155 bp, Glycine max
  unsure (1)..(155): unsure at all n locations; Clone ID: 701059908H1
cggctcttatgattctgaggatggcttccgcctgttggataaagagatttcagagcatgaatatttgaaaaacagtgttgagggtttatctcggaggcttttctatcttgctcttccaccttcagtatatccntcagtttgcaagatgatcaaga

SEQ ID NO: 28234 - DNA, 272 bp, Glycine max
  Clone ID: 701059909H1
gagttttgaaggagaaggagggaaggggtgtaacggctccttcttccgcgcgtttgacatggacgacaatggggatgagtgcatggacgagtactttcatcaacccgagaagaagcgacgtctctctgcgagccaggttcagtttctagagaagagcttcgaggaggagaacaagcttgaacccgagagaaagaccaaactagccaaagaccttggtttgcagccacggcaagttgctatttggttccagaaccgtagagctcggtggaaga

SEQ ID NO: 28235 - DNA, 270 bp, Glycine max
  unsure (1)..(270): unsure at all n locations; Clone ID: 701059910H1
attttctctgttttcatttcattattttcttcttctcccttcgatttctccagaacagcaagggngaatcaattcctcatcgttgcaatttttctttcactctctagattctcatctttcctctcttctaccccttcagaaaaaaccatgtcttcatattatntgtntatctagctcttcattttttcttgctccaagattatgctgtaaaattctgaaactcacagtttcagccacattttagacttaaagatctgcgcgttgaccctt

SEQ ID NO: 28236 - DNA, 269 bp, Glycine max
  Clone ID: 701059912H1
catgtcttccttctctagggtttttagctcccccaatttcttcgctcaacatggttcttcaaaatgatattgatttgctaaatcctccggttgagcttgagaagaggaaacacaagctcaagcgtcttgttcagtcaccaaactctttcttcatggatgttaagtgccagggttgcttcaacataaccactgtctttagccactctccagactgttgttgtatgcggaaactgccagactgtcttgtgtcaaccaaccggtggccgggc

SEQ ID NO: 28237 - DNA, 191 bp, Glycine max
  Clone ID: 701059914H1
ctattcattcaagattcagcaagtgcgttttggaagcagagaccgaaatacttcgagatggcccgtacaaagcaaactgctcgtaagtcaactggaggaaaagctcccaggaagcagcttgcaaccaaggctgcacgtaagtctgcaccaacaactggtggtgtgaagaagcctcatcgttatcgccctgg

SEQ ID NO: 28238 - DNA, 272 bp, Glycine max
  unsure (1)..(272): unsure at all n locations; Clone ID: 701059915H1
cattaattccactgtgtgtgaggggcngtcttccataatctctcttaatggaacagttgaagccaagtgctgttaactcttctcctctcactccactcaccttcttggacagagcagccaccgtttacggcgatgtcccttccgttgtttataacgacacaaccttcacgtggtctcagacgcgccgccgatgcctccagctggcctctgccctcgcctccctcggcatcggccgcggccagtcgtctccgtcgtggcccccaacatccccg

SEQ ID NO: 28239 - DNA, 264 bp, Glycine max
  unsure (1)..(264): unsure at all n locations; Clone ID: 701059916H1
cttgggagtgagtcactcttcttgcataacccaganctgcagacaatatgcgaagnactggcttgttacatnngttatgccttgtcattgctttagtaagtgtgcaagcagaagatgcgtataagtattacacatggacggtgacttatggaactatttctccattgggtagtccccagcaggttattcntatcaatggtcagtttcctgggcctagacttgacttggtgactaatgagaatgtaatctcaaccttatcaacaa

SEQ ID NO: 28240 - DNA, 157 bp, Glycine max
  unsure (1)..(157): unsure at all n locations; Clone ID: 701059917H1
gaacatgatcttaaaggactaatggagggaatgaagcagccctttagccagagtgaagtaaaatgcttaatgcnccagcttttagaaggtgtgaagtatcttcatgacaactgggtgcttcatagggatttgaagacttctaacctgcttctgaata

SEQ ID NO: 28241 - DNA, 275 bp, Glycine max
  unsure (1)..(275): unsure at all n locations; Clone ID: 701059918H1
cgcgtcttcataaacgcctttcttctccgtttccgtttcctcgttcgaattcgctttttgatctgcgaaaatgagagantgcatctcgatccacattggtcaggctggtatccaggtcggaaatgcttgctgggagctctactgcctcgagcacggcatcgggcccgatgggcaaatgccaagtgacaagacagttggcggtggtgatgangctttcaatactttcttcagcgagactggtgctggaaagcacgtgccacgtgcagtgtttgtag

SEQ ID NO: 28242 - DNA, 251 bp, Glycine max
  unsure (1)..(251): unsure at all n locations; Clone ID: 701059920H1
caacgaacgatccacgaaagatgtcngctgttttccacaaanccggtggcaaaaagcccagagggtctgcagagccctcactcagattccgtctcagccctaaaagacggttttatcgcagaacacttctcttccgttcaccctggttccgtcaccgtcaaccttggctcttccggtctcttggcctattcccttcacagacagaacccccttctcccaaggctgtttgcagttgtggacgacatttctgt

SEQ ID NO: 28243 - DNA, 272 bp, Glycine max
  Clone ID: 701059921H1
tatcttcatcaataatcgcagaagcagtttccggtgcatctcatcgtcttccaaaatgccacgacgcagatgtctcgaagcaaatccagcagatggtgcgtttcatccgccaggaagctgaggagaaagccaacgagatctctgtatctgccgaagaggaattcaatatcgagaagctgcagttggttgaagccgaaaagaagaagatcaggcaagaatacgaacgcaaagagcgccaagtcgaaattcgcaagaagattgagtactcatgc

SEQ ID NO: 28244 - DNA, 270 bp, Glycine max
  Clone ID: 701059922H1
acaaatcaaagccatggccacctccaacttctctattgttctctccgtctccctagccttctttttggtgctacttaccaaggcacactcgaccgataccgtttctttcaccttcaacaagttcaacccagtccaaccaaacattatgctccaaaaagatgctagtatttcatcctctggggtgttacaactcaccaaagttggcagcaacggcgtgcccacctcgggatctctcggtcgtgccctttacgctgccccaatccagatttg

SEQ ID NO: 28245 - DNA, 267 bp, Glycine max
  unsure (1)..(267): unsure at all n locations; Clone ID: 701059923H1
cttctcttgcggctagggttttagcgcanttcttctagatttaangnagatgggtaaggaaaaggttcacatcagtattgtggtcattggccatgtcgactctgggaaatccactaccactggtcacctgatttacaagcttggaggcattgacaagcgtgttattgagaggtttgagaaggaagctgctgagatgaacaagaggtctttcaagtatgcctgggtgctggacaaacttaaggctgagcgtgaaagaggaatcaccat

SEQ ID NO: 28246 - DNA, 270 bp, Glycine max
  Clone ID: 701059924H1
atttacgcttctcttctctgcagcaactatgcctaaccctaaggtcttcttcgacatgaccatcggcggtcaatctgctggccgcatcgtgatggagctctacgccgacgtcactccccgcaccgccgagaacttccgcgcgctttgcaccggcgagaagggcgtagggcggagggcaagcccctccactacaagggctcgtccttccaaccgcgtgatcccgagtttcatgtgtcagggtggcgattcacgccggaaacggaaccggcg

SEQ ID NO: 28247 - DNA, 267 bp, Glycine max
  Clone ID: 701059925H1
gcgacgctgtctctcctgctattctccgccggcggtaaatgcaacacttcctttactctttcatttccctgcaaatacaaagagacacaccatcgaattcgcatgtttttattattaattaattcaattaggtgcacataaattccattttcattcttttccgcttgcatttcaatatattaccacattctctgtgctccgcttcgcctgtgtgcgtgtctagagtttccttaacaatcataattcaattccgtaatgtatagttgt

SEQ ID NO: 28248 - DNA, 237 bp, Glycine max
  unsure (1)..(237): unsure at all n locations; Clone ID: 701059926H1
gcacagtgccaatggcggatccaatcgcgaaggctctgatcgcgtttgcgctcttagcttcccttttgctgtgcttgcaagcttcctccgatgtccccttcatcgtcgctcacaaaaaggcctccctcaacagactcaagtccggcgccgaaagggnctccgtcaccatcgacatctacaaccaaggaacctcgacggcctatgatgtaagcttatcagacgatagctggccaagtg

SEQ ID NO: 28249 - DNA, 267 bp, Glycine max
  Clone ID: 701059928H1
cagaatttcctgtttacgatcttattgcaattttgcaactttcaaagcttattagctaaagtaacatcaaaagatgtcattgattccaagtattttcggtggcccaaggagcaacgtgttcgatccattctcactcgatatgtgggatcccttcaaggattttcatgttcccacttcttctgtttctgctgaaaattctgcatttgtgaacacacgtgtggattggaaggagacccaagaggcacagtgctcaaggctgatattcca

SEQ ID NO: 28250 - DNA, 155 bp, Glycine max
  unsure (1)..(155): unsure at all n locations; Clone ID: 701059929H1
cacaatacaaacncatgggcaccanctccgnattnctcntccttnncctnctcctgctggatccacctcgccatcgccgntcacggcatcggcatcaactacggcacgctcggngacaaccttccaccgcncgcggcgtnnagaacttcctgaag

SEQ ID NO: 28251 - DNA, 270 bp, Glycine max
  Clone ID: 701059931H1
aaattgatgttgcttcaacctttttgacttttaagtaaggttttcattttcttcacataaccacacgcaggaagcattggagactcatgatggtgccagtaaagggaagtataccattggacttggccaagactgcatgtcattctgtaccgaagtagaagatgtcatctcaatgagtttgacagtggttacttctcttcttgagaagtatgggattgatcctaaacaaatcggtcgtctggaagttggaagcgagaccgtgatagacaa

SEQ ID NO: 28252 - DNA, 158 bp, Glycine max
  unsure (1)..(158): unsure at all n locations; Clone ID: 701059932H1
tgtgtggttgcgngcggcgggcaatggcggagcacttgggcatcgatattcgggacggagaaggacagggtgaactgcccgttctacttcaagatcggcgcgtgcaggcacggcgaccggtgctcgcgtctccacacnaagccgagcataagccccac

SEQ ID NO: 28253 - DNA, 157 bp, Glycine max
  Clone ID: 701059933H1
ttctctttgcgcagttccctacctctcctttcaagatgcagatcttcgtcaagaccctcaccggaaagaccatcacccttgaggtggaaagctctgacaccatcgacaacgtcaaggccaagatccaggacaaggaaggaattcccccggatcagca

SEQ ID NO: 28254 - DNA, 155 bp, Glycine max
  unsure (1)..(155): unsure at all n locations; Clone ID: 701059934H1
cctagtgcaccgtaagggttgtgaagcaggcagagaagagccatggtgcacgtttctttctaccgaaactatgggaaaacgttcaagaagcctcgtcgtccctacgagaaggagcgtttggacgccgagttgaagctggtcggtgagtacgggnt

SEQ ID NO: 28255 - DNA, 272 bp, Glycine max
  unsure (1)..(272): unsure at all n locations; Clone ID: 701059935H1
cccttctccaacatgccanacgacagcgttctgagtcttttcttcttcgttaccctcttcacatgccttctctctgctaattcccacgatgaccatattttcctaccgagtcaactccatgacgatgactcagtgagttgcactgctaccgacccaaaccttaactacaagccggtgatcggaatcctgacccaccccggcgacggtgcctctggccggctcagcaacgccaccggggtttcttacatcgccgcctcctacgttaaattcgt

SEQ ID NO: 28256 - DNA, 272 bp, Glycine max
  Clone ID: 701059936H1
ctctgcatcggaagaaaccctagccactctcccggcgtcacgatgcagatcttcgtgaaaaccctaacgggtaaaacgatcacgttggaggtggagtcttcggacaccatcgacaacgtgaaggccaagatccaggacaaggaaggcatccctccggaccagcagcgcctcatcttcgccgggaagcagctggaggacggccgcacccttcgccgactacaacatccagaaggagtccacgcttcacctcgtcctccgcctccgtggcggcg

SEQ ID NO: 28257 - DNA, 269 bp, Glycine max
  unsure (1)..(269): unsure at all n locations; Clone ID: 701059937H1
ggctgcattcaatgtagatgaagtctccacttctcaaaaaactaatatactttgagtaataaaatagaaaaagatgtattttaggaatattgaggagagagagtgtaggtggataaaatccttcttttcactactttatctagagacttcatttgcaataatattgagtagagcaggctgcattcaatgtagatgaatttttccacttttcttgcttggttttccactacttgtntgattgtcttgtcctcaaaacaagaaagtgagta

SEQ ID NO: 28258 - DNA, 268 bp, Glycine max
  Clone ID: 701059938H1
gtcactcttcctgcagaacccagatctgtagacaatatgggaagcactggtttgctacatttgatatgccttgtcattgctttagtaagtgtgtcgcttgtgcaagcagaagatgcgtataagtatttcacatggacggtgacttatgggactctttatcccttggctagtccccagcaggttattcttatcaatggtcagtttcctgggcctagacttgacttggtaactaatgaaaatgtaattctcaaccttatcaacaagctgg

SEQ ID NO: 28259 - DNA, 130 bp, Glycine max
  unsure (1)..(130): unsure at all n locations; Clone ID: 701059939H1
cttccattgatggcttcttgatcanngtgatctgtgggaanccgatctttctctttgttactggtcttgaaattccctataaggacgctgagaattatctcgtaaacattgtttggagaagcaattggat

SEQ ID NO: 28260 - DNA, 267 bp, Glycine max
  Clone ID: 701059940H1
gaattttcaacgggattttgcagagcttccgcgttgaaaccatccaaccctcttagcctcatattcgttgtctatacttccctccttccttcgtgtaattacatttctttcatcagcagttccaggaccaaattgatacacaagatcactgtttttttagagagagattgagagaggatgtttggttcaaagaaaactcctctgagagatgctaaacctagttctgttggccatgcccataaccccttgattctgatgaagagacaa

SEQ ID NO: 28261 - DNA, 151 bp, Glycine max
  Clone ID: 701059941H1
ggatggctttcatgtctgcaagcctgtattttctaagtatcagcttacctgaggacttaagcttgtagcaaagttccttcagaaggggtctcacagagtgtccaaggacaataatgcaccaccatgtgtttaggatacctatcaatcagac

SEQ ID NO: 28262 - DNA, 265 bp, Glycine max
  Clone ID: 701059942H1
gttgtaaagaaaaaaacctgtgatttaagagccttggttttctttctggctttctgtaagtgacaaccgaaccaaagttttttagtattttcattttgagcaaaattagttacatgatgaaccttttcctacatacccactccaaacagctattggtagaagcagccttcaagggcattacttcttttgagtggggatgaacagtgtatttttctattttttcactcatgggtgtcaatcgcttaagagttgaacttgagttagt

SEQ ID NO: 28263 - DNA, 267 bp, Glycine max
  Clone ID: 701059943H1
gcctagccattgatttggaaaagtccaacttcaaggatgagtaagcttcagagtgatgctctaagagaagctattctcaggaatcatggctgattccaaggaaaagaacaggaaatttgtggagaccattgaactccaaattgggttgaaaaattatgatccccagaaggacaagcgtttcagtggctctgttaagttgcctcatattcctcgccccaagatgaagatttgtatgcttggagatgcccagcacgttgaggaggctga

SEQ ID NO: 28264 - DNA, 153 bp, Glycine max
  unsure (1)..(153): unsure at all n locations; Clone ID: 701059944H1
caatcttcaccttcgcccacaacaaatcccattcctgnatctcctccttcagcatcgctgcaaactttactttgccatttttgtccttcctccccgaganaaaaatggcgancgcagcatctggtatggccgtccangangactgncangcta

SEQ ID NO: 28265 - DNA, 156 bp, Glycine max
  unsure (1)..(156): unsure at all n locations; Clone ID: 701059945H1
gcaagaatggcactttcgttgcttggtgatgtccctttctgttctcttcactcttggtcttgcgagagaaagccatgccagagacgaagatttttaggcatgctgtttggccaaanactacccattnnnaagttcattgtgagatcnccctaaagc

SEQ ID NO: 28266 - DNA, 269 bp, Glycine max
  unsure (1)..(269): unsure at all n locations; Clone ID: 701059946H1
ctattctctaacatcacaatttcaattgtcttntttttacataatcntggccatgaaacgtgctgttcaatccctgcttgcctcatcttccaccctcaccaggaaccttcatgcctcaggagaaaaaaagaagattgtaggggtgttctacaaagggaatgagtatgcttcgaatcccaattttgtgggatgtgttgaaagagcattgggtatacgtgagtngttggaatcacagggtcaccagtacatagtcactgatgacnaagaag

SEQ ID NO: 28267 - DNA, 269 bp, Glycine max
  unsure (1)..(269): unsure at all n locations; Clone ID: 701059947H1
gaaaaaacaccaccatcttaanattatcatcatattcttaataaaataaaataaattgtttgactatagttacgcaattctatgaatttcggtccacaattggttgactgacttcgttctttttgtgagtctaaaacagtgaaacatctttgttttccacgttttatcttcctatcattgaagacataatagtaagatgttcttgaccagatagcatggaggagcctcaatgtgcatcaagaaggatgccactggaattggtagggata

SEQ ID NO: 28268 - DNA, 273 bp, Glycine max
  Clone ID: 701059948H1
gtgaagagaatggctcccaagggtttaacctttctggctgtgttaatatgcgtttcagcactgtcactgagtcctttctgttgcgggggaagggcaaaataatggccttgttatgaacttctacaaggaatcatgccctcaggctgaagacatcatcacagaacaagtcaagcttctctacaagcgccacaagaacactgctttctcctggctcaggaacatcttccatgactgtgcctgttcagagttgtgatgcttcactgttgctggact

SEQ ID NO: 28269 - DNA, 267 bp, Glycine max
  unsure (1)..(267): unsure at all n locations; Clone ID: 701059949H1
agcacactatgtttttgcccttggagttgcaaggttcttgagttgtgcacattgggtcctcnnggtattagatactcgtggacatctactgactgcattgggttatggattgtgggcctttatggttcttctatcagaaattgtgcaaactttcattctggcagatttttgctactactacgtcaagagtctgttgggggacaacttgttcttcgacttccttcaggagtggtgtaactaacattcaagtaggacgttccttaacat

SEQ ID NO: 28270 - DNA, 267 bp, Glycine max
  unsure (1)..(267): unsure at all n locations; Clone ID: 701059950H1
ttccttccattcctttcttccggatcacagggaaaataaaaaacaatggagttggacttgacaccaaagacagcagaagtgttgtttgagggagatggtggaggttactacacttggtggagttctaaagtgccactgctggccaagaccaatgttggtgctggtcggttagtgcttcagcctcagggctttgctattcctcattattcagatatatccaaagtaggttatgtgcttcaagggaacgatggcgtactgggatggncc

SEQ ID NO: 28271 - DNA, 265 bp, Glycine max
  unsure (1)..(265): unsure at all n locations; Clone ID: 701059951H1
aggtttggagatgggtggtgagtttgatgttagtggggttactgcccgtgtcaacaatgggtcgattcgtggtggagaagaacagcctgagagtgacatcgccggagaaaataagagggacacacgacagtgccattggcaacttcggaatacctcaatacggtggtagcatggccgggaacgtaatttaccctaaggataacaaaaagggttgcnaagagttcgatgagttcgggatttcctcaaatcaacccccggtgctctt

SEQ ID NO: 28272 - DNA, 266 bp, Glycine max
  unsure (1)..(266): unsure at all n locations; Clone ID: 701059952H1
aaagtactccattgaaatgtcatcagttgtttacaagaattgggnnttcacnngaccaagcattaccagntgatcttgncaagagaggattggcagttgaggatccctctgccccacatggtcttcgccttgngatagaggactaccctnatgctgttgatggacttgaaatatgggatgcnattaagacatgggtccatgagtatgtctctgtgtattacccaanaaatgcagnaatcaacaagacactgnacttcnagnatggt

SEQ ID NO: 28273 - DNA, 150 bp, Glycine max
  unsure (1)..(150): unsure at all n locations; Clone ID: 701059953H1
gcagaccgagctagctagctagcaagcnagcacagagatggaggcaaagcgaggccatgccctacatgtgcttggcacgtgtttcactcttcctctgcgctctaaccctatccgctgctcacggaagcaccacggttcaanacatcgcga

SEQ ID NO: 28274 - DNA, 264 bp, Glycine max
  unsure (1)..(264): unsure at all n locations; Clone ID: 701059954H1
ctggttgtcaaggaactggtatgaaggtttctataagacatcttgncccatccatgattcagcagatgcagcatgcctgcaatgaatgtaagggtactggagaaactatcaatgacaganatcgctgcccacagtgcaagggagagaaggttgtgcaggagaagaaagtccttgaagttattgtagaaaaggggatgcagaatgggcagaagataacattccctggcgaactgatgaagcgccggacacaattactggggatat

SEQ ID NO: 28275 - DNA, 148 bp, Glycine max
  Clone ID: 701059955H1
gaagaagaaggttttcgcgatggcatcgaaacggatcttgaaggaactcaaggatctccagaaggatcctcctacctcttgcagcgccggtcctgttgctgaagacatgtttcactggcaagcaacaattatgggtcctccagacagt

SEQ ID NO: 28276 - DNA, 150 bp, Glycine max
  unsure (1)..(150): unsure at all n locations; Clone ID: 701059956H1
tgantntggtaacaacttgcgctccacttgntcttaatcttaagcnnctgtacgangaagtacntnccgtngtcaatgcgatggnagggtggacctagtgacaccaatgctatgnaattttcancgtaactataaaccgttaatnttgtg

SEQ ID NO: 28277 - DNA, 260 bp, Glycine max
  unsure (1)..(260): unsure at all n locations; Clone ID: 701059958H1
gtttgttgtgagctataagctagtttatcgtgaggagaatatgaagttgtttgttttctttgttgctgcagtagttttggtagcatggccatgccatggcgcaggctaccaaaggttccctctccgaatganaactggctatggtgagcgttcttcggaggtaaaatgcgcaagttttaggcttgctgtggaagcacacaacatccgagccttaaaaccatcctgaagagtgcgttgaaccaacnaaggactacattaat

SEQ ID NO: 28278 - DNA, 265 bp, Glycine max
  unsure (1)..(265): unsure at all n locations; Clone ID: 701059959H1
aaaaaaactcccttgtatattgttgcagctctagctagggtttcgcaagtgcgattcgaagaagaacaacgacgatggcgatggctgcagctctgcgtcgcgaaggaaggcgtttgatccaaccaatcanngccctccactcttctctcaattcctccctcatctctcaagancaagtccctcatggcgcgcgctccatttccactcaagttgtgaggnaccgaatgaagagtgtgaggaatatccagaagatcaccaaggccat

SEQ ID NO: 28279 - DNA, 267 bp, Glycine max
  unsure (1)..(267): unsure at all n locations; Clone ID: 701059961H1
ctttgatgaattttaatatttgangctgtggtacaaatttttgaagtcactgtngcttttgcaatagagatggaagagaattctgctctggaacaccattgttactaccctcttcctgcttctgctgcaaaagctgatcatcccaatcataatgatggtgaaaaagaagaaacttgtgcagaggaaggtagctctccaacatcaggctaacacatcacagaattgtgtttcataccaaagcaataagcctcgcctccaacagatatg

SEQ ID NO: 28280 - DNA, 270 bp, Glycine max
  unsure (1)..(270): unsure at all n locations; Clone ID: 701059963H1
cattnctgancaancnttttggacagcctcagcttgtggtnnaatgggatacttgccatttgntgagcttgtcgaaagangcattattcccttccaagatgagagtttcactactgatgggtcattggatacaaatcnagactggatatctgnaatgaanaatatgcgaatcagagattgttccaantttcgtgagaactaccactctagatgaaaccagttttatntgctttgggnatagaagcnaaaacctgcatgagntcatcntca

SEQ ID NO: 28281 - DNA, 271 bp, Glycine max
  unsure (1)..(271): unsure at all n locations; Clone ID: 701059965H1
cttcaaaatccaaaaacatcttcagccaacttgattctcattttganccttattcagttggcatggggacttctgatacacacttgtttctttctcttatgcagattttcattctatgcttcatctgtttcatagccaaagttgaagcttcaaacaaaaagctttcaggcttttatgtgtttggagactccacggtagacccaggaaacaataactacataaagacaccttttaggagcaattttccaccgtacgggagggatttccccaa

SEQ ID NO: 28282 - DNA, 151 bp, Glycine max
  Clone ID: 701059966H1
ggaaaaccctaagagatgaagagaactcctatcttgttccctctcttctttcttctttgtgccttcaccttcatatctaccttcagccaccgctgatgatgatcatgtgtacgacactgacggcgataagcttcaatacggggtcaattat

SEQ ID NO: 28283 - DNA, 266 bp, Glycine max
  unsure (1)..(266): unsure at all n locations; Clone ID: 701059967H1
tcttcttccgaggaaaaggnacatggatgctccggttaagaaaaangcattgtctcgtcctagcttgagtcctcagaagaaagacaagtgcatagtttttccccttgtgaggtataatgaattccggcagcctgtttnccaggcttgtantgtagttatgttggagtctatacgtgcacacctagcttctcctgagnatcacgagntnatggaaaaactgaaagctaatgctgctggatcaactgcaagataaggatgcaaagnca

SEQ ID NO: 28284 - DNA, 265 bp, Glycine max
  unsure (1)..(265): unsure at all n locations; Clone ID: 701059968H1
caaacatggcagaaagtcctaattggaatccctcatatgctgctttacatgatgaacacttgagagtgtgctgttcaaatctatccaacatctgagggattccaaacatggcagaaagtcctaattggggcaacagttgtgttttgtgcaacatcagggatcccatcagatttccagttgcgtgtacttttgncctggactcgcagttgtcagcgcanccatagcttttgccctaaaccaactccaaaagaattttgaatcgtgg

SEQ ID NO: 28285 - DNA, 263 bp, Glycine max
  Clone ID: 701059970H1
gccaccaccagagggtcgcttgcccgatgccactaagggttctgaccatttgagagatgtgtttggcaaagctatggggcttagtgaccgagatatcgttgctctgtctgggggtcacactattggagctgcgcacaaggagcgttctggattcgagggtccctggacctctaatcctcttattttcgacaacttcatacttcaaggagttgttgagtggtgagaaagaaggcctccttcagctaccttctgacaaggcattt

SEQ ID NO: 28286 - DNA, 260 bp, Glycine max
  Clone ID: 701059974H1
ctaagtttgatgctcctaagcatacttgttgcatgctgcctggtgctgaatttttaagctccaaattctggaagaaaacacagggccgatattcatcgtaccggttctctagaactggtagcactccattactaccttccagtcattacagagctaacaggaatgccgaatctaataggttgacaagccacagacttggggtccacggtgatggaggcttcaccactaatcctctggcagagattaaaattaattcaagg

SEQ ID NO: 28287 - DNA, 265 bp, Glycine max
  unsure (1)..(265): unsure at all n locations; Clone ID: 701059975H1
ggnggaatatggcttccttaagctccttcattagtgctgctccttgcagctnctaattctatcccctncaagttcttgctgactatgagaagnccccaatttacaagccacctgtttacacaccgccagtttataagcccccagttgcaaaaccaccagtgtanaaacctccagtttacaagcctccagttgaaaaaccacctgtttataagcctccagtttataagccanccattacaagcctccagtgtanaaaacctccagt

SEQ ID NO: 28288 - DNA, 259 bp, Glycine max
  unsure (1)..(259): unsure at all n locations; Clone ID: 701059976H1
cagaaggttgaaacgggtcatcaagacacggtccatgatgttgcaatggattactatggtaagaggctggccacggcttcatcagatcacacaatcaagataattggggtgagcaactcggcctctcagcatctagcaaccttgaccggtcaccaaggacctgtatggcaagtggtgtgggctcaccctaagtttggttctctacttgcgtcttgttcctatgatggccgtgtcatgtttggaaggagggcnaccaaaa

SEQ ID NO: 28289 - DNA, 261 bp, Glycine max
  Clone ID: 701059977H1
cgaaagggtgagacaagaggcttcacctgcttccatgttacccaatttggaaacttggcataagcttgacaaaatattggatgctaccctaactaatgaagtgggtcgaaaggcatcaatctcgcaaggatctgcattaatgagggtggcttcagctgtgttttccgaggttccctccctcaaaaccatgagagatgcttctctgggtttagagactgtatcttttcatcatgctcctgtatttggacttatatgtggagc

SEQ ID NO: 28290 - DNA, 262 bp, Glycine max
  unsure (1)..(262): unsure at all n locations; Clone ID: 701059978H1
caaagttgtntgctgtcatttctcttcagatggganattattagctagtgctggacatgacaaganggttgttctgtggaatatggagacattgcaaacaganagcactccggaggaacncagtcttattattactgatgttcgcttcagaccaaattcaactcagctggcaacatcttcatttgatacaactgtgcggctgtgggatgctgcagatccaaccttccctttacatacntanagtggncatacntcacatggg

SEQ ID NO: 28291 - DNA, 265 bp, Glycine max
  unsure (1)..(265): unsure at all n locations; Clone ID: 701059981H1
ganaaatggagggaaaagaggaagatgtttccttgggagctaacaaattctcagagaggcaaccgattggaactgcggctcagagccaagacgatggaaaggactacacagagccacccccggctccacttttcgagccctccgaactcacttcttggtccttctaccgagccggaatagccgagtttgtagccacttttctctttctctacataaccatcttaaccgtcatgggtgtcaataggtccagctccaagtgtgctat

SEQ ID NO: 28292 - DNA, 218 bp, Glycine max
  unsure (1)..(218): unsure at all n locations; Clone ID: 701059983H1
ctctgtttcgattgggnagaacaaaaccctaccaaagtacccatcttttntnccctgcagtgttggcctcaagttttgttttttcggcgctgtggttgtgttttgtcttgtgggtcgcgttccttttggggttttgggtgcaatggtccctggttccaaaacggagggtggtggcactggtancactcacttgctctctgcaagantgcgcaaaacca

SEQ ID NO: 28293 - DNA, 263 bp, Glycine max
  unsure (1)..(263): unsure at all n locations; Clone ID: 701059984H1
anttgaattgaacaaaccagtgcagtgcaatggaggttctgtacaggaagctctatgacaagtacaccagactaaagtctaacaaactttctgatttggatcacctcaacgaagaacaagaactcaaattcagaaacttctcgtccgctgcggaagagttgatagagcacttgatgaccgaaaaggaagagcttcttggacaagttcatcacttgagaagcgagctcgcttcccttagggctgccaaagacaaccaggttgtt

SEQ ID NO: 28294 - DNA, 144 bp, Glycine max
  Clone ID: 701059985H1
aatgaatcgaaattacggcttacttgtcaaaacgtagtgtttcagtggttaggtcttcccttcccactgttgccctgacaccgccttgctaatcccatcctccctctttctctctctacattttaataggaatcaatttccaac

SEQ ID NO: 28295 - DNA, 95 bp, Glycine max
  unsure (1)..(95): unsure at all n locations; Clone ID: 701059986H1
agagagtgnagtgnagtgagggagcaatggagaagattgcagcactgcanctgcctaattactatgccaacacccctctcttacggcaaacaacc

SEQ ID NO: 28296 - DNA, 262 bp, Glycine max
  Clone ID: 701059988H1
cttctttctctctcacgttttccgcttcagttttctcgggaaaatcactggtgaaaggtccaggcctctacttctgacattggcaagagagctcgcgatcttctgttcaaggattatcagaatgaccacaagttcaccatcaccacttacacttccaccggagtggaaatcacttcaactggagtcaggaaaggtgagatatatttggccgatgtcagcactaaggtgaagaacaagaacatcacaactgatgtcaaagtgg

SEQ ID NO: 28297 - DNA, 260 bp, Glycine max
  unsure (1)..(260): unsure at all n locations; Clone ID: 701059989H1
cncaagttncttnncanncntngncactcagggctctanattcatattgtnttgggttgagtgggaccaaaaattcaggtcaggtagtatcattcccaaaacttttccaggtcattctttcaccttttcaaagacatctgcctcctcacctcatgtatcaaagcctcgaacttggcatcgtacaggtaataatcctccggnttctctacctannatcaagcctcattaggaacagttctcccaaaaagccaattctagna

SEQ ID NO: 28298 - DNA, 256 bp, Glycine max
  Clone ID: 701059990H1
gcgcggcataacctaaacttacccttcttctctctgtgtgtgtgcgcatcaaacgcaaccagaagcagccatggccactgcaagaactgtgaaggacgtttctcctcatgagttcgtcaaagcttactcttctcacctcaagcgatctggcaagatggagctgccagagtggactgatattgtgaaaactgcaagatttaaggagttggctccttatgatcctgactggtactatgtcagagctgcttccatggca

SEQ ID NO: 28299 - DNA, 260 bp, Glycine max
  unsure (1)..(260): unsure at all n locations; Clone ID: 701059991H1
gcaagaatgggcacttcgttgcttggtgatgtccctttctgttctcttcacttcttggtcttgcgagagaaagccatgccagagacgaagatttttggcatgctgtttggccaaacactcccattccaagttcattgcgagatcttctaaagcctggccctgcaagtgttgaaatcgatgatcancctatgcaaattgncgaaacacagtacccgaaaaccttcttctataaagnagaccttcatccaggcaaaacaatg

SEQ ID NO: 28300 - DNA, 257 bp, Glycine max
  unsure (1)..(257): unsure at all n locations; Clone ID: 701059993H1
aaatccagtgcgtgtgtgttgtagcagcgagagaaggaaggaggaaagangaacacagacatcactgcatcgacgaagccagagtaccctgtcattgatcgtaaccctcccttcaccaaagtcgtcggcaacttcaacaccctcgactatctccgattcgtcaccatcaccggcgtttctgtcaccgtcggctatctctccgggattaagcctggaattaggggtccgtcgatggttacagggggttgatcggagtg

SEQ ID NO: 28301 - DNA, 177 bp, Glycine max
  Clone ID: 701059994H1
gcacagtgccaatggcggatccaatcgcgaaggctctgatcgcgtttgcgctcttagcttcccttttgctgtgcttgcaagcttcctccgatgtccccttcatcgtcgctcacaaaaaggcctccctcaacagactcaagtccggcgccgaaagggtctccgtcaccatcgacatct

SEQ ID NO: 28302 - DNA, 261 bp, Glycine max
  unsure (1)..(261): unsure at all n locations; Clone ID: 701059995H1
gagaaaagttagggttcacaacttttccttttccttttgcttgcgaatctgaatcaaataatcaatcatccattcattattcatcatgtcgtcggcgaagaaaatcacgctgaagagttcggacggcgaggctttcgaggtggaggaggcggtggcgctggagtcgcagacgataaagcacatgatcgaggacgactgcgccgacagcggcatccctctgccgaacgtgacgagcaagatcctggcgaangttatcgagta

SEQ ID NO: 28303 - DNA, 265 bp, Glycine max
  Clone ID: 701059996H1
ctctctagtcatggcttcttctcttcctcttctcaaccttcttaccctcgctctgtcactactcttctgcattgccttaacttccgaggttggcgtgcaggcgcagatggaggagacaggcttgaacctcatgtcggaggcgttggagtggccaaccgcaatgtcgctctacgacgaagacagcgaagaagaggatgtccagaacggttacagtcggagatcgttgttctggcggaggatgaagtactacatctcctacggcgct

SEQ ID NO: 28304 - DNA, 265 bp, Glycine max
  unsure (1)..(265): unsure at all n locations; Clone ID: 701060001H2
gaagttctgaatttaaagtacaaggnttgctatgcaaggattttggatttgaagaggaagtttttggaagcagcattacgatattatgatatatctcaaattgagaaaaggcaaataggagacgaggagattaatgaggaagcacttgaacaagctttatctgctgctgttacatgcacaatattggcagctgcaggacctcaacgttcccgtgttcttgccactttgtacaaggatgagcggtgttcaaagttgaagatctatc

SEQ ID NO: 28305 - DNA, 191 bp, Glycine max
  Clone ID: 701060002H2
ataaagttgaagcagaaaaagcaaagactgaaagagaccttgccggaggtccttaaccgcatcgcctccgccattctcttccaggaacccgccgatgccggatccctacttcgccggatcaaggtctccgtcgccgacaacgctactctcctccccgaagcttccagaaactccgcccgcgacgttctcat

SEQ ID NO: 28306 - DNA, 259 bp, Glycine max
  Clone ID: 701060003H2
caattggattgttcctccgaacagtgaaccctcacctaacaatcagaacccaggatttggtgaaacgatgaacagtgataggaaaattggggttgccttggacttttccaaaggcagcaaaatcgctctgaaatgggctattgacaatcttatcagcaacggtgacactctctacatcgtccacaccaagccttccggaggaagtgaatcaggaaatcttctctggtccaccactggttcacctctgattccattgtcg

SEQ ID NO: 28307 - DNA, 257 bp, Glycine max
  unsure (1)..(257): unsure at all n locations; Clone ID: 701060004H2
tcaaaaccaaaatgccaaggaaggtagattctgtgagaaactcaagatcaagaacaagcctaagtttgtaggagtgagacaaagggcatcaggganatgggcagcagagatcaaagacacatcaaagaagattaggctgtggcttggaacttaccaaactgctgaggaagcagctcgagcttatgatgaagctgcgtgcctccttagaggttcaaacactcgcaccaatttctctacncataaatatggcattgctc

SEQ ID NO: 28308 - DNA, 248 bp, Glycine max
  unsure (1)..(248): unsure at all n locations; Clone ID: 701060005H2
gtcttcagtttctcctcgttgttcttcgctttcctgttttcaatttcgattctttcgttaatttaataagatgtttgggagggcaccgaagaagagcgataatacgaggtactacgaaatcctcggcgtctccaagaacgcttcgcaggatgatctgaaganggcttacaagaaagccgccattaagaatcaccccgacaagggcggtgatcccgagaagtttaaagagctggcgcaagttatgaggt

SEQ ID NO: 28309 - DNA, 253 bp, Glycine max
  unsure (1)..(253): unsure at all n locations; Clone ID: 701060006H2
tctcactgtcttgtctctccagagaactgtatagagagagatggcagctgcaacatctggtgctgtgttaaatgggttgggatcttccttcttgagtggaggaaacaggagccaaacccttctggccactgctattggaggcaaannnnnnnnnnnnnnnnnnnnnnnnagtcctagaagactcattgtggtagctgctgctgcaccaaagaagtcatggctccctggtgtcagaggtggtggcaactcntcg

SEQ ID NO: 28310 - DNA, 245 bp, Glycine max
  unsure (1)..(245): unsure at all n locations; Clone ID: 701060007H2
cttccttccttctccttctctctgagaacaacaccccacactcctctctctctctccgcttccttctcttctcacacctccatggcccacacttcccttccctccgccgatgccggcatggacgctgtccagcgccgtctcatgttcgaagacgaatgcattttggtggatgagaatgaccgtgtggttggtcatgattcaaaatacaattgtcacntgatggaaaagattgaagctgagaattt

SEQ ID NO: 28311 - DNA, 235 bp, Glycine max
  unsure (1)..(235): unsure at all n locations; Clone ID: 701060008H2
cnggcaattcactctgtacaattccncgttcgttctctgcagttatatcctttttgagcacccaatggcggacgctgaaaccttcgctttccaggctgagatcaaccagcttctaagtctcatcatcaacacattctacagcaacaaggagattttcttgcgtgaactcatcagcaatgcttctgatgctttggataagattcgattcgagagcttaaccgacaagagcaagctc

SEQ ID NO: 28312 - DNA, 249 bp, Glycine max
  Clone ID: 701060010H2
gctcatcgaggcttaaaccctttcggcggcagcgaaaaaagtctccccgcccccaaacccaaacaatgaggaagaaaaaacaagggttcagaagacccgttgtcataaaaaagccgaagcaaccgcaagagcaacccagcgttgatcctattacgggaaagaaaatccccaaaagtttcgtgttttcgcgaggcaagttgccggctctctcaaacagcttcagatggacctcagaaagttgatgcttcc

SEQ ID NO: 28313 - DNA, 250 bp, Glycine max
  unsure (1)..(250): unsure at all n locations; Clone ID: 701060011H2
cagcaacacaaaaaggacattgctcaagaagctgtgaggaagaggagacgtgctgccaaaaagccttactctaggtccattgttggtgcgaccttggaagtaatccagaaaaagagagctgagaagccagaagttcgagatgcagctagggaagctgctcttcgtgaaattaaggagaggatcaagaaaacaaaggatgagaagaaggctaaganagcagaagttgcttccaagtcgcaaaaagcaggag

SEQ ID NO: 28314 - DNA, 249 bp, Glycine max
  Clone ID: 701060013H2
gagattcgccaacatcgcttgcaagaaggccgatgttgacatgaacaaaagggctggtgagttgagtgctgcagagttggatagtgtgatgactgtggtggcgaaccctaggcaattcaagatcccggattggtttttgaacaggaagaaggattacaaggatggaaagtactctcaggttgtgtctaatgctcttgatatgaagctcagggatgacttagagagactaaagaagatcagaaaccaccg

SEQ ID NO: 28315 - DNA, 248 bp, Glycine max
  unsure (1)..(248): unsure at all n locations; Clone ID: 701060014H2
tcgttgtgaaaacactgctacgttgggtgagaganaaaatgttaaccttcctggtgttgttgttgatctccccacacttactgagaaggataaggaagatattcttcaatggggtgtacccaacaagattgacatgattgctctttcatttgttcgcaaaggctcagatcttgttaatgtccgcaaggttctggggccacatgcaaagactattcagttgatgtctaaggttgagaatcaggnaggag

SEQ ID NO: 28316 - DNA, 251 bp, Glycine max
  unsure (1)..(251): unsure at all n locations; Clone ID: 701060015H2
gacacattagcctttcaatatgggggttctgcggcacacaataagatattttctgagagaagaggtcaatggnaggcagcagcccaatcccaggaatttattcgaacactacagcgttattacaacaacacatatttagatggtgataagcaaaaagcaattaacttactcttggggcattttcagccccaacagggaaaaccagcactatgggagctagattcagatcagcattacactgtcaagaaaca

SEQ ID NO: 28317 - DNA, 96 bp, Glycine max
  unsure (1)..(96): unsure at all n locations; Clone ID: 701060016H2
tctaaancctatggccgacgnagccaaagnnaaangcaacggnagccttctccttccggggacttatcctgccgccatccaaccacttctccgatg

SEQ ID NO: 28318 - DNA, 149 bp, Glycine max
  unsure (1)..(149): unsure at all n locations; Clone ID: 701060017H2
gaaatataaaagtttatntcctctgatcgtgtggtttctgagttctaagcactcacctctttcatacacgtttgttcgcttgttgagaagccatggggcnangatttcgagttcccaagtgctggcaacatggaaatgcctgaggagga

SEQ ID NO: 28319 - DNA, 258 bp, Glycine max
  unsure (1)..(258): unsure at all n locations; Clone ID: 701060018H2
caatgtcaaccaaccccgccatttctgcaagaattgtcagagatactggactgccggtggagtgatgaggaatgttcctgtgggtgctggtcgcaggaagaacaagaattttacttctcagtatcgtcagataactgttcctgaagcagcactcttgagttctcagccggacttgccaaatggagtcagtcatccttccttgaactgtaatgccacactccttgncatttgggtctgatacacccttgtgtgaatcaa

SEQ ID NO: 28320 - DNA, 257 bp, Glycine max
  Clone ID: 701060019H2
caaaagaaaagaaaagaaaaacttcacttcacttgcatgccaaatgagaacaacctcttcttagaataatttcctcggtgtttaagccttgtcgatttccgaacaccaatccgagttaattaaacaatgagagtttcgacagaaaagttagagacagagccggagagcaaaaagataaaacgcattcgtggcggcggcggcggggactcgagcaataagcaccctttgtaccgcggcgtgcggatgcggaatggggg

SEQ ID NO: 28321 - DNA, 254 bp, Glycine max
  Clone ID: 701060020H2
ttcattcaagattcagcaagtgcgttttggaagcagagaccgaaatacttcgagatggcccgtacaaagcaaactgctcgtaagtcaactggaggaaaagctcccaggaagcagcttgcaaccaaggctgcacgtaagtctgcaccaacaactggtggtgtgaagaagcctcatcgttatcgccctggaactgttgctcttcgtgagattaggaaataccagaagagcatgagctcctaatcaggaagcttcct

SEQ ID NO: 28322 - DNA, 253 bp, Glycine max
  unsure (1)..(253): unsure at all n locations; Clone ID: 701060021H2
gcttaccttgttgcagagaaggtcattgttaccaccaagcacaatgatgatgaacagtacatttgggagtctcangctggtggctctttcactgttactagggacactgatggcgagcaactcggaaggggaaccaagatcaccctcttcctcaaggaagatcagttggagtacttggaggagaggagaatcaaggatcttgtgaagaagcactctgaattcactagttatcctatttacctttggactgaga

SEQ ID NO: 28323 - DNA, 254 bp, Glycine max
  unsure (1)..(254): unsure at all n locations; Clone ID: 701060022H2
gagaaaaacagatagtgtgggagagagaagagcggaagagaaaatgacgaccaggttcaagaagaacaggangaagagaggtcacgtcagcgccggacacggccgtatcggaaagcaccgcaagcatcccggaggtcgcggtaacgccggtggcatgcatcaccaccgtatcctcttcgacaagtaccatcctggtttcttcgggaaggtaggcatgcgctacttccacaaacttcgcaacaaattctacaatc

SEQ ID NO: 28324 - DNA, 251 bp, Glycine max
  unsure (1)..(251): unsure at all n locations; Clone ID: 701060023H2
gttgaacatacaaaggtcctgaatgttgtctaccgctctgcaactgcacttggatcacgcttaccatctatatctagtgcaaaagctagagnagctggngctggtgctattctgtggccagtaaccagtagcactcaggttgtgatgaagcgtgcacaaagtgttgctgaagctgttgtcagaactcgctcatcattgtcatcatggtcttgcatgagtgcacggcgccgaaatgtgggttcatcagtaaa

SEQ ID NO: 28325 - DNA, 248 bp, Glycine max
  unsure (1)..(248): unsure at all n locations; Clone ID: 701060024H2
aagtnttctctatttcacattaattgtgtgtgagcatctttaaggtctctttttaatatgtggtggtgtcggcttgtcaaaaggtgtattttcccaatattgttgactcctggtaaggtgtatgtaattttcatgggttgcattctaagatccaatggtcaacatatcgtcactgtagccctctggtatgtggtaattgtatcttatggcaacaatcgcatgcctacaaggcatacctatgtagataa

SEQ ID NO: 28326 - DNA, 248 bp, Glycine max
  unsure (1)..(248): unsure at all n locations; Clone ID: 701060026H2
aagagaatacaccaaaacccaacatgaaaacccttaacaaagcctcacttattttattccctctacttgttcctttccctattcaagcattcccatgctgcaggaatcgctatctactggggccaaaacggtggagaaggcaccttagcagaagcttgcaacactagaaactaccaatatgtgaacatagccttcttgtccacttttgggcaacggccaaactccacaantcaaccttgcaggtcntg

SEQ ID NO: 28327 - DNA, 247 bp, Glycine max
  Clone ID: 701060027H2
gaatttcattgcagagtgttattttgagtatcagcatcaatggctccaattgcagtgggaaacgtgattccagacggcattttggcttacttggatgaagaaaacaaaccccaaactgtctccattcactctctcgccaccggcaagaaagtcatcatctttggggttcccggtgccttcactcctacttgcagcttgaagcacgttcctggcttcattgagagagcagaagagctgaaagggaagg

SEQ ID NO: 28328 - DNA, 245 bp, Glycine max
  unsure (1)..(245): unsure at all n locations; Clone ID: 701060028H2
ggagtcattgtcttggtcactgggtttatgataggnaaggacgacattaagcagaaatttactcaatgtttcttccttgctcctcaagagaaaggctactttgttttgaatgacgttttcagatatgttgatgaaaatggaatccaagggtctgctcatgatattggaactcctgcccctcctgacactgttgccgatccttctgtgctggagacacaagtttccgagcaaatatctgtgacagc

SEQ ID NO: 28329 - DNA, 141 bp, Glycine max
  unsure (1)..(141): unsure at all n locations; Clone ID: 701060029H2
aggatttaaggggcaactatgtcgaatgttcagagttttaactgaatgagatcctcttttctcatncgtaatttgtcagacactaccttgtagatatttatatactcttgtattccacaaagtttttttaagcnaattaag

SEQ ID NO: 28330 - DNA, 142 bp, Glycine max
  Clone ID: 701060030H2
aattatttataaccctcgttcgtaactccaacggagaacaaaaaaaaaacaactttgcggctgcgctgctgctaatagcgcgttgcatctgctacctatcatacatattttcgccaaaccgccgattccgttgagcgttttc

SEQ ID NO: 28331 - DNA, 250 bp, Glycine max
  unsure (1)..(250): unsure at all n locations; Clone ID: 701060031H2
ggnatggggatcagctataactgaaagtagtttgtcaccaatatctgataaatgcactcaacatacaaggnactgtttggatagagtgaatgctgtcacttctgtactttttttgatgcacaaggatgctaaattgcaaccgattatgtctttattcaaggnagatattgataacgtcatacataaagttttttctttaaagacatcagggcggatcagtacgacaattgaagaaaggcatganatacat

SEQ ID NO: 28332 - DNA, 247 bp, Glycine max
  Clone ID: 701060032H2
gctaggttgaaaatagtttggttttgtagtaagtgaggtgaggtgccaaaatggtgaagataactcttggtactttcgatgactcttttggtgttgcctctcttaaggctatttggcagagttccatgcaactctgattttcgtgttcgctggtgttggttcagccatcgcttacaacgagcttacaaaagatgcagccttggatccaacggggctggtggcagtagctgtggcccatgcatttgca

SEQ ID NO: 28333 - DNA, 216 bp, Glycine max
  Clone ID: 701060033H2
ccgatcgcatagctcgctcgcaaccaccatgccttcccgaagaagaactctcttgaaggtcatcattctcggtgacagtggggtggggaagacatctttgatgaaccaatatgtgaataagaagtttagtaatcagtacaaggcaaccattggagcggattttttaaccaaagaagtgcaattcgaagataggcttttcaccttacagatttggga

SEQ ID NO: 28334 - DNA, 255 bp, Glycine max
  unsure (1)..(255): unsure at all n locations; Clone ID: 701060035H2
ctctttctttgtnttccgnggaaaccaacctatcttcctttgttnttttcattctgataaaacaaacatattttcttccacctttttccatctttgcaaaggggatanagggttgctagttgctaccatttatggttttattccgccatttgaaggaaccttatgctcttaaaacaaataaaacccaaagggttctcttgaaaaacaccagaactttcatctaatcaaaacacgtgttggccaaaaacatcacct

SEQ ID NO: 28335 - DNA, 253 bp, Glycine max
  unsure (1)..(253): unsure at all n locations; Clone ID: 701060036H2
cttgacttggtcactctctcaggctcacacacaattgggaggagcncttgttcttctatcatggataggatttacaacttcaatgggactaaaaagccagatccctcactaaatgtctttttcttgaagttgttgagganaaggtgcaaaagggtgatggatttggtgcaccttgatgtcataacccctaggacttttgacacaacctattacactaaccttatgagganagtggggttattgtcaacagatc

SEQ ID NO: 28336 - DNA, 253 bp, Glycine max
  Clone ID: 701060037H2
ggcagactagtatccgatcctctgtcctctcgaagctttcatcgttcaacatattctcaccatctcagtcatgggcctgctatcttgttttaggtctaccgtcctgagaaaatgttccaaaggaagctctggcatgtcaagattcctgtatacgaacaattttcaacgaaacttgatttcgtctggtggcaatgaatcgtattatgggtattttaacaggagatcatacacttcactttatatgggaactgga

SEQ ID NO: 28337 - DNA, 251 bp, Glycine max
  unsure (1)..(251): unsure at all n locations; Clone ID: 701060038H2
gaaagtccctcttctcaacaatcggtttccgatcatcaaccccgctactgaagacatcatagggcatattccagccgctactaaggnagatgttgaccttgcggtggatgctgctaaaagagccttttcccataacaaaggcaaagattggtcttcagctcctggctctgttcgtgctcgctatcttcgagccatcgcttcaaagataacagagaaaaaggatgaactaggaaagcttgaagcaattgatt

SEQ ID NO: 28338 - DNA, 250 bp, Glycine max
  Clone ID: 701060039H2
gaagagaacacatattgctgcaaaagctgttgagattgccgagagacgcatattaagagacaggtggccagaatattatgacacaaagagatctcgattcgtcggaaagcaatctcgactatatcagacttggtcaatcgcaggataccttgtggcgaactggctgcttgcagacccaagtaaagcaaacacattgatcactgaagaggattctgagcttgtgaatgccttgataagtgccaaccctaga

SEQ ID NO: 28339 - DNA, 250 bp, Glycine max
  unsure (1)..(250): unsure at all n locations; Clone ID: 701060040H2
cttcttctctggttgattcggatctagagtcttcagtttctcctcgntgttcttcgctttcctgttttcaatttcgattctttcgttaatttaataagatgtttgggagggcaccgaagaagagcgataatacgaggtactacgaaatcctcggcgtctccaagaacgcttcgcaggatgatctgaaganggcttacaagaaagccgccattaagaatcaccccgacaagggcggtgatcccgagaagtt

SEQ ID NO: 28340 - DNA, 248 bp, Glycine max
  unsure (1)..(248): unsure at all n locations; Clone ID: 701060041H2
ccatgtcagacgaggagcaccacttcgagtcaaaggctgatgctggagcatcaaagacatttccccagcaagctggaaccatccgcaaaaacggttacattgtcatcaagaacaggccatgcaaggttgtggaggtttcaacttccaaaactggcaagcatggacacgcaaagtgtcactttgttgcaattgacatcttcactgggaaanagcttgaggatattgtcccatcttcccataactgtgat

SEQ ID NO: 28341 - DNA, 140 bp, Glycine max
  Clone ID: 701060042H2
gattcaatgcctacagtgtgttttagaggtcccagtagtgtcaaagattctggattaaatacagtgcttatgcgttcgcccattaaaggtcgaacctgaatctcaaatcccatgtttttctcagactccaaatattcgag

SEQ ID NO: 28342 - DNA, 246 bp, Glycine max
  unsure (1)..(246): unsure at all n locations; Clone ID: 701060043H2
ctcaaacacctcaacttcatttctctgctccaaagtctcaatcttttatccaaaaactcaaatgggcatggccacaatcacaatgggaggnaaccacaattcctccatcactccacgccactacaacacccacaaggtgttccttttctgcaactacattctcttgggtgcagcttctagctgcatcttcctcaccctctctctgcgcctcattccctctctctgcggcttcttcttcatccttct

SEQ ID NO: 28343 - DNA, 245 bp, Glycine max
  unsure (1)..(245): unsure at all n locations; Clone ID: 701060044H2
ctcaaaaggnagtcttggaagggaagattcaatcagctactgataggattaaatccttaatgaatcaactccaggnatcagagaaaattattgacagcttgagattggngatacagtcctataaagaatcaaatggnaaacttgagaatganatcaggaatcagcaagtgataatttcaaatcttgaagaacatcatacagaagaagaattaaaggaggctgtnacaaggttttggctttagaag

SEQ ID NO: 28344 - DNA, 244 bp, Glycine max
  unsure (1)..(244): unsure at all n locations; Clone ID: 701060045H2
gtgaaatttgatcctcaaactggatctgttttacatattgaacttgccaggtcaaactctaggaggaagcgtaaaccaggtagtggngcctacgtggttatagataaaaggtccaaaggagagcctgatcttcagggatcatcaagtgaggacggtgacagcgaccctgntgaaccatcagacagtggcgacaaccagggtgatttagcaatcatgacaagtgntgnaacggctgttggttctg

SEQ ID NO: 28345 - DNA, 142 bp, Glycine max
  unsure (1)..(142): unsure at all n locations; Clone ID: 701060046H2
caacgccatagcgtttcctaacccatcgtgcgaggtccctcgacctccgcacaaccccaacttccaaggggctgtgcctgtcgccgtcgtcttccacgctcatgtcggaacccgacatccacgcgccgccgttcctgntccc

SEQ ID NO: 28346 - DNA, 248 bp, Glycine max
  Clone ID: 701060048H2
caacaattgttgagatttctccagatgctcctgtagttaaagaagaattgtttggtccagttctgtatgttatgaaatttcagactctagaagaagcaattgccttgaacaattctgtacctcaaggattaagtagttcaatctttacccaaagacctggaactatattcaaatggatcgggccacgaggtagtgattgtggtatagtgaatgcaaacatacctacaaatggagctgaaattggtggt

SEQ ID NO: 28347 - DNA, 254 bp, Glycine max
  Clone ID: 701060050H2
gaggacttttgttttatgttgcttgatgaagaaacctgggaaaacaactgaaggcggaactgatcccctgatctgtgatgaaggggagcccagcagaagcatgatttctgactatgaaaatcagccaacagcagaaggaattgcatctgaaggtacttttacaggaatagaggcaatctttcaggcaaccccttgggcagagaattgcttctccccaatacaacagtctccgactcttattgagcaggatgaca

SEQ ID NO: 28348 - DNA, 252 bp, Glycine max
  unsure (1)..(252): unsure at all n locations; Clone ID: 701060051H2
caagatggtggagacagccctgttgttagtttgtttaaatcaacagctgctgcaatggtttcataccctggctgtccatcacctacctctttccacattatgtcaaaacnagcagaagctgcagatcttttatacaaggctaacttgaacactggaagtgtgctggagtatgcacttgctttcgctagtgctgcgttggataaatattgtaataaatggagtgctgcacccaaaacgggcttcatgacatcc

SEQ ID NO: 28349 - DNA, 254 bp, Glycine max
  unsure (1)..(254): unsure at all n locations; Clone ID: 701060052H2
ggganatttctggcgatctctgcgttttcccctattttttctgaatctaacaacaaacattcctctggcaacaatcatcactattaataagagttccttccttcactctcacccaagccaaagaaaggaacaagaacaagaacaacaaagtaacgtgaaagagagagngatggaggcgattgttccagtggtggatttccagaggctttcagaggaagaggngcgcaagaagctgagaaaaacatgtgaganac

SEQ ID NO: 28350 - DNA, 258 bp, Glycine max
  unsure (1)..(258): unsure at all n locations; Clone ID: 701060053H2
gagagttggttaaaagtagganatgaaagtnagggagagagaatggnggangangcagggatctncccgtctagcggaggancatcctccggcagatattctgcaggctgcncactgagggaaataatgatatgccgctcagtgtcaaaattcttcctgcagctgctncncaacaccttcgttcctgccaggtcctctnccagctcccatccacccctccagctcctgggcctccgcaaccgccaccacaccccttct

SEQ ID NO: 28351 - DNA, 140 bp, Glycine max
  unsure (1)..(140): unsure at all n locations; Clone ID: 701060054H2
gtttatgancacacatgntgattnnggattcggcaagcataatgtatattttcggagtctcttttaagtgcttggctataatcacaaaattgtgcttataaatnagctttgtgctggatctattncaaacttactagtgc

SEQ ID NO: 28352 - DNA, 97 bp, Glycine max
  unsure (1)..(97): unsure at all n locations; Clone ID: 701060055H2
cttcttcaacttgaacttcgaagtatgccggtttgtttgagatnccaaaagtnctatgttacctttcattcagtactgcaattttaccagacnacac

SEQ ID NO: 28353 - DNA, 249 bp, Glycine max
  unsure (1)..(249): unsure at all n locations; Clone ID: 701060056H2
ctcaatctcattcacctcaaccacttctcatcatctctatcaccccattttctcaaacacctacacaaaatgtgcttcctncaacacaaagtccctggctcacttcatgttgctaacaacaattgtagttggcattgcaatgggagattcatcaaaggacaaagaggaatgcactgagcanttggcaggcctagcaacatgtctgccctatgttgggggtcaagcacaagctccaaccccagattgttg

SEQ ID NO: 28354 - DNA, 244 bp, Glycine max
  Clone ID: 701060057H2
ctggcaccaacagccaagactctgacttacctgggcccaggagaaaaccctagaatcgagcttcgttcgggacgaggaggagcgtcccaaggttgcctacaacgaattcagcgacgagatcccagtgatttctcttgccggaatcgacgaggtggatggacgcagaagagagatttgtgagaagatcgtggaggcttgcgagaattggggtatattccaggttgttgatcacggtgtggatcaa

SEQ ID NO: 28355 - DNA, 243 bp, Glycine max
  unsure (1)..(243): unsure at all n locations; Clone ID: 701060059H2
ctcagttagaatattggtggttttncttggtgttaccaagggcgaggatggttctctctccaaccaagacaagtcaaaggttttatttacaacagaaatggcatatacaatttatgcttctggggatgtcattatagaatgcaatgtgaaaccaaaccctgatcttcctcctttgccacgtgtgggaatcgagttaaatgtggaaaagtctttggatcaagtaacttggtatggaagaggacc

SEQ ID NO: 28356 - DNA, 138 bp, Glycine max
  unsure (1)..(138): unsure at all n locations; Clone ID: 701060060H2
cgttgtggcacttgcaagggcattgggatcaangccaggagtttatcgggttgatttgctaactagacaagtgtcggcgccagatgtagattngnnttatggggagccgacggaaatgttgttctccaagngacacag

SEQ ID NO: 28357 - DNA, 244 bp, Glycine max
  unsure (1)..(244): unsure at all n locations; Clone ID: 701060061H2
gctttcttgagttgagttaacagcatggagagggaggaagatgttaaggttggagcacagaaattctcagagaggcaagcattggggacaggagctcagggtgacaaggactacaaggnggcaccaccagcacccttgtttgagccaggggagttaaagtcatggtctttttacagagctgggattgcagagtttgtggccacattcttgactgtcatgggtgtcaacagggcacccaacaagt

SEQ ID NO: 28358 - DNA, 245 bp, Glycine max
  Clone ID: 701060062H2
cctagatctctttctgaaacgcgtctcgaactcggacctccacccggccgagtcaaaggccgagttcgagtccaacgcgctgcaaggccctgttgtctcgggaacgagtcagggaagcggcgagtacttcctccgagtcggaatcggaaagccaccgagtcaagcctacgtggttctcgacacgggaagcgacgtgagctggatccaatgcgcgccgtgctccgaatgctaccaacaatcggatc

SEQ ID NO: 28359 - DNA, 244 bp, Glycine max
  unsure (1)..(244): unsure at all n locations; Clone ID: 701060063H2
aaacattgcaggatttgcaacttgattaccttgacctctatctgatccactggccagtgcgcatgaaaagcggatcagttggattcangaaggaatatctcgatcaaccggacattcccagcacatggaaagcaatggaggcactctatgactcaggcaaggcaagagccataggagttagcaatttctcttcaaaaaagcttcaagatctcatgaatatagcaagagtgcctcctgctgttaa

SEQ ID NO: 28360 - DNA, 246 bp, Glycine max
  unsure (1)..(246): unsure at all n locations; Clone ID: 701060064H2
ganaataaaatgagataaganattataagangacgacgttctctctcggttttgattcccaatggcaacgcgaaagctgattcgtgatttgttactctccaaacgatcccttcttcaccaccagggttggagtaggagtagaaggttacctttggtttgggaagataggcgtagatacagtgtcttcaatgagttctctaagaacattaaaggccaagctgttagaaaccaagaattccaacagtc

SEQ ID NO: 28361 - DNA, 253 bp, Glycine max
  unsure (1)..(253): unsure at all n locations; Clone ID: 701060065H2
gtgagctataagctagtttatcgtgaggngaatatgaagttgtttgtnttctttgttgctgcagtagttttggtagcatggccatgccatggcgcaggctaccaaaggttccctctccgaatgaaaactggctatggtgagcgttcttcggaggtaaaatgcgcaagttttaggcttgctgtggaagcacacaacatccgagcctttaanaccattcctgaagagtgcgttgcaccaacaaaggactacatta

SEQ ID NO: 28362 - DNA, 250 bp, Glycine max
  unsure (1)..(250): unsure at all n locations; Clone ID: 701060066H2
ctagaaacagtgtgatgaaaatgaaggtccttgttttcttcgttgctacaattttngtagcatggcaatgccatgcgtacgatatgttccctctccgaatgaacactggctatggtgcccgtactccggaggtgaaatgcgcaagttggaggcttgctgtggacgcacacaacatctttggctttgagaccattcctgaagagtgcgttgaagcaacaaaggaatacatccatggcgaacaatatagatc

SEQ ID NO: 28363 - DNA, 251 bp, Glycine max
  Clone ID: 701060067H2
gagaaaaacagatagtgtgggagagagaagagcggaagagaaaatgacgaccaggttcaagaagaacaggaagaagagaggtcacgtcagcgccggacacggccgtatcggaaagcaccgcaagcatcccggaggtcgcggtaacgccggtggcatgcatcaccaccgtatcctcttcgacaagtaccatcctggtttcttcgggaaggtaggcatgcgctacttccacaaacttcgcaacaaattctaca

SEQ ID NO: 28364 - DNA, 138 bp, Glycine max
  unsure (1)..(138): unsure at all n locations; Clone ID: 701060068H2
cctttgttcactcttcttctcttgcggctagggttttagcgcanttcttctagatttaaggnagatgggtaaggnnaaggttcacatcagtattgtggtcattggccatgtcgactctgggaaatccactaccactgg

SEQ ID NO: 28365 - DNA, 245 bp, Glycine max
  unsure (1)..(245): unsure at all n locations; Clone ID: 701060070H2
ttgatttcttgcttctatatattacttgcttcttttcttgatcatgtcccttgctggtaaaatcagctctgaaattggtgttcaggcaaccgctgcaaagtggttcaacctcttcacaacacaacttcatcacgttcaaaatcttactgatagaattcatggaaccgagctgcatcatggtgaagactggcatcacaatgagtcggtcaagcactggacttataccatagatggcaaggttacna

SEQ ID NO: 28366 - DNA, 246 bp, Glycine max
  unsure (1)..(246): unsure at all n locations; Clone ID: 701060071H2
ctcaaccctccttaaaccctaaccaatccaaccatggcttcttcttccaccttcactgcaatgncccgcctgcaagctctcctacctccgccgccatctcctccttcccctcccgccgccgctccaacgccgtcgttctgtcgaggcgcagcgcgccgccagggtctccgccatggccaaggagttgcacttcaacaaagacggcaccgcaattaagaagctccagagcggtgtgaacaagctcgc

SEQ ID NO: 28367 - DNA, 245 bp, Glycine max
  unsure (1)..(245): unsure at all n locations; Clone ID: 701060072H2
cttcatttcaaatcccaacaaaaaaccaaagtaatctaacaaagtaagcacaatgagggagatattgcacgtgcaaggtgggcaatgcgggaaccaaatcggttccaagttctgggaagtgatatgcgacgagcatggcatcgaccccaccggaaagtacaccggcgacgaggcctccgatctccaactggagaggntcaacgtctactacaatgangcctccggcggaaggtacgttccccggg

SEQ ID NO: 28368 - DNA, 242 bp, Glycine max
  unsure (1)..(242): unsure at all n locations; Clone ID: 701060073H2
caaanaagtacaatgcaaaacagtggggttacccaaagggctgaatctcaacgcttcgctagtgtacatgatgacaatccttgtgtagctttcatcccttactttggtttcattgaagaaatttgggngcttaactatgtcaaattcactgtctgtgtnatcaaatgtaagtgggtggacagtaataccggtgtgtggaccgatgatgttggatttacactgggtggatcttaacaaactcg

SEQ ID NO: 28369 - DNA, 242 bp, Glycine max
  unsure (1)..(242): unsure at all n locations; Clone ID: 701060074H2
cgacaacttggaccttacaatctcagccattatgaagattggnaacaattatctaattttatcacaaagagcgtcattgaacggcttgagcccattggaggtgaaattactgttgaatgtganaatgagatagttagaaatgctactaaaatgccaatggaggacgcactagggcaagcagctgaaggttggtaattctgcaacatctgttgggcaagtctcagaggaanggatgttattat

SEQ ID NO: 28370 - DNA, 239 bp, Glycine max
  unsure (1)..(239): unsure at all n locations; Clone ID: 701060075H2
gaagttgtttgtnttctttgttgctgcagtagttttggtagcatggccatgccatggcgcaggctaccaaaggttccctctccgaatgaaaactggctatggtgagcgttcttcggaggtaaaatgcgcaagttttaggcttgctgtggaagcacacaacatccnagcctttaaaaccattcctgaagagtgcgttgaaccaacaaaggactacattaatggcgaacaatttagatcag

SEQ ID NO: 28371 - DNA, 238 bp, Glycine max
  unsure (1)..(238): unsure at all n locations; Clone ID: 701060076H2
gtgattgtctttgtatcacgaaaactatacgattcgattccttgttttcaatggacaccttcttcaannnnnnnnnnnnnnnnnnnnngagaagccgctggagttacgatactctcaagaatttccgtgagatctctccgctggttcagaatcacatcaaacgggtttattttacgttatgttgcgctgtggtggctgctgctgttggagcttttcttcagttctgtggaacattggg

SEQ ID NO: 28372 - DNA, 239 bp, Glycine max
  Clone ID: 701060077H2
ttggcattggggtcttgtttagtttgttccaatccaacgttggttgtgtgtgtttgtgttgggaggattgggattgggattggaatcagcgaccccatgagacctcagagaacgtcgatccacgccgtcacgacatgggtgaggcgacagcccccaaaggtgaaggcttttctcgccgtcgtttccggcatggcggccctcgtcctccttcgcttcatcgtccacgatcacgacaacct

SEQ ID NO: 28373 - DNA, 240 bp, Glycine max
  unsure (1)..(240): unsure at all n locations; Clone ID: 701060078H2
ctataagctagtttatcgtgaggngaatatgaagttgtttgtnttctttgttgctgcagtagttttggtagcatggccatgccatggcgcaggctaccaaaggttccctctccgaatgaaaactggctatggtgagcgttcttcggaggtaaaatgcgcaagttttaggcttgctgtggaagcacacaacatccgagcgcttaaaaccattcctgaagagtgcgttgaaccaacaaagga

SEQ ID NO: 28374 - DNA, 240 bp, Glycine max
  Clone ID: 701060079H2
attaagtggtggtgttcatcatgttgaggaggaacctgagaaaaagcttccagattttcccaagaaggatgttgaggtggctagtactgctgatgaccgtgaaagtagaatccaagctgctagagaacgatttcttgctcgtaaaggcaaaaaatgagcctgaaaggatggagaggttaaatacactagagatgatcttggcctgtcaggcattttattagctggtatagttacctgaaa

SEQ ID NO: 28375 - DNA, 265 bp, Glycine max
  unsure (1)..(265): unsure at all n locations; Clone ID: 701060081H2
cnntncgctcgagcttntatcccatttattgnngctttcttttgntccttccctagganattttctattgatgtattaagatgcagaagaggtaaccgtgtttgttcattcactttcctaatccnagaaccaacgaacgaacgaagacactgcaatctagaaaaaagttttgaactttgatgcacggaaagccttcatgcccgaccatgacatgtaccattttgatcacatggacgaagacgatttttttgacgaaattgatgac

SEQ ID NO: 28376 - DNA, 249 bp, Glycine max
  unsure (1)..(249): unsure at all n locations; Clone ID: 701060082H2
gattttccttcaacacagtcggcaaantctttcaccaccaacacacagccatggcaggctctcaccttctttctcactcaccctcccttcccaaaacctataactactccttaaaccaaaaccctttatcccaaaatcttttttttccacccctcaaattcaanagcnccacaaaaccgcgtgttctcaganctgttctctnccaatntnctgcaaaatccgcggtagaggacacaaagaacgctcatt

SEQ ID NO: 28377 - DNA, 248 bp, Glycine max
  unsure (1)..(248): unsure at all n locations; Clone ID: 701060083H2
tccaagttcaaagatgaagatgatccacgttcttttcctctttgctcttgtnctcgttcacttcccatgcttctgtcaatgatttctgtgtagcagacctaaaaggtccagatagcccttccaggctatcagtgcaagccacctaacacagtcacagtggatgactttgtgttctctggctttgtagctggaaacaccacaaacactttcaatgctgcattaacctccgcatttgttactgattttcc

SEQ ID NO: 28378 - DNA, 246 bp, Glycine max
  Clone ID: 701060084H2
tacactctgctcgtagggtttctccacctagagggaaatggctcccaaaccgcctagtacgggtctgtttgttggactgaacaagggtcacgtcgtcaccaagaaggaattgcctccacgcccctcagatcgtatggggaaaacaagcaagagggtgcactttgtgaggaacctcataagagaggtagccggttttgcaccctatgaaaagcgtataactgagttgctgaaggttgggaaggataa

SEQ ID NO: 28379 - DNA, 245 bp, Glycine max
  Clone ID: 701060085H2
cgaatagattatcctaagtctttgggaatagtgctgcaatggcttcaagtcaggaggaggtgacccttttgggagctactggaagcccatttgtgtgcagggttcatattgccctcaagttgaagggagttcaatacaaatatgtcgaagaaaatttgaggaacaagagtgaactgcttctcaaatccaacccagttcacaagaaggttccagtgtttattcacaatgagaagcccatagcagag

SEQ ID NO: 28380 - DNA, 244 bp, Glycine max
  unsure (1)..(244): unsure at all n locations; Clone ID: 701060086H2
ctgctatcgataacatatttcacttgagacagttatctttatctacgcaaganaagaatagaaaatggatatcaggttgatggatttggactctccattgttcaacactctgcaccgaatcatggatctgacagaggacgcagagaagaacttgaacgctccgacgcggacatacgtgcgcgacgcgaaggcaatggctgcgactcctgcggacgtgaaggagtaccctaactcactacgtgtt

SEQ ID NO: 28381 - DNA, 240 bp, Glycine max
  unsure (1)..(240): unsure at all n locations; Clone ID: 701060087H2
gtatgctggatatggtggangtgatagttcttatgggaattcaagtgcatatggtactgttggtggacgtactgggagtggtccaaacagtaatgctagtgctcctggtgggactgaactaacaagtagtggtggcagtggcaactatatgggtggtggctatggggatgcaaatggaaattcaggttatggaaatgcagcttggagatctcnacaaactcatgcatctggaaattatgg

SEQ ID NO: 28382 - DNA, 241 bp, Glycine max
  Clone ID: 701060088H2
tctgtttggatggaacggtgcctggataccatttggatcgtggatttggatctggtgcagatagttggctattcatttggagggaggaggatggtgtaataccattcagaaactgtgtctatagaaaaaatactcgtcgtggatcctcaaaatacatggaaaatcaaataccattcacgggaatattgagcaacaaacctgaagaaaaccctgatttctttaactggaatagagttaaatt

SEQ ID NO: 28383 - DNA, 237 bp, Glycine max
  Clone ID: 701060089H2
tcttgttgtgcgtgtgtgttagagagagttagagaatgggaaattgccaagccgttgacactgcaactctagtgattcagcaacccaatgggaaagtagaaaggttgtattggcctgtaagtgctagtgaagtgatgaagaccaaccctgatcactatgttgctcttcttatctccaccacattgtgctcatccaaggacaatgaaaatcgctcaaataagagtgacaacaccaacc

SEQ ID NO: 28384 - DNA, 239 bp, Glycine max
  Clone ID: 701060090H2
ctggacatggctcgccttcactttctggaggacccgagcccccacctccgagttgctgccaccacccgatgacccggttcgcgacgagttcggatcctgttgccgtgaccgggccaagtccaactgtggttgacgttgacggtgcgaggaaggggaaatttaccttgtattacgaggatgagtctgagagggaatgcgagagccaccaggagacgacggcgctaacggagagagacgga

SEQ ID NO: 28385 - DNA, 184 bp, Glycine max
  unsure (1)..(184): unsure at all n locations; Clone ID: 701060091H2
cccttacccttctctatcgctcgctttcctttgacgcttctgacccttgctttgtctgcgtcnnnnnnnnnnnnnnnnnnnnnnnnnnnnnnnncgtaatggctctcccagactcttcttcccgtcgcaactccctgatcccctccttcatctatcctcttcctccaaaacgctccctctccac

SEQ ID NO: 28386 - DNA, 238 bp, Glycine max
  Clone ID: 701060092H2
tcatttctccatttccattttctctctcacttttcaagaatcgtaagctatgggaaagtcttacccaactgtgagtgctgattaccagaaggccgttgagaaggcgaagaagaagctcagaggcttcatcgctgagaagagatgcgctcctctaatgctccgtttggcatggcactctgctggaacctttgacaagggcacgaagaccggtggacccttcggaaccatcaagcaccct

SEQ ID NO: 28387 - DNA, 236 bp, Glycine max
  unsure (1)..(236): unsure at all n locations; Clone ID: 701060093H2
atcancncnacgctcctccatttatctcttcacttctctctctcttccctcgccgcaacgaaatggcgtccctcacgtgcncncccacctccctccagctccgattggccttngccgcccccaaattcccgcaccccccgcacgtgcgaatgcggcaattcaagctcaaccgacttcgcctctgnncnccgngaaagacggcgtcagtccgaatnggcgggnccnggcccaaattt

SEQ ID NO: 28388 - DNA, 240 bp, Glycine max
  unsure (1)..(240): unsure at all n locations; Clone ID: 701060094H2
cagaacagaaganacacgttcgtttcgtttcgttcccatggcggtctccgtttccgcgtcctccgcgattgcttctttgaactccgaactctccacgcgcttgccaccctcactcgcctccgcatcttcttccgccaagcaatcctttctgcaattcccgtcgtgcacgcgccttcttcggattagcactccacgcgctcccgctccatcgcgacctcgattccttcctctggttcaagc

SEQ ID NO: 28389 - DNA, 241 bp, Glycine max
  unsure (1)..(241): unsure at all n locations; Clone ID: 701060095H2
ctttgacagatgggtcattgtacatgctgagactgagaccgtcttctcagattcaattcaaaattcctcaacgtcactcacagcccttngntctccaatcagattcgcaacgcgccatcttccagctagggtttccagctcaatttccagattttcactttccctcgatttcgaccgttgcaagagttaatttgaaatgcgcttcccctgtagatccgtggcgggattctgttgacttcga

SEQ ID NO: 28390 - DNA, 241 bp, Glycine max
  unsure (1)..(241): unsure at all n locations; Clone ID: 701060096H2
ttcttcccaaccantactactcactcactgcagatctcaattgcatcgctgtccatggctaccatcgttagcatcaaggcccgccagatcttcgacagtcgtggcaatccaactgtcgaggtggatttgacttgctccgatggtacttttgccaganctgctgttccaagtggtgcatccactgggatttatgaggcccttgaattgagagatggaggatctgactaccttggaaagggtg

SEQ ID NO: 28391 - DNA, 277 bp, Glycine max
  unsure (1)..(277): unsure at all n locations; Clone ID: 701060101H1
gagttgaatcgcgangaagatgaagaccgaatcgcgttcgaaagaggaaacaaagacgtatnaggaatggtttaatttggcagattcagatggagatggtcgaatctctgggaacgacgccanaaagttcttcgctctctccacttgtcgcgctcgcaactgaagcaactctnggctctcgccgatgtcaaaaggcaagggtttttgggcttcacagagtttgttactgcaatgcagttggtttcgctagcacaagcagggcaggaacttaaatcag

SEQ ID NO: 28392 - DNA, 255 bp, Glycine max
  unsure (1)..(255): unsure at all n locations; Clone ID: 701060102H1
atgcgctctatctatctctgaccgatctggctantacaccctaanccgcttcgaaccgtggcttcctcggcctcgcagaacctctctcgaagaaaannnnnnnnnnnnnnnnnnnnnnctnanaaanttccgggtcgacncggatcgtttaccgcgaacctcggatcccatcggaatccaatnttccgatctggcagcagaantggttcatcgcattgctcttcctcatggctctcggattcttcgccctcgctc

SEQ ID NO: 28393 - DNA, 271 bp, Glycine max
  Clone ID: 701060103H1
gaactagctctgcaaaaagttctgccaagggtgtagttgacaactcccagcctttccaaaagaatggtgctattgtgttactccttggtgctttctatttgctcagtagatatgccattcactgcacatgggtcacatcgaggcttactcatctccctcaattgtcttggctgcgaggggtgcccatggcaacagggtcatctttgatgattatcgtgaagcttacttttggcttcgccagaacactccacaagatgccaaggtgatgtca

SEQ ID NO: 28394 - DNA, 273 bp, Glycine max
  unsure (1)..(273): unsure at all n locations; Clone ID: 701060104H1
gcgatgttcattttctgcgcgttttgaaancctgaatgacgcaacccgcaaaaccctaaancctttctctctctgcatgagcacagaagancaacgtaaatcacatagatgaggaagaagcttctgatcgaaancactaaggcctctccttttgctccaatcgcaanttnactcccaaacccaaccacttatcctatgaggtatgcttttctgttgatccattgaaagtccagcagtgtggatggtcacacgctgcttctgtcccttctgagg

SEQ ID NO: 28395 - DNA, 270 bp, Glycine max
  unsure (1)..(270): unsure at all n locations; Clone ID: 701060105H1
gtttgttgtgagctataagctagtttatcgtgaggagaatatgaagttgtttgttttctttgttgctgcagtagttttggtagcatggccatgccatggcgcaggctaccaaaggttccctctccgaatgaaaactggtatggtgagcgttcttcggaggtaaaatgcgcaagttttaggcttgctgtggaagcacacaacatccgagcctttaaaaccattcctgangagtgcgttgaaccaacaaaggactacattaatggcgaacaa

SEQ ID NO: 28396 - DNA, 271 bp, Glycine max
  unsure (1)..(271): unsure at all n locations; Clone ID: 701060106H1
gcaagacatgagagactgctacgatagcttgctttccgcggcagcagcgaccnccaacagtgcttatgaattctcagagtccttgggagatttgggctcttgccttctggagaaaaccgccttgcatgacgacgaagaagcggcaaagttctcataatgctcggtaaaatacagtttcaactccagaagcttattgataaatatcgctctcatatcacccagacaattaccattccttcggactctcttctcaatgaacttcgaattgttg

SEQ ID NO: 28397 - DNA, 270 bp, Glycine max
  unsure (1)..(270): unsure at all n locations; Clone ID: 701060107H1
ccattggctaagcactcatgcaattgttgagccatttgtcatagcaacaaacaggcaactgagtgtggttcaccctatttacaaacttctgtttcctcactaccgtgacaccatgaatattaattcacttgcccggaagccctggtcaatgcagatggtattatagagaaaacattcttgtggggtaggtactctatggaaatgtccgctgtcatntacaaggactgggttttcactgatcaagcattacctaatgatcttgtaaagaga

SEQ ID NO: 28398 - DNA, 271 bp, Glycine max
  Clone ID: 701060108H1
caacaattttccctcttttcattttccattgctgaaaaatcataccttgaaatcgaaagcccctgttttgtttttcttttcgctggtgttgtgagagaaatgtgccctttaaggtttatcttggtgttcttctccgccggctggcgggttattttgcgtggaaaacggtgcgttctaacccgatcgaggtgttttccgaggattctgccgatgaagataaatcctccaagaagggagattttgatttcaagaagatgattcagaatggatt

SEQ ID NO: 28399 - DNA, 189 bp, Glycine max
  unsure (1)..(189): unsure at all n locations; Clone ID: 701060109H1
gcgacgtcgatgttcggttcaagatctgnnagtggaccatttgatccacgtaataatgtacaccatacnacacagaggtgtgtaatgtgttaattgcctgtntgtnttctttttcttgcctttcctttcagcttcttttatttggtatagttttcgagaatttgtccatattcataattaattacctta

SEQ ID NO: 28400 - DNA, 235 bp, Glycine max
  unsure (1)..(235): unsure at all n locations; Clone ID: 701060110H1
tccccctttccatttagagttctctcttccaaaacccaaaacaaaaacctcactcacctctgctcttttctgtgaatcacttatcacttaagaaaataaaagagcaaacgaaatgttgcggtcacttgcgagagccgtagcaccaatcatcgatgtcacgccacgttctcatctctcagtcactcttctaggcccccaaagcccanaccacccttcaaacccgatcccaaaaaat

SEQ ID NO: 28401 - DNA, 276 bp, Glycine max
  unsure (1)..(276): unsure at all n locations; Clone ID: 701060111H1
cagttatctttatctacgcaagagaagaatagaaaatggatatcaggttgatggatttggactctccattgttcaacactctgcaccgaatcatggatctgacagaggacgcagagaagaacttgaacgctccgacgcggaatacgtgcgcgacgcgaaggcaatggctgcgactcctgcggacgtgaaggagtaccctaactactacgtgttcgtgatcgacatgccaggcctganatccggggacattaaggtgcaggtggaggatgataacgt

SEQ ID NO: 28402 - DNA, 275 bp, Glycine max
  Clone ID: 701060112H1
ggttgagtggtgttttgcatcttgaaggatctgtgaagaccacaaaattgaaactcacttggctacctgagatagatgaactagttagcctgacattagtggagtttgattatctaattacaaagaaaaagcttgaagaagggaggatttcattgatgtggttaacccatgtaccaaaaaggagactttagcttatggagactccaacatgcgaaatcttcagcgtggagatttattgcaactggagagaaagggatatttcaggtgtgatttac

SEQ ID NO: 28403 - DNA, 207 bp, Glycine max
  Clone ID: 701060113H1
gagaagccgctggagttacgatactctcaagaatttccgtgagatctctccgctggttcagaatcacatcaaagggtttattttacgttatgttgcgctgtggtggctgctgctgttggagcttttcttcatgttctgtggaacattgggggttttctcaccacgttggcttccattggaagcatggtttggttgctatctacaccc

SEQ ID NO: 28404 - DNA, 207 bp, Glycine max
  unsure (1)..(207): unsure at all n locations; Clone ID: 701060114H1
ctacctgcnaacctaagagactggacccaaggccttagctacaggttagttagatgatatgtttacatcatgttatccgtagcttgggcagaaaaaaacttgtanaatttctttgtagctatctgcatatatatacaagtagtgtgctcgagcaaaaactactttgttcattaaacgaagaacctccagcaccaccattatcattca

SEQ ID NO: 28405 - DNA, 281 bp, Glycine max
  Clone ID: 701060115H1
agcaaagggaaaatggccatgcatatgcaagcacccacaatcagtcttaacactgcaaggtccccatcttcattagctccagctgccaatgctggcctgcgaccacacctcaaccctttggctttaaagtcatctttcttctctgttcccttaacctcttacttcatccaatgcaacagtatcttacttctggagctcccaggatttccatgcgtgtggcctccaagcaagcctatatctgtcgtgattgcgggtatatttacaacgacaggatccccttt

SEQ ID NO: 28406 - DNA, 235 bp, Glycine max
  Clone ID: 701060118H1
atcacaccgtctttgactatggaaatctccaagttggctttgccgaagcagtctaattacgctttctggaggattttctttgtaaatttgttaagcgtgttgtaaataagctgttataattgtagctctggttacttttgaaaccacgaatgtatttatccatttaagacgtagaagtatcccacttgcaagtgttgtgtgctttttatatgaaaaaaccatcctcatttcattc

SEQ ID NO: 28407 - DNA, 270 bp, Glycine max
  unsure (1)..(270): unsure at all n locations; Clone ID: 701060119H1
ggaaaacatgtcttactttcggcgtaggacggctaaggagatcttgagattgaaagctgaatgaggaaaganatgactgancagcatcccaatatatagctgtggatttttggtacaagatatttcgaaaggtcgttatattttttggcagcacttggtgaaaggatacagctgaaaggattcttcacattttgcaatgtcttaacaataaccatcatacagttggagcatttgtnagcttggatactaaattgactatacatataatgg

SEQ ID NO: 28408 - DNA, 269 bp, Glycine max
  unsure (1)..(269): unsure at all n locations; Clone ID: 701060120H1
cccgnaagatggtgaactatgcctgancggggcgaacagtangaaactctggttgangctcgcagcgatactgacgtgcaaatcgttcgtctgacttgggnataggggcgaaagactaatcgaaccgtctagtagctgntccctccgaagtttccctcaggatagctggagcccgcgggcgagttctatcgggtaaagncaatgattagaggnatcgggggcgnaacnccctngacctattctcaaactttaaataggtaggacggtgc

SEQ ID NO: 28409 - DNA, 269 bp, Glycine max
  unsure (1)..(269): unsure at all n locations; Clone ID: 701060121H1
tccaaggtggtgctcaccaaggatacaaccacaattgttggtgatggaagtacccaggaagcagtgaacaagagagttgcacaaattaggaacctaattgaggctgctgagcaagagtatgagaaagaaaagctgaatagagaattgctaaattgtctggtggtgtggctgtgatacaggttngcgcacaaactgagacagagctcaaggaaaagaaattgagagttgaagacgctcttaatgctacaaaggcagctgtagaggaaggt

SEQ ID NO: 28410 - DNA, 214 bp, Glycine max
  Clone ID: 701060122H1
atctgtgacgagcatcatggcctcgagagcagtgctattgttggctatgtgtgtgcttccggccatggttgtggccattcgccagcaaagaaccctttttgcgtgaagggtcgcgtctactgtgacccttgccgtgctggttttgagacctcagcaaccacctacattgccggtgctgagattatgttgcaatgcaagagcagggttagcaacg

SEQ ID NO: 28411 - DNA, 268 bp, Glycine max
  unsure (1)..(268): unsure at all n locations; Clone ID: 701060123H1
caaaatccccaaaccccaatttctcgtccccgtacgataatttccccgcaattttcatcgntccgtatccgctcgcattgctgtttcatccacattgcaatcttccaggacattggatttgatctctgctttccgaaggtgagattcctctccctcacctttttcccacattgcttcctccagatagtgtaggtgttattgatcgagggggtgaggagtgttgaaaacgagcatgcagtgggagcaggaggggcgggggaaaggggga

SEQ ID NO: 28412 - DNA, 274 bp, Glycine max
  unsure (1)..(274): unsure at all n locations; Clone ID: 701060124H1
gtggcgtttcaatgcgtgaaaccaaactagcaggatgatagtgcctccattaaacacgaaagtncgcaaagagacagtgatcttctcgttcttgtctgaagaagtcgatcatctcccaccgaagaaacagagcagaactgactagcattgaccaaaaagaaaaatgtgcgctttgagagcgttgactaggtccgtatgcaacagcagctcctatgttaaaacttccaaaccctatctcattctcaatctcatcacccatcagcaccagacccgt

SEQ ID NO: 28413 - DNA, 275 bp, Glycine max
  unsure (1)..(275): unsure at all n locations; Clone ID: 701060126H1
caaccactcttaatttctctctgccttgctcatttacacacctctccaacctntcactttcagctttatttgaatccctctctctcctttccaaatggccagcgttgaggttgcacatcaaacaccaacaacagttccagaaatgaaacaaccgaggtaatcaagacccaggaaacaaccccggaaccagtaccagccactgaggctcctgcaacagaacaagcagcagctgaggttcctgctcaagaagaacaacaagcaactgaggttcctgc

SEQ ID NO: 28414 - DNA, 275 bp, Glycine max
  unsure (1)..(275): unsure at all n locations; Clone ID: 701060127H1
gagagagagagcgagcagtttcagacacagagagaggggtttgggattggagggattgacgctgcgtctcttcctcttctctttcgatccatccctcattcctaatcctccaatccaaccacctcagcctcacactcacantacacatatctgaacgcgtatcgtccctcctatggcttcaaagcgcatcctcaaggagctcaaggacttgcagaaagacccaccaacttcttgcagcgctggtccagtagctgaggacatgttccattggcaag

SEQ ID NO: 28415 - DNA, 275 bp, Glycine max
  unsure (1)..(275): unsure at all n locations; Clone ID: 701060128H1
gggagtagaagtagaagcttcacttcactctgttcagttcttattgttgcatagataatttgtnctctatttttgttattttctttctctctcctctttgtgcattttaatagcaantcttagtttccaatgtccaagatgtgggagtgtttgtgggacttttgctgttggtggggttggctgcctctgccaagtttgatgaactcttccagcccagttgggctatggaccatttcatccatgaaggagaacttctcaaactcaaacttgataac

SEQ ID NO: 28416 - DNA, 275 bp, Glycine max
  unsure (1)..(275): unsure at all n locations; Clone ID: 701060129H1
ttctgcttgcagctgatggcgcaaattctgctccatgggactcttcatgccactatctatgaagtcgataagctcaaaattggtggaggcaactttttaaccaagatcgtacaaaacatcgaggagactgttggtattggaaaggtgtcactaaactatatgcaaccattgatctagagaaggcacgagtggggaggaccagaattattgaaaaagagattaanaatccaagatggtacgagtcctttcatatttattgtgcccatatggcatca

SEQ ID NO: 28417 - DNA, 281 bp, Glycine max
  Clone ID: 701060131H1
cggaacaaacagggaatataagagagaaaaagatgggtttcataatggaattcgcggagaacttggtattgaagttgatggaggatccgaaggaaagggatcggaggttccgggagcacgtttatagagtgaaggacaggtgcggaagacgaaggagatgtggagctaccctatgcgaccctatgggttttggactttcgaacgccacaattctcagcttgcttgggatgcacagattagccaagtggctgggaggagggacccttatgatgatatcctcc

SEQ ID NO: 28418 - DNA, 285 bp, Glycine max
  Clone ID: 701060132H1
aaaacaaaaacaaagtaagagttcactcaatctcactgtgttgtgagttgtgtgtgagcaccaaccaacaatggtgtctctgactccgttatgtttctttattaccttgttgatcgctggtgcagacgcaccggcggagccccaaacgtgcgttttgacaccggggggttgagcagagacacctttcccaaaggattcttattcggaacggccacgtctgcgtaccaagtggagggtatggcccacaaagacggtcgcggcccaagcatttgggacgtcttcatc

SEQ ID NO: 28419 - DNA, 269 bp, Glycine max
  Clone ID: 701060134H1
ctattcttacaagttacatccattgagaaacatgaaggtctcccccttagcattttcaatcctttttttgtcctttcaccatagaactcttcattggcattgttcagcagcacaagaaccagtgttgacacctcaggcagaagtgagaacaggtgtcaagtactacattctaccagtcttcagaggcagaggtggaggcctaacagtttcaagcagtggcaacaacacatgccccctctttgtggtgcaagagaagttgaagtctcaaa

SEQ ID NO: 28420 - DNA, 269 bp, Glycine max
  unsure (1)..(269): unsure at all n locations; Clone ID: 701060135H1
cncnagcgtggcaggggtaactccttggttanctanagaattctcatgccaatattcgagnaatggntgctgatgttgtgaccacaatagtccagaataatcctcgaagtcagcaacttgttatggaagcaaatggcttgaacctcttatttctaattttagttcggatcctgacgtgactgttagaactaaagcactgggtgcaatatcttcacnaattcggcncaanaaaccagtccttactgnatttcgtttggcaaatgggtatg

SEQ ID NO: 28421 - DNA, 267 bp, Glycine max
  unsure (1)..(267): unsure at all n locations; Clone ID: 701060136H1
ggatctagagtcttcagtttctcctcgttgttcttcgctttcctgttttcaatttcgattctttcgttaatttaataagatgtttgggagggcaccgaagaagagcgataatacgaggtactacgaaatcctcgggtctccaagaacgtttcgcaggatgatctgaaganggcttacaagaaagccgccattaagaatcaccccgacaagggcggtgatcccgagaagtttaaagagctggcgcaanttatgaggttctgagtgacc

SEQ ID NO: 28422 - DNA, 268 bp, Glycine max
  unsure (1)..(268): unsure at all n locations; Clone ID: 701060137H1
gcaaaaagataaactacttggtggccttttagcagatggatttgatgaanaatcttgtctcagcaggtatcattcggccacatatagcaaaggactatcgggaaatccttcatctnacctcatttctagattgagaaatatgaagctctccacaaaaaatgtggacnnttcaccgttttgttataggattcagtgtaaggtcatgtaagtnnagtccccagaatgtaaatatgtggtatggatttcatatagtgggttagggaatagg

SEQ ID NO: 28423 - DNA, 267 bp, Glycine max
  unsure (1)..(267): unsure at all n locations; Clone ID: 701060138H1
gttgtgagctataagctagtttatcgtgaggagaatatgaagttgtttgtnttctttgttgctgtagtagttcttggtagcatggccatgccatggcgcaggctaccaaaggttccctctccgaatgaaaactggcatggtgagcgttcttcggaggtaaaatgcgcaagttttaggcttgctgtggaagcanacaacatccgagcnttaaaaccattcctnaagagtgcgttgaaccaacaaaggactacattaatggcgaacaat

SEQ ID NO: 28424 - DNA, 267 bp, Glycine max
  unsure (1)..(267): unsure at all n locations; Clone ID: 701060139H1
agagtttgttgtgagctataagctagtttatcgtgaggagaatatgaagttgtttgtnttctttgttgctgcagtagttttggtagcatggccatgccatggcgcaggctaccaaaggttccctctccgaatgaaactggctatggtgagcgttcttcggaggtaaaatgcgcaagtnttaggcttgctgtggaagcacacaacatccgagtncttaaaaccattccngaaganngcgttgaaccaacaaaggactacattaatggc

SEQ ID NO: 28425 - DNA, 274 bp, Glycine max
  unsure (1)..(274): unsure at all n locations; Clone ID: 701060142H1
attttactctgcagcagcagccaccacccatggcgtcgttttccgccgccgtcgctcagttctcccgcgtttacaccttctcacacttcgctccactcctcactctcacggcacgctcttccaatctcaatgccnccctttttcctctcgcgcacttcccattcactccggaagggtcttactttaccacggggaagagaggcaccgagtacatctgtacgtncttcatttacagatgtttcaccgaatgtntccttggaggaaaaacaactac

SEQ ID NO: 28426 - DNA, 271 bp, Glycine max
  Clone ID: 701060143H1
gttggcaacgccttggtgttggagatcgtgatgaccttcggtctggtgtacacggtctacgcaactgccattgaccccaagaagggtaatttgggaattattgctcccatcgccattggtttcattgtcggcgctaacatttgttgggtggggccttctctggagcggccatgaaccccgctgtgacatttgggcctgctgtcgtgagctggacctggaccaaccactggatctactgggccgggcctctcatcggtggtggaatcgctgg

SEQ ID NO: 28427 - DNA, 273 bp, Glycine max
  unsure (1)..(273): unsure at all n locations; Clone ID: 701060144H1
cggcgcacggccactacgaccaccannactactggtccccgcgtgacgataaaccctccgccgcctctctccaaatatcctctctctcctccttcgttttctccgttttccgaagcgttaggtccggccacaggtanatgagaggctctttctcatgatctcgctcaatgtcgcgtantccancgccgaattgctcactggactcttcaccggtcgcgtaggtttggtgtctgatgcggttcacttgactttggttgtggtcttcttacattt

SEQ ID NO: 28428 - DNA, 275 bp, Glycine max
  Clone ID: 701060145H1
caaggggagtgccaggatgaacaaaggggtacatctgtctaccttgttgagcggcggatagacatgcttcccaaacctcttacagaggacatatgttctcttcgttctgatgtggaaaggcttgcattctctgtcatatggaaatgacacctgaagccgacattatttctaccagatacacaaaaagtgtcataaaatcttctgcagcattgtcttatgttgaagcacaagcaaggatggatgatagtcgtttgatggatccaattactgctgat

SEQ ID NO: 28429 - DNA, 279 bp, Glycine max
  Clone ID: 701060146H1
tgccactgccataactcactcactagcttcttctctgttctcaccaatggcatcaacaatatcagcaatggccatgatcaacgccaaatgcgtcaacccaaagttccccaatcccaccaagctcgcaccatcaaaaccctccttcagatcaaccttccaaagggcctcatagcctcacccgaaagcactaaactttcccccgcgacagcaatcgcaggagcaatattcacaaccctcggaacctgcgacgccgcattcgctgttcaacaaatagccgac

SEQ ID NO: 28430 - DNA, 151 bp, Glycine max
  Clone ID: 701060147H1
ctgaagtcaaactgcggtctaacctccgatggtagtgtgagcagaatataatgttaagattaaatgatgaatctgaagtcattttgtaccatgcatagtatgggggacaatataatgttaagaattaatgcaaaatagtttattttggtat

SEQ ID NO: 28431 - DNA, 283 bp, Glycine max
  unsure (1)..(283): unsure at all n locations; Clone ID: 701060148H1
gagttcctggacgaggacgcaaggccaaggttcgtgttccagtccggtgcagctgcgaggagcagcgagccaccgcacccgatccanaaacctaccaagccattcctcttcgccaccgtttccctctcctcactcttcctcactcctccctcttcttcctcgaagcggagcccttcaaatcgctcctcttctggctcgcantctctctcctcgttggccccttcgcccctccctccatcactggcggcgacgtccgcgtcggccgcggcgaggtcgtcaattc

SEQ ID NO: 28432 - DNA, 272 bp, Glycine max
  unsure (1)..(272): unsure at all n locations; Clone ID: 701060150H1
ggggatgnttcagancatggcaaggcatcacgngaanatgangctnggngnaangaagtcncaaggttcgaaaggtggtactatagnaggattacaaggatcaannacgtggatgaacatcttaatgatgaggaagaattgatgaatnagacaagtcanatcataatgaagctccagnatatagacacctaattgccattcatgctgggaagcctaaaggtggattagtggaatgcctcaaagtggatcctgaaaaagtgagacgtctaagt

SEQ ID NO: 28433 - DNA, 266 bp, Glycine max
  Clone ID: 701060151H1
gttgaaatcattacccctgtggagctcattaagaagggagacaaggttggatcttctgaagctgcattgcttgccaagctagggataaggcccttctcgtatgggcttgtggttctttctgtttatgataatggtcagtgttcagtcctgaggttcttgatcttactgaggatgaccttattgagaagtttgctgctggtgtctcaatggttacttcactttcattagctatctcatacccaacacttgctgctgcaccacacatg

SEQ ID NO: 28434 - DNA, 266 bp, Glycine max
  unsure (1)..(266): unsure at all n locations; Clone ID: 701060152H1
atgaaagcnataagtccctccttcctctgccttataattcttgtgacccttttngctggtagcattgaaagtgcaccagcaaacgtgaagccaagccattatgctgcacccttcaataggagtgtttttccttctgttttctatttggaataggctctgcagcttaccagatagaaggagcngcagctatagatggcagaggaccaagtatatgggacacctatactaaacagcaaccagggaagatttgggatcatagtgatgga

SEQ ID NO: 28435 - DNA, 265 bp, Glycine max
  unsure (1)..(265): unsure at all n locations; Clone ID: 701060153H1
ggaatccttgtcccatttgaagctcaacactgtctgcnaggnggcacagtgccccaacataggagagtgttggaatggaggtggagatggcattgcaactgcgacaatcatgcttcttggggatacttgcncacggggtgtaggttttgtgctgtgaagaccagcagaaaccctccacctgctgatcctatggaactggaaaatactgccaaggcaattgcnagttggggcgtggattatattgtcttaacaagtgtggatcgtg

SEQ ID NO: 28436 - DNA, 270 bp, Glycine max
  unsure (1)..(270): unsure at all n locations; Clone ID: 701060154H1
gaaaaacagatagtgtgggagagagaagagcggaagagaaaatgacgaccaggttcaagaagaacaggaagaagagaggtcacgtncagcnccggacacggccgtatcggaaagcaccgcaagcatcccggaggtcgcgtaacgccggtggcatgcatcaccaccgtatcctcttcgacaagtaccatcctggtttcttcgggaaggtaggcatgcgctacttccacaaacttcgcaacaaattctacaatccgatcatcaacatcgaca

SEQ ID NO: 28437 - DNA, 268 bp, Glycine max
  unsure (1)..(268): unsure at all n locations; Clone ID: 701060156H1
gggctgaantattggtgaatgttgtgccactaaccaaagangatgacagaattcacaactaccaagtgccttctgatgactgttttgctcacttggaagttcanntnnnantctttgcnttgtcncanaaagntgntgtgtacttggaaggacttataggttggattttgagaacccagcaaagcctggtgtggctatgccgntgttggaggagaagannagtacaggactaactcattgctctctcctgattgtgtttctgtgtgtc

SEQ ID NO: 28438 - DNA, 272 bp, Glycine max
  unsure (1)..(272): unsure at all n locations; Clone ID: 701060159H1
ctttaccagttgccacactacaccgagatnccccctaaacccntttgcnttgttgtttgcgaagaaatggcgactaagaggagcgtgggaacgttgaaggagggtgatttgaaagggaagagggtgttcgtgagggtcatctgaacgtgcctttggatgacaaccttaacatcaccgatgacactagagtccgtgctgctgttcccaccatcaagtacttaactggtcatggagccaaagtgatcctttctagccacttgggacgtcctaaa

SEQ ID NO: 28439 - DNA, 274 bp, Glycine max
  unsure (1)..(274): unsure at all n locations; Clone ID: 701060160H1
atctcattccctctctccctaaaatggccactcttccctcctacgaccacctcatcttcactgccttagctttcttcttatctggccttattttcttcctcaaacataaatccanatccaaatccaaaaaattcaacctcctccaggaccccctggatggcctattgttggaaacctcttccaagttgctcgttccgggaaacctttctttgaatacgtgaacgatgtgagactcaaatatggctcaatcttcaccctcaagatggggacaagg

SEQ ID NO: 28440 - DNA, 278 bp, Glycine max
  unsure (1)..(278): unsure at all n locations; Clone ID: 701060162H1
gtntaagnntcngntgntcctgaaacnnattctagtnccgggtgctgataatgngactggaattgnnagtgttgtggtnatttctggagctaaanaagangatttcagatncnaagttnnncaatgaagctggtcaagagaatttcngtcagctttaaagaatgaaaaccttgacntgaagaaaattncagaggtctcngnnganaaaaangagccttcctttgaagagcggagattcctggaaatganctgtttgaaaaatcanctanntcaaganc

SEQ ID NO: 28441 - DNA, 280 bp, Glycine max
  Clone ID: 701060163H1
catcatcaatgatataaactccttgctcctcttgactcattcattcactcccaatatgatggaattggaagccaccgccgctacttccccaccttctcgcgttctcctcatctccgccggtgccagccacaccgttgcccttcctctgggaatgttgtgtgttcgtggggtcgcggagaggacggacagttaggccatggtgacaccgatgataggcccttacccacgcagctcagtgcattggatgcccaacacattgattctattgcctgtggagctg

SEQ ID NO: 28442 - DNA, 283 bp, Glycine max
  unsure (1)..(283): unsure at all n locations; Clone ID: 701060164H1
gcgaaccacaacggaagagtaaattaccgtcaaccgaatagccgtttctccgtcaaagnctccgccaaagagattgcctttgacnagcattccngtctgctatgcaggccggcattgacaagctcgccgacgccgtcggctcaccttgggcccagggggaggaatgttgtgttggatgagtttggaagtcctaaagtggttaacgatggtgtcaccattgctcgcgccatcgagcttccagatcctatggaaaatgccggtgcagctcttattagagaggttg

SEQ ID NO: 28443 - DNA, 269 bp, Glycine max
  Clone ID: 701060166H1
attttagtttggactgagaccaagagaagagggtatagcatagtttaatcgcagccccgaggggaataaaaccgacaaatcgttgaacatcggagccagagattcagagcgggtaccaccgacgatggatactggggaggcggagcatcacctacagccgccatgtcgcggtggaagttcgcggcgtggcggcagtaccagcacctgctggacaaatcgacgccgcacgtcggacgccggtggctggggttcgcggcggtggcgctttt

SEQ ID NO: 28444 - DNA, 267 bp, Glycine max
  Clone ID: 701060167H1
gagagagcgagcgagcgagcagtttcaaagagaggatttgggattgggaaggcgagggattgcgctgcgtctcttcctcttctctttcgattcatccctcattcataatcttccaatccaacaacctcagcctccactcacacatacacacatctgaacgcgtatcgtccctcccatggcttcaaagcgcatcctcaaggagctcaaggacttgcagaaagacccaccaacttcttgcagcgctggtccagtagctgaggacatgtt

SEQ ID NO: 28445 - DNA, 264 bp, Glycine max
  unsure (1)..(264): unsure at all n locations; Clone ID: 701060168H1
tttggtcttgttaggttacctctgtnacatttgtnttgttagttcgtagttgcngctgacacccnnnnnnnnnnnnnnnnnnnnnnnnncaaaaaggcgcagatgggtagcacaggtttctcatggaaattggggatcatccaaagcttccaaagggtaagactgtggctgtggtggtgttggatggttggggagaggccanacccaatgagtanaactgcatccacaaggctgaaacaccctgcatggattctcttaaaaagg

SEQ ID NO: 28446 - DNA, 266 bp, Glycine max
  unsure (1)..(266): unsure at all n locations; Clone ID: 701060169H1
cagatttcagacaaatcgcatcaaagttcagagaaactgaaaaaatcagatagccagccagcccatcactcagatggatggaatcaacaaccaaaacacttggagagaggaaggtcagagggtcatcagacttatatgtggataaaggtcgatgattganaggctagttttcttctgttctagaacatgatccacatgcagtcagtgtttttgttgtccatgttgggatttgcttatgtctttcaacaatattttgtgtggtttat

SEQ ID NO: 28447 - DNA, 265 bp, Glycine max
  Clone ID: 701060170H1
agcagcagaacagagagagcaaaaccctagagcatccatcacaagcagaggaagaagatggtgaagttcctgaagcctaacaaggcagtgatcgtcctgcagggccgctacgccgggcgcaaggcggtgatcgtaggcccttcgacgagggaaccagggagcgcccctacggccactgcctcgtcgccggaataaagaagtacccaagcaaggtcatcaagaaggactccgcgaagaagaccgcgaagaaatctagggttaaggc

SEQ ID NO: 28448 - DNA, 265 bp, Glycine max
  Clone ID: 701060171H1
tcttcttctgttgcgttgtgtgtgagtgtgggcacggtaagatgcagaccattgctaggcgcttagggcagcaatcgctgaggccatcgacgtcgctcaagtccatctatccaatttccgatcaccattatggatggatcacgagcgttacgtttctaccctcgccaccaagggagttggtcacctcgttcgtaagggcactggtggacgatcctccgtcagtggcattattgctacagtatttggggcaactggattcttaggt

SEQ ID NO: 28449 - DNA, 268 bp, Glycine max
  Clone ID: 701060172H1
aagattccttgatgtccaattatttagaatcaagcagcaatgatatatcaggatctgcttatttccataagccgtctgaagagactaaaattatgccacttttctccaattttacaactgcaaatgttcatagttacttgagccgttaacaaccccttcagttgttgataatgacaatcaaggtgctctgataacaagcactagggaaagtggcatggagaagaagcacgattattactcatcttcacaaaatgaagacttcactgct

SEQ ID NO: 28450 - DNA, 271 bp, Glycine max
  unsure (1)..(271): unsure at all n locations; Clone ID: 701060174H1
gaaaatcctcacccattttcttcgtagccaaacactctgaaattctcagttatgtcgtggcaagcgtatgtggatgatcacctactgtgtgaaatcgaaggtaaccacctcactcacgccgctatcatcggccaagnggaagcgtttgggctcagagcaccaacttccctcagttcaaacctgaggaaataactgccatcaataatgactttaatgagcctggatcacttgctccaactggattgtatatcggtggcaccaaatacatggt

SEQ ID NO: 28451 - DNA, 272 bp, Glycine max
  unsure (1)..(272): unsure at all n locations; Clone ID: 701060175H1
gtttcaatattcatcatcaaatcactggtcctccttttatagaaatcttagatctgcttttaacacaaggttttggtggagaagaagaagcaaagacgacggtgtataaatacaagnnnnnnnnnnnnnnnnnnnnnnnnnnnnnnnnagttagtgagcaaggtggatcgaaggcaagggaagaggtctctccctcctcatgaggagaaaaaagaagctttcaactttcctattattcatccaacaccatctcaaaatcgaaaggaacaagc

SEQ ID NO: 28452 - DNA, 272 bp, Glycine max
  unsure (1)..(272): unsure at all n locations; Clone ID: 701060176H1
ggcactgtggcagaagtcctaggagtgtaaaacagagacgcaaaatgaagacgatcttgtcgtctgagaccatgaatattcccgacggcgtgagcatcaaggttcacgctaaggttatcgaggttgagggccctcgtgaaaactcgtgcgagacttccaccatctgaacttggacttccaacttattaccgacgatngcggtaaaaggaagctcaagattgattcttggtttggttctcgtaaaacctccgccgccatccgcaccgccctca

SEQ ID NO: 28453 - DNA, 286 bp, Glycine max
  unsure (1)..(286): unsure at all n locations; Clone ID: 701060177H1
canaacatagnatagaaagagaaagcgcagggtccgacccgatacntcatctttcgccctagtgctcgttttcagagctgcaaaggaatcgacacagaaagtgattaaaaaagggagaagatatgctttggtgtcaaacgttccctgattcttctggctgtggactccactttctctactgttccacctcnccaanactacgcattgctgttccaattcnctgaacgaacggtnctgtaattggtgattttggagccgaaactgtttcgttccaatgaaaatcaat

SEQ ID NO: 28454 - DNA, 275 bp, Glycine max
  unsure (1)..(275): unsure at all n locations; Clone ID: 701060178H1
cacctttctcctaaaacatctccagtgggttcttcttcttctattacaacaacgtcgncccaagaccatgaccatggccatggccacgatcctgctcctgttcacggtcttcgcggtttcatcggccctagacatgtcgaaatctcgtacgacaacgcccacgccgccacgtcgcgcagcagagggagctgatgtccatgtacgagcagtggctagtaaagcacggcaaggtgtacaacgcgctcggagagaaggagaagaggttccagatcttc

SEQ ID NO: 28455 - DNA, 278 bp, Glycine max
  unsure (1)..(278): unsure at all n locations; Clone ID: 701060179H1
gagttacaagagaaatcatcatgggcatcagcagcatctgggtttgtgttgtcacttaatgttgcagctgccaccacaaactcaagggtggtcatgttcaacaccaagaacaacacttctaggtttgttgtaaaggcttcaatgagcctgcngcggcggcacccgccaccgccacacccccagctgaagctgaagctaaaccaaagccaccacctattggccccaagagaggtgctaaggtgaagattcttaggaaggaatcttactggtacaaaggc

SEQ ID NO: 28456 - DNA, 280 bp, Glycine max
  Clone ID: 701060180H1
cgaatgccgagggagattccgacgagcttgtagatcctccgaagtggaggacaagatcggtgctgtgcctcatggcctttccaccgattcagatgtcgtcaagagggagtcggagtcgatctcgaagagatctctccggagaatgcggagaagtttgagttccaagcggaagtgtcacggcttatggatattatcatcaattctctctacagtaacaaggatatcttcctcagagagttgatttccaatgcttctgatgctttggacaagattaggttcc

SEQ ID NO: 28457 - DNA, 264 bp, Glycine max
  unsure (1)..(264): unsure at all n locations; Clone ID: 701060182H1
aacaagctagctattagttcgattttgtagtaagtgaggtgccaatatggtgaagatagctcttggtactttggatgactcttttagcgctgcctctcttaaggcttatttcgcagagttccacgcaactctatttncgtgttcgctggtgttggatcagccatcgcttacaacgagcttacaaaagatgcagccttggatccaacggggctggtggcagtagctgtggcacatgcatttgcactgtttgtaggtgtctccgtc

SEQ ID NO: 28458 - DNA, 264 bp, Glycine max
  unsure (1)..(264): unsure at all n locations; Clone ID: 701060185H1
tggagttcaccgaggctgagagcaacatgaatgacttggtggcagagtatcaacagtatcaagacgccgccgccagcgaagaaggcgagaacgagatcgatgacgaggaagccatggctgcatgagagcctcttaaagcctctccggaagaaattattatataatctagattaccacgtcatcatggtcgactcaattttcactgttacattaatcaaaatttntaatatacaataacaaattttgattagatgcaatgtgaag

SEQ ID NO: 28459 - DNA, 266 bp, Glycine max
  Clone ID: 701060186H1
cctttctttctccaaagcccaattccaaagccctcgtttcacttttcccaatgccgccatggccgccgccactgcattgctccgctctctccgccgccgcgaccttccctcttcttctctctccgccttccgatgttgacgagtggcacaaagacatcatatgtaggtaacaagtgggcaagtttgtcacgaccgttcagttcaaagcctgctggtaatgatgtcattggaattgatctgggtactaccaattcgtgtgtctctgt

SEQ ID NO: 28460 - DNA, 266 bp, Glycine max
  unsure (1)..(266): unsure at all n locations; Clone ID: 701060187H1
cccaaacaaagccgaaaganagaaagaaagcacgattacttgcacttgttcttcctctgcagtaaaaccctagctagccatcatcgtaacgtaatcgatccctctgactctcactctagaaccttcgactcgatcgaatccctagatcggattgcaaggctggcgggtattctggtcaagtaaatgacggatctcccccgccgcggtttcttattatcgttgatagggttaccgcgctgtgacgattgtnattgttttttccaaga

SEQ ID NO: 28461 - DNA, 266 bp, Glycine max
  unsure (1)..(266): unsure at all n locations; Clone ID: 701060188H1
gtttctctttctctttctctgtctgcttcttcactttctctcgtttcaatcgaaaaaaatcatgggcagaaaattcttcgtcggtggcaactggaaatgcaatgggaccactgaggaggtgaagaagattgttatactttaaatgaagcnaaagtccctggagaagatgttgtagaagttgttgtgagccctccttttgtgttccttcctttgtacaaagtttgctgcgccctgatttccatgtctcggcccaaaattgttgggtt

SEQ ID NO: 28462 - DNA, 266 bp, Glycine max
  Clone ID: 701060189H1
caattccataacccggttattaaaattattcgaattgctgatttttatattttttttctttttttctaagtgctgcaacgatcaatgcctgaagaattgaatgaagaaaaaaatgcttatgggtactgattgatcttcgttgtgtggtttgtgcagaaagttcagaaggctcttctgcaatccgatgtgcactcaaagtcagacaaaagtcctgtcacagtggctgattatgtttattagcttgacatatgctatcaaaagagtca

SEQ ID NO: 28463 - DNA, 269 bp, Glycine max
  unsure (1)..(269): unsure at all n locations; Clone ID: 701060190H1
aacaaccatggtgcacgtctccttttacaggaactatgggaagacattcaagaagccgcgtcgtccgtnacgagaaggagcgtctcgacgcggagttgaagctggttggtgagtacgggcttcggtgcaagagagagtgtggagggtgcagtacgcgcttcagccgcatccgcaacaacgcgcggaacctcctcaccctcgacgagaagaacccgcgccggatcttcgagggagaggcgctgctccgaagatgttccgttacggtctct

SEQ ID NO: 28464 - DNA, 270 bp, Glycine max
  unsure (1)..(270): unsure at all n locations; Clone ID: 701060191H1
aganagggaaagttgaacgagcaatgaatgccagancacgcaccactcttcactcaatgaaacctcctttaaatgaaaccaaagggaagatggaaactggaggagggaagagagcagtgggtggtggccacaagangggcgtcgatccaatcgagaaaggaaaatggctttgatccaagatgtagataagctgaagaggaaactcagacatgaagagaatgtccatagagctttagaaagagcattcactaggcctttgggatctctacc

SEQ ID NO: 28465 - DNA, 273 bp, Glycine max
  Clone ID: 701060193H1
ctgccactggggtgattcgtcttcatccttcatcggcattgcgcttcacaaattctcagtcctacgacttgggtgttggatttcattaagttgtgataaacatgggaaaagactcaaagccaaaggagtccggaggcagggaaaggggaaacaggctgcaagtggaagtgatgagaatgcttctaagggaaaaggaaaaggtgggaaaggtggagatgggcttggtacttgcacctatgtcaaagctaggcatatcctatgtgagaaacaagg

SEQ ID NO: 28466 - DNA, 276 bp, Glycine max
  unsure (1)..(276): unsure at all n locations; Clone ID: 701060194H1
agatgccaaggagaggttgttgctcacaacaaaggcagcagaaaaaatgggagttccattggggttcaaattggttagaggtgcctacatgtccacagagagtacaattggctgagtcatttgggtatgcatccccaatgcacaataccattcaagaaacacacaattgcttcaatggctgctcatcatttcttcttgagangattgctaatggacccggttcaatttcagttgttcttgcaactcacaatattgaatcagggaaattggctgcag

SEQ ID NO: 28467 - DNA, 286 bp, Glycine max
  unsure (1)..(286): unsure at all n locations; Clone ID: 701060196H1
cattgttccaaaatccccatcctttggtcgttgcagctattttttaaattggatgatgcaaaaacgcaaattgttgattaaaccactncttcttcncttcacacgaattccctctagcactcgtccaagcagaggaagagagagaggagaccaagacaaganaagatagaaacataggagaacaaaganacagaacaaagtcccaagtagcagtgaagaggagggaagaaaaaggtggcaccataattcaatctcagatctcacatcagaacctccccagatcccc

SEQ ID NO: 28468 - DNA, 165 bp, Glycine max
  Clone ID: 701060201H1
gtcacgggttcatatatatgtagcaatcccttgtgttgtttattgaaaatcctagaagatcttcactttactatgtgaatttggtggctattagagttggccggagaattgtggatattccaccggaggctctagcgttcaaccctaacaccggcgcaggcaccg

SEQ ID NO: 28469 - DNA, 155 bp, Glycine max
  unsure (1)..(155): unsure at all n locations; Clone ID: 701060202H1
gatcanaatcacgccacagatctacacacaccacatcatgacacaatagatctgtgttagtcctttggttttatcaaaccacacttgcaccaatcaaaaccacaaaacacaactcgtcacatcacatcacatcacatcnatttncattacttcat

SEQ ID NO: 28470 - DNA, 160 bp, Glycine max
  unsure (1)..(160): unsure at all n locations; Clone ID: 701060204H1
gtgtttccaaagagaggtgctatgaacattctcttcaactgacacaagttgaagaatttcagctaaatgggtttagaatttttatccttgtttcagctggaaacaaagagattgctatggcttattggcattacatttgcantgatcttaactttccagt

SEQ ID NO: 28471 - DNA, 160 bp, Glycine max
  Clone ID: 701060205H1
ttcatccaagttcaaagatgaagatgatccacgttcttttcctctttgctcttgtctcgttcacttcccatgcttctgtcaatgatttctgtgtagcagacctaaaaggtccagatagcccttcaggctatcagtgcaagccacctaacacagtcacagt

SEQ ID NO: 28472 - DNA, 163 bp, Glycine max
  Clone ID: 701060207H1
cgcagtcgtattggactggaataggcacagagagaagatccaattccaatcccaaccgaacaaactagaaattagggttcatatcccatttcctcagatttcatctcagatttcgcattggtttgcgttgcgtggttggttttgcggtatcgaagaagaagat

SEQ ID NO: 28473 - DNA, 164 bp, Glycine max
  unsure (1)..(164): unsure at all n locations; Clone ID: 701060208H1
tnacctacctctttttcttctctctcaacaacttcaccttcttcctcctcgatcatgtctcactttcaagggcaagtaccatgatgagcttatcgccaatgctgcgtacattggcactcctggaaagggtattctgctgctgatgagtcaacagggacaattgg

SEQ ID NO: 28474 - DNA, 166 bp, Glycine max
  unsure (1)..(166): unsure at all n locations; Clone ID: 701060209H1
gnaagcaggacctttaagcttcctaatcccctgtactacattcagtagttccttcacctctcaacaatctagcttgctcctatctatctatatgtaataagatgcgttcaaataggggcactagcttcactttatgttgtttcagctgtgtgtcaacaagtcatgt

SEQ ID NO: 28475 - DNA, 166 bp, Glycine max
  Clone ID: 701060210H1
tcgagtttcacagccaagtcgtaaaagggtttcaagggatggaaaacatgcagagcttctggcaattgggtgatgaactccgtgggcactcaaaagcatcggaggatcacaagtggttaatggttgcctcgaaactggccgaacagacaagattgaagggggagcg

SEQ ID NO: 28476 - DNA, 165 bp, Glycine max
  Clone ID: 701060211H1
ctaatcctggaccatcacccccttcacctgtgaagccaccaaatgtctgtgacaactactacagctgtgctgatagtgctacttgttgctgtattttcgagttcggaaatgcttgctttgagtggggttgctgtcctcttgagggtgctacctgctgtgatgacc

SEQ ID NO: 28477 - DNA, 167 bp, Glycine max
  Clone ID: 701060212H1
aaaaaaaaaaaatccgcgattcgctcttctcttggaaaagtgaaaaccagaagtacgaacgaaagagaagagcgatttagaagtgagagaagatggggttgtcgttcacgaagctgttcagcaggttgtttgcgaagaaggaaatgaggattctgatggtaggtctc

SEQ ID NO: 28478 - DNA, 167 bp, Glycine max
  unsure (1)..(167): unsure at all n locations; Clone ID: 701060213H1
ttccatcatcttctggtatnggtcttagcaataacttaacatcatctggtccattggcagcccctgccagggatagtagatatggagtttcacgaactccacctttatcagttgacgancagaagagaatacaacaatataatcagatgatatctagcagaaacatg

SEQ ID NO: 28479 - DNA, 168 bp, Glycine max
  Clone ID: 701060214H1
gctgctatcgataacatatttcacttgagacagttatctttatctacgcaagagaagaatagaaaatggatatcaggttgatggatttggactctccattgttcaacactctgcaccgaatcatggatctgacagaggacgcagagaagaacttgaacgctccgacgc

SEQ ID NO: 28480 - DNA, 168 bp, Glycine max
  Clone ID: 701060215H1
attaatcaaacatggctagggttagtgctttgtttcactctttgctcttgatttcttcccttgtattggcttctcaaatccatgtttcctctgggaaactagtccctggactatcatggaattactatttgttgacatgtcccaagcttgagaggattataaggaagc

SEQ ID NO: 28481 - DNA, 170 bp, Glycine max
  Clone ID: 701060216H1
gcttaaggacctccagaaagaccctccaacctcttgcagcgccggtcctgtagcggaagatatgtttcattggcaagcgactataatgggtccccctgatagcccttatgctgggggtgtttttctagttactattcattttcctccggattatccattcaagccaccca

SEQ ID NO: 28482 - DNA, 162 bp, Glycine max
  Clone ID: 701060218H1
gggtttccggattcttgcgttttaatctttgcaattcaaaagcatggggcactccaatgtgtggaactctcatccaaagaactacggacctggttctcgcacctggtatgttactcatcttcaccaaatgcagattcaggatgataaagttgatctttttcg

SEQ ID NO: 28483 - DNA, 160 bp, Glycine max
  unsure (1)..(160): unsure at all n locations; Clone ID: 701060219H1
cttgcattttagcaatggccaaatggatctcatttgctgctcnttttgcaatacttttactactcatctctcctgagcttgcaagtgctgcccaacctagtcttattcttcaactcggccgaaaacttttccaatgcggcaggccgccgtccctgttcgt

SEQ ID NO: 28484 - DNA, 159 bp, Glycine max
  Clone ID: 701060220H1
cgaacatggtttccatctcgctcggtgtagcggttgcggcttacggcgaacaaattcgatgcatggggtgttaccctgccagcttatggcggttgcgtttgaggcaacacggttggttctgattcaaattttgctcaattcgaaggggatttcgctgaa

SEQ ID NO: 28485 - DNA, 158 bp, Glycine max
  unsure (1)..(158): unsure at all n locations; Clone ID: 701060221H1
acacattggatgattganatgaaaatccttttactagattggtaatgcacttgatctattgttccataactaataactaaagtgagctataagccagtttatcgtgaggagaatatgaagttntttgtnctcttgttgctgcagtagttttggtagca

SEQ ID NO: 28486 - DNA, 162 bp, Glycine max
  unsure (1)..(162): unsure at all n locations; Clone ID: 701060222H1
aggccgttaaggatgacaaacaacaaattatttgtagcagagaccagactgaaattaaagatgtttcctactgatgttaaactgcagagtagttctgagggttgttcacttgtnctcatctcataatgaacttaatacatctaaaaataatatggacaagac

SEQ ID NO: 28487 - DNA, 164 bp, Glycine max
  Clone ID: 701060223H1
gaagttacttctatgacaaagtctgcacattgtttcttctttttaggacaagtctaatgtttaggtttcaacaagtccattagttaagtgtctatttacaaaccaatctgtaagttctcacccatctacttgttgcaagctgacctcagaccattagataacta

SEQ ID NO: 28488 - DNA, 163 bp, Glycine max
  unsure (1)..(163): unsure at all n locations; Clone ID: 701060224H1
aacaacagtttcgatcgtctgcantgcaacacacacacgcacncagaacactagaatnattattcgcttcagggttggaggcacgaatttgcaccggtagcncctatcacttggatcacgcggaaccctttggctgaaacttttatcgcttcttttctgtttt

SEQ ID NO: 28489 - DNA, 165 bp, Glycine max
  Clone ID: 701060226H1
agtgtttgagattgttatcacatttgggttggtttacactgtgtatgcaactgcagtagacccaaagaaggggtcattgggtatcattgcacccattgctattgggttcgttgtgggtgccaacatcttagcagcaggcccattcagcggcggttcaatgaaccc

SEQ ID NO: 28490 - DNA, 148 bp, Glycine max
  unsure (1)..(148): unsure at all n locations; Clone ID: 701060228H1
tgaaaacccaaagtgcttctctacctctgtctttttctcncctcttgctatccttttggatagtggcactgctgcaagtgcaactccaagaagcgcagtgccaagccaccatgtttcaacattcaacagaagcctttttccttccact

SEQ ID NO: 28491 - DNA, 167 bp, Glycine max
  Clone ID: 701060229H1
ggaagagagagggagattctttgtttgctaccttctctcggaaaaatggttacgttcaggtttcaccagtaccaggtggttgggagggctcttcccacggaagcagatcagcaccccaagatctaccgaatgaagctctgggccaccaacgaggttcgcgccaagtc

SEQ ID NO: 28492 - DNA, 163 bp, Glycine max
  unsure (1)..(163): unsure at all n locations; Clone ID: 701060230H1
caacgaggaagagaaaaatgggagacacaaaggagagagctacgaagaaanccgcggcaaaatggcctcttcattcaaacccaaaaagaatcttcagattagccgcctccgagatttcgatctcttcacggtccagaattttttctcctccgctgaatcaaag

SEQ ID NO: 28493 - DNA, 169 bp, Glycine max
  unsure (1)..(169): unsure at all n locations; Clone ID: 701060231H1
ctctctcccttagtcaaagggattcatcgttcttcttcccaggntatntagaaaagcaaaatggtgaagatttgctgcattggtgctggatatgtggggggtcctactatggcagtcattgcacttaagtgcccatccattgaagtcgctgttgttgatatctctaaat

SEQ ID NO: 28494 - DNA, 170 bp, Glycine max
  Clone ID: 701060232H1
tgttgatcgagataactagaaacagtgtgatgaaaatgaaggtccttgttttcttcgttgctacaattttggtagcatggcaatgccatgcgtacgatatgttccctctccgaatgaacactggctatggtgcccgtactccggaggtgaaatgcgcaagttggaggctt

SEQ ID NO: 28495 - DNA, 159 bp, Glycine max
  Clone ID: 701060234H1
tcttcccttccaagacccttttgaagcaaccgatggaatttcagtttcttcccagattctaccttcttgtttccttatccattctgttccttgcaccctttcacgctcaagctaaaattaaagtgacttactgcgataagaaggcagactatgctgtga

SEQ ID NO: 28496 - DNA, 158 bp, Glycine max
  unsure (1)..(158): unsure at all n locations; Clone ID: 701060235H1
caagtatagtgtagtantccaatatttgtcaaccctttgagagttagaatggctgctgctattgaaatccccacaatagtgtttccaaactcctctgcccaacagaggatgccagtggttggaatgggatctgcccctgacttcacatgcaaganaga

SEQ ID NO: 28497 - DNA, 158 bp, Glycine max
  Clone ID: 701060237H1
cagagaggcttatggaaggagtaccgcacccaatacccagaactgtcgaagaggttttcaccgattttaagggcagacgcgctggtttgattaaggccctcactactgacgttgaaaagttttaccagcagtgcgatcccgagaaggagaatttgtgt

SEQ ID NO: 28498 - DNA, 133 bp, Glycine max
  unsure (1)..(133): unsure at all n locations; Clone ID: 701060238H1
caccatgtcacttgctgggaaaatcaccactgaaanccggggttcatgcaaccgctacaaagtggttcaacctcttcgcaacacaactccatcatgttcaaaacctaactgatagagtgcatggaaccaagct

SEQ ID NO: 28499 - DNA, 160 bp, Glycine max
  Clone ID: 701060239H1
caaatcaaagccatggccacctccaacttctctattgttctctccgtctccctagccttctttttggtgctacttaccaaggcacactcgaccgataccgtttctttcaccttcaacaagttcaacccagtccaaccaaacattatgctccaaaaagatg

SEQ ID NO: 28500 - DNA, 159 bp, Glycine max
  unsure (1)..(159): unsure at all n locations; Clone ID: 701060240H1
attgttgtaactntttnattcctaaatnctctaaaattcgnnattctaatttcgccaggggaaagagattgtttgtgtgtgagtnagtntggctggaaaaggcgagggtcctgctatcggaatcgatttnggaacgacgtactcttgcgtcggcgtgtg

SEQ ID NO: 28501 - DNA, 162 bp, Glycine max
  Clone ID: 701060242H1
tgactgaatgccaagccttggttttagcaccaactagggagcttgctcagcaaattgaaaaggttatgcgagcacttggagattatcttggtgtgaaggtgcacgcatgtgtgggaggtaccagtgttcgtgaagaccaacgcattctatcgagtggtgttc

SEQ ID NO: 28502 - DNA, 165 bp, Glycine max
  unsure (1)..(165): unsure at all n locations; Clone ID: 701060243H1
tnttctggtgttagtgtnaggtcgaatcttaatcctgtagctgatcgttttgtatccatgcttgctccagtgtggattttatcctctcctccataattttccaacaaaatcncaaacataatanatanaaattacatttntattcacaaaaatatcgggattcat

SEQ ID NO: 28503 - DNA, 163 bp, Glycine max
  unsure (1)..(163): unsure at all n locations; Clone ID: 701060244H1
gactactgataagaaggcattagaagctttcaaaaggtttggaagcaaactgactggaattgaaggaaaaatcaatgcaaggnacagtgatccaagtctgagaaaccggactgggccagttcagctgccatacactttgctccatcgttcaagtgaggaaggg

SEQ ID NO: 28504 - DNA, 149 bp, Glycine max
  unsure (1)..(149): unsure at all n locations; Clone ID: 701060246H1
tnattagtaattgtgnttgtgttgtgttgagcngagananggatcanganaggataagangaaagacggaatagggttaggnttagcgttagggttaggttgaggatgccgaagaacaagggaaagggaggtaagancaggaagagggg

SEQ ID NO: 28505 - DNA, 167 bp, Glycine max
  Clone ID: 701060247H1
cgaataaggtattatctgtcaatttacattggaaagggttaggatattcaattttacataattaaagataaaattcaacgatagctatagttttaaaattaaccatcgatttagttgcaactggaacacaggtttctttcaatgaaataatattaatatcaatttaa

SEQ ID NO: 28506 - DNA, 166 bp, Glycine max
  Clone ID: 701060248H1
tctcaaatcattctagtcctcatcttctgcattgtggtgaaccatgtaatgttgtaaatgctggttctttagatgccaatgataaaatcaaggataactcattattacatgcacataacttttgcaatgaatattctgataaattgatcagcaccagctcttatgg

SEQ ID NO: 28507 - DNA, 150 bp, Glycine max
  Clone ID: 701060250H1
agagagagatccatccatcaattccaatggccgatcagctcaccgacgaacagatctccgagttcaaggaagccttcagcctcttcgacaaggacggggatggttgtattaccaccaaggaacttgggaccgtgatgcggtcacttggcc

SEQ ID NO: 28508 - DNA, 159 bp, Glycine max
  unsure (1)..(159): unsure at all n locations; Clone ID: 701060251H1
caacagtccccatttgttccccagcaaaacaaaaacaccgcgtcttccccnnnnnnnnnnnnnnnnnnngaatcctcaatttnccgggaaaacccttcagaatggtttcccgggaaaataccaattggctcttcgattacggcttgatcgacgatannc

SEQ ID NO: 28509 - DNA, 156 bp, Glycine max
  unsure (1)..(156): unsure at all n locations; Clone ID: 701060252H1
ttatgcaaaanataattaaggtcttttcctttaaatgggctggttcaatgaaccgagaccactgcaggttcatggggatgggaggattaagaggctatgttttttaatcttccgatgttactgttgttttttttttaatttcaataaggatattat

SEQ ID NO: 28510 - DNA, 157 bp, Glycine max
  unsure (1)..(157): unsure at all n locations; Clone ID: 701060253H1
tgtaaagcagcggcggtgttaggtgctaggtgggcggagccatgngcggcgcctganacccctctctgttacgtaggtgtcgccaggcaatccgctgcttttcgcctcatgaagcaaatgnggtgggaagaaggtgaaggtctgggaaaagagaagc

SEQ ID NO: 28511 - DNA, 159 bp, Glycine max
  unsure (1)..(159): unsure at all n locations; Clone ID: 701060254H1
catttccttatctatcttcacctccatcttttaacagttcccctncgaaacttctgaagatgggtggcattgcattcggacgcttggatgattctttcagtttaacctcaatcaaggcctatattgctgagttccattcaaccttgctctttgtttttg

SEQ ID NO: 28512 - DNA, 159 bp, Glycine max
  Clone ID: 701060255H1
gcattggaagccattgaagctatccaaaattagggatggaaatgagtcaagtcgcttgtcaagggcctatggctcggcctatttaaggctcggctcggcttggcttgtttactataaatgtcaagctcaagctttttaaaaagtttttttagataaaaa

SEQ ID NO: 28513 - DNA, 161 bp, Glycine max
  Clone ID: 701060256H1
aaggaattctagcacaattgaatctggaaactggaattcccctttatgaagcggagcctcttcttctgtttttcatcctcttcaccctgctaggagccattggaggtttaggtgaccgtggaaaatttgttgatgacgaacctactactggaggtgttatt

SEQ ID NO: 28514 - DNA, 165 bp, Glycine max
  Clone ID: 701060258H1
tgataattttataaagagcccctaacggttttgttggagtgagatcaaggaaacagagaaaaaatggcatcctcaagagcttgtaccaaacccatgcatcttcctctctgccttcaccaagtcaaagttctctcatcaatatcatgtctccttcatcaacaccac

SEQ ID NO: 28515 - DNA, 163 bp, Glycine max
  unsure (1)..(163): unsure at all n locations; Clone ID: 701060259H1
tggatgattcctctattcaaatatataatgtccgtnttgatgaggttaaaagtaaactcaaaggccataataaaagaattactggtcttgctttctctcatgtattgaatgtattagtttcatctggagcagatgctcagatttgtgtctggaatactgatgg

SEQ ID NO: 28516 - DNA, 166 bp, Glycine max
  Clone ID: 701060260H1
gcaactcacactgtcttccttctctagggtttttagctcctccaaattcttcgcccaacatggttcttccaaaatgatattgatttgctaaatcccccggctgagcttgagaagaggaaacacaagctcaagcgtcttgttcagtcaccaaactctttcttcatgg

SEQ ID NO: 28517 - DNA, 163 bp, Glycine max
  unsure (1)..(163): unsure at all n locations; Clone ID: 701060261H1
ttttagcgcanttcttctagatttaaggnagatgggtaaggnaaaggttcacatcagtattgtggtcattggccatgtcgactctgggaaatccactaccactggtcacctgatttacaagcttggaggcattgacaagcgtgttattgagaggtttgagaag

SEQ ID NO: 28518 - DNA, 166 bp, Glycine max
  Clone ID: 701060262H1
cagattcagatggaaccacattcagggagtaccatctcttttcaacctccaaggtgtgacaccatttttacccagtcttggattcctcgctctcctagcaataccatcaggggacttgttattcttatgcatggacttaatgaacacagtggcagatatactcatt

SEQ ID NO: 28519 - DNA, 166 bp, Glycine max
  unsure (1)..(166): unsure at all n locations; Clone ID: 701060263H1
aatttcttattcaaataatctttgttgtctganatcacattganggnngcgtactaaagtcacctgttgctcctgagactgctggctccactgcagcggttgncattttaagccaaacccacatcatagttgcaaattgtggagattcaagaactgtcttataccg

SEQ ID NO: 28520 - DNA, 167 bp, Glycine max
  unsure (1)..(167): unsure at all n locations; Clone ID: 701060264H1
caatgtccagcattacatccaagtggtttggtgaaggagaaaaatatgtcaaagcagtcttttctctggccagcaaaattgctccaanngttatttttgttgatgangttnatagtatgttaggaagacgtgaaaatcctggtgaacatgaggctatgcgtaaaatg

SEQ ID NO: 28521 - DNA, 207 bp, Glycine max
  unsure (1)..(207): unsure at all n locations; Clone ID: 701060266H1
gnggcacctgcanacaactgtcttctngtnctctnccctnccttccctcgttctncaactncaggcattcggccgtaaaacccgttagnatncgagacgcactnaacgcactnaacgcattgtgtgtaacactggcattaacgttcaggaaaccccggttcggtgttgaaagggcggaaacgggaacttctcaaggattcggggctg

SEQ ID NO: 28522 - DNA, 156 bp, Glycine max
  unsure (1)..(156): unsure at all n locations; Clone ID: 701060267H1
caagaatggcacttcgttgcttggtgatgtccctttctgttctcttcactcttggtcttgcgagagaaagccatgccagagacgaagatttttggcatgctgtttggccaaacactncccattccaagttcattgcgagatcttctaaagcctggc

SEQ ID NO: 28523 - DNA, 155 bp, Glycine max
  unsure (1)..(155): unsure at all n locations; Clone ID: 701060268H1
tgacttctgcgagggctttttcccctcttgaaacagcttcactgaaagagtttctgttgttgggtggcaatgnnagttttgcgaccaaaacttccttctttcaaatttccaagtgccacttattgctgctcgatcactagtaggagctcatcata

SEQ ID NO: 28524 - DNA, 155 bp, Glycine max
  unsure (1)..(155): unsure at all n locations; Clone ID: 701060269H1
cctgactctcctctgtggcaccaccgctctctctgcgttgttggagaacaatcagaggaaaaagattggagggtgaaccgaaaaanacaattcagaaaatggagaacaacgcattcagagatcaaatcatggnggacaatgaacatgaagaaatg

SEQ ID NO: 28525 - DNA, 155 bp, Glycine max
  unsure (1)..(155): unsure at all n locations; Clone ID: 701060270H1
ggagagangtgcggtctctcaccgcacgcactagcactgtctcactctctcacgcacgcatcatctcaaacttgttcgcactttttcacggatcngatctaactaagttctcgccatgaatcgccaccacgatcccaatcctttcgaggaagaag

SEQ ID NO: 28526 - DNA, 158 bp, Glycine max
  Clone ID: 701060271H1
caaagatgaagatgatccacgttcttttcctctttgctcttgtctcgttcacttcccatgcttctgtcaatgatttctgtgtagcagacctaaaaggtccagatagcccttcaggctatcagtgcaagccacctaacacagtcacagtggatgacttt

SEQ ID NO: 28527 - DNA, 157 bp, Glycine max
  unsure (1)..(157): unsure at all n locations; Clone ID: 701060272H1
aaagcaataagtccctccttcctctgccttataattcttgtgacccttttngctggtagcattgaaagtgcaccagcaaacgtgaagccaagccattatgctgcacccttcaataggagtgtttttccttctggttttctatttggaataggctctg

SEQ ID NO: 28528 - DNA, 160 bp, Glycine max
  unsure (1)..(160): unsure at all n locations; Clone ID: 701060273H1
ctttcttggaactttgttactctcacacttgtctcgctccgtgcctttggtttcaaccattttnnncntncttctgcttctggtggccactgagatgatggggccaacaattgtggcagaagcaagaacttgtgagtctcagagccaccgtttcaagggg

SEQ ID NO: 28529 - DNA, 160 bp, Glycine max
  Clone ID: 701060274H1
gtttgttgtgagctataagctagtttatcgtgaggagaatatgaagttgtttgttttctttgttgctgcagtagttttggtagcatggccatgccatggcgcaggctaccaaaggttccctctccgaatgaaaactggctatggtgagcgttcttcggag

SEQ ID NO: 28530 - DNA, 162 bp, Glycine max
  Clone ID: 701060275H1
cagaaaccttcgccaagaaccgtgaactcgaagtgatccactccaggtgggccatgctcggagccttgggctgcgtcttcccggagttgctgtcccgcaacggggtgaagttcggagaagccgtgtggttcaaggccgggtcccagatcttcagcgagggtg

SEQ ID NO: 28531 - DNA, 162 bp, Glycine max
  unsure (1)..(162): unsure at all n locations; Clone ID: 701060276H1
gttgttggcatggatgccaccaacacctaccctgccgatttcattgccatcaacctccaaatccagaccaatgtcattgattctncttatcgcaacggtgctaagaaactattgtttttnggttcctcttgtatttaccccaaatatgcaccccaaccgatt

SEQ ID NO: 28532 - DNA, 163 bp, Glycine max
  Clone ID: 701060277H1
cttagacttagatggagtcgcgtggacactcaaacccgcttctgccattttccagcttcatccatcaacactgcgtccgcttagggtccgacctcgcgactcgtttggatgacacgaagcgagccctagctcaatctcatcataatcttgtcttccccaaaca

SEQ ID NO: 28533 - DNA, 165 bp, Glycine max
  Clone ID: 701060278H1
cttacggctaaattctcaaagatttaaactttgtctcagagtttaccaaattcacccaaccccagagagaaaatgtctctaatcccaaatttcttcggtggcagaaggagcaacgttttcgatcctttttccctcgacgtctgggaccccttcaaggattttcct

SEQ ID NO: 28534 - DNA, 164 bp, Glycine max
  unsure (1)..(164): unsure at all n locations; Clone ID: 701060279H1
cttgttctatctgtgacgagcatcatggcctcaagagcagtgttnttgttggctatgtgtgtgcttccggcgatggttgtggccattcgcccagcaaagaatcctttttgcgtgaagggtcgtgtctactgtgacccttgccgtgctggttttgagacctcagc

SEQ ID NO: 28535 - DNA, 165 bp, Glycine max
  Clone ID: 701060280H1
ccacttagagctttctgcggcgccctctatcattgtccgtcgtctcggtttcttcccttctcgtggcagatgaggttggaaggtcagaaaccgaaccgtctaacccacacaaacacaacccagatactataattgactagcacttttttgtttattcctaaatac

SEQ ID NO: 28536 - DNA, 156 bp, Glycine max
  unsure (1)..(156): unsure at all n locations; Clone ID: 701060281H1
gcttganctctgcgagatcttgagtcgccgatttgaaaagatgagtaagcttcagagtgatgctttgcgtgaagccatctcaggaatcatggccgattccaaggagaagaatcgcaaatttgtggagaccatcgaactccaaatcggtttgaagaa

SEQ ID NO: 28537 - DNA, 156 bp, Glycine max
  unsure (1)..(156): unsure at all n locations; Clone ID: 701060282H1
cttgaagctaggtatccatgaggattcacagaacaagggaaagantgctgaattgctcaggtaccacttccaccaagagtggtgatgaaatgacaagcctcaaggattatgtgaccaggatgaaggaaggtcagagtgacatctactacatcacag

SEQ ID NO: 28538 - DNA, 154 bp, Glycine max
  Clone ID: 701060283H1
caatgactctcaccaatgctttcctcgctccttccttcgccgttcacggtggtagggtttccgatccgcgctccattcctcttttctctcttccctccgacgccttcttccgctccccaacctccctctccagggacaagaacattctatatgc

SEQ ID NO: 28539 - DNA, 153 bp, Glycine max
  Clone ID: 701060284H1
agaaaatcctcacccattttcttcgtagccaaacactctgaaattctcagttatgtcgtggcaagcgtatgtggatgatcacccactgtgtgaaatcgaaggtaaccacctcactcacgccgctatcatcggccaagacggaagcgtttgggc

SEQ ID NO: 28540 - DNA, 155 bp, Glycine max
  unsure (1)..(155): unsure at all n locations; Clone ID: 701060285H1
actcatcacttactggaagccttgttgtgagtaagagaaaaggcttcctgcaccgagcncaccaacttgatacctctgattctttctttgcttagaattccacagaatatggagaancaaacttttcaatcactccccacctttggaattcaagg

SEQ ID NO: 28541 - DNA, 155 bp, Glycine max
  unsure (1)..(155): unsure at all n locations; Clone ID: 701060286H1
aaaagttagggttcacaacttttccttttccttttgcttgcgaatctgaatcaaataatcaatcatnccattcattattcatcaacncgtcggcgaagaaaatcacgctgaagagttcggacggcgaggctttcgaggtggaggaggcggtggcg

SEQ ID NO: 28542 - DNA, 155 bp, Glycine max
  Clone ID: 701060287H1
caagtatatcatttctgctattcttggatcatttggagttgcatgggtttgtgattattatgtttcagacaaaaagctatttggaggttctacccctggaactattacaaacaatgagtgggcagaagagactgacaaaaaattgcaggcatggc

SEQ ID NO: 28543 - DNA, 75 bp, Glycine max
  unsure (1)..(75): unsure at all n locations; Clone ID: 701060288H1
cactgtcttcgagantgagagtggtagggaaaacatggaaaccacctcggtttccaaaatgcagtttgcagcatt

SEQ ID NO: 28544 - DNA, 158 bp, Glycine max
  Clone ID: 701060289H1
atcaaccttgcatcagggttagggaatggctgctatcttagctcggaaatcactccttgctcttcgtgcgcgccaattggctgtaagcggtcaagggctgcacagctcccaaaactatggccttcgattaagtgcacactcctactctaccaaaagag

SEQ ID NO: 28545 - DNA, 160 bp, Glycine max
  Clone ID: 701060290H1
ctctcaacttcattttcctttcaaatagtaacactagagaacaaaagctctggctagaacttgtaatgtatatgccagccatcatcattcagaacaattagtgcatcatcctccttcaactgaagaactttatttaatttgctcctaaaatattttgtca

SEQ ID NO: 28546 - DNA, 159 bp, Glycine max
  Clone ID: 701060291H1
taccatagtccaaccaagtctattctactatccatcattgtctgccacatcttcccttagtactagaaatgaggctacaacaactcaacttgttctttctgttgctttgtgttgccaaagcaaacgggtctctgctcccattcatggatcctcccatca

SEQ ID NO: 28547 - DNA, 160 bp, Glycine max
  unsure (1)..(160): unsure at all n locations; Clone ID: 701060292H1
cgctggatttggaggagaacaagattgtngatttcatcaaatttgatgttgggaatgtagtcatggtgacgggtggaaggaataggggtcgtgttggagtgatcaagaacagagagaagcataagggaagctttgagactatccatgttcaggatgctac

SEQ ID NO: 28548 - DNA, 160 bp, Glycine max
  Clone ID: 701060293H1
ttgatgattgcaagggccacacatttatccagtttgaacctgctcctaggagaggagaacctgatgtcactcgtagaacgcctgattacttcttataatgtagctgttgaatgtcatactgttatatcatggttacctctactgcactaattttaggtag

SEQ ID NO: 28549 - DNA, 161 bp, Glycine max
  Clone ID: 701060294H1
cagggatggagttctttggctaattgacaggtacatggttgctcatgccgtatccttgagtcatcctggtattcgttgccgatgtcttgctgcttatggtgatgctgttagtgcagtaaaatgggcaagtagacttggaagagaacaccatgatgatttag

SEQ ID NO: 28550 - DNA, 162 bp, Glycine max
  Clone ID: 701060295H1
gtgagaatggagagcaaagaggaagatgtaagggttggagcaactaagttctcagaaaggcaaccaattggtacagcagctcagggtgacaaggactacaaagaaccacccccagcacctttgtttgagcctggtgagctaaagtcatggtccttctacaga

SEQ ID NO: 28551 - DNA, 164 bp, Glycine max
  unsure (1)..(164): unsure at all n locations; Clone ID: 701060296H1
cacgancancacatccaantggtttggtgaaggngaaaaatatgtcaaagcagtcttttctctggccagcaaaattgctccaagtgttatttttgttgatgaggttnatagtatgttnggaagacgtgaaaatcctggtgaacatgaggctatgcgtaaaatga

SEQ ID NO: 28552 - DNA, 247 bp, Glycine max
  Clone ID: 701060301H1
gctcagcgataagcagaaagtggaaatcgcgaaatggttcctcctcaattctcctcccggagaaatccaatacgttgccaaagatgtgaaatccattctcaacaacgacgatttgtacaaggaagccgcttccgaggcttttctcttttacaacaaatcgcacttgatttcccttccaatgtccaaccgaagcggagacgtactggttacttcttttggtgagcttgagggtaatgcattcttgaac

SEQ ID NO: 28553 - DNA, 295 bp, Glycine max
  unsure (1)..(295): unsure at all n locations; Clone ID: 701060302H1
caactctttacttanttacttanttaattataagcccccttatntttcgaaatgagaaagagactcttctcacacttcaattaattaatttactttacttttctttcctttgtttcaaagctagccatccattctttcaaagccttgtttgcttccttttgatttctctgcttttcaatacacaacacaaaagctctcttttttttcaaacactcttcgagaaaaatcagatgggtgaagagcaccacaaccatccaccgccaccggttcaggcacctccggcaggtcaccaccg

SEQ ID NO: 28554 - DNA, 290 bp, Glycine max
  unsure (1)..(290): unsure at all n locations; Clone ID: 701060303H1
ttaattgcaagantggcacttcgttgcttggtgatgtccctttctgttctcttcactcttggtcttgcgagagaaagccatgccagagacgaagatttttggcatgctgtttggccaaacactcccattccaagttcattgcgagatcttctaaagcctggccctgcaagtgttganatcgatgatcaccctatgcaaattgaagaaacacagtacccgaaaaccttcttctataaagaagaccttcatccaggcaaaacaatgaaagtacaattcagcaagctcccttt

SEQ ID NO: 28555 - DNA, 286 bp, Glycine max
  unsure (1)..(286): unsure at all n locations; Clone ID: 701060305H1
atttctccatttccattttctctctcacttttcaagaatcgtaagctatgggaaagtcttacccaactgtgagtgctcnttaccagaaggccgttgagaaggcgaagaagaagctcagaggcttcatcgctgagaagagatgcgctcctctaatgctccgtttggcatggcactctgctggaacctttgacaagggcacgaagaccggtggacccttcggaaccatcaagcaccctgccgaactggctcacagcgctaacaacggtcttgacctcgctgtaggttt

SEQ ID NO: 28556 - DNA, 286 bp, Glycine max
  unsure (1)..(286): unsure at all n locations; Clone ID: 701060307H1
aaccgtgttctctaatcttgtaattntctgtgtcgcttcgtggttcattcttctcgttcttgtgatctgttctattttggagtacttacaacactcctttgcaagtttaattaattaaagaggctaatcaattttcaattggactgcagcagatggctgaggagggttgcagggttactctaaatgtttatgacttgagccaaggactagcacggcagctttcaatgtcctttttggggaaagctattgaaggcatatggcacacaggagttgtggttatggtaat

SEQ ID NO: 28557 - DNA, 286 bp, Glycine max
  unsure (1)..(286): unsure at all n locations; Clone ID: 701060308H1
gaacaaaaaagtgtagtgggaaatggcaggtgcgggtgcaggaggagggtatggggacgcgaaccagaggatagactacgtgttcaaggtggtgctgataggggactcggcggtggggaagtcgcagatactagctcggtttgcgaggaacgagttcagcttggactccaagtccaccatcggtgttgaatttcagacgaggactttggttatcgatcacaagaccgttaaggctcagatctgggacactgccggccaagaacgatacagngcagttacagtgcat

SEQ ID NO: 28558 - DNA, 288 bp, Glycine max
  Clone ID: 701060309H1
ccgtgatggttggtggattcccaagaaaagaaggtatggagaggaaggatgtgatgactaagaacgtctccatttacaagtcccaggcttctgcccttgaaaagcatgctgctgccaactgcaaggttcttgttgttgctaacccagcaaacaccaatgcattgatcttgaaggaatttgctccatctattcccgagaagaacatttcttgtttgactagattggatcacaacagggcattgggccaaatctctgaaagactgaccgttcaggtttctgagtaaagaa

SEQ ID NO: 28559 - DNA, 287 bp, Glycine max
  unsure (1)..(287): unsure at all n locations; Clone ID: 701060310H1
ctttctgtgatgatttctttggagaagaatctatattttatgaaattttttcaggtccatttggtgtcattgatgagcacttcaattctatacttccaaattgttatgatgctataggtctcatgcttatgattcgaataatacacaagcatcagctcatcatgtctcggagacggattccatgcttggattcatatttagacaaggtcaatatatccttgtggcctcgatntaaattggtatttgacatgcacctcaacagcttgcgtaatgcaaatgtaagacat

SEQ ID NO: 28560 - DNA, 287 bp, Glycine max
  Clone ID: 701060311H1
ctggcagcttacagctatgatcatcaacaacgccccttttcctctatgattgattcgattcgattgaagtcgattccgtagagagtgagaaatcagatcacaataatcatcgatgggtaatttgttcgtgaagaagcccaaggtaacagacgttgataaagcaatcctcgcactcaagacccagagacgcaaactcgcccaatatcaacaaaagctagatgctgttattgaagcagaaaagcaagctgcacgagacttgattcgtgaaaagaagaaggacaggcctt

SEQ ID NO: 28561 - DNA, 289 bp, Glycine max
  Clone ID: 701060312H1
cagtgaaagagaatccgaggcgaagagaagagaaaaattaagatggaggggaaggagcaggatgtgtcgctgggagcgaacaagttcccggagagacagccgattgggacggcggcgcagagccaagacgacggcaaggactaccaggagccggcgccggcgccactggttgacccgacggagtttacgtcatggtccttttacagagcagggatagcagagtttgtggccacttttctgtttctatacatcactgtcttaaccgtcatgggagtcgccgggctaagtt

SEQ ID NO: 28562 - DNA, 290 bp, Glycine max
  unsure (1)..(290): unsure at all n locations; Clone ID: 701060314H1
gnacaatggccggaaaacatgtcggcggcgagggcttagcggcgaacctcgccggaatgtcgaagaatcagctctacgatatcatgtctcagatgaagaatctaatcgaacagaaccagcaacaggccaggcagancctcatacaaaatcctatattaaccaaagcgcttttccaggcacaaattatgcttggaatggtgcaagcacctcaagtggtttcaaaagttcggccaatggtttcacagagcaatcagcagtcagtacaactaatacaaaaaccaaaattcagc

SEQ ID NO: 28563 - DNA, 294 bp, Glycine max
  unsure (1)..(294): unsure at all n locations; Clone ID: 701060315H1
gtgatttggagtttggagcgactgaactaatcattaatttgcactcgctgtttcagcttcatcacccttcttttgcatcatttatatctcttgagaaatggcacaagaaacctttctattcacatctgaatctgtaaacgagggtcaccccgacaagctgtgcgaccagatctctgatgcagtacttgatgcgtgccttgaacaggaccctgacagcaaggttgcctgnnagacatgcaccaagaccaacatggtcatggtcttcggagagatcacaaccaaggccacgtagat

SEQ ID NO: 28564 - DNA, 296 bp, Glycine max
  unsure (1)..(296): unsure at all n locations; Clone ID: 701060316H1
agagcgagagaacaagaacataagggaaccacagcggcggtaacagaagaacaagcagagaatgggtcgagtgagaacgaagacggtgaagaaatcctctcggcaggtgatagagcgtcactacttcgcgcatgaccctggacttccacacgaacaagaagngnctggaggaagtggcgataatcccgtcgaagaggctaaggaacaagatcgcggggttctcgacgcacctgatgaagcgcatccagaagggccctgtgcgcggcatctccctcaagtccaggaggagagcgcga

SEQ ID NO: 28565 - DNA, 294 bp, Glycine max
  unsure (1)..(294): unsure at all n locations; Clone ID: 701060317H1
ttcctaccatagtctgaggnaagtgagtnagananagagatcgcagacacagagcagaatggcttctacccaatgtttcttgcaccaccatgctcttaccacccctgccagtgccagatccccatcactacgcatcttggttagcaccaagcctaaccagcttgtttgcaaggcacagaaacaacaaacaccacaagaggatattgatgtcagcccaatctctcgccgtttagctctaactgtgctcattggtgctgctgctgttggctccaaagtccaacctgctgtgcagcc

SEQ ID NO: 28566 - DNA, 288 bp, Glycine max
  Clone ID: 701060318H1
tgagctataagctagtttatcgtgaggagaatatgaagttgtttgttttctttgttgctgcagtagttttggtagcatggccatgccatggcgcaggctaccaaaggttccctctccgaatgaaaactggctatggtgagcgttcttcggaggtaaaatgcgcaagttttaggcttgctgtggaagcacacaacatccgagcctttaaaaccattcctgaagagtgcgttgaaccaacaaaggactacattaatggcgaacaatttagatcagactctaaacagttaa

SEQ ID NO: 28567 - DNA, 286 bp, Glycine max
  unsure (1)..(286): unsure at all n locations; Clone ID: 701060320H1
cttaacttcacacacagacacggtntttccaccacaccatagcattnagtactagtagattaaacgccaaagaaataaattactcactttcacgtaaaccataacgtgcttccaccgcaaccaaccaccatgggtgccgttaggtccataacggtgttgctactagtgttatttatggccatgagctccggcgtgcgctcgtgtccgccgtcggacagggcggcgctgctggcattcaaggcggcgctccacgaaccctacctgggaatcttcaactcgggnccgg

SEQ ID NO: 28568 - DNA, 282 bp, Glycine max
  unsure (1)..(282): unsure at all n locations; Clone ID: 701060321H1
acaaaccagagtaataaaaatcttcaacttttagcagtttttttttttctatattgcagaanccatggatttcagggtgatgggtttggattctccattgttccacacgctgcaacacatgatggacatgtcagaggacgctgcaggggacaacaagacatacagtgctccgacacggtcatacgttcgagacgccaaagcaatggctgcaacacctgcggatgtgaaggaatatcccaactcctacgtattcgagattgacatgccagggttgaatctggg

SEQ ID NO: 28569 - DNA, 286 bp, Glycine max
  unsure (1)..(286): unsure at all n locations; Clone ID: 701060322H1
gtaacaccactgcattttcaacatccactagaccccttaaccaaacaagagataagtcttgtccaaaccatagtccaaaacaagtacccaagctcaagtaacaggttgagcttccactacattggactcgnccgaacctgaaaaggatgccatcctcaaatgggaatccatcaaaccaactgttataactgtccctcgcaaagccttggccattgttataatcaacagccaaacccacgagatcttaattgatctaaaggcaaggcgcattgtctccgaaatattc

SEQ ID NO: 28570 - DNA, 285 bp, Glycine max
  Clone ID: 701060323H1
cgcgagttggtctaccgtgtagaaaagaatggaggggttgttaatcctacaactgggcagaagtccgatatcttgattcagatacctaatggacatgcacctaaaactgatgctgttcaagcagtcaagaagatgaagattgaggaaattgatgatgatgaaatggaagagtgaattttatgataaaatgtaattagtttgatggcgcaactcctcttgaacttccttctttgtcttttatgtgttttgaatgggtgtgagtgaaaattgaagaagtccttgtat

SEQ ID NO: 28571 - DNA, 283 bp, Glycine max
  unsure (1)..(283): unsure at all n locations; Clone ID: 701060324H1
ttagatctgtacccgcctagcaattgatttggaaaagtccaagcttcaaagatgaggtattcattctctcatcttcaacttatctttgttcaaatttcttagtttgttcgtacgttttattgtgaaagcaatgttgttgattgtntttcgttgatagctgatgtgtactttgcgtggtcntactgtgtatgatgttaatnnaaattgttcggtgaaaattgtgcatttggaaaatctatgttttgtgttttctgatctgtattgggtgttggttgtatagtaa

SEQ ID NO: 28572 - DNA, 285 bp, Glycine max
  unsure (1)..(285): unsure at all n locations; Clone ID: 701060325H1
ctgattctgaagaggaaganaacgataatgagcaaaaagagaaangcatctcaaacaagaagaaaaagcttcaacggaggatgaaaattgctcaactgaaacaaatttgctcaaggccagatgttgttgaggtgtgggatgctactgcatcagacccaaagttgctggtgttcttaaagtcttataggaatactgtacctgtacctaggcattggtgccagangagaaaatttttacaggggagctgctgaggcaatcaccaatcctggacttgtaggttttggc

SEQ ID NO: 28573 - DNA, 286 bp, Glycine max
  unsure (1)..(286): unsure at all n locations; Clone ID: 701060326H1
ttcagangcttgaacctaggccatccccaaaatcccattccatagtgaaggagtatgggagtagattactataagantttgcaggttgacaagcatgccaccgatgaagagttgaagaaagcttacagaaagcttgcaatgaaatggcaccccgataagaatccaaccaataagaaagaggctgagactaagttcaagcagatatccgaagcttatgaggttctgagtgatccccagaagagagcaatctatgatgaatacggagaagaagggcttaaaggcaagt

SEQ ID NO: 28574 - DNA, 286 bp, Glycine max
  unsure (1)..(286): unsure at all n locations; Clone ID: 701060327H1
cgnggattagagggtcgccacgtttagcaataaccaaaccctctctactcttttttcttctccttctcttcgctagggttttagcttcttcctcttcacttcgttctttttcgcctctacaatgagcaacgacaaggacacattcaacgtcgccgatctcacttctgctctcaacgaggacaatagagcagaccttgtcaatgcncttaagagcaagatacagagtttggctggacaacactcggntattctagagtctctgtcgcccaatgtccgaaaggtgttg

SEQ ID NO: 28575 - DNA, 287 bp, Glycine max
  unsure (1)..(287): unsure at all n locations; Clone ID: 701060328H1
agaatgtaactaaaactattctaattgcgtctcagtttctctcaggttggcttcccctctcccctatcgctctctccctaatcgcatctcaacttgtcgtcgtcggtgattcattctccctaatcataaccctaatcgcatcttaaatcgaactcaatcagagacaaaacanngttgtngattctgttacanaacatagcacggtggacaaacgttaaacaaggctacagatctttgattcagttganagcagattgaaggggagtaaaacaggaacaggcaacctg

SEQ ID NO: 28576 - DNA, 287 bp, Glycine max
  unsure (1)..(287): unsure at all n locations; Clone ID: 701060329H1
cnaaaacatggtaccctctattgttggttgtngctgacactcttcatagtcgcaaagtaggtgactagcagtagcatgtgagtnaaggagcctgcagtttttttttatcgtactgtactatgtttgttatgtaatggtatcatggtaagctgaccaaagtgacggatttgttccatcactgccttcagggaaagaagttaactcatagcaggtccatacaaacatgatgactccaaacttgaacttggaacctgaaaatcattcagaaggcagcagccagtggcttt

SEQ ID NO: 28577 - DNA, 289 bp, Glycine max
  Clone ID: 701060330H1
caagttcaaagatgaagatgatccacgttcttttcctctttgctcttgtctcgttcacttcccatgcttctgtcaatgatttctgtgtagcagacctaaaaggtccagatagcccttcaggctatcagtgcaagccacctaacacagtcacagtggatgactttgtgttctctggctttgtagctggaaacaccacaaacactttcaatgctgcattaacctccgcatttgttactgattttccaggtgtgaatggtcttggtgtatctgtggcacggttagcatagcc

SEQ ID NO: 28578 - DNA, 249 bp, Glycine max
  unsure (1)..(249): unsure at all n locations; Clone ID: 701060331H1
tctatgtttcaactntcaatgctccgagtcactcgctattcccactagtagcacccaaacaaaacccaataccacacgcaataacaganaaacatgcggtgttgcattccgacgttgttggccgtaatcaccgtactgttgtcggcggtgcacggcgttttccttcctctggagcggagattcctccgacgagccaccgcgtggaggtggcggcgctgagggcccgcgatagagcccgccatcccgcat

SEQ ID NO: 28579 - DNA, 171 bp, Glycine max
  unsure (1)..(171): unsure at all n locations; Clone ID: 701060332H1
cgnttcttgctgctagaattaatattccttcatccaatattttgtactggatgaatgtgtttgtctgtggtggtgttgctgagctatttaatttgatttagatatgtggaggtgaaactctactgcttggttaaatatgnangactttagagctcaagcatattttaacag

SEQ ID NO: 28580 - DNA, 290 bp, Glycine max
  unsure (1)..(290): unsure at all n locations; Clone ID: 701060333H1
tttattcattttccgatggcttctgcagatgttgagtaccgttgctttgtcggtgggctcgcttgggccactgacgaccatgccctcgagagagccttctctcagtacggcgaaatcgttgaaacgaaggtctgtttgttgcaggcatcacatctgatntcacacgattcggattcggaantttctcgatcccgttctgatctgtgatctctgatctgtttgcgttacttgatcttatgatacttgtgttactatatgattctnttattactcacgccaatagttatcaa

SEQ ID NO: 28581 - DNA, 288 bp, Glycine max
  Clone ID: 701060334H1
cagagtcagagagagagattcactgaaacagagcgcagaagaaaatacataaactaatccagaaaatgagcagcggcgctggaaaggtggtgtgtgtcaccggcgcttccggttacattgcttcctggatagtcaaattcctcctcaatcgcggctacaccgttaaggccaccgttcgcgacacaagtgatccgaaaaaaataaaccacttggttggcctcgacggtgctaaggagaggctgcacctctacaaggcgaatcttcttgaagaaggttcctttactctgt

SEQ ID NO: 28582 - DNA, 285 bp, Glycine max
  Clone ID: 701060335H1
ctcagaattctctaaaagagatctttttctgctctttgaagaaagaagggtctttgcttgattttggagatgtctctgctctcagatctcatcaaccttaacctctccgataccaccgagaaggtgatcgcagagtacatatggatcggtggatcaggaatggacctgaggagcaaagcaaggactctcccaggaccagttagcgacccttcagagcttcccaagtggaactatgatggttccagcacaggtcaagctcctggtgaagacagtgaaggattttat

SEQ ID NO: 28583 - DNA, 282 bp, Glycine max
  Clone ID: 701060336H1
caggagatccctcgacatcgagagaccaacctacaccaacctcaacaggctcatttcccagatcatttcgtccctcaccacttccttgaggttcgatggtgccatcaatgtggatatcactgagttccagaccaaccttgtgccctaccctaggatccacttcatgctttcgtcctatgctccggttatctctgccgccaaggcctaccacgagcagttgtcggtgccggagatcaccaatgccgtgttcgagcccgccagcatgatggccaagttgatcca

SEQ ID NO: 28584 - DNA, 262 bp, Glycine max
  unsure (1)..(262): unsure at all n locations; Clone ID: 701060337H1
gaaantcatatnaattagttagcacnggntcactacnaacacctnccntctgannnattaactgtnannttaagcttttatattgaancgtgtcaatggccgtnccngtgaggactttagctcttggngctntgcntgttgccattaatgcnatggngtgtgaaagtagagnggtaagaanggnacttggtttggaccttggtggggtgggaattggggtgggtgctngggntggattaggcctngctngtgcagntctggt

SEQ ID NO: 28585 - DNA, 283 bp, Glycine max
  unsure (1)..(283): unsure at all n locations; Clone ID: 701060339H1
agaganagagatcacatagcngnatggcttctactcaatgtttcttgcaccaccatgctcttaccacccctggccagatccccatcncaacgcntcatggttagcaccaagcctaaccagcttgtntgcaaggcacagaagcaagaggatattgatgtcagcccaatctctcgccggttagctctaaccgtgctcattggtgctgctgctgttggctccaaagtccaacctgctgatgcagcttatggggnagctgccaatgtgtttggnaagccaagncaga

SEQ ID NO: 28586 - DNA, 282 bp, Glycine max
  unsure (1)..(282): unsure at all n locations; Clone ID: 701060340H1
tttctncgaggcttaaganacctcgcagaaccaaagnaaactcactctcacacactttggttcacaaaaacctttcacttcncttttcaatnnntctagttccttctcccatattatagtacccttttatcccaagttacttaaatttaaaacctttattactgctcatacttgtntttcgctttgttaagttttaaganaaatggaggcacattctccagttatagccaagaagctatggaatgtgttgaggatcaccttcttcatgatcaggagggcttg

SEQ ID NO: 28587 - DNA, 283 bp, Glycine max
  unsure (1)..(283): unsure at all n locations; Clone ID: 701060341H1
ctcanacatggcntccactatgaagcaggttccctctnatttcatcaggccactcggtgaccgtccaaatcttcaaggcgtcgtccaatcctcagatgtttgcattcctctcatcgatctccaagaccttcatggccccaatcgctcccacatcatccaacagattgaccaagcttgccaaaattatggattttttcaggtgacaaatcatggagttccagagggtgtgattganaagataatgaaggtgacaagggagtttttcggttaccagaggtgagaa

SEQ ID NO: 28588 - DNA, 283 bp, Glycine max
  Clone ID: 701060342H1
ctcctgaagagtgcgttgaaccaacaaaggactacattaatggcgaacaatttagatcagactctaaaacagttaaccaacaagctttcttttatgctagtgaacgcgaagtccatcacaacgacatatttatattcggcatagataacaccgtactctctaatatcccatactatgaaaaacatggatatggggtggaggaatttaatgaaaccttatatgatgaatgggttaacaagggcgacgcaccggcattgccagagactcttaaaaattcaacaag

SEQ ID NO: 28589 - DNA, 282 bp, Glycine max
  Clone ID: 701060343H1
ctttgaacgccgaagaaggttcatccaatccccgaagcccttcaccgcattgcaaccatgtcgaggagaaaggtcagagagccaaaggaagaaaacgtgactctgggcccagctgttagagatggtgaacatgtctttggcgtcgctcgcatctttgcctccttcaatgataccttcattcatgtcactgatttgtctgggagggaaacgcttgtccgcatcactggtggaatgaaggttaaggctgacagagatgaatcgtctccttatgctgcatgcttg

SEQ ID NO: 28590 - DNA, 283 bp, Glycine max
  unsure (1)..(283): unsure at all n locations; Clone ID: 701060345H1
ctcatatggaggataatgttgttgatgatgtaaattggaatgantctggtgctctagaaggagaacagccagaagaagtttttgaaaatgaaggaagtgagtggtatcagnnnnataccgaatggagaaatagcactgaggaaaatgtcgatgataatcagctcagcaatacagcaaatgagtggcctgacaacagtttggcaaacgaggatggagaaaactctcgtctgcaagaatctcatgaagtgtggcaagaagatggtggcttccaagaggtgtggaa

SEQ ID NO: 28591 - DNA, 289 bp, Glycine max
  unsure (1)..(289): unsure at all n locations; Clone ID: 701060348H1
ctataagctagtttatcgtgaggngaatatgangttgtttgtnttctttgttgctgcagtagttttggtagcatggccatgccatggcgcaggctaccaaaggttccctctccgaatgaaaactggctatggtgagcgttcttcggaggtaaaatgcgcaagtnttaggcttgctgtggaagcacacaacatccgagcncttaaaaccattcctgaagngtgcgttgaaccaacaaaggactacattaatggcgaacaatttagatcagactctaaaacagtaaccaac

SEQ ID NO: 28592 - DNA, 288 bp, Glycine max
  unsure (1)..(288): unsure at all n locations; Clone ID: 701060349H1
cagttatctttatctacgcaagagaagaatagaaaatggatatcaggttgatggatttggactctccattgttcaacactctgcaccgaatcatggatctgacagaggacgcagagaagaacttgaacgctccgacgcggacatacgtgcgcgacgcgaaggcaatggctgcgactcctgcggacgtgaaggagtaccctaactactacgtgttcgtgatcgacatgccaggcctgaaatccggggacattaaggtgcaggtggaggatgataacgtgctntgataag

SEQ ID NO: 28593 - DNA, 285 bp, Glycine max
  unsure (1)..(285): unsure at all n locations; Clone ID: 701060350H1
ctctccctgcaggtgttgnaatcgatgaactccctaagcaaattnntgatacacagtacccaaaaacattcttctataaagaagaccttcatccaggcaaaacaatgaaagtacaattcaccaagcgtccctatgcacaaccttatggtgtatatacatggttaacggatattaaagacacctctaaagaaggatatagttttgaagagatatgcatcaagaaagaagcgtttgagggagaagagaagttttgtgcaaaatccttgggaacagtaattgttttgc

SEQ ID NO: 28594 - DNA, 280 bp, Glycine max
  unsure (1)..(280): unsure at all n locations; Clone ID: 701060351H1
ttgagatagctagaagcaataagatgaaaatgaaagtgcttgttttgtttgttgctacagttttggtagcatatgaatgccatggctcagactaccagaagttccctctccaaatgaaaactgggtttggtgggcaatacagcaatgaggtggcatgtgccagttggaggcttggcgtggnagcaaacaacgtagtcaagtggcaaactgttcctgcagcttgcggcgagtacatagctgactacgttctaggagaccaatatagatcagatccaaaact

SEQ ID NO: 28595 - DNA, 281 bp, Glycine max
  unsure (1)..(281): unsure at all n locations; Clone ID: 701060352H1
caactttcaacgccagtncacactctctgcttcgcgtgtaccaacaagtgcaagttcgaatcaatggccagcgctcagctcacagcaatagcgtcatcgatctctacggcgtcgtttgaagggcttcgaccttccgctgttcagtttgcttccacgggcagaattagaattggcaatctctcccaaaggtccttccggggcttggttgtcaaagccgccaccgttgttgcccccaaatacactgcgataaagcctctgggagatagagtgctaaaaaaatt

SEQ ID NO: 28596 - DNA, 280 bp, Glycine max
  unsure (1)..(280): unsure at all n locations; Clone ID: 701060353H1
cnnccccactacgagaccctttgtggagacttttgcgaaggatcaaaatagattctttcaggtttttgctagggccatgcagaagttgagtctcttgaatgtgcagaatggtttggaaacagcagcgaccagccattgccatcaactgtgttatcaaaacgtcagatgttggatagatttgaacagcacactctcaagtgttcatcatgtaaagcagcatatgagggattccaaacatggcagaaagtcctaattggggcaacagttgtgtttgtgcaac

SEQ ID NO: 28597 - DNA, 259 bp, Glycine max
  unsure (1)..(259): unsure at all n locations; Clone ID: 701060354H1
ttctcttctcgcgtctcactctcacccgatacagtttcgnnctctctctctctccgattaccgnacaacaccgtatcnccgttcagggtttcttcgctcctctttggatcttcctcccttcgcgtcgttcgctttgattcgttaattttttntcttgcttctcctgtcttggctcgagatccgggcnaagcacagaagaatccgattctgatttgcatttcgtactcactggtttggcttgtttttggctcttgtatat

SEQ ID NO: 28598 - DNA, 278 bp, Glycine max
  unsure (1)..(278): unsure at all n locations; Clone ID: 701060355H1
agctagctcctcgaaaatgctggcacgcctcgccgcgagtcgcttcaacgagatccgtcagattttccgtcagccttctagggctttctcgaccgctcngaactaccaccttgacacaccggacaacaaccctaaacttccatgggaattcaccgaggccaatcaagcaaaggttaaggagattttgtctcactatccatccaactataagcaatctgctacaattcctcttttggatcttgcccagcagcagcatggtggctggctcccttttctgc

SEQ ID NO: 28599 - DNA, 281 bp, Glycine max
  unsure (1)..(281): unsure at all n locations; Clone ID: 701060356H1
cgcacgaatatcttgttgtttggngcgatccgagaaaaactctgtnaacatgttggtttaccaggacctccttacaggtcgatgagcttctctctgactccttccgttacaaggaaattgagaatggaatgctgtgggaagttgaggggaagtgggttgttnnaggagcagttgangtagacattggtgcaaacccttctgctgagggtggaggagaagatgagggagttgatgatgcagctgttaaggttgttgacattgttgacacattcaacttcagg

SEQ ID NO: 28600 - DNA, 280 bp, Glycine max
  Clone ID: 701060357H1
tccattctcttcaacctaacgcagcatcgctatactcttcattccatggctttgcccaatcagcaaaccgtggattaccctagtttcaaactcgttatcgtcggtgatggtggcacaggaaagacaacctttgtgaaaaggcatctcaccggagaattcgagaagaaatatgagccaaccatcggtgtggaggttcacccattggattttttcacaaactgtggaaagattcgattctactgctgggatactgctggacaggagaagtttggtgcctcag

SEQ ID NO: 28601 - DNA, 281 bp, Glycine max
  unsure (1)..(281): unsure at all n locations; Clone ID: 701060358H1
gctaacttaagggaaatgagatggccaatggcaacactagtcatcgcttcaagctcttgcttttccttctaactctgcactcttcattcgctgagattttcttcgaagagagattcgaagatggatggaagagccgttgggtgctatccgattggaaaaggagtgaaggaaaagcgggtaccttcaagcacacagcaggaaaatggtctggggatcctgatgacaaaggtcttcagacatataatgacgccaagcattttgccatatctgcaaaatncccg

SEQ ID NO: 28602 - DNA, 278 bp, Glycine max
  unsure (1)..(278): unsure at all n locations; Clone ID: 701060359H1
tttgttgtgagctataagctagtttatcgtgaggngaatatgaagttgtttgtnttctttgttgctgcagtagtnttggtagcatggccatgccatggcgcaggctaccaaaggttccctctccgaatgaaaactggctatggtgagcgttcttcggaggtaaaatgcgcaagtnttaggcttgctgtggaagcacacaacatccgagtcttaaaaccattcctgaagagtgcgttgaancaacaaaggactacattaatggcgaacaattagatcag

SEQ ID NO: 28603 - DNA, 282 bp, Glycine max
  unsure (1)..(282): unsure at all n locations; Clone ID: 701060360H1
gttgtcaaagtcatgggcaagaacaaagtccttgtcaaggtccacccagaaggaaaatatgtcgttgatattgacaaaagtattgacattacaaagattactccatccactagagttgcacttcgcaacgacagtnatgttcttcacttagttctgccaagtaaagttgatccattggtcaatctgatgaaagttgagaaggttcccgattctacttacgacatgattggtggtttagaccagcaaattaaagaaataaaagaggtcattgagtaccaatct

SEQ ID NO: 28604 - DNA, 281 bp, Glycine max
  Clone ID: 701060361H1
ctcacaatcacatcgccaccgattcacctctctctcggcgcatagttcgtgccttcctctacttcctcaactctggtattcctcttctcctcattcattcctcaatatgcaacactacccaattgaattgcctccgcaaaatttcatctttgtctcgtgtttatgctttgggagtcattttatgaactgggtcgatttgttttttcgtgattaattaggttcgagttgccaattgtcgttttaatctgctagtatgtgtcagggttgagaaagtgttgttt

SEQ ID NO: 28605 - DNA, 284 bp, Glycine max
  unsure (1)..(284): unsure at all n locations; Clone ID: 701060362H1
ctgaaatggctgatacttgaactgaacaagaaaggagaagctggnggagtgaggttggaagaaatgctggaagagatagaaagaggcagagaagagaaggttgatcagaatgagaggggatggaagccttctttggagagcatcttggaggctcctgaattgcttgagatggacaccacatgattaatgatcattttcttaattactacttttcatcttaattattttcatcccctgttttgtagtctatagaccttttttggaatgatctacgttttaaatct

SEQ ID NO: 28606 - DNA, 286 bp, Glycine max
  unsure (1)..(286): unsure at all n locations; Clone ID: 701060363H1
cngaactcatctcactacattaatattcccttggntntcattaatcngtnacatttagcttttnttattgaaccgtgtcaatggccgctactatgaaggctttagcttntgtcgcnttgcntgtcaccattaatgcaatantgtgtganagtagagtggcgaganaggnccttggattggaccttggtggggtgggaattggggtgggtgctggggttggactaggccttggtggtgngggtggtgctggttctggtgcaggtgcaggctctggctctgctctggt

SEQ ID NO: 28607 - DNA, 291 bp, Glycine max
  unsure (1)..(291): unsure at all n locations; Clone ID: 701060364H1
caanaacactctctcttctcgctcttngcttttcgctcttcantcactctcattcattcatttccaccgttcatggatccagtaagcgtgtggggtaacangcccttggcgaacggtggatcccgagatccatgacctcatcgagaaggagaagcgccgtcaatgccgcggaatcgagctcatcgtctccgagaacttcacctccttcgccgtcatcgaggccctcggcagcgctctcacgaacaaatactccgagggcatgccgggcaancgtactacggcggaatgaat

SEQ ID NO: 28608 - DNA, 281 bp, Glycine max
  unsure (1)..(281): unsure at all n locations; Clone ID: 701060366H1
cacctactacaattgttaaagtcctttcttgttatagcaaaaatgaagcttgtctttgccaccctactgttatgtnctcttcttctaagctcctctttcttggagccagtcatcgcctatgaagactcgtcttattgcagcaacaagtgttcggacagatgctcatcggcaggggttaaggataggtgtctgaggtactgtggaatatgctgtgctgagtgcaaatgtgttccttctgggacctatgggaacaagcaccagtgtccttgctacaggacaag

SEQ ID NO: 28609 - DNA, 241 bp, Glycine max
  Clone ID: 701060367H1
caccatgtcacttgctgggaaaatcaccactgaaatcggggttcatgcaaccgctacaaagtggttcaacctcttcgcaacacaactccatcatgttcaaaacctaactgatagagtgcatggaaccaagctgcatcaaggtgaagactggcatcacaacgagacagtcaagcactggacttataccatagatggtaaggttacaacatgtctggagagtattgaatccattgagaacaga

SEQ ID NO: 28610 - DNA, 275 bp, Glycine max
  unsure (1)..(275): unsure at all n locations; Clone ID: 701060368H1
ctcatttctatttctctctccccaaaagcttttgcttctttctgtatatggaaggcccttaaannnnnnnnnnnnnnnnnnnnnnnnnnnnnnnnnncacttttgcattttcttgtgaaaaaaaaaatcctcagaaccaaaatcggttttcttctgtctctgatctctcaaagcttcaaattctccttgtttggtttgtttgtgtgtttggagtatgatgtcgccgccggggtggtaacggaggaggaggggcgganaacgtgtcgtcaccgtgg

SEQ ID NO: 28611 - DNA, 277 bp, Glycine max
  unsure (1)..(277): unsure at all n locations; Clone ID: 701060369H1
agcagagatctagcgtattctctcgctctttcttncactgtcacagagccacatccatgggcttcccagccaacggcgncctctgcggcccagcccctaaacttcctcatctacggccgcacgggctggattggcggcctcctcggctccctctgccgggcccagggcatctccttccattacggctcgggccgcctcgagaaccgggcctccctcgaaaccgacatagccctcctcaagccctcccacgtcttcaacgccgccgggtcagggccgt

SEQ ID NO: 28612 - DNA, 277 bp, Glycine max
  unsure (1)..(277): unsure at all n locations; Clone ID: 701060370H1
gggaaattgacagaggcagacttgagatttttatttgttacctaagcaggcttgttatctcgaccagaaatttctcgatgcttctggtcattcattttgcagaacaatattttctatataantaanaaatattgttctgcaaaatgaatgancagaagcatantttttatttatatagaaaaattgcattagctgtaaattattggcccaccctagttgccacagcccaagaaacacagcactgtactgttgaaaagtggattttcagctcaggttt

SEQ ID NO: 28613 - DNA, 277 bp, Glycine max
  unsure (1)..(277): unsure at all n locations; Clone ID: 701060372H1
cacanacggcgtcttcataaacgcctttcttctccgtttccgtttcctcgntcgaattcgctttttgatctgcgaaaatgagagagtgcatctcgntccacattggtcaggctggtatccaggtcggaaatgcttgctgggagctctactgcctcgagcacggcatcgggcccgatgggcaaatgccaagtgacaagacagttggcggtggtgatgatgctttcaatactttcttcagcgagactggtgctggaaagcacgtgccacgtgatgtttt

SEQ ID NO: 28614 - DNA, 280 bp, Glycine max
  unsure (1)..(280): unsure at all n locations; Clone ID: 701060373H1
cgcatgtncaaccattagccaataaccaaaccccccaacacacatatcagaacacacagcacaacacanttcaagtttctcgtttccctaaacagatcctaacaacacaacacaaacacggaganacaaaaatgcacgcaaagacagactcagaggtaacaagcctcgccgcgtcttcccccacgcgctcccctcnacgccgtcctctttactacgttcagtctccctcgcgagattctcacgacggcgagaaaaccgcaacgacgtcgtttcatccacg

SEQ ID NO: 28615 - DNA, 277 bp, Glycine max
  unsure (1)..(277): unsure at all n locations; Clone ID: 701060374H1
tttgaagtttgatgaagaaccaaattatgcaaganatatatcccttttcgatggaattgtgggcccaaatccagatatcaggccaataaacactgaaggtgctcagaagcttatatgtcaggttggacataagagggggcgattgaccatagaagaagatgatgatgaacaaccaaataagaaggttcgaatgggaatgcctgctacacaatggattagtgtttacaatgctcgtcgaccaatgaagccaaggtatcattataatgttgcgatgtgc

SEQ ID NO: 28616 - DNA, 276 bp, Glycine max
  Clone ID: 701060375H1
ctgttttgaacattcacccaatttgcagagttccaagttatatacatacactgcataattaagagaaaatgtctctgattccaagtttcttcggtggccgaaggagcagtgttttcgaccctttctccctcgatgtgtgggagccctttaaggattttccatttcccagttctctttctgctgaaaattcagcctttgtgagcacacgagtggattggaaggagacaccagaagcacacgtgttcaaggctgatattccagggctgaagaggagga

SEQ ID NO: 28617 - DNA, 278 bp, Glycine max
  unsure (1)..(278): unsure at all n locations; Clone ID: 701060376H1
gcgaaatgcgatacttggtgtgaattgcngaatcccgngaaccatcgagtctttgaacgcaagtcgcgcccgaagccattaggccgagggcacgcctgcctgggtggantgggcccaggctgcccacgcctggacncaggattcagtttaggctctatgctttggatgatgagctcaagcttggtaacaagttgacgaaggagaagttgttggaagataccattgaaggacatgtgttaggagaagcgaccttgatggctatattccnattaacaaca

SEQ ID NO: 28618 - DNA, 132 bp, Glycine max
  unsure (1)..(132): unsure at all n locations; Clone ID: 701060377H1
gtagttgtagagtagtgaaatcagattccaaaagtaacttcgggatttatggcaatgtaaatcgnttttattttcctcggtgacatgacagtggacccatcagccaatgttgtctatcttaatctgatactc

SEQ ID NO: 28619 - DNA, 301 bp, Glycine max
  unsure (1)..(301): unsure at all n locations; Clone ID: 701060378H1
cttcctcaccgattgcnagaatggaatttcgatgctcagtcatcncntttaccattctcttctctcttgctcttgcaggagagagccatgtccatgcatcgctacctgaggaagattattgggaagctgtttgggccaaacaactcccattcccactggcaactggcgagagctttctaaagcctctccctggcaggtgttgaaatncgctgaaactccctaaagcaaattngatgattacacagtaacccaaaaaacaattcttctataaaagaangacctttcaatccaagcaaaaaca

SEQ ID NO: 28620 - DNA, 285 bp, Glycine max
  unsure (1)..(285): unsure at all n locations; Clone ID: 701060379H1
cgataaagtagatcatcactgtccaaggctgcacatttaaactttaaaagggaaganaganactaaagaagcatgtgaaacggaagtgcaagcnacacacagacacacaaaagcaggggaggatgcagaacgcctcctgcgtcgcactgaaaaacgggcatttgctgcatttaagagagctgcaagtttagcagattcttcacctgcatcagtaccactggcatttcgggttgagccaaagcccaaaagtgggatcaggcagcaagacttgctgaagaagttgtt

SEQ ID NO: 28621 - DNA, 289 bp, Glycine max
  Clone ID: 701060380H1
caagaacaagaacaacaaagtaacgtgaaagagagagagatggaggcgattgttccagtggtggatttccagaggctttcagaggaagaggagcgcaagaagctgagaaaaacatgtgagaaaccagggtgtttcagaatcatcaaccactcaattccactaacactcatggctcgacatgaagtcagtggttaaatacttgcatgaccttcccacggaaatcaaaatgcgcaacaaaccctccgtccctgagagtggctatagggcggcaatgccaacaatcctctat

SEQ ID NO: 28622 - DNA, 276 bp, Glycine max
  unsure (1)..(276): unsure at all n locations; Clone ID: 701060385H1
gnaagcaatangtccctccttcctctggccttataattcttgtgacccttttnngctggtagcattgaaagtgcaccagcaaacgtgaagccaagccattatgctgcacccttcaataggagtgtttttccttctggttttctatttggaataggctctgcagcttaccagatagaaggagcagcagctatagatggcagaggaccaagtatatgggacacctatactaaacagcaaccagggaagatttgggatcatagtgatggaagctagcaa

SEQ ID NO: 28623 - DNA, 274 bp, Glycine max
  unsure (1)..(274): unsure at all n locations; Clone ID: 701060386H1
gttattgtggaaaagggaatgcagaacgggcagaagattacattccctggcgaantgatgaagcgccagacacaattactggggatattgtctttgtccttcagcagaaggaacatcccaaattcaaaagaaaggctgaagatctttttgtagagcacattttgtcccttactgaagccttatgtggcttccaatttgtgctgactcacttggatggccgtcagcttcttattaaatcaaatcctggggaagttgtcaagcctgatnatacaag

SEQ ID NO: 28624 - DNA, 272 bp, Glycine max
  unsure (1)..(272): unsure at all n locations; Clone ID: 701060387H1
taacaaaagttgcgtancatactctgattcattagtgaagaaaaatggcaaccatcatcgccggcatcccaactacatcgatcactcgcgcaggtcttgtgctcaaacgacctgttggagcctcgtcctctaccgttcttggattgccagcaatggctaaggcagggaaagtgaggtgctccatggaggaaaagccttcaagcagctcaaatatagggatgggggcatccttgttagcagctgcagttgccgcaaccatgtcaagccagcca

SEQ ID NO: 28625 - DNA, 274 bp, Glycine max
  Clone ID: 701060388H1
tctgtgcaaatttgcgttgttcttcgcggcacacctcactcactgaacggtaagtatggcggacaaggctgttacaatccgaacccgaaagttcatgaccaacaggcttctttccaggaagcagtttgtcgttgatgtccttcatccagggagggcaaatgtttccaaggctgaacttaaggagaagctggctaggatgtatgaagtgaaagaccctaatactgtatttgtcttcaaattccgaacacattttggaggtggcaaatcactggat

SEQ ID NO: 28626 - DNA, 277 bp, Glycine max
  unsure (1)..(277): unsure at all n locations; Clone ID: 701060389H1
gcgaacacgacagacacatctgaganaccaaacctgatagagatgtcgagtggaggnaaccttagttgcgtgttggtagctgtggatggcagcgaggnaagcatgaacgcgctgcgttgggcactgaacaacctcaagctccgatcccctgcacccgattccaccgatgctccttccntcaccgtcttccacgtccaatccccgccctccatcgccactggcctcaatcccggtgccatccccttcggtggcnccagtgatctcgaagtcctgcttt

SEQ ID NO: 28627 - DNA, 274 bp, Glycine max
  Clone ID: 701060390H1
gaagatggagatgtatcagatctggagcaggagaatagcgttgggagcgttcgcgtttgttctgcttttcctatcggcctcagcagacgacgtcgttgtgctctctgaagataacttcgagaaggaagttggtcaggacagaggagctctcgttgagttctatgctccttggtgtggacactgcaaaaagcttgctccagaatatgaaaagcttggtagcagcttcaagaaagccaaatctgttttaatcggcaaggttgactgtgagagcaca

SEQ ID NO: 28628 - DNA, 268 bp, Glycine max
  unsure (1)..(268): unsure at all n locations; Clone ID: 701060391H1
gnttgattcanttcantgggttcagtaatgctcagtggnatgaaaagctnactctnagaancctaacngggaacggttaggtttcnatggttcggatttgcacggtaagaattgccaagagtgagtttcgctgntancactagtggtnaagttcnaactttagacgcatagtagtanccangtgtagtgtntcggcttccnggccaagntcgcgccaaggttcnttcagcaccacccgcggnctttggttccataggttttctcattg

SEQ ID NO: 28629 - DNA, 232 bp, Glycine max
  unsure (1)..(232): unsure at all n locations; Clone ID: 701060392H1
gtgtccttgaagcttcagangcggctcgccgctagcgtcctaaagtgtggcagaggcaaggtctggctcgatccaaatgaagtcaatgaaatctccatggccaattctcgacaaaacataagaaagttggttaaggatgggtttattatcaggaagccaactaagattcactctcgctctcgtgctcgtcgaatgaaggaggccagangaagggacgtcactctgntatggt

SEQ ID NO: 28630 - DNA, 276 bp, Glycine max
  Clone ID: 701060393H1
tcgttcgtcaccatgactttcaagcgcaggaatggaggtcgcaacaaacacggccgcggccacgtcaagttcattcgatgctccaactgcggcaaatgctgccctaaggacaaggctatcaagaggtttctggtgaggaacattgttgaacaggctgcagtcagagatgtgcaggaggcttgtgtctacgaacaatacacgcttccgaagctgtatgtgaagatgcagtattgtgtttcctgtgctatccactctcatgttgtgagggtcgatccc

SEQ ID NO: 28631 - DNA, 282 bp, Glycine max
  unsure (1)..(282): unsure at all n locations; Clone ID: 701060395H1
cttcctctgangcgaaacagattcgcaaaanaaaattaaaaaatcccaattctcttcgcaaaantcgaaatcaatgtcgaaaactccgaaggagaaggaaacggaggagcctctgccagaccacctccgctgcgggcgcacggacgggcggcaatggcgttgccggcggcgagtgaaggagaatctgaagctctgcgagattcactacctccaaggtcgccaccgccagtacaaggagaaggttcccgagtcgctgaagttcagcgcaaggcaaactaacaa

SEQ ID NO: 28632 - DNA, 287 bp, Glycine max
  unsure (1)..(287): unsure at all n locations; Clone ID: 701060401H1
tttacaatgggccttccatggctatgctgcagcaccaacaattgcagcacttttctgctttctatacttcttccacaggagactatgttncagacacccccttttgacagactaccccatcctcggcatgctgccacaattactcttcaacctgtggcgtgcccatgattttntcactgagatattgaaacggcatggaccaacaggtgagttcactgggaccttggtttaccagcatggatatttggtcattgtgaccccatcaacgtccaccacatgctgagcaa

SEQ ID NO: 28633 - DNA, 282 bp, Glycine max
  unsure (1)..(282): unsure at all n locations; Clone ID: 701060403H1
gtgatcttcaactttaccctgtttctgttaaaacccaaactggggagaagcttgagcttcagttgaatcctggagantctgtcatggatgttagacagttcctccttgatgctcctgagacatgttttattacatgctatgatttacttttgcatacgaaggatggatccacttcatcacctggaagattataatgaaatttctgaagtagcngatattactactggtggctgctcttggaatggttccggcattttatgatgatcgatctataagggccca

SEQ ID NO: 28634 - DNA, 287 bp, Glycine max
  unsure (1)..(287): unsure at all n locations; Clone ID: 701060404H1
gggctcgagagtnaaaaggaatcatcaggtcaggccaacgaggcacaaactgactcagacgagggacgcgtaccattactttctaaatcaaacatcgagggctctatgtggtgagaaaactccagtctgcataattggtgccttcagttcttctaaagctagagaaaagcttgaatcaatcctctctttggtttctcaaaaatctttgtcaagacaaccaaatcagggatccagcagctctagggatccatttcctatgctctcttagatgctgcaaagcaaaaatc

SEQ ID NO: 28635 - DNA, 268 bp, Glycine max
  unsure (1)..(268): unsure at all n locations; Clone ID: 701060405H1
aaattaatctaatattatagccatataagccaatggtgcacntgtccatactataaatactncatcattgccttagcttttttcctncccctccttcctttcatctttcaatacaatattgctctctaagctttgattcctcntaattcataccntcccacactcattcattgtngtgcgtctggttttctgcctgaaatggagtacatggaaccagagaccaaaatatgattgccttcttttgattnagagataacnttgtatccac

SEQ ID NO: 28636 - DNA, 284 bp, Glycine max
  Clone ID: 701060407H1
gggagttcatatgatctgctgtccaaaaactgcaatcacttctgtgatgaattctgtgaaagacttggtgtaccaaaacttccaggttgggttaataggtttgccaatgctggtgatactgctatggaagtggctggaaatacagcattacggttccggcaagctaaaactgagattgtatcagcaagcaaagtagcataccggttcctcttaggagttaccaataatgttactaataatgttaaaaatggtcctgagacccctaacaattcaaacagaggagg

SEQ ID NO: 28637 - DNA, 286 bp, Glycine max
  Clone ID: 701060408H1
gaaaagagaaggcaatgggctatcaggttgatggatttggactctccattcttcaacactctgcacagaatcatggatctgacggaggacgccgagaagaacttgaacgctccgactcggacatacgtgcgcgacgccaaggcgatggctgcgactcctgctgacgtgaaggagtaccctaactcgtacgttttcgtgatcgacatgcctggcctgaaatctggggacattaaagtgcaggtggaggacgacaacgtgcttctgataagcggcgagaggaagaggg

SEQ ID NO: 28638 - DNA, 287 bp, Glycine max
  Clone ID: 701060409H1
attgaatcacttggcatcgcttctcctctctcccaagaaagaatcatcaatggcgattgaacacgaagacgatctccaaagacgagaagaaccctcgacctctcgacgaggatgacatcgccctcctcaagacctacggtttgggaccttactccacaagcataaaaaaggcggagaaggaaatcaaagatatggccaagaaagtgaatgacttatgtggtataaaggagtctgatactggtttagctgcaccaagccagtgggatcttgtttctgataagcaaatg

SEQ ID NO: 28639 - DNA, 283 bp, Glycine max
  unsure (1)..(283): unsure at all n locations; Clone ID: 701060410H1
aagaaacccaataagtgattctcatttttatggctcttgccctgaagtcaagttgcttcttgcaattgangaaacctgaggctggtttcaatgtttgtttttcatctaagaaagctataatctccgtgaaacgacacactcccgtggctgctatcaggaccatggaagcagtgggactctctgcaacattcaccaggttgaaaaaagaaggaaaagtagctttcatcccgtatgtcactgctggtgatcctgacctttcaaccacagcagaagcactgaaagt

SEQ ID NO: 28640 - DNA, 211 bp, Glycine max
  unsure (1)..(211): unsure at all n locations; Clone ID: 701060411H1
tgattgaagaagatgccgatcagaaacatcgccatcggaaggcctgaagaggctactcaccccgacacgttgaaggcggggttggctgagttcatctccaccttgatcttcgtgttcgccggttcaggttccggcatcgcctacaacaagctcaccgacaacggcgccgncactcccgccggcctcatctccgcttccatcgcccatgctt

SEQ ID NO: 28641 - DNA, 284 bp, Glycine max
  unsure (1)..(284): unsure at all n locations; Clone ID: 701060412H1
actttctgttttttattcttttcagcagctatccaaacaaaacaggttcctcgttgactgagtgtgtcaggtcggaacagtgagtagagaataagctatgcagtttcaaanntcacatcacaattcttcatatcttctctcntaccttcttccttatcattacctcttcactttcacaatccaaccagttttgtgatgctgggactgaaattccatcatccaagttgttgatcaagggaggcacggttgtgaatggtcaccaccaacagatggctgatgtttac

SEQ ID NO: 28642 - DNA, 284 bp, Glycine max
  unsure (1)..(284): unsure at all n locations; Clone ID: 701060413H1
gttaattctgatatatatccaggtgaatattcanaganggaaggttacaatggatctgaatacgntcctacntatgaagacaaggatggtgactgncatgctggttgganatgttccanngancatgtttgtntcctcctgcaagangctgaaaataatcaaaggatcagaagncaaaggggttgggttgtttgtgaccaacaaaacttgcaaaagcaaatcaaatcaaaatagtcacatgaggncttcaaagacaaataccctttgtgttgtgcaannaatac

SEQ ID NO: 28643 - DNA, 283 bp, Glycine max
  Clone ID: 701060414H1
gatcgagataactagaaacagtgtgatgaaaatgaaggtccttgttttcttcgttgctacaattttcgtagcatggcaatgccatgcgtacgatatgttccctctccgaatgaacactggctatggtgcccgtactccggaggtgaaatgcgcaagttggaggcttgctgtggaagcacacaacatctttggctttgagaccattcctgaagagtgcgttgaagcaacaaaggaatacatccatggcgaacaatatagatcagactccaaaacagttaaccaa

SEQ ID NO: 28644 - DNA, 285 bp, Glycine max
  Clone ID: 701060415H1
cacaaccactcttaatttctctctgccttgctcatttacacacctctccaacctttcactttcagctttatttgaatccctctctctcctttccaaatggccagcgttgaggttgcacatcaaacaccaacaacagttccagaaaatgaaacaaccgaggtaatcaagacccaggaaacaaccccggaaccagtaccagccactgaggctcctgcaacagaacaagcagcagctgaggttctgctcaagaagaacaacaaggcaactgaggttcctgccccagaa

SEQ ID NO: 28645 - DNA, 283 bp, Glycine max
  unsure (1)..(283): unsure at all n locations; Clone ID: 701060416H1
ttcagttaaagatcaagggcagctgcggatcatgctggacattcagcacaactggggantaagaagcagcctatgcacaagcatttgggaagagtatctctctntctgagcagcagctagtggactgtgctggccctttcaacaactttggctgccatggtgggttgccatcacaagcctttgagtacattaaatacaatggtggactagagacagaggaagcatatccctacacaggaaaagatggtgtctgcaaattctcagctgaaaatgttgctgttca

SEQ ID NO: 28646 - DNA, 286 bp, Glycine max
  unsure (1)..(286): unsure at all n locations; Clone ID: 701060417H1
cactcagccttcattaccaacacgaaagcatagccaaaaccttttttcgaagtctctgattttcctaatggctccggcaaaggcagagaagaagccggcggagaagaagccagcggcggagaaggcaccggcggagaagaagccgaaggggnagaagaagatctcgaaggaaggagggagcgnnnnnnnnnnnnnnnnnnnnnnnnnnagcgtggagacctacaagatctacatcttcaaggtcctcaagcaggttcaccccgacattggtatttccagcaaggcc

SEQ ID NO: 28647 - DNA, 282 bp, Glycine max
  unsure (1)..(282): unsure at all n locations; Clone ID: 701060418H1
gagggtcaccaacngcacgtgcctttggggggccgaggccccctactgctggtcggcaaacggacggcgggcgcacgcntcgcntntagcccgncttctgacttagaggcgttcagtccataatccaacgcacggtagcttcgcgccactggcttttcaaccaagcgcgatgaccaattgtgcgaatcaacggttctctcgtactaggttgaattactattgcgacactgtcatcagtagggtaaaactaacctgtctcacgacggtctaaccccagctcac

SEQ ID NO: 28648 - DNA, 286 bp, Glycine max
  unsure (1)..(286): unsure at all n locations; Clone ID: 701060419H1
gggaccccatctctatcatgtgtgtggtctacactcacccctccattctcattcattaataacaaccttcannnnnnnnnnnnnnnnnnnnnnnncctatgctcgctcgatcatcgaatgaaaaaaccaaccaaaaaccctttctttcactttggttgtctcttctacaccactttcccttcaccttccgttctccactcactactactaacataaattaaaaacacgccatgaacaacaacccaacaacaatcatcggttccactacccacggatcagaagaaga

SEQ ID NO: 28649 - DNA, 285 bp, Glycine max
  Clone ID: 701060420H1
ttgtcgctgctcatcctccataacctccgagctctacaccgaagaacgaagccatggggaagacacatggaatgggagctgctcgcaagctcaagtctcaccgcaggagggcaaaggtggggctgataagtcatacaagaaatcccatcttgggaatgaatggaagaaaccttttgccggttcatcccatgccaagggaattgtccttgaaaagataggtattgaagctaagcagcccaactctgctattcgtaagtgtgccagagttcaacttatcaagatggg

SEQ ID NO: 28650 - DNA, 283 bp, Glycine max
  Clone ID: 701060421H1
ttcataaacgccgcccaaaaccatttatagggttttcttttctttgccaagaaaatgagagagtgcatttcaatccacattggtcaggccggtatccaggtcggaaacgcctgctgggaactctattgccttgaacacggcattcagcccgatgggcagatgccgagtgacaagaccgttggaggaggagacgacgccttcaacacattcttcagcgagaccggcgccggaaagcacgtgcctcgcgccgtcttcgtggatcttgagcccaccgtgatcgacg

SEQ ID NO: 28651 - DNA, 280 bp, Glycine max
  Clone ID: 701060422H1
gcctccgtcaaaaccgtcgagaaagcaaccgcggacgccgcgctggtcgaaaaatccgtcaacacgatccgcttcctcgccatcgacgccgtcgagaaggcgaattcgggtcacccggggctccccatgggatgtgctccgatgggtcacgtgctatatgatgaaaccatgaagtataaccctaagaaccctttctggttcaaccgcgatcgcttcgttctctctgctgggcacgggtgcatgcttcagtacgcgcttctgcactcgctgggttcgatag

SEQ ID NO: 28652 - DNA, 283 bp, Glycine max
  Clone ID: 701060423H1
tagctattagttcgattttgtagtaagtgaggtgccaatatggtgaagatagctcttggtactttggatgactcttttagcgctgcctctcttaaggcttatttcgcagagttccacgcaactctgattttccgtgttcgctggtgttggatcagccatcgcttacaacgagcttacaaaagatgcagccttggatccaacggggctggtggcagtagctgtggcacatgcatttgcactgtttgtaggtgtctccgtcgccgccaacatctcaggtggccat

SEQ ID NO: 28653 - DNA, 282 bp, Glycine max
  Clone ID: 701060424H1
agattctgctggataagttaaaactgtgcaaaggcatttcctatgcagcagttgctgctcatgcagacaaaaatgaccgacgaaagttagctgccttgcttgttgaacacgagcctcgttcatcgaaacaggttcctctcctgttaagcattggagaagaagatatagccttgataaaggcgaccgaatgtggtgatacagatcttgtttaccttgtactttttcatatttggcaaaagaggcaaccattggagttctttggcatatacaggcgagaccatt

SEQ ID NO: 28654 - DNA, 281 bp, Glycine max
  unsure (1)..(281): unsure at all n locations; Clone ID: 701060425H1
gtccccaacgactggttctgttttctctctgctgcttcgattcattcacacaaccatgactaacccttactaatggcgatgctggctccctcaacaaggtccccacgatcaagttcaccaagctcttcattaatggagacngcgttgactnnttgtcaggaaagacatttgagacaatagatccaagaacaggagatgttatagcgaggataagcgagggagataaagaagacattgacattgctgttaaagcagcacgtcatgcatttgacaaggtccat

SEQ ID NO: 28655 - DNA, 280 bp, Glycine max
  Clone ID: 701060426H1
cttcttcgtctcaaacctcttcgttccttcgattcattccatttcttccaaaatggccaaagacccagttcgcgttctcgtcactggagccgcagggcaaattggatatgctcttgtccctatgattgctaggggagtgatgctgggtcctgaccagcccgtgatcctccacatgcttgacattcctccagcagcagagtcgttgaatggggttaaaatggaattggtggatgctgcattccctcttcttaaaggtgttgttgctacaaccgatgtggtt

SEQ ID NO: 28656 - DNA, 280 bp, Glycine max
  Clone ID: 701060428H1
ctttagccgaggtcaggaggagcactagctaagttcacaatttcaaaatggctaggggactaaagaagcatttgaaaaggctcaatgctcctaagcattggatgcttgacaaactgggtggtgcatttgcgcctaaaccctcatctggaccacacaaatcgagggagtgcctccccctcattcttattctgcgaaaccggctgaagtatgctctgacataccgtgaagtcattgctattctgatgcagcgccatgttcttgttgatggcaaagtcaggac

SEQ ID NO: 28657 - DNA, 283 bp, Glycine max
  unsure (1)..(283): unsure at all n locations; Clone ID: 701060429H1
gtgctgtggcctctgttttcaaaggaaacccttgttcttttccttgcctttctttcctagcactgtcttctaacttccaacttcatataattcattttccctagncttctttgttttcaccctttccttgtgaaatctgcaaaaccngctattcagtttggctatcaaaccaagccaaagctcttatattatttttngnatataaataggcaccaaatacacatttatgatacaccaatttgaagcttgtccacacaagacaagattnctcaccagccccttt

SEQ ID NO: 28658 - DNA, 280 bp, Glycine max
  Clone ID: 701060430H1
caaacctaacgcagcatcgctattctcttcattccatggctttgcccaaccagcaaaccgtggattaccctagtttcaaactcgttatcgtcggcgatggtggcacaggaaagacaacctttgtgaaaaggcatctcaccggagaattcgagaagaaatatgagccaaccatcggtgtggaggttcacccattggattttttcacaaactgtggaaagattcgattttactgctgggatactgctggacaggagaaatttggtggctcagagatggatac

SEQ ID NO: 28659 - DNA, 284 bp, Glycine max
  unsure (1)..(284): unsure at all n locations; Clone ID: 701060431H1
gtcggaaaccgcaaggtcgctccgctcgcgtcgccgcataacacaacttcnaattttcacaaccannancattncaacacttgatctaactacttcattagctcactcantagtatcattattcccattnctcaattttcaattcaccttcttccnctgcnagagcatgangctgntgcgtcttcgaatcctcctcattgctctgcttctcatgttgtgcggccccattttcatcttcttcccaaacccaaagacccnnactcggcgtcgcccccgaagatgag

SEQ ID NO: 28660 - DNA, 278 bp, Glycine max
  unsure (1)..(278): unsure at all n locations; Clone ID: 701060432H1
ggtagatntgtagccgcctagcaatngantnggacaagtccaagcntcnnnnctgaggtantcattctctcatcntcaacttatctgtgtncaaatttcttagtttgttcgtacgtnnnattgtgaaagcnatgttgttgattgtttntcgtcgatagctgatgtgtacnttgcgtggtcttactgtgtatgatgttaatgaaaattgttcggngaaaattgtgcatttggaaaatctatgnatngngtnntctgatcngnaatgggtgttggnngat

SEQ ID NO: 28661 - DNA, 281 bp, Glycine max
  unsure (1)..(281): unsure at all n locations; Clone ID: 701060433H1
gtgggaatgaaagaccggtgtgggactcgtggcgactttgtggtaaataaaaatcgcacgcgtgcttggtgctgtttggaagaggaaaatacattacagcagcaaaggaaggttgtggtaagtaaatagtagtaacctaacccttgcgtttgccagtgaggctgaggttgggtttggaaggcaaaggctggtgttgtcccaatccaagagagaagtaaagtnaagcnaaggaatggcgaacatagacatcgaagggatcttgaagcagcagcctgatgatg

SEQ ID NO: 28662 - DNA, 279 bp, Glycine max
  Clone ID: 701060434H1
gtttttttgcagaaaagattaggagatggcgaacgcttgattccctgcttcaatcgcattctcatcgagaaaatcgtccctccctccaaaaccagcgccggcattctactcccggagaagacctcccagcttaattccggtaaggtgatagcggttggacctggatcacgtgacaaggcggggaacttgattccggtgtctgtgaaggaaggtgatcacgtgctcttgccggagtacggtggcacgcagatcaagctcgatgacaaagagtatggtttc

SEQ ID NO: 28663 - DNA, 280 bp, Glycine max
  Clone ID: 701060435H1
ttttcttcagaaatttgccatcgttgagagaagcgtgagagccttagtcgttcaagatgagagctaagtggaagaagaagcgcatgaggaggttgaagaggaagcgccgaaagatgagacaaagatctaagtaggtgcttgagcaggagttgagatgagctttccatctgctaccagcctcatgacattttaggctgttatgggctcttatgatcttgaggtctagtcgctaggggagcttcactcttgacttagtttgctttactggtccggtctggtc

SEQ ID NO: 28664 - DNA, 282 bp, Glycine max
  unsure (1)..(282): unsure at all n locations; Clone ID: 701060436H1
gtgcatccatcgttaagctagtggcgatcggatccagctacagcatagagatcnnnnnnnnnnnnnnnnnnnatgttgggtgttataagggcacaagagtattcgccctgccttctccgcaatcagacacttgtcttctgcagctaaagagattactgtcagggaggctctgaactccgcactcgatgaggaaatgtcagctgatcctaaagtgttcttgatgggtgaagaggttggggaatatcagggtgcatacaagatatcccaggggctgctcgacna

SEQ ID NO: 28665 - DNA, 279 bp, Glycine max
  unsure (1)..(279): unsure at all n locations; Clone ID: 701060437H1
gtttgttgtgagctataagctagtttatcgtgaggagaatatgaagttgtttgtnttctttgttgctgcagtagttttggtagcatggccatgccatggcgcaggctaccaaaggttccctctccgaatgaaaactggctatggtgagcgttcttcggaggtaaaatgcgcaagttttaggcttgctgtggaagcacacaacatccgagtcttaaaaccattcctgaagagtgcgttgaaccaacaaaggactacattaatggcgancaatttagatca

SEQ ID NO: 28666 - DNA, 281 bp, Glycine max
  unsure (1)..(281): unsure at all n locations; Clone ID: 701060438H1
gtaccctacacgtatcagagagagaatatttttnttcgtgcaggtgcagaagatggctcggagctccacaagaatgaaatgggtctctatcttcacacttctattctctcccactcgcccctcacaatctccgcagaagatgggctagtggcgaatggagattttgaggctaccccaagaaacgggttcccaaacgaggcgattgtggagggccccagcgaggtcccaaactggaagtcaaacggcaacgttgagcttgtggaatcggggcaaaaacaggg

SEQ ID NO: 28667 - DNA, 279 bp, Glycine max
  unsure (1)..(279): unsure at all n locations; Clone ID: 701060439H1
gctcggccacccactagctggggtccccctgctgctcctatgcaacaatctggttatggctatgtgcagccaggagcatactctggtccaccccagtataacatgnctcagcaacaatatgcaggctatcctccccagtcatctggtggatattctgccaccaactgggatcagtccactgccccacagcagcagtcaacccatgcagggtatgattactatagtcaacagcagcagcaaaatcctgcacttcatctgatgggactgcttacaattaca

SEQ ID NO: 28668 - DNA, 280 bp, Glycine max
  Clone ID: 701060441H1
gaacaatatcgtttcccattaccagtattatcttgaccttctaggtgttggtcgagaacaggctgggccccatgaaatccttacatgcgctgagcaggttcctttcaacccatcttccaaacctgcttcttcatcttaagattatatttattagcatatgatattgttgtaccaatccctttgaaagtgaaagttaataagggttcttgaaattattggtatgcaataattttgaactgcgtggtagtgtgggaattcattatatagcttttgttcgttg

SEQ ID NO: 28669 - DNA, 278 bp, Glycine max
  Clone ID: 701060443H1
gttagatctgtacccgcctagccattgatttggaaaagtccaagcttcaaagatgagtaagcttcagagtgatgctcttagagaagctatctcaggaatcatgactgattccaaggaaaagaacaggaaatttgtggagaccattgaactccaaattgggctgaaaaactatgatccccagaaggacaagcgttttagtggctctgttaagttgcctcacattcctcgccccaagatgaagatttgtatgcttggagatgcccaacacgttgaagagg

SEQ ID NO: 28670 - DNA, 279 bp, Glycine max
  unsure (1)..(279): unsure at all n locations; Clone ID: 701060444H1
acccccacactcccatctcacacacccctcgcatccaacaatgtctctcaccattccctccaacctctccaagcccgccgccctccgncccaaactaagcccaaagctaaggtccgcngccacaaccaccatcgtctgnnnnnnnnnnnnnnnnnnnnnnnnnnnnnnngtgtcctccgacctgaaggcgttctccgccgcgctggccctctcctccatcctcctctccgcccctctccccgccggcgccgacatctcggggtcaccccatgcaaggag

SEQ ID NO: 28671 - DNA, 276 bp, Glycine max
  Clone ID: 701060445H1
ttcccccattttttcctctttcttcctcgcctagctagctccagaaaattaggatctgcttcagatctagtgtttccctgtcccaaatcacgagtccattgagtttgattttgtggatgaaaagcatagatagggcttttgcaaaactctccaatgtttcttgaaattatatgaccatgcgtcgaattcgtatgctgcactccttctccgtcgtgttcctctactggttctacgttttctcatgaactccctcttaaatccgtgattaattagatc

SEQ ID NO: 28672 - DNA, 279 bp, Glycine max
  Clone ID: 701060447H1
ctcaggcgctgctgcccttcagtccttcagcaatggtttacgtgaagtcacagaaatcaaaagcctacttcaagaggtatcaagtcaagttcaagagaagaagagagggaaaaaccgattaccgtgccaggattcggttgattaatcaggacaagaacaaatataacaccccgaaatatcgctttgttgttcgtttcagcaacaaagacattgttgcacaaataatatctgctagcattgctggcgatattgttcttgctgcagcatatgcacatgagc

SEQ ID NO: 28673 - DNA, 278 bp, Glycine max
  unsure (1)..(278): unsure at all n locations; Clone ID: 701060448H1
atgaaaatgaaggtccttgttttcttcgttgctacaattttngtagcatggcaatgccatgcgtacgatatgttccctctccgaatgaacactggctatggtgcccgtactccggaggtgaaatgcgcaagttggaggcttgctgtggaagcacacaacatctttggctttgagaccattcctgaagagtgcgttgaagcaacaaaggaatacatccatgggcgaacaatatagatcagactccaaaacagttaaccaacaagcttacttttatgnca

SEQ ID NO: 28674 - DNA, 278 bp, Glycine max
  unsure (1)..(278): unsure at all n locations; Clone ID: 701060449H1
gaaactcttccgccatacctcacctcagatctacgtcgtcgtcgtcgatcttctgttcagaataataattttagatccctgatgcaacagaacaaggaatcttcttagattctttttctggaagaaagagaanacagaagaagaaactcttcttctttagacccgtcttatatatttatatacagtctctgattgatcggttttttcggaactctattttcactcaaatccangcgngctcttcgggcatggatttggncgatttccgatccatattg

SEQ ID NO: 28675 - DNA, 276 bp, Glycine max
  unsure (1)..(276): unsure at all n locations; Clone ID: 701060450H1
ctcaagccaaaagggtccgcgtccttgagctttctcgcagattgaagcaccgtggtcctgactggagtgggctccaccaatatggtgataactatttggctcatcaacggttagccatagttgatccagcttctggtgatcaacccctcttcaatgaagacaaaactgttgttgttacggtgaatggagagatctacaatcatgaagaactcaggaaacaattgnctaatcacaccttccgtacaggaagtgattgtgatgttattgctcacctgt

SEQ ID NO: 28676 - DNA, 280 bp, Glycine max
  unsure (1)..(280): unsure at all n locations; Clone ID: 701060452H1
gttcatctcaatctagatttgtgtgcggtgcgtctccggtgaagagaagaagatggcgaccgtaccaggacagcttcatatgggaggtcgtaaagaagaacaactctttcttggtgaaagagttcggaaggngcactcagagcgtgcagttcagcagagagcccaacaatctctacaacctcaacactttcaagtactccggtttggcgaacaagaaaactgtcactgttcaacctgcgggtaaagaccagtctgtgttgctggcaacaaccaagacaaa

SEQ ID NO: 28677 - DNA, 277 bp, Glycine max
  unsure (1)..(277): unsure at all n locations; Clone ID: 701060453H1
gtcaaacgacagcgttctgagtcttttcttcttcgttaccctcttcacatgccttctctctgctaattcccacgatgaccatattttcctaccgagtcaactccatgacgatgactcagtgagttgcactgctaccgacccaaaccttaactacaagccggtgatcggaatcctgacccaccccggcgacggtgcctctggccggctcagcaacgccaccggggtttcttacatcgccgcctcctacgttaaattcgtggagtcggtggtgcnagaa

SEQ ID NO: 28678 - DNA, 279 bp, Glycine max
  Clone ID: 701060454H1
aagaaagcaagggcacgcacatcttctcagctgtgagtgagaatttggagagtagaagaagacgcagctgattgtggaaatgtcagtgcaagattacctggacaagcacatgctttcccggaaactcgaagatgccgtcaatgccgccgttagggccaaaacctccgatcccgttctcttcatctcgaatcacatgagaaaagctgtgcaatcggtcataacgaaaatcaaggcgagacagatcctcgatagcagaggaattccaaccgtcgaagtcga

SEQ ID NO: 28679 - DNA, 218 bp, Glycine max
  Clone ID: 701060457H1
tcttcttcgtccagccaacatgagctcaatcgttcagggtttctccaagtcactggccatgaccattctctctgagatcggtgacaaaacgttttttgcagctgcgatactggctatgcgacaccctagacgctagtcttatcaggttgcttatcggtttgattgtgatgacattctctctgctcttgttggctgggcagctccaatctgatctctcg

SEQ ID NO: 28680 - DNA, 273 bp, Glycine max
  Clone ID: 701060458H1
aagatgaaggtttggagatgggtggtgagtttgatgttagtggggttactgcccgtgtcaacaatgggtcgattcgtggtggagaagaacagcctgagagtgacatcgccggagaaaataagagggacacacgacagtgccattggcaacttcggaatacctcaatacggtggtagcatggccgggaacgtaatttaccctaaggataacaaaaagggttgcaaagagttcgatgagttcgggatttccttcaaatcaacccccggtgctctt

SEQ ID NO: 28681 - DNA, 276 bp, Glycine max
  unsure (1)..(276): unsure at all n locations; Clone ID: 701060459H1
gttcagtccagtgcccgcactacatcgcaaatttttctttttcttctcccctttagatgagtaacgccacagactccgccggcaaaatcccaccggagacgaggcccgccgagagcgacagtggtggtgatagtgggccccggcccacgatcaagatcaatgttatgcacggatcctctcaacacgagttccacctcccggcccaatcaacttttggggatgntaagaaactccttgtcaataaaactggtttagagcctgtagagcaacgacttt

SEQ ID NO: 28682 - DNA, 273 bp, Glycine max
  Clone ID: 701060460H1
caacttaagcgaaaagcaatagaattcaaagagagagtttcttgttctgtattttttgatttgatcatttcaatcttcaatttttttttatatatccaccaatccgcaaagtgcaaatttctaatctttcacgtattgggttcttctcttttccctcttcgtctccgatcgatccaattctcttcccatggctacgatcggacacaacaatctcaatgccaaattggttcttctcggggacatgggtgctgggaaatccagcctcgttttgcg

SEQ ID NO: 28683 - DNA, 276 bp, Glycine max
  Clone ID: 701060461H1
gggaggttgtgggattaattaaaggaagaagaagaaatccttttatgtgggagtaacagcagaagcaaaacaaaacatcatagacagacacaacattatctttcaactgttgctctgcctctgcacagagaatggtgtgggaggggaaacagacatgatctatctgtgttcacagcaccactgtttccctgcctcacacccttatctagaagaacaagaatcagcacatacacccgccacaacgccatagtcatcatcacttagaagaattcacaa

SEQ ID NO: 28684 - DNA, 277 bp, Glycine max
  unsure (1)..(277): unsure at all n locations; Clone ID: 701060462H1
cngcgccgccggcgacgnccctccgctacgacacggaggcaanncagtcggccatcaactcgtgcccagagggggatccctgccatgttaccttcccagcgccgggaaagtacctgacggccaccgtgttcctgaaatccggcgtggtgctgaacgtggagtccggggccaccatccttggcggcacgaggctggaggactaccccgaggagtcgtggcggtggtacgtggttgttgcggagaacgcganggacgtgggaatccgcggcggcggacc

SEQ ID NO: 28685 - DNA, 276 bp, Glycine max
  unsure (1)..(276): unsure at all n locations; Clone ID: 701060463H1
ancactcaaacatttttcactaaaacacacactttctgaaaagaacaaggatccattttctttcccccaacatggccagaccacaacagcgttaccgaggtgtccgacaaaggcattggggctcttgggtctccgaaattcgccaccccatattgaagactaggatatggcttggtacatttgaaacagctgaggatgctgctaggggcctatgatgaagcagctaggctaatgtgtggtgcaagggcaagaacaaacttccctttcaatccaaat

SEQ ID NO: 28686 - DNA, 276 bp, Glycine max
  unsure (1)..(276): unsure at all n locations; Clone ID: 701060464H1
gctagtttatcgtgaggagaatatgaagttgtttgtnttctttgtngctgcagtagttttngtagcatgggccatgccatggcgcaggctaccaaaggttccctctccgaatgaaaactggctatggtgagcgttcttcggaggtaaaatgcgcaagttttaggcttgctgtggaagcacacaacatccgagcccttaaaaccattcctgaagagtgcgttgaaccaacaaaggactacattaatggcgaacaatttagatcagactctaaaacag

SEQ ID NO: 28687 - DNA, 274 bp, Glycine max
  Clone ID: 701060465H1
gcttattctctcgcattccgtggagatctagtgcttctgctgcaagacctcgctgaaaattagggtttcgattcggaggtagacgaagatgttcggaaggggctccgaagaaaagcgacagcaccaggtactacgaaatcctcggcgtttccaagaacgcttcgccggatgacttaaagaaggcttacaagaaagccgccattaagaaccatcctgacaaaggcggggatcccgagaagtttaaagagcttgctcaagcctatgaggttctgag

SEQ ID NO: 28688 - DNA, 275 bp, Glycine max
  Clone ID: 701060466H1
ttctgctcgtgcctctagggttatcatatctccatttccatttcctctctctcagtttccaagaatcttaagctatgggaaagtcttacccaaccgtgagcgctgattaccagaaggccgttgagaaggcgaagaagaagctcagaggcttcatcgctgagaagagatgcgctcctctaatgctccgtttggcatggcactctgctggaacttacgacgtgagctcgaagaccggtggtcccttcggaaccataaagcacccctccgaactcgct

SEQ ID NO: 28689 - DNA, 274 bp, Glycine max
  Clone ID: 701060467H1
gctagcagagaaacaaagttacaagtaaagtaaattaagaagatcattaatggcttctcttgcaaccttagctgctgttcaaccagctgcgctcaatggccttgctggaagttccctctctggaactaagctctctttcaagccctctcgccacactgtcaaatccaagaacttcaggagtggtgccgtggtagcaaagtatggtgacaagagtgtgtactttgatttggaggatctgggcaacactacggggcagtgggacttgtatggctca

SEQ ID NO: 28690 - DNA, 276 bp, Glycine max
  unsure (1)..(276): unsure at all n locations; Clone ID: 701060468H1
gnaagaaaaccctagctcaccgtttcaagatgcaaatcttcgttaagaccctcactggtaagaccatcacttctcgaagtcgagagttcagataccatagacaatgtaaaggccaaaattcaagacaaggaagggatncccaccagatcagcaacggctcatttttgctggcaagcagcttgaggatggacgtaccttgctgattataacatccaaaaggagtccactctccacttggttcttcgtctngtggtgggatgccaatctttgtnaagc

SEQ ID NO: 28691 - DNA, 274 bp, Glycine max
  Clone ID: 701060469H1
ggcaatgtctgcttggggattctagatggcactgaagtaggactagaaaatctgaacataataggagacatcactttacaagataaaatggtgatttatgacaacgagaaacagcagattggatgggtttcttcaaattgtgataggcttcccaatgtggatcgtgatttggaaggtgattttccacacccatatgcaacaaatttgggtatctttggggaccgttgccctgcatcatatgaagaaacaggctgtgaatgaattgctagggaag

SEQ ID NO: 28692 - DNA, 275 bp, Glycine max
  unsure (1)..(275): unsure at all n locations; Clone ID: 701060470H1
cttacttgtagttgcgaaatcatccaaacacattccatctattaagattttagagagtgaaaatggattggcaaagcatgatgggcaacctggacccattccaaagaacaatcttaancctcgtcccactaacactactcctgctgctgttactatctcgtacccgtccaagaccgccctatccaccaggccctaagggttcccaatcataggaaacatgtttatgatggaccagctaacccaccgcggtctcgccaacctggccaaacactacg

SEQ ID NO: 28693 - DNA, 276 bp, Glycine max
  Clone ID: 701060471H1
ggcgtaggcaaggtaatgatcctagtcctaccactgtgaactcctccattgctcttcttcaagaaaggtttagacagttggagaaggtgaaagaaagaagagaggggaaacaacttaaactcttgtcatttgagaccacctcctcatcatcacaaaactctcaacaacaaccaaggttggtggctccacataggccaactctccatgactctctttctcttggcctcaacttcacaaacaagcaaggtgatcatcacaacaccatgaacatgaaac

SEQ ID NO: 28694 - DNA, 198 bp, Glycine max
  Clone ID: 701060473H1
atgaagaaatgtagcaggttattactagctataaataaagcgggcattactttctgagttctgatggcgaatttttatgtatcttgagagatcaagttgacattcaaattatgtgctaggataagaatcttgaaaatttctagttgtactttattgatgatcatgacaatctagtgctgttttaatgtgagataaaag

SEQ ID NO: 28695 - DNA, 272 bp, Glycine max
  unsure (1)..(272): unsure at all n locations; Clone ID: 701060474H1
tgctgtcggccactgtctctctttctctttcgcgcttcaactttcgtttatgcaccgattgggatggatcagtgggatgctcatcatcgactcatgttcattggtcggcatgaggnagatggaactgctgatacttctaagggagaggaatcaaatgatgaagaaaaaataagtaaaactgaacccgtctttgtgcctgaaactaagaaaaggaaacgccttagccttagtcagcttaaagaggtgaaanaggagtcacatgggangcaaac

SEQ ID NO: 28696 - DNA, 271 bp, Glycine max
  Clone ID: 701060475H1
gctgattggactccagaagaaagacaaatgctaaggaataaggttcctgtaactggtttgaagacaccattccgagacggtttgctgaagcatgttgctgaagatgttctaaagttggcaaaggatggcttggaaagaagaggcttcaaggaatcaggatttttgaatgaggttgccgaggtggttagaacaggtgtcactccagccgagaggctttggaattgtatcatggaaagtgggagcaatccgtagatcacgtgtatgaggaatt

SEQ ID NO: 28697 - DNA, 273 bp, Glycine max
  Clone ID: 701060476H1
cttcgatcttcgtcgctgaaaatgagagagtgcatttcaatccacatcggccaggccgggattcaggttggaaacgcctgctgggagctttactgcctcgaacacggcattcagcctgatgggcagatgccaagtgacaagaccgttggtggaggtgatgatgctttcaacaccttcttcagtgaaactggggcaggaaagcacgtgccccgtgcgatttttgtagatcttgagcccactgtgattgatgaggttaggactgggacataccgc

SEQ ID NO: 28698 - DNA, 273 bp, Glycine max
  Clone ID: 701060477H1
atgaatttcattcacagggatgaggaggttaattacttcccttcaaggtatgatcctgttcgtcatgcagaaacgttccccatacctcctgctatctgcagtggaaggcgtgaaaagtgtggaattgagaaggagaacaactttaagcagcccggagagagataccgatcttgggcacctgacaggcaagatagatttaatcgccgatgggttgatgctttatctgacccacgggtcacccatgaaatccgcagtgtctggatatcttactgg

SEQ ID NO: 28699 - DNA, 246 bp, Glycine max
  unsure (1)..(246): unsure at all n locations; Clone ID: 701060478H1
ancacttaccgttgtatgtaactgcccttcagttagctcaccgtgacatatctgtaacagttgtatgtgatatatgaaagtggtgattgtgtttggtggagattagtgactatcatatttttaagttttgagatttcaaactttttgggtgagtcttgaagaatatatacatgcatatcaaatgtaaggcacacaatatgggattgcnagtcatggctcaaagttgtattgctgtttagaagtaga

SEQ ID NO: 28700 - DNA, 271 bp, Glycine max
  Clone ID: 701060479H1
tgaagaaccaacaagaggggtattgagattgagattcaagtaatggggaagagcaaggttcttgtggtggggggaactgggtacatagggaggaggatagtgagggcaagcctggcactgggccatgagacctatgtggttcagaggccagagttgagcctccagatagagaagctgcagaggctcctctccttcaagaagcaaggtgctcatctcattgaggcctctttcaatgatcacaagagcttgttgatgctgtgaagcaggttga

SEQ ID NO: 28701 - DNA, 271 bp, Glycine max
  Clone ID: 701060480H1
aacgctgctgccgaaacccttccggaaccctaaggtaagtgagtaatcagtggttgagaatggtggagaaggcgaagggtagaaaggaggaggtggttacacgtgagtacaccattaacctccacaagcgcctccatggctgcacatttaagaagaaagctctaaagctattaaggagataaggaaatttgcccaaaaggccatggggaccaatgatgtgagggtggatgtgaagttgaacaagtttgtctggagccagggaatcaggagt

SEQ ID NO: 28702 - DNA, 271 bp, Glycine max
  Clone ID: 701060481H1
agatatcatcacattgcaaagaaaatacacattacattactaagtctttgttcatttgagtagtagtgatggctagcctcaaggttgcatgtgtggttgctgtgatgtgcatggttgtggtggccatgagtgctgcacccatggcacaggccgcaatcacgtgcgggcaggtcgccggcgacatgtctccgtgcttcagttatcttcgaagcggcggaaaaccgtcgcaggcctgctgcaacggggtgaagtccctcagcagcggggcgaa

SEQ ID NO: 28703 - DNA, 272 bp, Glycine max
  Clone ID: 701060483H1
ggatggcgaagttcaatgtggtgcagaagaaaagaagagctctaatagcagagaagaagagacagcttcacggagaccctttaaccggcaagctcaagatcaaggaccaacccctttccctatccggaaaacgcaaacgcaagctcttcaaaaaatggcgccgggaccaaaaggacgccttgcagaatggtttggtaaccatggaagatgttcaaatggcagttgctgaaggggataccaaagatgcccctagacttcagcaaaaattcatt

SEQ ID NO: 28704 - DNA, 272 bp, Glycine max
  unsure (1)..(272): unsure at all n locations; Clone ID: 701060484H1
gagtggccaaggaagagaaaaaggagaatacagtctcaagaactacttgcaagtnaaggctgttnttacatccttgaagaaccctgcttggctttgaacatcattagctttagatttatttgatgaaaaagattaataaataggctccaataataaagataattaaattgggtttattccattcaaagtatctgataatgatgaatatgatctattttctttttctgtttttgcccctgcattttatgggtagcgcgaaatatactatggtg

SEQ ID NO: 28705 - DNA, 277 bp, Glycine max
  Clone ID: 701060485H1
cattgattccgaagagaaaagaaaagatgtttgagccacaacagctatacactcgcgcgaagaccgaggaattcgaccttcgaatcaggagaaaccctctacccaggggctgagcgtccggcgagaaccagctccgatggggtttcatccgcaaggtctacgggcatcctctccgcgcagatcgtcctcaccaccctcgtctccgtcaccaccgttttctatactccaatcaatgacctcctcaaggggcaattccaccctcctcctcatcctcctc

SEQ ID NO: 28706 - DNA, 274 bp, Glycine max
  unsure (1)..(274): unsure at all n locations; Clone ID: 701060486H1
gatattctacctgctcatgcagctggtcttctttcatcttttacagctcccagatcagattcataatgtcccaatgatcaaaaggcatcccggctggctcttttcaaagtctcgttaccataaagtgtgatatnccatgaaaccttcccaaccctccacaccttatattcatgggcaccactctagtagagcaacattagaatcatatttgccagctccaactccaaatatcctagacatctggagcaaatggatcaataaattctgggatgag

SEQ ID NO: 28707 - DNA, 270 bp, Glycine max
  unsure (1)..(270): unsure at all n locations; Clone ID: 701060487H1
cataacctgaagtgcacctttctctctctgtctccctgtctctctctccctctctctcaatatacctcttttccnnnnnnnnnnnnnnnnnnnnnnnnnnnnnnnnnnnnnnctttgcgaagaaagcttaggcaaaccctgatctggaaggtgcaataaggttatgaatgaaaccagtgactaaagctgtagatgattgttttaagctatgagatctgagggcttcaaattctctttttccttccatatttcatcctgtgcctctacttt

SEQ ID NO: 28708 - DNA, 276 bp, Glycine max
  Clone ID: 701060488H1
ctttctgaaggagattccaggggctttatcagcttcccactgaggcttcagtggtgaaggctgctgctggttgggctcactgtggctttcagttaatgggagctaatggaatttcagacattaaacaggaagcccacaaagctcaaacacgagcagtggatcagattctcatcatgacaacaagaaagtgggagatgaagtattgaagcgaaggaagatcactttttctagacaggattctgacagccaagcatctggagatgaattctttactgt

SEQ ID NO: 28709 - DNA, 273 bp, Glycine max
  Clone ID: 701060489H1
ctcaagtccaacctacccctttttcttctcccaccaacttcaccgtcttcttcctcgatcatgtctcactttcaaggggcaagtaccatgatgagcttattgccaatgctgcttacattggcactcctggaaagggtattcttgctgctgatgagtcaacagggacaattggcaagcgtttggccagcatcagtgtagagaatgttgaatccaacaggcgtgctcttagggagctgcttttcacgctcccggtgctcttaaatatctcagtgg

SEQ ID NO: 28710 - DNA, 275 bp, Glycine max
  unsure (1)..(275): unsure at all n locations; Clone ID: 701060490H1
aagaaaacccctcaatagccatgggagagaaagagaagagaaacaagaacaagaagcaaaagcaccaacaccccaatgaccaaaccacaaagcagaactccgatttctccttcaagccaagctncagaggtaaagggtatcaaatttggaggccagttcatagtgaagtccttcacaatcagaagagcaagacccttagagcttctcaaggttctttctttcccaccaaccaacaacaccaacaaaccaaaggacaagcttcctttcccttccac

SEQ ID NO: 28711 - DNA, 222 bp, Glycine max
  Clone ID: 701060491H1
tgaatcgcgattgttctgttgtgcgactgaaagaagagagatcgaaaatggcgttggctttcgacgagttcggaaggcctttcataatcctgaaggaacaggagcagaagagcagacttcgaggtttggacgctcagaaagccaacatctccgccggcaaagccgtcgctcgcatcctccgaacctccctcggccccaaaggcatggacaagatgctccaga

SEQ ID NO: 28712 - DNA, 249 bp, Glycine max
  unsure (1)..(249): unsure at all n locations; Clone ID: 701060492H1
gatttgtaggagctttgatgatcattattgcctcaatgatagtgtgttgttcctcagctttggatgaatcgggagtcatttacgtgggtggaaaantgcagtgccaggactgcaccaagggctggaacgaatgggtaaatggtggcaaccctatgaaaggagttaaagtgtccctaacatgcatggacaagagaagtagggttgtgtattacacgagtgatacaacagatgagttggggcagtacgact

SEQ ID NO: 28713 - DNA, 271 bp, Glycine max
  unsure (1)..(271): unsure at all n locations; Clone ID: 701060493H1
gtgtgaaggtagggttttagaaactgatcctacggcatgttcatgtttttggttagcagagtaactaaggattcaatttcacgcaaccgcaatgctnctgcttcttttgctttctctagcaggtgtgctcattcattatcatttgccacagtagaagcagaagagatatcaggttctaggcctgctgaagttttgaacctggtgcaaggtaaatgggtaggatcttcaaattggaacacaattgcagatcctttaaatggtgactcattta

SEQ ID NO: 28714 - DNA, 140 bp, Glycine max
  unsure (1)..(140): unsure at all n locations; Clone ID: 701060494H1
caagtgctgtgaagccagatgactgggatgaggatgcacccatggnaattttagatgaagnagcaganaaacctgaaggatggttngatgacgagccagaggacattgatgacccanaggcgacnaaacccgaagacctg

SEQ ID NO: 28715 - DNA, 266 bp, Glycine max
  Clone ID: 701060495H1
catcaaagtttcttcctttctctgctctttgccttctctgacacatttggtgccttgtagagcgtgttttggcaggaaggtggtatggcgaaggacgttgaggttgctgagcgtggctcttctctgggaaggactaccaggaccctccaccagcaccactcattgatgctgaggagctcacaaagtggtccttttacagggctctcattgctgaattcattgccatttgctcttcctctacattactgtgctcacagtcatagggt

SEQ ID NO: 28716 - DNA, 271 bp, Glycine max
  unsure (1)..(271): unsure at all n locations; Clone ID: 701060496H1
acaaatatttggaagatgatttgtattcaactcccttcaatttgagagcaatctgcaccctgtgcagaaatgggcttccaataaccccnaaaaggatcacctcttcctgacttgaagccattgaagcagcacttcacttcttctcttgacttgaagggagttgaatacaaatatttggaagatgatttgaacaacaagagtgatttgctcctcaagtataacccagtttataaaatgattccagtgtttgttcannatgaaaagcccatat

SEQ ID NO: 28717 - DNA, 255 bp, Glycine max
  unsure (1)..(255): unsure at all n locations; Clone ID: 701060501H1
cnaaaactccagtttcttccaagaaagccaaaaatgctactcctgaaaagactgatggtaagaaaggtggacatacagcaactcctcaccctgcaaagaaaggcggaaagactcccaacagcgaagccaaagccaagactcccaacagtgaagccaaagccaagactcctaagtctggtggactctcttgcaaaacctgcagcaagtctttcaccaatgaaagtggtctgcaacaacataacaaggcaaagctgg

SEQ ID NO: 28718 - DNA, 249 bp, Glycine max
  Clone ID: 701060502H1
gagacagggagacaagacagagtagtacagattactaccaatggctaccaaggtttacattgtttattattctacgtatggacatgttgagaagctagctagagagatagaaaaaggggctgcttctgtggagggagtagaagcaaaactgtggcaggtacctgaaacattgcctgaagaagtccttgctaagttgggagcacctccaaagagtgatgttccaattattactcccaatgagctcctgag

SEQ ID NO: 28719 - DNA, 249 bp, Glycine max
  Clone ID: 701060503H1
gtttgttgtgagctataagctagtttatcgtgaggagaatatgaagttgtttgttttctttgttgctgcagtagttttggtagcatggccatgccatggcgcaggctaccaaaggttccctctccgaatgaaaactggctatggtgagcgttcttcggaggtaaaatgcgcaagttttaggcttgctgtggaagcacacaacatccgagcctttaaaaccattcctgaagagtgcgttgaaccaacaaa

SEQ ID NO: 28720 - DNA, 248 bp, Glycine max
  unsure (1)..(248): unsure at all n locations; Clone ID: 701060504H1
cttcaggtcaccatctagactgcaatcatggctgatggaccacancatccatcagttgttcagangctagctggacagtcttacctggtgtccaggcttagccccaactttaactctaggaattattctgcaactggntcttacgtcaatggcggaatgcactcgcctgggttggctgttgtgtcacctgtatctccagttactgtgcatgcttcagcagagaaaggagtgagtggatttctagtgga

SEQ ID NO: 28721 - DNA, 249 bp, Glycine max
  unsure (1)..(249): unsure at all n locations; Clone ID: 701060505H1
ttttccaaacgagcatcttcgtagtttcttaagtcaagagaagaagtgaagtgctgcttcaatggcttcaagtcaggaagaggtgatccttttgggggttattggaagcccatttctgcacagggtgcagattgctctcaaattgaagggagttgaatacaaatatttggaagatgatttgaacaacaagagncatttgctcctcaagtataacccagtttataaaatgattccagtgtntgttcacaa

SEQ ID NO: 28722 - DNA, 250 bp, Glycine max
  Clone ID: 701060506H1
ctcgcttcggttcaagaaatgaaagctctctgtcaactttctccccatcttcccaaactcgcaaatatgcttgaaggaggaggcaaaacgcctatacttagtcctcaagaacttgaagacgttggttataaacttgctatttatccaatttccttgattggggtttgcatacgagcaatgcaggatgcactcactgctattaaaggaggcgctgttcctcctccgggaagcatgccatcttttgaagaaa

SEQ ID NO: 28723 - DNA, 251 bp, Glycine max
  unsure (1)..(251): unsure at all n locations; Clone ID: 701060507H1
ctcacgtagcagtggttccaagtcctggcttcacccatctggttccaattcttgagttctccaaacgccttcttcatctccacccagagtttcacatcacttgtttcattccctcagttgggtcatccccgacttcctccaaagcatacgttcaaacccttccaccaaccataacttcncttttccttcccccaatcacccttgaccatgtgtcagatccctcagtccttgcactccaaattgaactctca

SEQ ID NO: 28724 - DNA, 251 bp, Glycine max
  unsure (1)..(251): unsure at all n locations; Clone ID: 701060508H1
gcaattgtttacattttttccccaaacttatccgatacaatcgagcaaatgcaacaaacgaaaccagagattcataattgcacgttctcttttgttgtctccagctcatagaatattacattaactctgattcattcagaatttcagattcaccttttcttcttctctntttttttnccccngaaagctttttgcagaaagttgtgattttnccntgaaaganggcatctttgagcatgacccagatcagg

SEQ ID NO: 28725 - DNA, 250 bp, Glycine max
  Clone ID: 701060509H1
gcaagaatttccattgcatgcaaagcaaatacgcattatattactagttttaatttgttttgtcgtttgcttctttctttgattaatgatgactagctttaaggttgcatgtgtggttgcgatgatgtgcatggttgtggccatgagtgttacacccatggcacaggccgcaatcacgtgcgggcaggtcgccggcgacgtgtctccgtgcctcagttatcttcgaagcggcggaaaaccgtcggacgcc

SEQ ID NO: 28726 - DNA, 250 bp, Glycine max
  unsure (1)..(250): unsure at all n locations; Clone ID: 701060510H1
cttgctccctcagaagcgaagaagaagccacagagaaccagtctcctactctctctcacccacaaganaaatggcatctcacatcgttggatacccccgcatgggtcccaaganagagctcaagttcgctctcgagtncttctgggatggcaagagcagcgccgaggatttgcagaaggtggctnctgatctcaggtcatccatctggnagcagatggctggtgctgggatcaagtacatccccagcaac

SEQ ID NO: 28727 - DNA, 249 bp, Glycine max
  unsure (1)..(249): unsure at all n locations; Clone ID: 701060511H1
ctcatcacttactggaagccttgttgtgagtaagagaaaaggcttcctgcaccgagcacaccaacttgatacctctgattctttctttgcttagaattccacagaatatggagacngttctttcaatcactccccacctttggaattcaagggtttgagcaaggaggaggaagactcattgctagggcaagtggaaatatggaggtacatgacatgcttcacggactccgtggccttgaaagctgtcat

SEQ ID NO: 28728 - DNA, 252 bp, Glycine max
  Clone ID: 701060512H1
gcttctcaagtctctcgaagcctctttctctctcttctagaagctatctgtgtttggtgttactaagtctccaacaagcaaagtacatggttgatttggaaatccaggtccccaccccattcgacccgtttgccgaggcgagagaatcggatgcccccggagcaaaggagtatgtgcatattcgaattcagcagaggaatgggaagaagagtctgaccacagtggcaagggctgaagaaggagttcagctac

SEQ ID NO: 28729 - DNA, 252 bp, Glycine max
  unsure (1)..(252): unsure at all n locations; Clone ID: 701060513H1
ttncctcttcagctctcttcttncccaatacctcgttcaatagctccaaggttctgagttgcaagctaacatgggtgagatagctttaccaaatggcattagcaatggcaatattaatggagtcaatggacaaagccattctcttaatggttacaggaagagttgttggtatgaagaagagattgaagaggacttaagatggtgcttgctctcaatagtatattgcatacaggagctagccagtaccaagac

SEQ ID NO: 28730 - DNA, 253 bp, Glycine max
  unsure (1)..(253): unsure at all n locations; Clone ID: 701060514H1
tcgttcgtcaccatgactttcaagcgcaggaatggaggtcgcaacaaacacggccgcggccacgtcaagttcattncgatgctccaactgcggcaaatgctgccctaaggacaaggctatcaagaggtttctggtgaggaacattgttgaacaggctgcagtcagagatgtgcaggaggcttgtgtctacgaacaatacacgcttccgaagctgtatgtgaagatgcagtattgtgtttcctgtgctatccac

SEQ ID NO: 28731 - DNA, 256 bp, Glycine max
  unsure (1)..(256): unsure at all n locations; Clone ID: 701060515H1
ctgcaaagcttttcgtcggaggtattccttacagcactgatgatctgagtttgcgagantcttttgctacgctatggagaagtaattgatgtcaaggttattatggatcgtgaaactggcaggtcaagaggttttggctttgtaacttttgcnacaagtgaggatgcatcttctgccattccagggcatggatggccaggatcttcatggtcggaggatacgggtgaattatgctacagaaaggtcacgtccaggg

SEQ ID NO: 28732 - DNA, 253 bp, Glycine max
  unsure (1)..(253): unsure at all n locations; Clone ID: 701060516H1
aggaacctaattgaggctgctgagcaagagtatgaganagaaaagctgaatgagagaattgctaaattgtctggtggtgtggctgtgatacaggttggcgcacaaactgagacagagctcaaggaaaagaaattgagagttgaagacgctcttaatgctacaaaggcagctgtagaggaaggtattgttgttggtggtggttgcactcttctgagacttgcatcaaaggtggatgcaatcaaggatagcctga

SEQ ID NO: 28733 - DNA, 248 bp, Glycine max
  Clone ID: 701060517H1
tcttcctttctctgctctttgtcttctctgacacatttggggccttgttgagtgtgtttttgcaagagggtatggcgaaggacgttgaggttgctgagcgtggctccttctctgggaaggactaccaggaccctccaccagcaccactcattgatgctgaggagctcacaaagtggtccttttacagggctcttattgctgagttcattgccactttgctctcctctacattactgtgctcacagtta

SEQ ID NO: 28734 - DNA, 248 bp, Glycine max
  unsure (1)..(248): unsure at all n locations; Clone ID: 701060518H1
ccgtcaacnncaacgacgacgaaaccacgaacgagttcttatctcgattcgtgtggataatgcggaagaaggtgaaggaagcgtaccctgactccgacaagcccaccgtcgacggcatgctcgtcgccatcgtcganatggtcgtctcggagatggaaaagggtaacatcggaacgacgtcgtcgttgttttgttctgctgatttcagcgaggatttgtggagaacggtgtgggaggtgagcagtctg

SEQ ID NO: 28735 - DNA, 90 bp, Glycine max
  Clone ID: 701060519H1
gaagatggcttcacgcaggctcgtatcttctctgattcgatcctacccttcgtagatctcaatcgaagccctcaatttccgcatcgacat

SEQ ID NO: 28736 - DNA, 249 bp, Glycine max
  unsure (1)..(249): unsure at all n locations; Clone ID: 701060520H1
cnaacaaacaaaccagagtaataaaaatcttcaacttttagcagttttttttttctatattgcagangccatggatttcagggtgatgggtttggattctccattgttccacacgctgcaacacatgatggacatgtcagaggacgctgcaggggacaacaagncatacagtgctccgacacggtcatacgttcganacgccaaagcaatggctgcaacacctgcggatgtgaaggaatatcccanctc

SEQ ID NO: 28737 - DNA, 249 bp, Glycine max
  unsure (1)..(249): unsure at all n locations; Clone ID: 701060521H1
caaacctaacgcagcatcgctattctcttcattccatggctttgcccaaccagcaaaccgnggattaccctagtttcaaactcgttatcgtcggcgatggtggcacaggaaagacaacctttgtgaaaaggcatctcaccggagaattcgagaanaaatatgagccaaccatcggtgtggaggttcacccattggattttttcacaaactgtggaaagattcgattttactgctgggatactgctggac

SEQ ID NO: 28738 - DNA, 246 bp, Glycine max
  unsure (1)..(246): unsure at all n locations; Clone ID: 701060522H1
gctcgagatcgtcagcaattaataaacttgtgcatttgggtgtgttttgctttcattttaancttgattccaaacttatgatttgagggtttgaagtttgacgatgtataaataaaaattttagagtttagtttgagtgcatcattgatttcaagaaagtaattaagacagacatcaagatgttcactgatnncttttattataataaaaataataatatttcanacaagatattaataaaaagtt

SEQ ID NO: 28739 - DNA, 251 bp, Glycine max
  unsure (1)..(251): unsure at all n locations; Clone ID: 701060523H1
gtttgcttcccaagtctctcgaagcatctttctttctcttcctgcagaagctatccgtgttacttgttcccaagtnctccaacaagcaaagtacatggttgatttggaaatccaggtccccagcgcattcgacccgtttgccgaggcgagagaatcagatgcccccggggcaaaggagtatgtgcacatacgaattcagcagaggaatggaaagaagagtctgacaacagtgcaagggctgaagaaggagt

SEQ ID NO: 28740 - DNA, 250 bp, Glycine max
  unsure (1)..(250): unsure at all n locations; Clone ID: 701060524H1
gtggtctgcaactatgagcaaggattatctaatcatactttctctccttctttccacggtgcttgcaactgcaagnnnnnnnnnnnnnnnnnnnnncctctatcttgggaagggcttctcccatcgcaaattgtctcccagttatcacattcacaaaaccattgacgaatcctatgcagttatcttcgatgctggtagcacgggaagccgtgtacatgtctatcgttttaaccaacaattagatctcctt

SEQ ID NO: 28741 - DNA, 179 bp, Glycine max
  unsure (1)..(179): unsure at all n locations; Clone ID: 701060525H1
agccgtagcagcagcggaagctctagcttgggcagcgaatcacaatggcgngaggattgaagaagcatttgaagaggcttaatgccccaaagcattggatgcttgacaaactgggtggtgcatttgctcctaagccctcatctggaccacacaaatccagggactgcctgccactcata

SEQ ID NO: 28742 - DNA, 244 bp, Glycine max
  Clone ID: 701060526H1
cttggtggtggcctcggcggtcctaccggtgggatcggagggtttggcggtaccggtagcggtgtcggtggcggtattggtggtggcgttggaactggcgttggtggtggcagcggtgttcttcctttcccttgaaatgctgaacatgcatgcatgcatgcatatatgctccgtcacgtttctttggattacactagtctttatttttcgttcgggaaataatgtggtttgtgctgtacgtgtc

SEQ ID NO: 28743 - DNA, 250 bp, Glycine max
  unsure (1)..(250): unsure at all n locations; Clone ID: 701060527H1
cacccttcacagttctcatgttatgattcaatctcacagagaatcttaggattctttgagtgagcagagagaggaagacacccanccctctaagaaatgcggtcaattcctttgggaacctcagtatctccaactcctataaacacctcaaagntntcacctttcagtgttaattttnagaagccaaccacctttccatctcggggttcaactcctcctcatgaattctctctctcccaatcaggattat

SEQ ID NO: 28744 - DNA, 249 bp, Glycine max
  unsure (1)..(249): unsure at all n locations; Clone ID: 701060528H1
cacagttgccacactacaccgagatnccccctaaacccgtttgcnttgttgtttgcgaagaaatggcgactaagaggagcgtgggaacgttgaaggagggtgatttgaaagggaagagggtgttcgtgagggtcgatctgaacgtgcctttggatgacaaccttaacatcaccgatgacactagagtccgtgctgctgttcccaccatcaagtacttaactggtcatggagccaaagtgatccttctag

SEQ ID NO: 28745 - DNA, 250 bp, Glycine max
  unsure (1)..(250): unsure at all n locations; Clone ID: 701060530H1
cttactgctattacgagacgacgcagatttagttcggattgttcncttgcnatggctaggaagatgcttatcgatggtgaagctgaattggctcaaggtggtggagaanaancccgaattttgacttcgacttgtttattattggggctggaagtggtggcgttcgtgccgctagattttcatccaattttggagctaaggtggggatttgtgagcttccatttcatccaattagttcagaaacaattgg

SEQ ID NO: 28746 - DNA, 252 bp, Glycine max
  unsure (1)..(252): unsure at all n locations; Clone ID: 701060531H1
gtttgttgtgagcnataagcnagttttatcgtgaggagaatatgaagttgtttgttttcttgttgctgcantagttttggtagcatggccatgccatggcgcaggctaaccaaaggtttccctctccgaatgaaaactggctatggtgagcgttcttcggaggtaaaatgcgcaagttttaggctgctgtggaagcacacaacatccgagccttaaaaccattcctgaagagtgcgttganccnacaaagga

SEQ ID NO: 28747 - DNA, 253 bp, Glycine max
  Clone ID: 701060532H1
agattttctcattgtgggctctcagtcctttaaggttgggtggtctgaactttacaactgatgatgttggcaatgttcttgcaatatcaggtcttgctattctagtcttccagcttaccctgtaccgattggtgcaaaaagcttgtggacctgttgctctagttcgtatagcaggggtgttatccatacctctcttgcaatgttatcccctcatgacaatgttatcaggcttcacactggacatagtgatcaa

SEQ ID NO: 28748 - DNA, 252 bp, Glycine max
  unsure (1)..(252): unsure at all n locations; Clone ID: 701060533H1
caccgtctacctatctgcacaaactttccttgtctttccctctcagttttgtcacttttcccccaaaactttcctccaaagctttcgattctctctctcgacccgcaccgatcatgcttcaaagcttggtcccccgatcccctcgcacttcaaaccccaacgctatgaaaactaagcgcgccgttgacgccggaggnatttcccccgccgacgaaccttccttcaagcggaccaacttctccggcgagaaaa

SEQ ID NO: 28749 - DNA, 247 bp, Glycine max
  Clone ID: 701060534H1
ggatgctgttctgaggttgattaagaatgcaaatccagacatatttgtgcatggcattgtcaacggatcctatgatgtaccattctttgtgtcacggttccgggaggctctctttcattacactgcattgtttgacatgcttgacaccaacgttgctcgtcaagatcccatgaggttgatgtttgagaaggagttgtttggacgggagatagtgaacatcatagcttgcgaaggttttgagagggtt

SEQ ID NO: 28750 - DNA, 244 bp, Glycine max
  unsure (1)..(244): unsure at all n locations; Clone ID: 701060535H1
ttttcaggcggtgaattgtcgatcaagaggtttcgattgacattgctcgtaattttggtattgcaattaggagtgcggtgttgattgcaaaggtgcactgcatgttcgattnttgagganagggggtcctctgttccgaggattcccgtcgttggttgttcagattcgtggctctgttgttcgaagtttaagagttgctctgaatttcaggtgttgaattttgttggggaaatgtttgcntctg

SEQ ID NO: 28751 - DNA, 247 bp, Glycine max
  Clone ID: 701060536H1
caaagtttcttcctttctctgctctttgtcttctctgacacatttggggccttgttgagtgtgtttttgcaagagggtatggcgaaggacgttgaggttgctgagcgtggctccttctctgggaaggactaccaggaccctccaccagcaccactcattgatgctgaggagctcacaaagtggtccttttacagggctcttattgctgagttcattgccactttgctcttcctctacattactgtgc

SEQ ID NO: 28752 - DNA, 249 bp, Glycine max
  unsure (1)..(249): unsure at all n locations; Clone ID: 701060537H1
ctcaccccacttactattattattgtacaacacaaccaggtccctnaatgctttttagagagagaaagagtaataataataaagtggaaganaaagaattaggagagtgannnnnnnnnnnnnnnnnnnnnnnnnnnnnnnnnnnnnnttgagaagatggtntttgaggaaactgagctgaggctgggactgggactatgtctccctggaaatggaaccacggcaacaactgaagctgctgctgcggaa

SEQ ID NO: 28753 - DNA, 248 bp, Glycine max
  unsure (1)..(248): unsure at all n locations; Clone ID: 701060538H1
ctgcacataaaaaaccactctacaaaactctccagtaattctgaanattttattttcttttggtgaaattaacagctctgtgattgatcaatggcgacaaaggaaggcaaagccataggcatcgatctcggcacgacctacagctgcgtgggcgtgtggcaaaacgaccgcgtcgagatcatccccaacgaccaaggcaaccgaaccactccctcttatgtagccttcaccgacaccgagaggctcat

SEQ ID NO: 28754 - DNA, 228 bp, Glycine max
  unsure (1)..(228): unsure at all n locations; Clone ID: 701060539H1
ggnaaactgttttataatgcagttaccgttaaatgctgcagcntttccctaagaaactgggcacaccaagaaaaagtgagattgtattcattgctccaactggagaggagatcagtaccaaaaaacaattggagcagtacctaaaggcacatcctggcaatcctgtcatttcagagtttgactggggaactggtgagacccctaggcgatcagcaaggatcagtgaga

SEQ ID NO: 28755 - DNA, 248 bp, Glycine max
  unsure (1)..(248): unsure at all n locations; Clone ID: 701060540H1
tgnggcttttatttgattctaaaaatgagacgtgctcttgctttgcttcctcttctcttcctgtttgnagcgattggggaatcaagaaaagatggaggaaaatattggaaaatgaacacgaganatcatcagatgccganaaaatttaaggctctcctcaaccaaaactttgagatccaatctgaaaagattctcaaaaccaaggaacaaattcttgaaggttctaaacatgattgcncaaaatctct

SEQ ID NO: 28756 - DNA, 249 bp, Glycine max
  unsure (1)..(249): unsure at all n locations; Clone ID: 701060541H1
tccaccaccgtgtgttaccttgttctctcttctcttctccatgcnactgaaagcttgaaacccacatagctagccatcaatggaatacagcaattgggctgaatctcttcaaaccgaaacccctctcccttctttcccacaaccctcatcatcatatcctcctacctattacccctcttaccctcaaaaccctaaccctaacccttcttcttctcttccccttaaccctcccggggttgatccccaaac

SEQ ID NO: 28757 - DNA, 249 bp, Glycine max
  Clone ID: 701060542H1
gtagccgtcgcactttgcgttttctgcgtcatctccgattccccgacaatggccacccaaatgagcaagaagagaaagttcgtagctgatggagtgttcttcgctgaactgaacgaggttctgacaagggagttagccgaggacggatactccggcgtggaagttagggttacgccgatgcgccccgaaatcatcatcagagccaccagaacccaagccgttctcggtgagaagggaaggagaatcagg

SEQ ID NO: 28758 - DNA, 249 bp, Glycine max
  unsure (1)..(249): unsure at all n locations; Clone ID: 701060544H1
tggttgattcgggtaatggtttaaaatacaccaacttgttcgacgctcaaatcgacgccgtttttncctgccatgtcagcagttcaaatacgacgacgttaagattgcagtttcggaaactggttggccttctgctggggactctaatgagattggagccagccccgacaatgcggcgtcgtataacggaaacttggttaancgcgtcttgagtgggagtgggacacccttgaagcccaatgagtcatc

SEQ ID NO: 28759 - DNA, 249 bp, Glycine max
  Clone ID: 701060546H1
ccggagatcctccgctttaaggccttcgagcccatcctcctgttgggaaagagccgcttcgccggcgtcgacatgcgcatccgcgtcaagggcggcggccacacctcccagatctacgccattcgccagagcatcgccaaggcgctcgtcgcgttctaccagaagtacgttgatgaacagagtaagaaggagatcaaggacattctggtgaggtacgatcgtacttgctcgtcgcggatcccaggcgct

SEQ ID NO: 28760 - DNA, 253 bp, Glycine max
  Clone ID: 701060547H1
ctgaggttaagtctgttgagatgcaccatgaggctctcacagagggctcttccaggtgacaatgttggctttaatgtgaagaatgttgcagtcaaggatctcaagcgtggttttgttgcatccaactccaaggatgaccctgccaaggaagctgccaacttcacatctcaagtcattatcatgaaccaccctggccagattggaaatggatacgcaccggtgcttgattgccacacttctcacattgctgtca

SEQ ID NO: 28761 - DNA, 254 bp, Glycine max
  unsure (1)..(254): unsure at all n locations; Clone ID: 701060548H1
ctctgcaaaccgttcttgggcagtgagaaagatgctcaaatgtgtanatatgatgcttcatggaacactcacttcggtttttgttgtgacattgatgaagaaatatcctcccagctggccagtttacctgaggtcttgttggttaggcctgacctggatttcaactctttgaaaaaagactatagtttatcaagtggcgaggcaggccacctatcaggattacgaactagaactaatatgttgttccctgctgg

SEQ ID NO: 28762 - DNA, 249 bp, Glycine max
  unsure (1)..(249): unsure at all n locations; Clone ID: 701060549H1
ggagctaganagtagagacacaaaatccaaaagagtctatagttgaagggtgagtgtcaccttggaaatccatccatggctcccactcttacatccaattcatcttttataactagcactcctcattcaagggtgaccctccggaatccaaggctgagagtctttgccaagaagtctggatcattcccatcttttgggctaggcaagcccaaagatgattcttcttcttcaactgaagaaaaagatggc

SEQ ID NO: 28763 - DNA, 246 bp, Glycine max
  unsure (1)..(246): unsure at all n locations; Clone ID: 701060550H1
cnctctttgagaggttggtgtagtagctttttggagggttgacatggaagaacggtatganccattgaaggagcttggtgctgggaattttggtgtggcaaggttggcaaaagacaagaaaactggagagcttgttgcggtcaaatacatagagaggggcaaaaagattgatgagaatgttcagagggagataattaaccaccgatctttaaggcatccaaatataatcaggtttaaagaggtgtt

SEQ ID NO: 28764 - DNA, 247 bp, Glycine max
  unsure (1)..(247): unsure at all n locations; Clone ID: 701060551H1
gcgattaattatagtttaggcagcaaattatggaatcccatgatgaggagcatgctgccaaactacttagagctcaaacccacatatggaatcacatatttagcttcataaactccatgtcccttaaatgtgtggttgactnaggcataccagatatcatacacaactatggccaacccatgccactctcaaacctcattgcttcactaccaatccacccatccaaaacttgcttcgtccattgctt

SEQ ID NO: 28765 - DNA, 245 bp, Glycine max
  Clone ID: 701060552H1
gagaataccagttgctccagtagccggcactaaacaacatggcggacaaggcagtcaccatccgaaccaggaagtttatgacaaacaggcttctctccagaaagcagttcgtcgttgatgtccttcatccagggagggctaatgtttccaaggctgaactgaaggagaagctgggaagaatgtatgacgtgaaagacaccaacactgtatttgtcttcaagttccgaactcattttggtggtggc

SEQ ID NO: 28766 - DNA, 245 bp, Glycine max
  Clone ID: 701060553H1
caccatggtctctctttaagcaagggggcactgctgctgaagcagctgctaaggaccttgtaattatattagagacagtgaggattattgcaattgcactctttcctgttacaccaagcttgagttggagaatatatgcacaacttggctattccagggaccaatttgatgcagcaacctggagagacaccaagtggggtgggctaagggtggccaagtcatggctcaacctaaaccagtctttg

SEQ ID NO: 28767 - DNA, 246 bp, Glycine max
  Clone ID: 701060554H1
gtcaacgtttttggtaagcaagcaagaatcacaaattggaaccatgtttctcaaatgttttggcttcggcgctcggggacagtatccaacggtgatagaagacggcgctcggagacagtatccaacggtgatagaagagttgtgccatcgattttctctcgcagatctaaggaaatcaaccaacaatttcgatcaaaacacagcaattgatcgtggtagagtatataaaggttgtctccaacacaa

SEQ ID NO: 28768 - DNA, 247 bp, Glycine max
  unsure (1)..(247): unsure at all n locations; Clone ID: 701060555H1
tgtgtcaaggcaactaaagcttctctcgctttgcaaganagggaggagtgagtgagatggaaggagtgatacacagaacagtggaagtgaatggcataaaaatgcacatagcagagaaagganagggtccagtggtgttgttcctccacggcttccctgagctctggtactcatggcgccaccagattctctctctcagctccctcggctaccgcgccgtcgctcccgatctccgtggctacggtga

SEQ ID NO: 28769 - DNA, 246 bp, Glycine max
  unsure (1)..(246): unsure at all n locations; Clone ID: 701060556H1
gagtttgttgtgagctataagctagtttatcgtgaggagaatatgaagttgtttgttttctttgttgctgcagtagttttggtagcatggccatgccatggcgcaggctaccaaaggttccctctccgaatgaaaactggctatggtgagcgttcttcggaggtaaaatgcgcaagttttaggcttgctgtggaagcacacaacatccgagcctttaaaaccattccngaagagtgcgttgaacca

SEQ ID NO: 28770 - DNA, 248 bp, Glycine max
  Clone ID: 701060558H1
cacggcgctaacaacggtcttgacatcgctgttaggcttttggagccacttcaaagcggagtttcctattttgagctacgccgatttctaccagttggctggcgctgttgccgttgaggtcaccggtggacctgaagttcccttccatcctggaagagaggacaaacctgagccaccaccagagggtcgcttgcccgatgccactaagggttctgaccatttgagagatgtgtttggcaaagctatgg

SEQ ID NO: 28771 - DNA, 247 bp, Glycine max
  Clone ID: 701060560H1
tcgagataactagaaacagtgtgatgaaaatgaaggtcttgttttcttcgttgctacaattttggtagcatggcaatgccatgcgtacgatatgttccctctccgaatgaacactggctatggtgcccgtactccggaggtgaaatgcgcaagttggaggcttgctgtggaagcacacaacatctttggctttgagaccattcctgaagagtgcgttgaagcaacaaaggaatacatccatggcgaa

SEQ ID NO: 28772 - DNA, 249 bp, Glycine max
  unsure (1)..(249): unsure at all n locations; Clone ID: 701060561H1
ttaagtctctgcattattctcttcccttttctatctccctctgcanaaacgaagtaaatgggtcggcttaatctcctacttgtgtggtcactctctttaacacttttccttaattatctacacccaacctctgcccagctcagtccaaaccactatgctaacatatgccccaaccttgaaagcatcgttagacaagccgttactaataagttccaacaaacctttgtcaccgtcccagccacccttcgc

SEQ ID NO: 28773 - DNA, 251 bp, Glycine max
  unsure (1)..(251): unsure at all n locations; Clone ID: 701060562H1
caatttcttcatttctctcttcctctcaccgagtcacgncactacggcttgactcgtacgaactccgatccccccccgagtcacactcaaccagcaccaccgcccgatccgacgatgtctcgcgcctcctccgccgcagattccgccgcctccggtgagatcatactgttcggagtcagantcgtcgtcgattccatgaggaagagcgtcagcatgagcaactctcaacagtacgagcatcctcaagangg

SEQ ID NO: 28774 - DNA, 253 bp, Glycine max
  unsure (1)..(253): unsure at all n locations; Clone ID: 701060563H1
ctcttcaaaagggagaagnnaaggaaagaaaactctcaaaaaactattatagcaatggcagaacaaaaccaaaaccaaacaactgaagctggaaggcaccaagaggttggtcacaagagccttctccagagtgatgctctttaccagtatattctggagacaagtgtctacccaagagaacctgaatccatgaaagaactgagagagttgacagcaaaacacccatggaacatcatgacaacctctgcagacg

SEQ ID NO: 28775 - DNA, 253 bp, Glycine max
  unsure (1)..(253): unsure at all n locations; Clone ID: 701060564H1
ctcagaacgacgtgttcctgccgcgtccgccaccgctcccaccacgcagcatatactcacagcaataacagcattgcactgaaccctaactcatcactgcacttgcgaagacacagccacaatcacgcatcgctgaaactcgtcatcacactattagactcatagcactgatnnnnnnnnnnnnnnnnnnngtgaacgttggtggtcgacgacggcgttgcggttcataggtnganatncgggngtgatgttg

SEQ ID NO: 28776 - DNA, 250 bp, Glycine max
  unsure (1)..(250): unsure at all n locations; Clone ID: 701060565H1
ggaaatttctggcgatctctgcgttttcccctattttttctgaatctaacaacaaacattcctctggcaacaatcatacactattaataagagttccttccttcactctcacccaagccaaagaaaggaacaagaacaagaacaacaaagtaacgtgaaagagagagagatggaggcgnttgttccagtggtggatttccagaggctttcagaggnngaggagcgcaagaagctgngaaaaacatgtgag

SEQ ID NO: 28777 - DNA, 245 bp, Glycine max
  Clone ID: 701060566H1
tcccttctcggcccattcttcttcttctgctacaccattcattcgagcattcggttttgaatcttttgagcgaaaatgcagtcgagtcctttgcttctggaggaacccataaggatggcctccatcctcgagccatccaagcctagtttctttccagcgatgacaaagattgttggcacacttggcccaaagtcacgatcggttgacgtgatttcccaatgtcttgaggcaggaatgtctgtggc

SEQ ID NO: 28778 - DNA, 247 bp, Glycine max
  unsure (1)..(247): unsure at all n locations; Clone ID: 701060567H1
ccaaatcctcacttatccaaattcgatactccaatccccacccaaattccccgcatcgactcccctccccaaaattcccccatcgccggcgtctcccgcggccgaacgncancacatcgccgattcggctacggcgctaacagtggctatcgtatgggtaagattctccaagaaaccgcgaagccgtcggcgaattccacatcggcgtacccctctgcggcgcccggcaccacgtcgtcgatgtcgg

SEQ ID NO: 28779 - DNA, 215 bp, Glycine max
  unsure (1)..(215): unsure at all n locations; Clone ID: 701060568H1
cgctatctcagtggcannacgcagcatgtggactggagcaagatccagacgactacggacgacntggttgtgccttacgacactttggcgccaactcctgaaggttcttcggaggtgaagaatctattggacaagcttgtggtgttgaagctaaatggaggcttgggaacaactatgggttgcactggtcctaaatctgtaattgaagttcgtga

SEQ ID NO: 28780 - DNA, 249 bp, Glycine max
  unsure (1)..(249): unsure at all n locations; Clone ID: 701060569H1
gcagcatataatgaattgaagtctgctggagttgaatttccaccaacgagatgagaanccgtgtaccattcttcactacccgctcaaactcagccaattattcattctgctgcagaatatgatgatgctactattcaggcttctcttcngtcagatgcatctgaccttagtttgctagagattcaaaatgctcaaggactagctgatgtattgatggaaatgcttagcgccttgagtcctaaagaccgt

SEQ ID NO: 28781 - DNA, 242 bp, Glycine max
  unsure (1)..(242): unsure at all n locations; Clone ID: 701060570H1
aaaacgcgtcttcataaacgccgcccaaaacttctcatacccttttattcattccattcgtttctagggttttcttttctttgccgagaaaatgagagagtgcatttcgatccacattggccaggccgntatccaggttggaaacgcctgctgggaactctattgccttgaacacggcattcagcccgatggacagatgccgagtgacaagaccgttggcggaggagacgacgcntcaacac

SEQ ID NO: 28782 - DNA, 245 bp, Glycine max
  unsure (1)..(245): unsure at all n locations; Clone ID: 701060572H1
tcccacaagatcgtcattttttccaagacctattgcccgtactgtagaagggcaaaagctgttttcaaagagttgaaccaagttccacatgttgttgagctcgacgagagagaggatggttcaaagattcaggatatcatgattaatacngttgggaggcgtactgtgccacaagttttcattaatggaaaacaccttggaggctcagatgacaccgttgaagctatgagagtggacatctgcat

SEQ ID NO: 28783 - DNA, 244 bp, Glycine max
  Clone ID: 701060573H1
tttctgcagtcggcaactcttccctttctcttgaagcttctattctgtgctgttgctgaatcagaatggatggtgctgtgttggcatgtacagatggagcagttcttcccgtcagtcaagtgtttgatgcaattagagagcttgggaatggagggcttgagcaatgggatcctcttgtccttacttctgcctcactcttaagcaagttgcctgtggattcttcctctgttgattttgtgatttt

SEQ ID NO: 28784 - DNA, 246 bp, Glycine max
  unsure (1)..(246): unsure at all n locations; Clone ID: 701060574H1
atcaacatggtttcgctacattgcccacaagctcgaatactccttctccctcagctggaagaactacaaaggaggtcaaattacagacagagaggtacgtgatgttgtttggaaaaacttctttcaaggaaagctgacgtacttgcactggaataaaggagaggagatggcccctactattnatggaaaagcagtaactcttgttcggaaattaccagttgtagacccaacgcgtgtttttgtagg

SEQ ID NO: 28785 - DNA, 245 bp, Glycine max
  unsure (1)..(245): unsure at all n locations; Clone ID: 701060575H1
ccaattctctacacttcaatattccttatttttggcgaagtcgtattgactattgaagatggccattgacgacctctgcggcgattnctgaagctgaaactccgctgctatcggagacgctatacggcgtcgtcaacttcaagggcctccccgtcctacgatctacctctggtggttggaaagctgctgccttcattataactgtggaagtggctgagagatttgcttactatggaatcaactcg

SEQ ID NO: 28786 - DNA, 248 bp, Glycine max
  Clone ID: 701060576H1
gctagctactcgtccgtcgttaagacaacaattatgttggctgacttgaaggacttcaagaaagtcaatgagatctatgctaaatacttcccttcacctttccctgctcgttcaacttatcaagtagctgcattgccattggatgccaagattgaaatagagtgcatagcaactttataagcatcaattgtactagtacatctggctccatcagcaaactcaggttaacaatggcaggaagggacata

SEQ ID NO: 28787 - DNA, 249 bp, Glycine max
  unsure (1)..(249): unsure at all n locations; Clone ID: 701060577H1
gngaaaacaaaccaaaaagtctgacctttccctttctccaaaggatcatcaaactaaactaaatcaaatcaaaatcaaactttgtcacggttatattagacccttttataaacctctttcaaggcttttcaatcacaccctttctctaatcacttcttcttgtgctggcataacttcaacaacttattctttgttctcgatctcacgatggctcatttggccctgtctcagatggctgtaactgttcct

SEQ ID NO: 28788 - DNA, 252 bp, Glycine max
  unsure (1)..(252): unsure at all n locations; Clone ID: 701060578H1
gaagcccaccacctcagnaaacagaaaacagagtgagtgagtgtgttgtgtaatatggataaaagctgttcatccctctagcaatactagtataagcacatcctcngnngnngaanccaacaacaatagcagggatcaatatcttcgccatctcaacaagctctctcaaaagatctccaaacccatcattaagaaacccgtctttgatcctcctcaggcccaagtcccaaacaatcaggtgcagcatcagcc

SEQ ID NO: 28789 - DNA, 249 bp, Glycine max
  Clone ID: 701060579H1
ttttctctctccatccaacatcgaaacgaggtcgttttgtgttccgccgaaggaaccggaggttgtagcaggctagcagctatggatttggcatccaatctcggtggcaagattgacaaagccgaagttctctctgccgttcagaagtatgagaagtatcatgtttgctatggaggtcaagaggaagagaggaaagctaattataccgatatggttaataaatactacgatcttgttaccagcttttat

SEQ ID NO: 28790 - DNA, 250 bp, Glycine max
  Clone ID: 701060580H1
tttcctgtttacgatcttattgcaattttgcaactttcaaagcttattagctaaagtaacatcaaaagatgtcattgattccaagtattttcggtggcccaaggagcaacgtgttcgatccattctcactcgatatgtgggatcccttcaaggattttcatgttcccacttcttctgtttctgctgaaaattctgcatttgtgaacacacgtgtggattggaaggagacccaagaggcacacgtgctcaa

SEQ ID NO: 28791 - DNA, 247 bp, Glycine max
  unsure (1)..(247): unsure at all n locations; Clone ID: 701060581H1
ttatcgataacatatttcacttgagacagttatctttatctacgcaagagaagaatagaaaatggatatcaggttgatggatttggactctccattgttcaacactctgcaccgaatcatggatctgacagaggncgcagagaagaacttgaacgctccgacgcggacatacgtggcgcgacgcgnaggcaatggctgcgactcctgcggacgtgaaggagtaccctcaactacttacgtgttcgtg

SEQ ID NO: 28792 - DNA, 244 bp, Glycine max
  unsure (1)..(244): unsure at all n locations; Clone ID: 701060582H1
cttttcttctcatttttantctttactttttttcttcttttttttcnctcgccgttgtaacagaatatcacgattttcgtttcgccaattcgtgaaatcgaaagattcccacagaattgtacgaattattgttcattttttngtctctactgtcgngctccaacttggtaaactagaagttcatttatngttttcatnctncaatgggggatgctgagaatgccctnccacctacaaagaaaag

SEQ ID NO: 28793 - DNA, 244 bp, Glycine max
  unsure (1)..(244): unsure at all n locations; Clone ID: 701060583H1
ttcctcacaatcagctccacatttttcaaatcccaattttgccctcctcccttcccctctcgcgtggtggcgtgtcacgttggatccaattccaatgttcaaaagcacgttgccaccgacctcaagtncgtcctccacgacgccctccatgactctggaatcaacaccactcatgccagagaagctagggagcatttctgctcacaaattaggagattcactgatattgagaagggaaccagta

SEQ ID NO: 28794 - DNA, 103 bp, Glycine max
  unsure (1)..(103): unsure at all n locations; Clone ID: 701060584H1
gnnttaatttcttaatcaataggtgttagttagcaagactncttaactatatattaaccacatcaaaacatatagattcatgcactatctgttggtctgncac

SEQ ID NO: 28795 - DNA, 243 bp, Glycine max
  unsure (1)..(243): unsure at all n locations; Clone ID: 701060585H1
gagaacgaacttgctttatgtgtcaaagatttganctctccgagcttccatccttccttggtttctctctgggtcacggattcatttgaganaaaggatgcggaaagagatcttttggccaaactacttgtcaaccttgtgaaatctcagcatggaaccttgaatcaagttcagctcattaaagggtttgaatctgctctcagtacattggaggatgctgttnatgatgctcccagagcagca

SEQ ID NO: 28796 - DNA, 244 bp, Glycine max
  Clone ID: 701060586H1
ccgcctcttccgtaggcagcagcaatggcctcaaatcccaaaactttgacctttgaggaggtagctaagcacaacaacaaaaaggattgctggattattatcaatggaaaggtgtatgatatcacaccatttttggatgagcatccaggaggtgatgaagttttgctgacgtcaacagggaaggatgccaccattgattttgaagatgtgggccacagtgattctgctatagaaatgatggaaa

SEQ ID NO: 28797 - DNA, 247 bp, Glycine max
  unsure (1)..(247): unsure at all n locations; Clone ID: 701060588H1
ctaataatgaattgaagccacctcagagatctgagcttgcaagtnangagtttggacagcggcagaataaaccccgaagatattcagagatgaattttggtcagtgaatagggtgcagcttgtttgaaatttgaaataagcagatgaaggcctttctcctgggccctttgttctctagcttttgatctggagcactttgggctacaataagttttcagatttttttagttatataatgcctgccccc

SEQ ID NO: 28798 - DNA, 244 bp, Glycine max
  unsure (1)..(244): unsure at all n locations; Clone ID: 701060589H1
ccaggatgaacttaggcgtggttactctccatcaaattcaccaaaaccaacccaggatgaactaaggcagcagaaggaggaggatatggatgattactgttcgcaggtccctgttcgacacttggtatttatggttcatgggattggtcaaagattggaaaagtccaatttggnanatatnaaaagcaatttccggcatattacagcaagtcttgcagagcagcaccttactccacatcaagtg

SEQ ID NO: 28799 - DNA, 243 bp, Glycine max
  unsure (1)..(243): unsure at all n locations; Clone ID: 701060590H1
tcccttcactgctttttaggttcctgaaatcccctagtacttttcttgttcaaaacagctttttccttatccaaaaaacaaacagcaacacagatggctaaggagcaaatgaagcctattgccactcttcttttggggctgaacttctgcatgtatgccatagttttgggcattggtggatgggccatgaacagagcaatagatcatggttttattataggtccagaattaanactaccagca

SEQ ID NO: 28800 - DNA, 245 bp, Glycine max
  unsure (1)..(245): unsure at all n locations; Clone ID: 701060591H1
gaaaacccaaagtgcttctctcctctgtctttttctctctcttgctatccttttggctagtngcactgctgcaagtgcaactaccaagaagcgcagtgccaagccaccatgtttcaacattcaacagaagcctttttccttccacttttctctttggaattggttctctgcttaccaggcagaaggagcagcaagtgtagntgggagaggaccaagcatatgggacacctaacactagacagcat

SEQ ID NO: 28801 - DNA, 245 bp, Glycine max
  unsure (1)..(245): unsure at all n locations; Clone ID: 701060592H1
gcgttctatatattattgnattgacaatgaggcctgctcttgctnctgcttcctcttctatntgctttctngttagctgccactacggaatcaagaaaagatccaggggaatattggaaaatgatcatgaaagatcaggaaatgccagaaggacttcaaggtctgtttcatttcaatctgaaaataaccctaagactcaagagcagcttggtaaaggttccaaaaaccatgtgaagagtctctag

SEQ ID NO: 28802 - DNA, 249 bp, Glycine max
  unsure (1)..(249): unsure at all n locations; Clone ID: 701060593H1
gtcggtgtttacaagantangtngtncccangatcaatnccgatgaccgtccctaacttggtggcttcctccttagcaatggacggtcatcggcattgatcttggaacaacctattcatgtgtcggtgtttacaagaatggccatgttgaaatcatagccaacgaccaaggtaaccgtatcaccccatcgnnggttnctttcaccgacagtgagagactcattggggaggctgccaagaatcaggcagt

SEQ ID NO: 28803 - DNA, 247 bp, Glycine max
  unsure (1)..(247): unsure at all n locations; Clone ID: 701060594H1
gctaagtgtgagananagaaaatgccaaagtctcaatttcgaaccccatttcttgtttctttttctcttttgttattcatcttcaacctcaccccttcatacgcactctatggagcatccacacccgtgcttcaactcactccctctaacttcaagtccaaggttctgaattcaaatggagttgttcttgttgaattctttgctccatggtgtggacactgtcaggctctgactcctatatgggaga

SEQ ID NO: 28804 - DNA, 251 bp, Glycine max
  unsure (1)..(251): unsure at all n locations; Clone ID: 701060595H1
cgaagcattanttaaacaacatgaaggcatggaccattaattctctccctatncgntcactgatcattcactgcaattctccattcatccatccacggcacnaccatgcttcttcttcnttacctctcccttctgtgttcccttccccacattgcattgtcntcccattgcaccgtggaaaccgccacgaaaangtttaaaaaatgcatgaacctcccaacccagcaagcctccatagcgtggacattcca

SEQ ID NO: 28805 - DNA, 250 bp, Glycine max
  unsure (1)..(250): unsure at all n locations; Clone ID: 701060596H1
aaccaccaatcaatctgttctaccctggcattgtgttgtttctagttggcatcattggcaacttctaccaccattaccttctgtccaaattgaggggaaagggtgaaaaggagtacaagattccaaagggtggcttttttgagcttgtgatttgcccccactacttctttgagattactgtgttttatgggatcttcttcatttctcagacattatattcattcgctttcgcngtaggcactactatgta

SEQ ID NO: 28806 - DNA, 276 bp, Glycine max
  unsure (1)..(276): unsure at all n locations; Clone ID: 701060602H1
ttccttccattcctttcttccggatcacagggaaaataaaaaacaatggagttggacttgacaccaaagacagcagaagtgttgtttganggagatggtggaggttactacacttggtggagttctaaagtgccactgctggccaagaccaatgttggtgctggtcggttagtgcttcagcctcagggctttgctattcctcattattcagatatatccaaagtaggttatgtgcttcaagggaacgatggcgtactgggatggccctccgcaaca

SEQ ID NO: 28807 - DNA, 275 bp, Glycine max
  unsure (1)..(275): unsure at all n locations; Clone ID: 701060604H1
ctctccttcaaaatcgttgtcaatttcgcctctttctttctcaactcccttagattctctccatcgggtcttcaaaaatgcggatgagctgcaatggatgtcgagttctcagaaaaggttgcagtgaaaattgcagcatcagaccctgtttacaatggatcaaaagcccagaatctcaagccaatgctactgtgtttcttgccaagttctacggccgtgctggtctaatgaacctggttaacgcaggccccnaacatcttcgtccagcgatcttt

SEQ ID NO: 28808 - DNA, 271 bp, Glycine max
  Clone ID: 701060605H1
gaacttctaataatggtggaaggtcaaatcactgctggttttatgaccccaactgcactttataccaagacactgaaacctggagatattatggtttttccacaaggacagttgcattttcaggttaattctggaaacggaaaagccactgcttttctggcattcagtagtgcaaaccctggagcacaactacttgaccttctgttatttggcaacaccttgccttctgacttggttgcacagactaccttccttgatgttgcacaagtcc

SEQ ID NO: 28809 - DNA, 272 bp, Glycine max
  Clone ID: 701060606H1
gtgagatagagagagacgcttcgcaaatctcaatcgaatctcagaaaaatgagagaaatcatcagcattcacataggtcaggccgggatccaggtcggaaactcctgctgggaactctactgcctcgaacatggcatccagcccgacggcatgatgccttctgactccaccttcggtgtagcccacgacgccttcaacaccttcttcagcgaaaccggatctggcaagcacgtcccccgtgctgtcttcgtcgacctcgaacccaccgtcat

SEQ ID NO: 28810 - DNA, 193 bp, Glycine max
  unsure (1)..(193): unsure at all n locations; Clone ID: 701060607H1
caattatggtttccaatttattaattgtgtgttgagtttttgtttttggattttgggtactaaaanctatgtattggggtttaaatttcatagggttttagaaaaattgatccagataggtgggagtttgcaaatgaaggattccttagagggcacaggcacctgttggcaaacataaggagaaggaaacaac

SEQ ID NO: 28811 - DNA, 270 bp, Glycine max
  Clone ID: 701060608H1
ctgtgaagagtgaaaaaatgccgcaagacttggcattggatttggaggagcttcgccacctccacagcatcgtcaaaagacctcgaactctctctctactctcctccgaaattcgcatcctcgaaaagttatcgtcatcagaggagccttctgcgcaggcttcgcagattccggcgccgattacgaccggaactaaggtggcgccttcagttgcactgaattatgccgcactcgcttcgttcagttgggatcaggatagcgacaaagtta

SEQ ID NO: 28812 - DNA, 270 bp, Glycine max
  unsure (1)..(270): unsure at all n locations; Clone ID: 701060609H1
cgaagncccnaaagnggagagacaagaagantanacactcgagnaatttctcacttagggtttggatttttcgagtaatcttctctctccgtcacttcatctcacgcgatctcgttcngatcgcacgcgttttaatnatcgtcntcttccgcggcctctgattcgnctctgatcttcctcgccgcacctctccgcacctctccgccggaaccatgatctccgtgcagggcgacctaccaccgccaccaccancactaccaccancagccg

SEQ ID NO: 28813 - DNA, 262 bp, Glycine max
  Clone ID: 701060610H1
agagacttcctgggcatctctgaaactgctgctatttttgctggtgtggatgttacaaaggaacccattcctgttttgccaactgtacattataacatgggcggtattcccacaaaccattatggagaggtggttaccattaaaggtgacaatccagatgcagtggttcctggattgatggctgccggggaaacggcctgtgcatcagtccatggtgccaataggctggtgcaaattcacttctggatatcgttgtttttgg

SEQ ID NO: 28814 - DNA, 264 bp, Glycine max
  unsure (1)..(264): unsure at all n locations; Clone ID: 701060611H1
tcttcccccacccaaccctttncgnntttctctatttctaatcatgggtatgcgctgaagtgtggaaatttntaatttttattttctcggatcggcatggaacccgaacatcatgattcttcgaacatgcttttgtttcttcccgatgatgttttcgccatcgtttctcggttcatgtcgccgagagatgtgtgcaatctttgcctatgctgcaagagcttaaacgctccttgtggcatccgagaaactctggctcacgcaatg

SEQ ID NO: 28815 - DNA, 262 bp, Glycine max
  Clone ID: 701060612H1
ctatttccgaagcctactagttgtcctttgtcctttctgggtttgcagaatttcttacaaccctgtatcaaacaaggcatctttgattcttctctctcacacttcttttggcacttcatgcttcaactctgacttagctccttgccttcaatataccagacatgcaattttattgagccctgaataatataatccataagacagaagaaagtgaagaggcatggcatccctcattcctggagttctactgaagctctccaaa

SEQ ID NO: 28816 - DNA, 260 bp, Glycine max
  unsure (1)..(260): unsure at all n locations; Clone ID: 701060613H1
cgccagactgagaggaagagngagggagattctttgtttgctaccttctctcggaaaaatggttacgttcaggtttcaccagtaccaggtggttgggagggctcttcccacggaagcagatcagcaccccaagatctaccgaatgaagctctgggccaccaacgaggttcgcgccaagtccaagttctggtattttctgaggaantgaaaaaggtgaagaagagcanggccaatgcttgccatcnacganattttgagaa

SEQ ID NO: 28817 - DNA, 263 bp, Glycine max
  unsure (1)..(263): unsure at all n locations; Clone ID: 701060614H1
actagccgcagcacgaggagcagcctcaggaggagaaggatgtctcacaggaagttcgagcacccaaggcacggttcactgggatttcttcccaggaagcgtgctgctcgtcacaggggaaaagtgaaggcattccccaaggatgacccatccaaggcacccaagctcactgcattcttgggttacaaggccggtatgactcacattgttagagaggtcgagaagccaggatcaaagcttcacaagaggnaattgtgagcctg

SEQ ID NO: 28818 - DNA, 276 bp, Glycine max
  unsure (1)..(276): unsure at all n locations; Clone ID: 701060617H1
catgtgngtctatncagcattgttcatgagatttgcatggatggtacagccacggaactatctactttttgcttgtcatgcctccaatgagactgttcaactctatcacttcacccgatgggcaaaggcacaggggcttctgtcggaaaagaaggaggaagcttcatcccagtgatttggtgatgctaaaagactttcttgagtggagcgattttaaagattttgcatttgaacttggcgatgtatgaataatgattactgattgtnagaaggggc

SEQ ID NO: 28819 - DNA, 275 bp, Glycine max
  unsure (1)..(275): unsure at all n locations; Clone ID: 701060618H1
caattttccacaaaagcccatattatgtctcatgtttaaatcattaagcaaattgaattttacacaaccaattgcatgtggatatcatatgaaaaacctcaactttagttaatgggtttcgtttaaatggttcatttttggggagtgctttgctggagcatgataattgtgctcttgcatattgaattgaattgaatnatcttgtggctgatttattnatgaatttatngtctatncttgtgttgctgtatgatcaactgtctgaggagaaaatt

SEQ ID NO: 28820 - DNA, 274 bp, Glycine max
  unsure (1)..(274): unsure at all n locations; Clone ID: 701060619H1
cgaattctgaatcaaaattcatcgaagaagaaggagaaggagatgtatagcaattncaaagagcaagcaatagagtacgtgaaacaagcggtagatgaagacaataagggaaactacgcgaaagntttcaactttacatgaacgcgttggagtatttcaaaacgcacctcaagtacgagaagaaccctaagatcaaggaggccatcactcagaaattcaccgagtatctccgccgggccgaggagatccgggccgtcctcgacgatgggcccag

SEQ ID NO: 28821 - DNA, 274 bp, Glycine max
  unsure (1)..(274): unsure at all n locations; Clone ID: 701060621H1
cggcgcggcacccanacanacagttcgtcggaatgggaagggtgnttcgcgctcagcgtaagggtgctgggtcggtgttcaagtctcacactcaccaccgcaagggtccggcgangttccgcagcctccgacttcggcgagcgcaacggctacctcaagggcgtcgtcaccgacatcatccacgaccccggtcgcggcgcccctctcgccaaggtggcattccgccancccttccgntacaagaagcaaacggngctcttcgtcgccgccgagg

SEQ ID NO: 28822 - DNA, 268 bp, Glycine max
  unsure (1)..(268): unsure at all n locations; Clone ID: 701060622H1
ctccatttgactacaaaacagtctccatttgacacagtcctagtngtgtactacttattatggccacaccagcatccatcactaatgtcactgtggagttccttcaattccccgcactggtgacacctcctggctctaccaaatcctatttccttggcggcgcaggggtgagagggttgaatattcaagaagaatttgtgaagttcacgggaataggtgtttatttggaagacaaggcgtgtcatcactcgctgccaaatggaagggc

SEQ ID NO: 28823 - DNA, 267 bp, Glycine max
  unsure (1)..(267): unsure at all n locations; Clone ID: 701060623H1
ctagaaacagtgtgatgaaaatgaaggtccttgttttcttcgttgctacaattttngtagcatggcaatgccatgcgtacgatatgttccctctccgaatgaacactggctatggtgcccgtactccggaggtgaaatgcgcaagttggaggcttgctgtggacgcacacaacatctttggctttgagaccattcctgaagagtgcgttgaagcaacaaaggaatacatccatggcgaacaatatagatcagactccaaaacagtta

SEQ ID NO: 28824 - DNA, 266 bp, Glycine max
  unsure (1)..(266): unsure at all n locations; Clone ID: 701060624H1
gattcatcaaattgtgcttcggactccaaggngtgcttcagcacaggtatgcttacatggggcgcaggtcacttcatggcggaatgagcatggggaagaacttctattcacaagcagcaaggcaattttcaaggctccaaaagccatacgaggaggaattcctatatgttttccacagttcggaaactgtggatcgctggagctgcatggttttgcgaganatagaatgtgggcaattgatgataatcctcctcctctgcctgcaa

SEQ ID NO: 28825 - DNA, 264 bp, Glycine max
  Clone ID: 701060625H1
ccgccattgtcacaatgaggcaaaaaatgatatcaacattgatctgaagcttagacatgatattccacgacacgaagtcaaacaggtgatttgttcactttgtgggactgaacaagaggttcagcaaaactgtataaattgtggtgtttgtatgggaaaatacttctgtggaacatgcaagctttttgatgatgatatatctaagcagcagtaccattgctgtggctgtggaatttgcagaactggaggaagcgaaaatttctt

SEQ ID NO: 28826 - DNA, 235 bp, Glycine max
  Clone ID: 701060626H1
tcgctttccagaaaatggtgaaccctagatgcttcctcgacatcaccatcggcggcgagttagaaggcaggatcgtcgtcgagctcttccacgacgttgttcccaaaaccgccgagaatttccgcgccctctgcaccggcgaaaagggcatcggccccaacaccggcgtccccctccactacaagggcatgtgtttccaccgcgtgatcaaagggttcatgatccagggcggcga

SEQ ID NO: 28827 - DNA, 218 bp, Glycine max
  unsure (1)..(218): unsure at all n locations; Clone ID: 701060627H1
actttgtaactttcgaatcttcttccttccaccgcaatggccattnccacgcttagccccgccgacgccgacaagctctccaacctcaaatcctccgtcgctgcattgagccaaatcagtgagaatgagaagaatggatttcacaagcctcgttgctcgttacctcagtggcgaagcacagcatgttgagtggagtaagatcgagacgcctacggatg

SEQ ID NO: 28828 - DNA, 259 bp, Glycine max
  Clone ID: 701060629H1
caagcatgagatcagtaagttcccctggtttcttcttccttttgtttcttgctgcctttagctttgccaactttgcttctggagccactctgcttcaagatgaagtgaaagctctggaagatatagccaagacacttgggaagaaggactgggatttcaacgtagatccgtgcagtggacaacgtaattggacttctgcggttcaagtgaaagggagtgaaaacaatgtcacatgtgattgtaccttgccaatggcacc

SEQ ID NO: 28829 - DNA, 261 bp, Glycine max
  unsure (1)..(261): unsure at all n locations; Clone ID: 701060630H1
tgaagcttcttccatcaggtgctggccacatttcgcacctgaacgctgtgatacttggtgaatctctcgccactgaagaggatgntttcgttcttccaagtgaggactttncctggccaagccaatgttcagtccccagaacagtatctgaagatgtataagagatcgattgaggaccctgctggattctggtctgagattgcctcagagttctattggaaacagagatcgggtgacaaagtgtgtgatgaaaattttgat

SEQ ID NO: 28830 - DNA, 263 bp, Glycine max
  unsure (1)..(263): unsure at all n locations; Clone ID: 701060631H1
gcaatatattcgttccgttccttctttctccgctcctcacttcgctctctcattctccattctcacttctcaaattgaatcgaacgaattcacaaaccctagttttcgaggatgggtcagatccagtactccgagaagtacttcgatgacacttacgaatatagacatgtggttcttcctcctgaagtcgcaaaactgcttcccaagaatcgtcttctctccgaaaatgagtggcgggcattggggttnagcagagccgtggc

SEQ ID NO: 28831 - DNA, 277 bp, Glycine max
  unsure (1)..(277): unsure at all n locations; Clone ID: 701060633H1
cttgcttcccaggcccaagatggttaactctgatcttgccaggattattaattctgacgaggttcagtctgttgtgagggcccattaagaaggatgtgaagaaggccacgctgaagaagaaccctcttaagaactgaatctatgctgaagctgaatcttatgccaagactgctaagaggatggctcttcttgctgaagctcagcgcgttaaggccaagaaggagagctcgacangaagaggaagactgtctctaaggaggaagcttctgccatcagt

SEQ ID NO: 28832 - DNA, 273 bp, Glycine max
  unsure (1)..(273): unsure at all n locations; Clone ID: 701060634H1
atttatttattttttgttcatcatgatataaaaataaaaaataaaaaatcatccagaatcggatttcagtgaagaaagacccaaaacgatgaagaagggcgaaaatnagggtcngactcggaccttcccggtggatccgaatgttccccgatgggtttgccaganctgccgcaaccctctctgcatcgtaggcgccgattctacgccgacaagttcttcaacgatcctctcgctacgggatgcaagggtcgtccattcacgttgccagcagtg

SEQ ID NO: 28833 - DNA, 276 bp, Glycine max
  unsure (1)..(276): unsure at all n locations; Clone ID: 701060635H1
tgnttccgaagagaaaagaaaagatgtttgagccacaacagctatacactcgcgcgaagaccgaggaattcgacctcgaatcaggagaaaccctctacccagggctgagcgtcggcgagaaccagctccgatggggtttcatccgcaaggtctacggcatcctctccgcgcagatcgtcctcaccaccctcgtctccgtcaccaccgttttctatactccaatcaatgacctcctcaagggcaattccaccctcctcctcatcctcctcttccttc

SEQ ID NO: 28834 - DNA, 269 bp, Glycine max
  unsure (1)..(269): unsure at all n locations; Clone ID: 701060636H1
ctatacacttgaaggaatcacgcattaatgccctaccaaggtacttgactgttcagtttgtccgtttcttttggaagagggaatccaaccagaaggctaagattttgcggaaagtagattatcctctggagttggatgtttatgattttngttctgacgaacttcgtaaaaaattggaagctcctagacagatcctaagaaatgaagaaggcaaaaagcttggtctgaaagtgaatgagaaaagctctgttcagaaggaaaatgatgta

SEQ ID NO: 28835 - DNA, 269 bp, Glycine max
  unsure (1)..(269): unsure at all n locations; Clone ID: 701060637H1
ccagcatccgcngcagnacggtaaccctccaacaacaacacttccgctgcgaaaaatgtctctggtggcgaacgaggatttccagcacattctgcgtgtgctgaacaccaacgtggatgggaagcagaagataatgttcgcaatgacctccatcaagggtattggaaggagattcgccaacatcgcttgcaagaaggctgatgttgacatgaacaaaagggctggtgagttgactgctgctgagttggatagtgtcatgactgtggtgg

SEQ ID NO: 28836 - DNA, 269 bp, Glycine max
  unsure (1)..(269): unsure at all n locations; Clone ID: 701060638H1
cgaaaaatcgccatgaatcccaaaatcctcttcgtgtttgctctgcttctgaatctcgtatccaattcgttccaaaaccctaaccctaaaacccccaaatcaacgtcatcgcaggctcacgtggagctcatcaaccacggcttacccgccggtcttctncccggcaccaccgtcttgggctacgccgtgaaccgtacctncggtgactttaccgtcaagctcggcggcgcgtgcaagatcangctcccggcggacaactacgtcgccac

SEQ ID NO: 28837 - DNA, 266 bp, Glycine max
  Clone ID: 701060639H1
tggtactggtactgttgtcggatcgaaaaccctaaattgaattcgaatcaacaacatgcagcagggaggaggctcggagacggaagtgacatgggaggaccagcagaacatcaacaaattcggaaggttgaacaatcgctttcacgagcttgaggatgagatcaaaatcgctaaggaaacaaacgataatttggaggatgcaagcaacgagttgattctcacagatgaagaggtcgttcggtttcaaataggagaggtttttgctc

SEQ ID NO: 28838 - DNA, 265 bp, Glycine max
  unsure (1)..(265): unsure at all n locations; Clone ID: 701060640H1
cttgttcctctcgcccagaatccgagatcaaccccgacgaaggcaaggggtttttctcggcttcttcagatttctgaaatggcgcctgtttcagctttagccaagtacaagctcgtcttcctgggtgaccaatccgtgggcannaccagcatcatcactcgcttcatgtatgataaattcgataacacctatcaggctacaattggtattgattttctatcaaaaactatgtatcttgaagatcgaactgttcgactgcagttgt

SEQ ID NO: 28839 - DNA, 265 bp, Glycine max
  unsure (1)..(265): unsure at all n locations; Clone ID: 701060641H1
tggnactccagangtnacttcctctcccgnnncagttagaggaacctagctcccccatcagcccggcngggtttgggtttggatcaaatgtggcacggccacctggccaatatcctgcctcccccataaagtcatcagatcaattggttaaggattctaanccagtggatgcttctgttaacggtgattcttccgattcattttttggaggagatttattctcagctaggctcattcagcccaagcaagcttcttctccacangg

SEQ ID NO: 28840 - DNA, 263 bp, Glycine max
  Clone ID: 701060642H1
atttcagtgagtgatcggtgttcacttgatctcatcataatcgtcagcgtcaattgaagaagatgccgatcagaaacatcgccgtcggaaggcctgaagaggcgactcaccccgacacgttgaaggcggctttggctgagttcatctcaaccttcatcttcgtgttcgccggctcaggctccggcatcgcctacaacaagctcaccgacaacggcgctgccacccctgccggcctcatctccgcctccatcgcccatgcattc

SEQ ID NO: 28841 - DNA, 263 bp, Glycine max
  unsure (1)..(263): unsure at all n locations; Clone ID: 701060643H1
cttgcttcccggagctctgaacttgaccgacgccattttcacatcnaaacgcttcaactaaaaaaatggcgttcttgtggaacaaaactagtatcgcttcccattttcgatctcactctcagaagactgagggtttgacttcttttccgcgccgtcgattccacgtcgaacccggggctcgtgaaaaagctctcttggcagaagatgcaacgctggaaaccgttcaaatcatataagaagagtgtaaaacagctcagaaaaat

SEQ ID NO: 28842 - DNA, 261 bp, Glycine max
  Clone ID: 701060645H1
ttattattaattactaaggaactctcccagaaaagaggcatcagttgcaatggctcgttacggtgagggcgacaagcggtggatcgtggaggaccgccccgacggcaccaatgtccacaactggcattggtccgagaccaactgcctcgactggtccaagaccttcttcaccagcctcctcactaacctccctatcctcgacggcgagggtaacctcttccttcaaaacgacgtcgcttcgctccctcgacggcgagggct

SEQ ID NO: 28843 - DNA, 261 bp, Glycine max
  Clone ID: 701060646H1
ctttctttcaagtttcatctcttttcctcatttcattcttctaaccttctctccgtttacttcacttcatgacggattcttctcctcttatccctccctcaccggtcacagtcaccgagatcgacctcgaagagggaccctccgaacaaattcaatgccggatttgtcttgaaactgatggtagaaatttcatagttccttgtaagtgcaaaggtacgtcaaagtacgtacatagagagtgtttagatcatggcgagccgt

SEQ ID NO: 28844 - DNA, 159 bp, Glycine max
  Clone ID: 701060647H1
aacagttccatataccctctctctagcttccttcactcacttaattgtgcaatcccaattcaaatcccatcagaatgatgaaatttcaagcatgttcaaaccccatctcaaacttgttctatgcgtgttgtgtccttcttttaccaccaaccatggctt

SEQ ID NO: 28845 - DNA, 263 bp, Glycine max
  unsure (1)..(263): unsure at all n locations; Clone ID: 701060648H1
gttctttctctcgcaatcttcactacattcaccgcnccatttgcattcacattgaatatggctgagactacacaatctaatgctgagttgttggagtggcctaagaaagataagcgccgcttcctgcatgttgtgtatcgtgttggtgatcttgatcgcaccattaagttttatactgaatgttttgggatgaagcttttgaggaaaagantattccngagggagaaatatgccaatgcttntctggatttngccccgaaaca

SEQ ID NO: 28846 - DNA, 273 bp, Glycine max
  unsure (1)..(273): unsure at all n locations; Clone ID: 701060649H1
ctagggttaccggattcttgcgttttaatatctgcaattcagaagcatggggcactccaatgtgtggaattctcaccctaagaactacggacctggttctcgcacttgccgtgtgtgtgggaatcctcatggattgatcaggaaatatgggcttatgtgttgcaggcagtgcttccgaagcaatgccaaggaaattggcttcatcaagtatcggtgaaagattagttttccactngccccacccggtttggattcttgcatcaggctatgatg

SEQ ID NO: 28847 - DNA, 273 bp, Glycine max
  Clone ID: 701060650H1
caaattctcaaatccaaatccaattccaattccaattcccaatcttctcaaaccctaattcctcatcttgaaaatgagagaaatcttgcacatccagggagggcaatgcgggaaccagatcggagcgaagttctgggaggtgatatgcgacgagcacggcatcgaccacaccggaaagtacagtggcgactctgaactccaattggaacgcatcaatgtttattacaacgaagcgagtggcggaaggtacgttccacgcgccgtcctcatgga

SEQ ID NO: 28848 - DNA, 273 bp, Glycine max
  unsure (1)..(273): unsure at all n locations; Clone ID: 701060651H1
tttcactctcacaatggactccctctctctcttctgcaccggancccttctcgccggcggcctctactggttcgtctgtgttctgggccccgccgannagaagggcaaacgcgccaccgatctatccggcggctccatntccgccganaaagtccaanaccactacaagcngtactggtccttcttncggcgccccaaggagatcgagaccgncggacaaagttcccgacttcgtcgacaccttctacaatctagtcacgacatctacgantg

SEQ ID NO: 28849 - DNA, 88 bp, Glycine max
  Clone ID: 701060652H1
gaagatggcttcacgcaggctcgtatcttctctgattcgatcctcccttcgtagatctcaatcgaagccctcaatttccacacaacat

SEQ ID NO: 28850 - DNA, 268 bp, Glycine max
  unsure (1)..(268): unsure at all n locations; Clone ID: 701060653H1
cactaaaccaaagtaagaggtatagtgttctangagtgagcaacttgtgaganatggcttccaaggctgcacttctcttgtgtctcaatnttctctttttcactgtggttagttccacatatgtgccatgtaatccaccccccaaaactcccaaacacccacctgtcccaaagccaccatccccaaagctagcaagctgccccaaagacactattaagttcggtgtgtgtgctgatgtgttaggtttgattaatgtgcaattgggaag

SEQ ID NO: 28851 - DNA, 267 bp, Glycine max
  unsure (1)..(267): unsure at all n locations; Clone ID: 701060654H1
ttatgttgacttgcaaganatggtcagggaggacagtatcacatgctcatatggatccactcttccacaagatccctacttgtacattaccatgtagtttgacagaaacagatccttatactttcctgatacgtggagaaaattatcttgaagaccgccagaaggttaaagcaaagggaaccttgatgaaaatggttgctgcagattgggtgagatctgacaaaagggaagatgaccttggtggccgtcctgggagcattgcgcaga

SEQ ID NO: 28852 - DNA, 264 bp, Glycine max
  Clone ID: 701060655H1
caatgggtggggagcgcaacaaggttttcactttggccgaggtctctcagcacaacaatgccaaagactgttggcttgtcattcatggcaaggtttataatgtaacaaagtttttggaagatcaccctggtggggatgaggtcctgttgtcttccacagggaaagatgcaaccaatgattttgaggatattggtcacagcaccagtgccgtagccatgatggatgagttctatgttggagacttgatacatcaaccatccccag

SEQ ID NO: 28853 - DNA, 268 bp, Glycine max
  unsure (1)..(268): unsure at all n locations; Clone ID: 701060656H1
cgttctctgaaattttaattgacttttctcccctcataaaaaaaacctaccaatggctcccgcaaaggcagagaagaagcccgcggagaagaagccggcagagaaggccccagcggagaagaagccgaaggggaagaagaagatatcgaaggaaggaggaagcgnnnnnnnnnnnnnnnnnnnnnnnnnnagcgttgagacctacaagatctacatcttcaaggtgttgaagcaagtgcaccccgacatcgggatctccagcaaggct

SEQ ID NO: 28854 - DNA, 262 bp, Glycine max
  unsure (1)..(262): unsure at all n locations; Clone ID: 701060657H1
gtttgttccatttcttgcttcttaatttcttgatcatgtcacttgctggtaaaatcagcattgaaattggggtgcatgcaagcgctgcaaagtggttcaacctctttgcaacgcaactccatcatgttcaaaaccttaccgaaagagtgcatgaaaccaagctacatcatggtgatgactgncatcacaacgaatcgatcaaacactggacttgtaccatagatggtaaggttacaacatatcacgagagtcntgaatccgt

SEQ ID NO: 28855 - DNA, 261 bp, Glycine max
  Clone ID: 701060658H1
tgaaagtcaaaataccttcaagtccttccatcttcttaatgctttaagcgacctcctgatgcttcctaaggatatgctcttaaatgcatccatcaggaaagaggtgtgtccaatgtttagtgcatcgctaatcaagaagattctagacaattttgtcccggatgagttttgccctgatccaattcccactgatgtttttgaagctctggactcacaggcatgatcttgaggatgaaaatgagtctatcagcaacttcccct

SEQ ID NO: 28856 - DNA, 259 bp, Glycine max
  unsure (1)..(259): unsure at all n locations; Clone ID: 701060659H1
gagctataagctagtttatcgtgaggagaatatgaagttgtttgttttctttgttgctgcagtagttttggtagcatggccatgccagcgcgcaggctaccaaaggttccctctccgaatgaaaactggctatggtgagcgttcttcggaggtaaaatgcgcaagttttaggcttgctgtggaagcacacaacatccgagcncttaaaaccattcctgaagagtgcgatgaaccaacaaaggactacattaatggcgaa

SEQ ID NO: 28857 - DNA, 138 bp, Glycine max
  unsure (1)..(138): unsure at all n locations; Clone ID: 701060660H1
gtatcttgaatgagatagttataataaaaatattgtatttaaatggaaacggtttaatgaanatgacatatgttgtagagggcatttgctctcattggtaaatgtttctgattaaaggttccagcacattgtgatgac

SEQ ID NO: 28858 - DNA, 261 bp, Glycine max
  unsure (1)..(261): unsure at all n locations; Clone ID: 701060661H1
ctcaatccttttcgcctttgtctgcgaatggcgtcgttcgatcaggcacctcccggcgatgtcaaatccggtgacaaaatcttcaggaccaagtgtgctcagtgtcacaccgtcgaaaaaggtgccggtcacaagcaaggacccaatctgaatggtttgtttggaaggcaatcaggcactactcccggttattcttactcttcagctaacaagaacatggctgttacttgggaagaaaagacactatacgattacttggnt

SEQ ID NO: 28859 - DNA, 258 bp, Glycine max
  unsure (1)..(258): unsure at all n locations; Clone ID: 701060662H1
tctaccgtcatcaactaggagaagaagcttcattttctgcaaaatggatccctctgcggcattgctatttaaccacctcaagggtgcagacccgttcttcctgctagcgggtcctaatgtgattgaatcggaggagcncattctgcggatggctaagaacatcaagagtgttgcatctgaagttggaataccattggttttcaagtcaagctttgacaaagctaaccgaacatcatcaaaatcattcgtggcccgggg

SEQ ID NO: 28860 - DNA, 259 bp, Glycine max
  unsure (1)..(259): unsure at all n locations; Clone ID: 701060663H1
ttctaaacttttttcatctaataatggctgcnacaacacgttcacgtgcatccatctacgatgtgttcctcaacttcagaggggaagacacacgctatggtttcaccggcaatctctacagggctctttctgacaagggaattcgtaccttctttgacgaagagangcttcncagcggngaggaaataacactgcacttttnaaggcanttanagttccanattgccatcatgtgctctnnaaaanantttccttcccc

SEQ ID NO: 28861 - DNA, 260 bp, Glycine max
  unsure (1)..(260): unsure at all n locations; Clone ID: 701060664H1
gagggggccgaatcaactgtgataatggcgtctgggatgtgtgctagcgtagtcctgtttatgncactggttccagctggtggacatcttgtgaccactacggattgttataggaagactagaatattcattgagacttttcttccaaagatggggatcacgaccactgtaattgatccagcagatgttggagccttggaatctgcattggagcagcacaatgtgtctctattcttcactgagtctcctaccaatccatt

SEQ ID NO: 28862 - DNA, 272 bp, Glycine max
  Clone ID: 701060665H1
ctctgaattattactataaggacacaccatattgccaacattttccctggaaaagtacagtctgttgaaattcataaaggtgaatggggcactgagggatccgtcatctcctggaattatttacatgagggcaaagtttgtgtggctaaggagatggttgaaggcatagacatgaaaaacaataaaatgacctttaaggtcatagagggagacctgctgggacttacaaaagcttcaagtttttattgcaagttactccaaaggaaaaggga

SEQ ID NO: 28863 - DNA, 272 bp, Glycine max
  Clone ID: 701060666H1
cagagagcaaccaccaatcgaagaagaaacaaccgtaacagatctccgtttctcgccaaacaaaaaacaaaaaaatggctgccttcagcggtgacgaaaccgctcctttctttggcttcctcggagccgccgctgccctcgttttttcctgtatgggcgcggcgtacggcaccgcgaagagcggcgtcggggttgcgtcgatgggcgtgatgaggccggagctggtgatgaaatcgatcgtgccggttgtgatggcgggtgtgttgggtatc

SEQ ID NO: 28864 - DNA, 269 bp, Glycine max
  Clone ID: 701060667H1
cggaaccttgcaatcctaaagtaactgatatcatgggatttagtttctccatggacagcaaggtccgtcaatatcctgccaataaccggagccatcttgaagccgtgaccagaaaagccggctccaagaaccacatccttcccaaagtccccacccaagaaatcaatgaggaaatcctcatctggcgtcatggagtagatgcaagactgtttgatgacgggctcagtggattcaaccatccccttgaacgtaaatccacccattctttg

SEQ ID NO: 28865 - DNA, 265 bp, Glycine max
  Clone ID: 701060668H1
tttgttctctctaccattgagcaaacaaaaagaatctttgggagatcggagaggtcatcgtcgtcatttctgcgctcgagattaacataaggaacaacagtgagcagggtattgtagctgaacgatatggagagaagcactccggtgaggaagccacacacttcaactgcagatctgcttacgtggcctgaaacaccaatttctcattccccaatcatccttcctccgccgttcgttctcacagccgtcggatgggatcaggagg

SEQ ID NO: 28866 - DNA, 267 bp, Glycine max
  Clone ID: 701060669H1
ctgggaatggtggtgacttttgcaccaactggactgacaactgaagtcaagtctgtggagatgcaccatgaatctcttacagaggcacatcctggtgacaatgtgggattcaatgttaagaatgttgctgttaaggatttgaagcgtggttatgttgcctcaaactcaaaggatgaccctgcaaaggaggctgctaacttcacagcccaagtcatcatcatgaaccaccctggtcagattggaaatggctatgcccctgtcctcgac

SEQ ID NO: 28867 - DNA, 267 bp, Glycine max
  unsure (1)..(267): unsure at all n locations; Clone ID: 701060670H1
ctcaactttactcctcttcaatcagttgcatattctttgctattccnatggccactgttgaggttgtgtcagccaaggttgccctcccagaggacacaaaagaggcatcattgaaggttgacgaggagaagaacacagaagaagttgttgagactccaacaccagaaactgtggtcactgagcaaaccaaggaggaaagtactgaggccccacgacctgcagcttcagaagacaagccctcggttgaagttcagactaaagaggtgg

SEQ ID NO: 28868 - DNA, 264 bp, Glycine max
  unsure (1)..(264): unsure at all n locations; Clone ID: 701060671H1
cgtaacttcatctgggtttcaggaaaaaagaaaaaggaaaacaatgggttccgataatcaccagaacttggagttcttgaaggagatcggtttgggctcttccaacattggctcttacattaatggccagtggaaagccactggttcttctgtcacttctgtnaatccttctaacaatcagagtatagctcaagtgaccgaagcaactttgcaagattttgaggaggggttgcnagcttgcagtgaagcagctaagacatggat

SEQ ID NO: 28869 - DNA, 263 bp, Glycine max
  Clone ID: 701060672H1
cttctcactgatctccattcccattccatggcttccactgaatcatcccctttcaagaaaattcagattcaaagggatgacactacatttgacgcatatgtggttggaaaagaggatgctcctggaattgttgtgattcaggagtggtggggtgtggattacgaaattaagaaccatgccgtgaagatttctcagcttggtagtgggtttaaagctcttattccagatttatacagaggaaaggctggtctggatgttgctga

SEQ ID NO: 28870 - DNA, 263 bp, Glycine max
  unsure (1)..(263): unsure at all n locations; Clone ID: 701060673H1
cagaagatccagtgatcatctgggtgggacctttcattggtgctgcacttgcagcactactaccaccaggtcgtaatcagggccattcccttcaagtccaagtgattcaatcaaaccgttcatgcttaatcaagttgggaacaacaaaaaaaatcacaaacaatgtttctgggtttcggtttcatttcatcaagatgatctgtttatcttttntttttaattttaatttaaagtctttgtattttgtatgnaaagatgtnaaa

SEQ ID NO: 28871 - DNA, 261 bp, Glycine max
  unsure (1)..(261): unsure at all n locations; Clone ID: 701060674H1
ctgcaatggaaaatggaaccgaggaagggcttggagactcatctgaatcagcccctattgcctttcctcaagacatacaaatggaggaaaggcctgaacctgttaggaacaacccacctcacggtactcggcgctaccaggatcagatggtcccaagtattacttcttcccatgtgagagtggaagaggaagaaacatcttcagaccttcgcnactcggctgcagacagcagagccgaagtgcctataaatgtaaccacac

SEQ ID NO: 28872 - DNA, 261 bp, Glycine max
  unsure (1)..(261): unsure at all n locations; Clone ID: 701060675H1
aaatgaaaacccaaagtgcttctctcctctgtctttttctctctcttgctatccttttggctagtngcactgctgcaagtgcaactnccaagaagcgcagtgccaagccaccatgtttcaacattcaacagaagcctttttccttccacttttctctttgganttggttcttctgcttaccaggcagaaggagcagcaagtgtagatgggagaggaccaagcatatgggacacctacactagacagcatactgaaaagatt

SEQ ID NO: 28873 - DNA, 213 bp, Glycine max
  unsure (1)..(213): unsure at all n locations; Clone ID: 701060676H1
ggtttgcaacttcatcccatccatccagaaacagaagtactttggcacntttcagtctctctctactctaaacgctacacactacactttgtacctttctttttctttgcttgctattctacaccgtgtctttactcttgttcttgttgcagcttggtggttgcattgaatcggagaggattggatggaggaagcatgtgaatttcgaagttg

SEQ ID NO: 28874 - DNA, 258 bp, Glycine max
  unsure (1)..(258): unsure at all n locations; Clone ID: 701060678H1
gcacaagagtgagatcaagagcgatcaacatggtatcttggtgtcggcaaacagcattggtgtttaccacgaccacttctacatttaccatcttgaccttgacattgatggtgttgccaactcttttgagaagacaagtttgaagactgtaagagtgacagatggaagttcgaagaggaaaagctattggacaactgaggttgaaactgccaagactgaaaatgatgcaaagataatacttgggttgagccngggtga

SEQ ID NO: 28875 - DNA, 260 bp, Glycine max
  unsure (1)..(260): unsure at all n locations; Clone ID: 701060679H1
cgagataactagaaacagtgtgatgaaaatgaaggtccttgttttcttcgttgctacaattttngtagcatggcaatgccatgcgtacgatatgttccctctccgaatgaacactggctatggtgcccgtactccggaggtgaaatgcgcaagttggaggcttgctgtggaagcacacaacanctttggctttgagaccattcctgaagantgcgttgaagcaacaanggaatncntcccnnggcnaacaatatgggncc

SEQ ID NO: 28876 - DNA, 257 bp, Glycine max
  unsure (1)..(257): unsure at all n locations; Clone ID: 701060680H1
aacccagtgggaaggtatcntggaaaacgaatganaatagactactttctagtttcagagaagctaanagaaaggattgctgcatgtgaaatgcgtggacatgggntagnntnagaaggtttctatggaagtgatcattgtccagttaccttggagctctctcctagttctaactctcanaatgaggatccatatnggaagcgttanagnnacnaagcaangtccataatttccaccccanggncgggncccggnaa

SEQ ID NO: 28877 - DNA, 273 bp, Glycine max
  unsure (1)..(273): unsure at all n locations; Clone ID: 701060681H1
cncgatttaagaagaaccgcaagangcgcggccacgtcagcgccggccacggccgtattggaaagcaccgcaagcaccccggcggccggggaaatgccggcggcatgcaccaccacaggatcctcttcgacaagtaccacccggggttcttcgggaaggtagggatgaggtactttcataagctccgcaacaaattctactcccccatcgtcaacatcgacaagctatggtctctgataccccaagacgcgaaggacaaagccctaaaatcga

SEQ ID NO: 28878 - DNA, 269 bp, Glycine max
  Clone ID: 701060682H1
gctgattggctacgtaaaaactactcagataaatatgtcattcttgcagttaacaagtgtgaatctccacgcaaaagaattatgcaggcatctgaattttggtcccttggatttgaaccacttccaatatcagctatctcagggactggaactggagagcttcttgaccttgtttgttctggcctacagaaaattgaggaatctaataatcttgttgaagaagattatgttccagcaatttcaattgttggtagacctaatgttggcaa

SEQ ID NO: 28879 - DNA, 270 bp, Glycine max
  unsure (1)..(270): unsure at all n locations; Clone ID: 701060684H1
ctaattcagtttttttctcccatcataaaaaaccgaccctctccttnccctcttcaccaaccaatggctcccccaaaggccgagaagaagcccgcggagaaaaagcccgcagaanaaggctccggcggagaagaagcccaaggccgagaagaagatatcgaaggaaggaggaagcgagaagangaagaagagaacaaagaagagcgtggagacctacaagatttacatcttcaaggtgctgaagcaggttcaccccgacatcggaatctc

SEQ ID NO: 28880 - DNA, 257 bp, Glycine max
  unsure (1)..(257): unsure at all n locations; Clone ID: 701060685H1
gggcgcaanttatgaggttctgagtgaccctgagaagcgtgagatatatgatcagtatggtgaagatgcgcttaaggaaggaatgggtggtggcggtggccatgatccatttgatatcntttcatctttcttggcggtgggagtcccttggatcaggtggaagtagtcgangtaggaggcagaggcgcggagaagactggtcacctctcaaggtctcttggaggactttatttggaaattccaagaagcnctncctc

SEQ ID NO: 28881 - DNA, 196 bp, Glycine max
  unsure (1)..(196): unsure at all n locations; Clone ID: 701060687H1
gtggccgtaacttgtttgttgggaacttgacctatccaaganacgaatatcaaccaaacccattcattaggnataaggaatccaatccccttcttcctcgttccgctcctcctttgcatacatggtttgtgagcaaccctaatccaccccaacccaacccaaccctattgaattgaattgggggaagaagaacatt

SEQ ID NO: 28882 - DNA, 263 bp, Glycine max
  unsure (1)..(263): unsure at all n locations; Clone ID: 701060688H1
tcgtgccaaagaggcttattgaacacttgcagcagctagagccacaatttcaatgcccctgattagtttgtctgtccatcacagtacatagtataataatcntaaaccctttttctcagcgaggcacacagtatcattactacactttttttttcactattgttttggcaagtcctcaaccccaacaacatagagagccataatacccttcttaggcacaacaatatggctttgtaaaatgggaaggagtccttgctgtagtc

SEQ ID NO: 28883 - DNA, 259 bp, Glycine max
  unsure (1)..(259): unsure at all n locations; Clone ID: 701060689H1
ctgatttccatgtttcggcacaaaactgttgggttcgcaaaggtggngcttataccggngaggttagtgctgaaatgcttgttaatttgggaattccttgggttattattggtcactctgaacggaggcagcttttaaatgaatcaaacgagcttgtgggagataaagttgcctatgcacttcaacaaggtctaaaagttattgcatgcattggggagactctcgaacagcgtgaagctggtacaacaacggctgttgt

SEQ ID NO: 28884 - DNA, 263 bp, Glycine max
  unsure (1)..(263): unsure at all n locations; Clone ID: 701060690H1
cnagagtatcctttcacttcctttaaatacctcgagtgtccccattgacatcatcaaacaagagaagagttacagaatttcctgtttacgatcttattgcaattttgcaactttcaaagcttattagctaaagtaacatcaaaagatgtcattgattccaagtattttcggtggcccaaggagcaacgtgttcgatccattctcactcgatatgggggnnccctancngggnttcntnatgcccnccacttctgctgttgctg

SEQ ID NO: 28885 - DNA, 262 bp, Glycine max
  unsure (1)..(262): unsure at all n locations; Clone ID: 701060691H1
cgaggtcgtgttgcagaggccacaacgtttttcattagaaattttcagttccaccacattctctgaantgaagaaacctcttgcactgtggacgcagcctccgccggcggcattaccgccattgaagctcattcaagctttttttcaccgttcctcacaagactaggtnncgaagctgttatccattggaaattagcacttctttgttagtgaaagattagagcaggataaaaatgctcagacgaaggntatctgttctctt

SEQ ID NO: 28886 - DNA, 258 bp, Glycine max
  Clone ID: 701060693H1
gggacttggtcggaaggcaaaccaggtttatataattgattttggggcttgcaaaacgatatagggactcctcaactaatcgccacatcccttacagggagaacaaaaacttaacagggactgcacgctatgctagttgcaatactcatcttgggattgagcaaagtcgacgggatgatttggagtcacttgggtatgtgcttttgtacttccttagaggaagcctccttggcaaaacctaaaggctgcaacaaagaa

SEQ ID NO: 28887 - DNA, 189 bp, Glycine max
  Clone ID: 701060694H1
agagagagaaatggcttgcaggcaattgtgggcttcaagagctgcctcttacctgaggatctctgtgtttcacagaggcttttctaatgttattaaagatttcaagtatgttgattctcatgagtgggtgaaagttgatggaaattacgcaaccatcggcataactgatcatgcccaagatcatttggg

SEQ ID NO: 28888 - DNA, 181 bp, Glycine max
  unsure (1)..(181): unsure at all n locations; Clone ID: 701060695H1
cacgctcactctagaatttnttacctctcacacttcaccttcttcttctttattccttgctcttcaatggcttccgatcttgagcttaaggccaaagaggctttcgaagatgataactatgatctcgcctacgacctcttaactcaggccattggtctcagccccaacaacgnagacctat

SEQ ID NO: 28889 - DNA, 190 bp, Glycine max
  unsure (1)..(190): unsure at all n locations; Clone ID: 701060696H1
gccctcttctctcaatctcaaatctctgctctgcaactactccaaattgattgaatgctccaaactccatccacacacaccttnaaanatcttattaattaccctcacctagcaacagttcgtagctcctccctnnggctcnanaaaaactcaccaaacantctcttnnaatcctcaaaattttgcaaaa

SEQ ID NO: 28890 - DNA, 276 bp, Glycine max
  Clone ID: 701060701H1
ctctcttcttcttgttacaagagagagattcaaggatctggtgccccttcttccttccccttgtgttgtgttgttgggaccaattctttaatcagcgagagagagggggcgcaatagtagcctttagcttctttattattattgtttagggatgagtgaggtgaatgaatgagaacaaaaactccgccatcgctcttgtctctcaccattgactctgccgtccttaatctccccgacatctccgatctctcccatatccctgatcacatcctcctc

SEQ ID NO: 28891 - DNA, 246 bp, Glycine max
  unsure (1)..(246): unsure at all n locations; Clone ID: 701060702H1
ttgataagttttttgtgcagctccaatggcaacctctcaaatcacttcattcattgaggaacttgcctgcatttgaaaggtttcaaccttcaacgcttcgatttccttctgctgggcacgtcagaattgggacactgacacaaacctcggttncctcttcgtgtcaanncggcnctgntgncngccccngaaanagcnntgnaancccctgngatagantatantgaaaatanggagcagaggaga

SEQ ID NO: 28892 - DNA, 202 bp, Glycine max
  Clone ID: 701060703H1
tctcttaataaatctaatcggaatcttcaccagttaatcagagctttgagtagataagactcgtggatgtgtcatctcctttattcaacgttgaatattgttattattcttgcccggtattgagaaaatactttttcgctgaagctctgaataacagaccatcatcgacagatggggtctgaaggtcctccagcagctgtgg

SEQ ID NO: 28893 - DNA, 263 bp, Glycine max
  Clone ID: 701060704H1
tcaatcatcatatttatctttgcaactaaaatggcgtcgtcacaaccagagatggagcatccaaagaaggtttttggttgggctgctcgggactcatctgggcttctctccccattcaacttctccagaagagaaacgggggagaaagatttggtattcaaagtgcaatactgtggaatatgccactcagatctacatatgttaaagaacgagtggggcaacacaacctatcctctggttcctgggcacgagattgctggtgt

SEQ ID NO: 28894 - DNA, 257 bp, Glycine max
  unsure (1)..(257): unsure at all n locations; Clone ID: 701060705H1
cttttgccctacctcctcgattctagggtttcaacaatggcgctgttccttctctacgaatccgcttcgggctacagcctgttcgaggttcacggcgtcgatgaaatcggccagaacaccgaagcggttcggaactccgtttcggacctcaacaggttcggcaaagtcgttaagcttcgctccttcaaccctttcacttccgctctcgatgctctcaaacagtgcaagccgtctccgaagtctattaatgntgagtg

SEQ ID NO: 28895 - DNA, 263 bp, Glycine max
  unsure (1)..(263): unsure at all n locations; Clone ID: 701060706H1
ctcattaattgcaagantggcacttcgttgcttggtgatgtccctttctgttctcttcactcttggtcttgcgagagaaagccatgccagagacgaagatttttggcatgctgtttggccaaacactcccattccaagttcattgcgagatcttctaaagcctggccctgcaagtgttgaaatcgatgntcaccctatgcaaattgaagaaacacagtacccgaaaaccttcttctataangaagaccttcatccagggcaaa

SEQ ID NO: 28896 - DNA, 262 bp, Glycine max
  unsure (1)..(262): unsure at all n locations; Clone ID: 701060708H1
gaaaataaaaganaaacccgctaacggctttgcactgagcgattcacgaaacccttcgatcaaaggttggaatcgaaatgcagaagtcggcattgccactgagcgacgcgaatgcgaaacaagaagagggaggaattgcgccgcaaggnaacgttggtgaagcttctgagatggcattttgggtaccccgatttcagggacatgcaattggacgctattcaagctgtgctctcagggaaagattgtttttgtcttatgccaa

SEQ ID NO: 28897 - DNA, 261 bp, Glycine max
  Clone ID: 701060709H1
gctcgtagggtttctccacctagagggaaatggctcccaaaccgcctagtacgggtctgtttgttggactgaacaagggtcacgtcgtcaccaagaaggaattgcctccacgcccctcagatcgtaaggggaaaacaagcaagagggtgcactttgtgaggaacctcataagagaggtagccggttttgcaccctatgaaaagcgtataactgagttgctgaaggttgggaaggataagagggcactgaaggttgcaaaga

SEQ ID NO: 28898 - DNA, 237 bp, Glycine max
  Clone ID: 701060711H1
gttcacaaacccgtcaaaaccgaaaacgtctctttctttcatcatcgaaatcaccgccatgtgctcagtgataagcgcgcaaggggtggccgttgcgaccgccgtggccgtctccggcacggtgatcctcctcgccctccgtctccagaagtctttcccaccaccccaattctccgttcaccaccaaatccctccttctccttctccggttctgcgatcttgcatatccaatgtagg

SEQ ID NO: 28899 - DNA, 257 bp, Glycine max
  Clone ID: 701060712H1
tttcaacactcatcagatcccagtcatcaattgcgttaacaactcgtaaggcaaccatgaggggcattctttctgtaaggacagccttggttcaacatcgtagtgagaaattgggccttggtttcaggctatttagcactcagggtgcttccactgctagtaccccacagccgccgccaccacctccaccaccagagaaaacccattttggtggccttaaggatgaggacaggatatttactaacttatatgggctg

SEQ ID NO: 28900 - DNA, 260 bp, Glycine max
  Clone ID: 701060713H1
cagaaacctcaatgggttccttcacactgtggatgttagcaaatcgcttccaccatcctctgtgagttttgtacattgtgaaaatcactgcaatatgccccatggcattgttagaaagaatgagtgaccttcttagatggcaacaaaaagacccttcattcgttttgccatggaagcaagattcccttccaattttcgctgagtctagtcctttgtaccacacacagaagagatcggagcctctaaccccagaagaagag

SEQ ID NO: 28901 - DNA, 260 bp, Glycine max
  Clone ID: 701060714H1
ccaacatttgaagaattgaacctgccattattgtaagtaagaattgggaaaggaaggaaggagatgaatctccctatcatagatctgtcctcacctgatcctctttccactgccatttccatccgtcaggcgtgcattgagtatggtttcttttaccttgtgaaccatggcgtggagaatgacttggtcaaagcctttgatgagagtaagaggttcttctcacttccaccaggagagaaaatgaagttggcccgcaagaa

SEQ ID NO: 28902 - DNA, 260 bp, Glycine max
  Clone ID: 701060715H1
gtcgtgtcgcagcaaaaccaagccacccactaacttgtttggtccaagacatggctctgatcctgcatgctaccaaaacaaacaagaatgccttcaagactctgattgcggcagagtacagtggcgtccaagtggaattggcccctaatttcgagatgggtgtctctaacaaaactcctgaatttctcaagatgaatcctattggaaaggttcctgttttggaaacgcccgatggtccagtcttgagagcatgcaatcgc

SEQ ID NO: 28903 - DNA, 245 bp, Glycine max
  unsure (1)..(245): unsure at all n locations; Clone ID: 701060716H1
ttgcaagaatggcacttcgttgactggtgatgtcccttacctgttctcttcactacttgncccttgcgagagaaagccatgccagagacgaagatttttggcatgctgtttggccaaacactcccattccaagttcattgcgagatcttctaaagcctggccctgcaagtgttgaaatcgatgatcaccctatgcaaattgaagaaacacagtacccgaaaaccttcttctataaagaagacctc

SEQ ID NO: 28904 - DNA, 267 bp, Glycine max
  unsure (1)..(267): unsure at all n locations; Clone ID: 701060717H1
cagaatctccattctccaatcggagacaaagcgagctcgaacgaacgaagtagagnagtgtgctacggnaaatgtggcggtgcattgctcgtggactccgtggacctgcttccaccagatccacctccaatcactcacttggatctcacttttatagattcttctctagtggggcgnactcttcgtacaccgtggtggatcatacttatgatgctgttgtcgttggtgctggtggcgcgggatgagagctgctatggactttcagaa

SEQ ID NO: 28905 - DNA, 267 bp, Glycine max
  Clone ID: 701060718H1
gcggagttgaagctatgggaagcagattgggaagaagagtggtgcagttcgcgaacctccccataaagcttctgatgccgaacagcttcaccaacatccacgaaatcgctctcaagaccattccttcggccacgaagatcgagatcaagcgcgtccttcaatccctctacggcttcgatgtcgataaggtccgaacgctcaacatggagggcaagaagaagaagcgtggtggcttgttgattgcaaaacccgactacaaaaaagcct

SEQ ID NO: 28906 - DNA, 262 bp, Glycine max
  unsure (1)..(262): unsure at all n locations; Clone ID: 701060719H1
ctcagaattatactgcattggtattttaaaaganaactggaggaggtaagtgcaattatggatggaganttctgtgatgatgcatctcaaaataaagatggcatgaatttagatgaaaaaggaaaaatatgcaacaaagttggtgaaatggatgttgatgagtgctatagcgaccataggttctcggaaaacagtagacttgtgaagaacattggaaaagttgttcttgatcttaggaatctggatttacttccatggctga

SEQ ID NO: 28907 - DNA, 262 bp, Glycine max
  unsure (1)..(262): unsure at all n locations; Clone ID: 701060720H1
ggatagtaattaacctcactcaaactcgggatcacagaaaccaacaacagttcttgcactgaggtttcacgatgttgctggaacttgcacttggtttgtttgtgttagctttgtttctgcacttgcgtcccacaccaagtgcaaaatcaaaagcacttcgccacctcccaaaccctccaagcccaaagcctcgtcttcccttcattggccaccttcacctncttaaaagataaacttctccactatgcactcatcgatctct

SEQ ID NO: 28908 - DNA, 226 bp, Glycine max
  unsure (1)..(226): unsure at all n locations; Clone ID: 701060721H1
ctgtttaaggcaanacaacatttactactcatactcaaagtagcttagtgttttgtttagcatatcatggagaataataatcagtcgttttggcaattcagtgaccagctgaggttacaggcatccaatttggcgaacctttctctaaacgattcgatttggagcaacaattacatctccaagaggcgtgatgaaaggataattttgacatcaaagtggggggtga

SEQ ID NO: 28909 - DNA, 256 bp, Glycine max
  unsure (1)..(256): unsure at all n locations; Clone ID: 701060722H1
tgatgcaccactaaaacggcaaaagttaggccaggnggaaggcattgaccaatcatcaagacaacttgatgttggtaattactacttaaactttctagtttctactgatagtgttggctaatgattgtnattcctgctgattgcaacttttatgttggaatagtcaagtagtagcttnattaattctttatgttcagcatgtcccattntgccatgcctttatatgtcatgctaatttttcatacgatcttatttt

SEQ ID NO: 28910 - DNA, 254 bp, Glycine max
  Clone ID: 701060723H1
agaatggcagcacttggtgggaatcgtgatgtgacaggaagccagaacagcgttgagatcgatgctctagctcgctttgctgttgaagaacacaacaaaaaacagaatgcccttttggagtttgaaaaggtggtaactgcgaaacagcaagtggtttctggtacctgtacaccatcactttggaggcaaaagatggtgggcaaaagaaggtttatgaagccaaagtttgggagaagtctggttgaattcaagga

SEQ ID NO: 28911 - DNA, 261 bp, Glycine max
  unsure (1)..(261): unsure at all n locations; Clone ID: 701060724H1
catttctccatttccattttctctctcacttttcaagaatcgtaagctatgggaaagtcttacccaactgtgagtgctgattaccagaaggccgttgagaaggcgangaagaagctcagaggcttcatcgctgagaagagatgcgctcctctaatgctccgtttggcatggcactctgctggaacctttgacaagggcacgaagaccggtggacccttcggaaccatcaagcaccctgaccgaactggctcacagcgctaa

SEQ ID NO: 28912 - DNA, 256 bp, Glycine max
  unsure (1)..(256): unsure at all n locations; Clone ID: 701060725H1
cagcanattcacganaattaaaagtantgacttggatgaggttcaaactaccccattattccttggaacaacatggggcgatccaattttctcaacgaatcaanctcgcacttggaagtttgttcagtgtcgacgagttattacattattactctaccgtttgtgccaatttattattgacgcccatgtactcaatttgggaaaagcagtgggactnataatggtacaatttgctccatatactggtgcaaattaa

SEQ ID NO: 28913 - DNA, 254 bp, Glycine max
  unsure (1)..(254): unsure at all n locations; Clone ID: 701060726H1
acaaaaccacaatctaagtnagtnttgagagangagtgcgtttgtttgtttganattaagtagtaaagatgtttggnatcatcggaggaaacaagggtcacaagataaaggggaacttggtgattatgcgaaagantgtgttggatatcaacagcatcaccagtgttaagggtgtcattggaaccggcattaacatcattggnggtgtcgtcgacaccgttactgctttggcgtcccacatctccatccagctc

SEQ ID NO: 28914 - DNA, 254 bp, Glycine max
  unsure (1)..(254): unsure at all n locations; Clone ID: 701060727H1
ctcaaataacccttgttatctctctttcattctcacttgtactcntctctttttcacaactttttttgtaccttctgatctaatggcagttccagtgattgatttttcaaagctgaatggtgaagaaagaaccaaaactatggcacagattgctaatgggtgtgaagagtggggattttttcagttgatcaaccatggtattccagaggaactccttgagagggtgaagaaggttgcctctgagttctataagc

SEQ ID NO: 28915 - DNA, 255 bp, Glycine max
  unsure (1)..(255): unsure at all n locations; Clone ID: 701060728H1
cgattcgggtcgggtttgtgttatcngaaccttcaccggaaaattctcagtcnacgtagcgaaaatggcggtatccctagcgacgaggctcgtncggcggcnatcnccaccgcttctctggcggcgcanttttctatgtcggcagtggacgccgaaaaggaagtcgtggtcgtgccggagcttccaccgttcgattactccccgccgccatatgcgggccccaccgctgaggagattctggcgaacgcagggagt

SEQ ID NO: 28916 - DNA, 255 bp, Glycine max
  unsure (1)..(255): unsure at all n locations; Clone ID: 701060729H1
ttgtgagctataagctagtttatcgtgaggngaatatgaagttgtttgttttctttgttgctgcagtagttttggtagcatggccatgccatggcgcaggctaccaaaggttccctctccgaatganaactggctatggtgagcgttcttcggaggtaaaatgcgcaagttttaggcttgctgtggaagcacacaacatccgagcctttaaaaccattcctgaagagtgcgttgaaccaacaaaggatacattaa

SEQ ID NO: 28917 - DNA, 262 bp, Glycine max
  unsure (1)..(262): unsure at all n locations; Clone ID: 701060730H1
cgcaagcnaacaaagatgaaagangcggatgagcaactatgcgaggcggccattaaaggtgacacgaagaaagtgaggtctcttatatactccggcgctgacgtcacccactttgacggcgatggcctcaatcctctgatgcacgccgcaaagcacggccatgcacccgtcctcaccctcctcctctccgtcggcgctccctggaacgctctttctccctaccaacctactccgccggtgactacgccatgcaagaaggcca

SEQ ID NO: 28918 - DNA, 249 bp, Glycine max
  unsure (1)..(249): unsure at all n locations; Clone ID: 701060731H1
cgcgtttgggagaagaagagcaaaatcgctgtgaaaatgagcggaacggtgaancanagttagcgatgtagcattcaaggtgggaaggaacatcgattgggatggaatggcgaacttctggtctccgatgaggctcgcagggagttctccaatctccgtcgcgctttcgacgaggttaactcccaactccaaaccaagtttagccaggaacctgagcccattgattgggattactatagaaaggattgg

SEQ ID NO: 28919 - DNA, 265 bp, Glycine max
  unsure (1)..(265): unsure at all n locations; Clone ID: 701060732H1
cgattgnaaaattctcttccgtttcaggattagngtttcaccgttacagtgaaacatggcaaaaccaaagcnaatacttctctgcntatctntncgctgctcctcttgatttccacctcttcgtttcagcttctccgcgcttccnatgacgccgatgatgatncgatcttctatgattcgttcgacgaggattttgaagaccgttgggttgtgtctcanaaagatgagtacagtggtgtctggaaacatgccaagagtgagggac

SEQ ID NO: 28920 - DNA, 270 bp, Glycine max
  unsure (1)..(270): unsure at all n locations; Clone ID: 701060733H1
cggcaacacccgtgttgcacttgccctctcttccttcctatttcttcaatcttccaccacttttcatctttccacacaattgaataacngtaggacacaaaaaggaggaagagagaaaaggagatcagattcaatctcgaaaatccattttgtgcatgtatatttttgtctcttttgcgcaatttccttttggttaattaaacacnttgccattaaatggaaaagaaagtcctgatctcatattagtcccaagtggtttcctgtgttgtt

SEQ ID NO: 28921 - DNA, 265 bp, Glycine max
  unsure (1)..(265): unsure at all n locations; Clone ID: 701060735H1
ctttcantcagatactccttcacgctcttcttcattctcctccncttatcaccttcacacattgcttcaacaacaccaacactagcctcacacactaacacaatcagccaccanaatanccatcacaaaccgcaacatccatagccttaacaatgctggaagaggcaccaaaatcaccggcatatcgcaattcaaacgatacctgcatcgttttgggtacttacaaaacaacaacattagtttcagtgatgaatttgatgccgtc

SEQ ID NO: 28922 - DNA, 259 bp, Glycine max
  Clone ID: 701060736H1
cttacggctaaattctcaaagatttaaactttgtctcagagtttccaaattcacccaaccccagagagaaaatgtctctaatcccaaatttcttcggtggcagaaggagcaacgttttcgatcctttttccctcgacgtctgggaccccttcaaggattttcctttcccaaacactctttcttcagcttcctttcctgaattttctcgggaaaattctgcatcgtgagcactcgtgtggattggaaggagaccccagaa

SEQ ID NO: 28923 - DNA, 254 bp, Glycine max
  unsure (1)..(254): unsure at all n locations; Clone ID: 701060737H1
ctgctgnaacagctntctgtcgcnaattgatgatatttgggtgtcgatgcgcttcngncatttggtttagnatgaaaatgncactggtttggcctctgcttaacgaggcgangattcagcacaagctcnnanaatcttgttgctctgtgcnctttnngagattgccantggtcattcccaaaattgatcctgtggtttatgnatnncaagaatctcgtttcgatggcgncaacaatatcaacgcagctaccctg

SEQ ID NO: 28924 - DNA, 259 bp, Glycine max
  unsure (1)..(259): unsure at all n locations; Clone ID: 701060738H1
cgggaaagtntcctccgtcgtaccagaacganggaggtgccatcccggtcaaacaagttacgctatggaggttcatccagggtatggtgctagtgctaataatcatacacgtggagccagggtacgtgaaccagggttatcctctgcagccacctctaccgtactacatgcacccgcacgctacctcctaccgcagatgttcagcgatgaaaaccccaatgcatgttcaatcatgtgatgatcggtgattattttcggt

SEQ ID NO: 28925 - DNA, 256 bp, Glycine max
  unsure (1)..(256): unsure at all n locations; Clone ID: 701060739H1
ctgatggcaaaccaagcttcactctccttctcttcngggtctccagttcacgcncctctnaagcgcgtgggcacgcacaacggaagcttccactgcgacgaggcccntngctgcttcatgattcgcctcacgaacaaattcaacagcgccgaaatcgttcgctcccgagaccctcaggtgttggaggatcttgatgctgttcttgatgttgggggagtgtatgaccctgctcgagatcggtatgatcatcatcaaa

SEQ ID NO: 28926 - DNA, 259 bp, Glycine max
  unsure (1)..(259): unsure at all n locations; Clone ID: 701060740H1
caaatcgaanagcactagaagaagacgatggagaaagaggagagnacggaacagcgaaagcaagcgatgctcgccattatggagctcgctaacatgntaagcgtaccgatggcgttaaacgccgtcgttcgcctcaacgtcgccgacgccctctggcaaggtggcgccaacgcccccctctccgcctccganatcctcccccgcatcctccccggcgccgacggcggaatcgccgagaacctccagcggctcctccgta

SEQ ID NO: 28927 - DNA, 251 bp, Glycine max
  Clone ID: 701060741H1
ggcgtgagtacaatcgaagagtgagggaaattgtggagcagagttggacagcagattaagttcatccttatatgcatgggaagcttgaaggcatgaatttggttgcagtgatggcaactataagaatgattgtgcaaactacatcacatttatattctctgctgatatgaatgatagcatcatctatcttaatttattatagcttctgcatgcatatgtcagctaatgtaaaatagattatgcgtgtcatt

SEQ ID NO: 28928 - DNA, 252 bp, Glycine max
  Clone ID: 701060742H1
ccagccccatcatggcttcagagaagcaagcggctcttgccgtcactccctctgatgctgatgctcctaccatatttgacaagatcatcaataaggagattccttctactgtggtttatgaggatgacaaggtgcttgccttcagggacataactcctcaagctcctacacatattcttatcattcctaaattcaaagacgggttaagtggtctatccaaggctgaggagaggcactttgagattcttggcc

SEQ ID NO: 28929 - DNA, 254 bp, Glycine max
  unsure (1)..(254): unsure at all n locations; Clone ID: 701060743H1
tttagagggctgctcctcctccatgctttcctcccttttaacctcaagaatgttttttgaactttttantcgtccatgctttaactctgaaatgctgattttgtaagaatgataattgggttcctcttcctcactntcctctctatcanccattattgtcactgttctcttccgccttcttgtctctgttgaccganttttccccaccatccgaaggctacctttcctttcttgaattcaagaagtaattcctt

SEQ ID NO: 28930 - DNA, 254 bp, Glycine max
  unsure (1)..(254): unsure at all n locations; Clone ID: 701060744H1
ccattcctgaagagtgcgttgaagcaacaaaggaatacatccatggcgaacaatatagatcagactccaaaacagttaaccaacaagcttacttttatgccaganacctcgaagtccatcccaaggacacatttgtgttcagtatagatggcaccgtactctctaatattccatactacaaaaaacatggatatggggtggagaaatttaactcgaccttgtatgatgaatgggttaacaagggcaatgcaccg

SEQ ID NO: 28931 - DNA, 254 bp, Glycine max
  unsure (1)..(254): unsure at all n locations; Clone ID: 701060745H1
ctgtctctgtgtttgcggctgaggattccgaacgagcgaccttcctcgtttctcgcaaagtttaagtcatcatgggtaaggaaaagactcacatcaacattgtcgtcattggacatgtcgactctgggaagtcaactaccactggtcatttgatctacaagcttggaggtattgacaagcgtgtgattganaggttcgagaaggaggctgctgagatgaacaagaggtcattcaagtatgcctgggtgcttgac

SEQ ID NO: 28932 - DNA, 228 bp, Glycine max
  unsure (1)..(228): unsure at all n locations; Clone ID: 701060746H1
gcaaganggggtntggtganggctttcagnggctctctcagtacattaaatagagaacaagtgtttgctcctttattatcctcatgctaatgtagtctccacattagcgtatctcngctcatgtaaattggatatactttaatggtggttntactttcnntcgttgttangnatgagacatantagtttctanaaanananaananangaancnnnaaaannanncct

SEQ ID NO: 28933 - DNA, 257 bp, Glycine max
  unsure (1)..(257): unsure at all n locations; Clone ID: 701060747H1
cnaccgtacaacaaggttgtttttgttttgttttgtgttttctctctaatcattcgaatggccaaagaaggacctaactgggacgggttgctgaaatggagcattgctcactccgatgggactagccctactcgcaatttaagtgaggaggatcgaaaatggtttatggaagcgatgcaagcacagaccattgatgttgtaaaacgtatganagagctcacacttgtgatgcaaactccagaacaagtattgaaaga

SEQ ID NO: 28934 - DNA, 260 bp, Glycine max
  unsure (1)..(260): unsure at all n locations; Clone ID: 701060749H1
tttttctttgttctgtttaaataaaaaaagaaaatttaaaccttaaatttcctagctgtcttcaatatcgtgaaactcactcttcaatcatcgattttntggtttctgggtttttgttttcctgtgatttagggtctgattctgatcgaaacccgcgccatggccatgttcgattccatcttcaacaaaggcntttanggngtcnnatgngnaaaacttnnnaaattgnnaanncccnggtaaanctncnangaacanaa

SEQ ID NO: 28935 - DNA, 261 bp, Glycine max
  Clone ID: 701060750H1
gtaggttgggagtgatgatgttatgtgtagcacataggaattgccgaattggatacaatccggaagaataagcttggagagcaaggcaatatttggatgttttatggcagaaataggtgcacggcaggcatgggtttcagcttttgtgactcaatcacccaccataaccattattatcagtacatagtactagttaatctcagtcatgcctattcctaggtttatgctcttttcatcccagcatcgctccactgctgcggc

SEQ ID NO: 28936 - DNA, 255 bp, Glycine max
  unsure (1)..(255): unsure at all n locations; Clone ID: 701060752H1
gcccgtgtgtcgccgccatggccaccgtcaccacccaagcctccgccgcaattttccggccatgtacctcgaaatcgaggtttttgaccggctcttccggtaaacttaaccgggnagtgactatgcggccaatggggtgccctccttctgcctctttcaaggttgaagccaagaagggagagtggttacctggcttggcntccccaacttacctcaatggcactcttcctggtgacaatggatttgaccctctgg

SEQ ID NO: 28937 - DNA, 253 bp, Glycine max
  unsure (1)..(253): unsure at all n locations; Clone ID: 701060753H1
tctcaccagagccgccaaggtgttggaacaacttagtggccaaaccccagtgttttccaaagcaaggtacactgttcgttcctttgggattagaagaaatgagaagattgcatgctatgtcactgtcagaggtgacaaggcaatgcaacttttggagagtggtttgaaggtgaaggnatatgaacttctcagaaggaacttccagtgatactggttgctttggctttggtattcaggagcatatcgatttggg

SEQ ID NO: 28938 - DNA, 253 bp, Glycine max
  unsure (1)..(253): unsure at all n locations; Clone ID: 701060755H1
gcgtacaagancctcacatctctgaatngcgtcantgcatatgggtttgatttagtccgtggaacccatactcttgatttgatcaagggtggatttcccagtggaaaatacctctttgctggantggttnatgganggnncatctgggccaatgaccttgcngcntctctcacnacattncagggtcttgagggcattgtgggcnaagatannctngttgtgtccacctcctccncccttcntcacactgctg

SEQ ID NO: 28939 - DNA, 253 bp, Glycine max
  unsure (1)..(253): unsure at all n locations; Clone ID: 701060756H1
caagctagctattagttcgattttgtagtaagtgaggtgccaatatggtgaagatanctcttggtactttggatgactcttttagcgctgcctctcttaaggcttatttcgcagagttccacgcaactctgatttncgtgttcgctggtgttggatcagccatcgcttacaacgagcttacaaaagatgcagccttggatccaacggggctggtggcagtagctgtggcacatgcattgcactgtttgtaggt

SEQ ID NO: 28940 - DNA, 248 bp, Glycine max
  unsure (1)..(248): unsure at all n locations; Clone ID: 701060757H1
cgtcaatgcttcaaaaaacattctcccacaaacccgataaataatcttgtgccctgggcaaaatgtgattttaagttgccggtgctatctccatctccagtttctgtagtagtttatttctcccagctgttacaattcagtgtgctttcattaatgtgggcctcttgctgtggtattcttgctgcatacattgcatctgataaactgcgatttttttatgaatgctganagattaatcagcaggttaa

SEQ ID NO: 28941 - DNA, 250 bp, Glycine max
  unsure (1)..(250): unsure at all n locations; Clone ID: 701060758H1
gaaaacccaaagtgcttctctcctctgtctttttctctctcttgctatccttttggctagtngcactgctgcaagtgcaactnccaagaagcgcagtgccaagccaccatgtttcaacattcaacagaagcctttttccttccacttttctctttggaattggttcttctgcttaccaggcagaaggagcagcaagtgtagatgggagaggaccaagcatatgggacacctacactagacagcatactga

SEQ ID NO: 28942 - DNA, 248 bp, Glycine max
  unsure (1)..(248): unsure at all n locations; Clone ID: 701060759H1
cactgaacaagggtttctctttctctttctctgtctgcttcttcactttctctcgtttcaatcgaaaaaaatcatgggcagaaaattcttcgtcggtggcaactggaaatgcaatgggaccactgaggaggtgaagaagattgttactactttaaatgaagctaaagtccctggagaagatgttgtagaagttgttgtnagccctccttttgtgttccttcctttgtaaaaagtttgctgcgccctga

SEQ ID NO: 28943 - DNA, 233 bp, Glycine max
  unsure (1)..(233): unsure at all n locations; Clone ID: 701060760H1
atggaattggnagacaagttggaacgtggtggtctgtttacnaatccaacacttaatctactctcttcgcancctaaaatcccaatggcttcactctctgttttgcgccacaaccacctcttctcgggccccctcccggcccgccccaagcnnnnnnnnnnnnnnnnnnnnaggatccgaatgtccctccgcgagaacggcccctccatcgccgtcgtgggcgtcaccggcgc

SEQ ID NO: 28944 - DNA, 251 bp, Glycine max
  unsure (1)..(251): unsure at all n locations; Clone ID: 701060761H1
gcttagtgtcatagtgcagaaattncctccaccggaacctaagaaacctaagactattgaggttaaggttgcttgaacaacttgtagaacgaagttaaataaacgtttgtttccctctctagtagaagcaggggaagtaatgttttttctgatttgaaggtttttctgttctcaaagcaatggttttatggtattgtgattttgtgatgttgtaatcagatgatgctatatcagttgtttagtattgctga

SEQ ID NO: 28945 - DNA, 253 bp, Glycine max
  Clone ID: 701060762H1
tggttgtgggtaggtgctgctgctgcttccattcctattcttacagtgaaggttcaatggaagggacaatgcagcttgcatacgagactgttgtgaagctcatgctggctgcactcgaacgcaacgtgctccctgacgtcatcaccaggagactcacgcgcttgctgttggctactcgccttcgctctgcttacaaaccctcctcccaacttcaactctccgatctcctctacttcgcgcattcattacaaga

SEQ ID NO: 28946 - DNA, 255 bp, Glycine max
  unsure (1)..(255): unsure at all n locations; Clone ID: 701060763H1
gngaaaacgtaaaacctaattaattagggttccgagactgagantcctggattgctcgcanccttgacccaccttcttctctcagtcgttagggtttcntgtgctaacaaccaggagttgtgtgatatttagtaaaatgggtgagactggaaaacgatatcattcgcagagagaccatgatggggacnggaaacatcaaaagagacgaatgactgacagagatgataggggcaatgatgaattgattgtatatag

SEQ ID NO: 28947 - DNA, 257 bp, Glycine max
  unsure (1)..(257): unsure at all n locations; Clone ID: 701060767H1
tattctcctntgatcgtgtgatttctttctgagttcttagcacttacttttttcatacacatttgtngtncntnttgggaanccatngatgaggatttcganttcccaagtncctggcaacatggaaatgccagaggaggaagagatnnagagtccgattctgaaggttggggaggagaaggagattgggaaaatggggctgaagaagaagttgctaaaggaaggtgaaggttgggacatccctnactgtgganacc

SEQ ID NO: 28948 - DNA, 255 bp, Glycine max
  Clone ID: 701060768H1
gttgcttggtgatgtccctttctgttctcttcactcttgttcttgcgagagaaagccatgccagagacgaagatttttggcatgctgtttggccaaacactcccattccaagttcattgcgagatcttctaaagcctggccctgcaagtgttgaaatcgatgatcaccctatgcaaattgaagaaacacagtacccgaaaaccttcttctataaagaagaccttcatccaggcaaaacaatgaaagtacaattca

SEQ ID NO: 28949 - DNA, 113 bp, Glycine max
  unsure (1)..(113): unsure at all n locations; Clone ID: 701060769H1
gagtcntgtagtgtgngagccagcgagagaggngaaagcgccaaggctgcaacacccagctnccctgcccctacccttacaatnccctaattgccgaccatctacagcttgcc

SEQ ID NO: 28950 - DNA, 252 bp, Glycine max
  unsure (1)..(252): unsure at all n locations; Clone ID: 701060770H1
cagaacgctcgcccgcaccgtccagatcgtaatcaagagaagaggagcgagtttngtttttccttgcagcccaagccatggcgcctctgatcctgcatggtggaaaaaccaacaaaaattcttacaacacactcattgcggcggagtatgccggcgtccaagttgactttgccccaaattttgagatgggtgtctccaataaaactcctgaatttctcaagatcaatcctantggcaaggttcctgtgttgg

SEQ ID NO: 28951 - DNA, 252 bp, Glycine max
  unsure (1)..(252): unsure at all n locations; Clone ID: 701060771H1
gccaagtgaaagtgaganaaaataaaaatcaaagagcataatgtcagggatcattcacaagattggggagacccttcatgtgggagggcacaagaaggaggaggagcataagggtgagcaccatgctggagaatacaaaggggagcaccatggtgaacacagtagtgagtacaaaggagagcatcatggtgaacacaaagctggagagtaccatggtgagcacaagccagagcacaaagaggggttcctagc

SEQ ID NO: 28952 - DNA, 252 bp, Glycine max
  unsure (1)..(252): unsure at all n locations; Clone ID: 701060772H1
tgaccccaatatacttagccatatctttacttcccaaaacttgctctacaatgagtttccttcgttcttttgcaagaaacaaggatatatcaaaagtaggacgcagaggtatccattgcatgcagaaactatgtgcagaaaaaatatctcctgattcactagagaaggcccaaaatcgtgtgatagatgctgcactcacacttgttcgagaaaatacaaggctaaganagaactcgtgcatagtttgggagg

SEQ ID NO: 28953 - DNA, 250 bp, Glycine max
  unsure (1)..(250): unsure at all n locations; Clone ID: 701060773H1
ccgattgctagaatggaatttcgatgctcagtcatctcttttaccattctcttctctcttgctcttgcaggagagagccatgtccatgcatcgctacctgaggaagattattgggaagctgtttggccaaacactcccattcccactgcactgcgagagcttctaaagcctctccctgcaggtgtannaatcgatgaactccctaagcaaattgatgatacacagtacccaaaaacattcttctataaag

SEQ ID NO: 28954 - DNA, 246 bp, Glycine max
  Clone ID: 701060774H1
gttcgtagatagccgatgtgcttgtcttagtgtgtcagtcattcctgttcctcaagtcaagctttgtagtgagcagatataatggctgttgaaaggtccggaattgccaaagatgttacggaattgattggtaaaaccccattagtatatctaaataaacttgcggatggttgtgttgcccgggttgctgctaaactggagttgatggagccatgctctagtgtgaaggacaggatgggtatagta

SEQ ID NO: 28955 - DNA, 249 bp, Glycine max
  Clone ID: 701060775H1
caggagcgttggttggcggtgcgaaagcaaagttagttgagagagagaggagctgaggagaatcaatacgagagaaatatgtctggtatcgctcgtggacgccttgctgaggaacgaaagtcatggcgcaaaaaccatccacacggtttcgttgccaagcccgagactctacctgatggcaccgtaaatttgatggtctggcattgcactattcctggcaagaccgggactgattgggagggtggatat

SEQ ID NO: 28956 - DNA, 250 bp, Glycine max
  unsure (1)..(250): unsure at all n locations; Clone ID: 701060776H1
cagcattagggtttttcatctgcttcaatggggaagggaacagggagttttggtaagagaaggaacaagactcacactctctgtgtgaggtgtggccgccgcancttccatctccagaagagtcgttgcgccgcttntgctttccccgccgcacgcactaggaaatataactggagcgtcaaggcaatccgcagaaagaccaccggaactggcaggctgaggtacttgcgtaacgtgcctcgccgattca

SEQ ID NO: 28957 - DNA, 251 bp, Glycine max
  Clone ID: 701060777H1
caaaaagttacctgtttgcgatctcattacaatctccccagtttctaatctcagctaagaaaaaccaaaagatgtctctgattccaggtttcttcggtgcccgaaggagcaacgtcttcgatccattctcactcgacatttgggatcccttcaaggattttcatgttcccacttcttctgtttctgctgaaaattctgcattcgtgagcactcgtgtggattggaaggaaaccccagaggcacacgtgttc

SEQ ID NO: 28958 - DNA, 254 bp, Glycine max
  Clone ID: 701060779H1
ctcactcatcctctcccttctcttacattgttcatttctcaactctttctctcttttcttccaaaccctaatctggattagcctctcatcggatttcaattctcacggtcttcaccgaccgccagatctcttagcaccgctcttcttttcatcgattaaataacaaaaaattggcttaattttattctaacatcctaagcaaaaactaacgttttcacccgattttaacattcgagagaagagttagtttattt

SEQ ID NO: 28959 - DNA, 254 bp, Glycine max
  Clone ID: 701060780H1
ggaaggcgcagtgccccattgttgagagactcaccaactctctcatgatgcacggaaggaacaatggaaagaagctcatggctgtcaggattatcaagcatgcaatggaaattattcacttgctcactgacctgaacccaattcaggtcattgttgatgccgtcatcaatagtggtccccgtgaagatgcaactagaattggttctgctggagtggtgaggagacaggccgttgatatctcacccctagacgtg

SEQ ID NO: 28960 - DNA, 254 bp, Glycine max
  Clone ID: 701060782H1
agcataagaatctgcaacaaatagtcatggctgcgcttggggaccaatcagaggaacaagccatggctgcccaacctaaacctcagaaccgacccatttctaacatcgtcatcgtcgttgctatgcagacggaggcacttcccattgttaacagattccagctcactgaggaccctgacaccccgtttccgcaagggttccttgggtccgttatcaggggacatacaaagatcttaatataagcttgatttggc

SEQ ID NO: 28961 - DNA, 251 bp, Glycine max
  Clone ID: 701060783H1
ctaaatcaattatttcctttatcttgtttatgtactctgactctgtgagagagtgtttgtactttgtagtagcaagcgagcatggctccgaagaaggttcttctcctttgcggggacttcatggaagactatgaagccatggttccatttcaggcattgcaagccttcggtctcgccgtcgacgccgtctgtcccggaaagaaatccggcgatgtctgccgcaccgctgtccatgtacttgccggcgccca

SEQ ID NO: 28962 - DNA, 249 bp, Glycine max
  unsure (1)..(249): unsure at all n locations; Clone ID: 701060784H1
aactcatcacttactggaagccttgttgtgagtaagagaaaaggcttcctgcaccgagcacaccaacttgatacctctnattctttctttgcttagaattccacagaatatggagacngttctttncaatcactccccacctttggaattcaagggtttgancaaggaggaggaagactcattgctagggcaagtggaaatatggaggtacatgactgcttcacggacttccgtggccttgaaanctgt

SEQ ID NO: 28963 - DNA, 249 bp, Glycine max
  unsure (1)..(249): unsure at all n locations; Clone ID: 701060785H1
gcaacttccaacaccatagtgaaatggcttccaaggctgcacttctcttgtgtttcaatgttctcttcttcaccgtggttagctccacatatgtgccatgcaacccacnccccaaaactccaaaacacccacctgtcccaaagccaccttccccaaagcaagcaagttgccccaaagacactattaagtttggtgtgtgtgctgatgtgttaggtttgatcaacgtgcaattgggaagccaccaaagac

SEQ ID NO: 28964 - DNA, 248 bp, Glycine max
  unsure (1)..(248): unsure at all n locations; Clone ID: 701060786H1
gcctganttttgcgtgacaggtggtactgggttcatcgcatcttacctggtcaaggccttactagagaagggtcacacagtgaggaccaccgtgagaaacccaggggatgtggagaaggttggttttctgactgaactaagtggagccaaagagagactgaagattttgaaagcagatctattagtggaaggaagctttgatgaggcagtgagaggagttgatggtgtcttcatatggcgtcccctgt

SEQ ID NO: 28965 - DNA, 251 bp, Glycine max
  unsure (1)..(251): unsure at all n locations; Clone ID: 701060787H1
cctaattngcctccagcaccttctgctttgcctcctgctccttcagccttgcctcctgcctccttctgctttatctcccgttccttctgcaacgcttgcttctgaaatttttccagtatcagtagcaaataaggcacccaatgtttcaacttccgcagccatgttagcttctaacttaccatcactggctttgctgaccaatcctgctcgagatatcaatgctatagtgccacccatttccagcaaatcga

SEQ ID NO: 28966 - DNA, 249 bp, Glycine max
  Clone ID: 701060788H1
aacgttatgatgtcatccagacaagaataaaggagatgggtttgcctgttgagccatatgagtggtaccttgatctgaggcggtatggaacagtgaaacatgccggatttggccttggctttgaaaggatgattctctttgccactggcctggaaaatattagagatgtgattcccttcccacgatatcctggcagagcagatctatgattacaagtggtttttacgaatctattgcaccaagtagtta

SEQ ID NO: 28967 - DNA, 247 bp, Glycine max
  unsure (1)..(247): unsure at all n locations; Clone ID: 701060789H1
cttcccttcaacaaaacacaggggangggaaagtattactagtagtcnggnacgaaaccccaaaacatgggtggtggtttcttgttaccattgccaaccctcttgttgtgtctctttgttgtgttaatttattattccctccaaacaaaagctgaggaatttgatgagtccttgttgttcaatggaaaaaacgtttccagtttcagcagtggcagaaagcttggtgcaggaagatgcaacttgttcc

SEQ ID NO: 28968 - DNA, 245 bp, Glycine max
  unsure (1)..(245): unsure at all n locations; Clone ID: 701060790H1
gcagatgatgtcaatgggtgctggattttgtatgccgttcatgatgctacctaatgctgctcatcatatgatgaacacaccccatttacatcagttaatgggacttggtatggggttcaggccaggcacagccatgccttgtagcctccctcagttccctattncacctttgcatggtatcactgacaacagagttcacatgtttggtttccctaaccaagttccacccatgccaatttctcatg

SEQ ID NO: 28969 - DNA, 244 bp, Glycine max
  Clone ID: 701060791H1
gctgaacaggatcagaggacccgaggggatgaaagtgatttgcatgttataatctttgatgaaattgatgctatttgcaagtcaagaggttcaactcgagatggtactggagttcatgatagtattgtaaatcagcttcttactaagatagatggtgtggagtcactaaataatgttttacttattggaatgactaacagaaaggacatgcttgatgaagctctcttaagaccagggaggttgg

SEQ ID NO: 28970 - DNA, 246 bp, Glycine max
  Clone ID: 701060792H1
cttgactcggggtgagttgactcagcgatggcggaagaggtgactcgggtgatggtggcagtgaacgagtcgagcatgaagggataccctcatccttcgatcagcagcaaaggggctttcgaatggaccatcaacaagatcgttcgcaacaacgtctctgccttcaaccttctttttcttcacgttcaagtccccgatgaagatggttctctttctatttccctctcttttctttttaatgttctt

SEQ ID NO: 28971 - DNA, 248 bp, Glycine max
  unsure (1)..(248): unsure at all n locations; Clone ID: 701060793H1
gaatgggttaacangggcaatgcaccggcactgcccgagactcttaagaattacaacaagctggtgtctcttggcttcaagattatattcttgtcaggaagaacactggacaaacaggccgtaacagaagcaaactgataaggcagggatacaacattgttgggatcattggagaccaatggagcgatctcctcggaggccacagaggcgaaagcaggacctttaagcttcctaatcccctgtactac

SEQ ID NO: 28972 - DNA, 250 bp, Glycine max
  Clone ID: 701060794H1
ctcgaactgttgtttggtctcttctctcttatccatggcatcaacgtttctcaccctaccaactcccttcctacacaaaaccaatgccatcagtttctctaacaagagaccctcatttttgcagaggagctctctgaagattcatgcaattaccaaaaaatgggaacccacaaaggttgtgcctcaggctgatagagttcttattcgtttggaggagctttcagataaaacagttggtggagttttgctg

SEQ ID NO: 28973 - DNA, 242 bp, Glycine max
  Clone ID: 701060795H1
gtcgaagagaggacgcggtggttcggcggggaacaagttccggatgtcgctgggtctgccggtggcggcgacggtgaactgcgccgacaatacgggggcgaagaacctctacatcatatcggtgaaagggatcaaagggcgtttgaaccgtctcccctcggcttgcgttggcgacatggtgatggccaccgtgaagaaggggaaacccgatctgaggaagaaggttttgccagctgtcattg

SEQ ID NO: 28974 - DNA, 251 bp, Glycine max
  unsure (1)..(251): unsure at all n locations; Clone ID: 701060796H1
ctgataggcgcagagcagagagagagaaaacgcaaaggcattatttggtcttggatccctttcgatccgacgacttcgttcgttccttctccttccaagttctaaccatttcccactgtcttcgattttagggcattaaatctgccatggcgcagcacccgctagagctcgtgccgattacgattacctcatcaagcttcttcttatcggcgacanggtgtggggaagagttgtctattttgangtttctg

SEQ ID NO: 28975 - DNA, 278 bp, Glycine max
  unsure (1)..(278): unsure at all n locations; Clone ID: 701060801H1
tcgagataactagaaacagtgtgatgaaaatgaaggtcttgttttcttcgttgctacaattttngtagcatggcaatgccatgcgtacgatatgttccctctccgaatgaacactggctatggtgcccgtactccggaggtgaaatggcaagttggaggctgctgtggaagcaaancatctttgggctttgagacatcctgaggagtgcgttgaagccacaaaggaatacatccatggggacattttngntcagttccaaaancagttacccaacagt

SEQ ID NO: 28976 - DNA, 282 bp, Glycine max
  unsure (1)..(282): unsure at all n locations; Clone ID: 701060802H1
gctggtgaagctcctggagattccaggacatcaaattctcagcagtcatgccaganaggtttataaatgacacttcagcaggtttttgactccaagaatnnatgaaaatactcagtactacagttctccatcatgcattgataaatatttggtggatcctggggatattgatcaatgtattcagctggtcaggagtggaacaacaatctacagatccagctgaagcatcactaaagtgaccaaattcacccaaagaataatatattaaattttgacaggcag

SEQ ID NO: 28977 - DNA, 278 bp, Glycine max
  unsure (1)..(278): unsure at all n locations; Clone ID: 701060803H1
gtagaagggaaacaanagtgctttactttcgaatctgtttccaaccccacccttnacggttgcgaacatacctgaactgtgccacatggcacaccggaagggagtgacggtggtggtggacaacacgttcgcgcccatggtgctttcgccagcgcgtcttggtgctgatgttgtnttcacagtatctccaagttatcagcggtggggccgatatcattgcaggagcggtgtgcggacccgcaagactggtgaacgcaatgatggattgcaacaagggc

SEQ ID NO: 28978 - DNA, 274 bp, Glycine max
  Clone ID: 701060804H1
atggagatgtatcagatctggagcaggagaatagcgttgggagcgttcgcgtttgttctgcttttcctatcggcctcagcagacgacgtcgttgtgctctctgaagataacttcgagaaggaagttggtcaggacagaggagctctcgttgagttctatgctccttggtgtgacactgcaaaaagcttgcccagaatatgaaaagcttggtagcagttcaagaaagccaaatctgttttaatcggcaaggttgactgtgatgagcacaagagtt

SEQ ID NO: 28979 - DNA, 271 bp, Glycine max
  unsure (1)..(271): unsure at all n locations; Clone ID: 701060805H1
accaaaattgatcatcaatgggtttcaattgaacggaaagatctcacttttcagttgctgttcatgcatgtatatttttggataaaattcaaaaattgaagatgtggatttagtgtcagaaaattaatgaattgtgtgctgttttcaaccggtgtcaataacatggaccaagggaatgttagccacagttgaggtccatgttttgtaacaaaagcttgcagggaagtatcatttagcctaaccttgtaaaaggggcaantaaattatggac

SEQ ID NO: 28980 - DNA, 275 bp, Glycine max
  unsure (1)..(275): unsure at all n locations; Clone ID: 701060806H1
ctnaagttncaantgtagatgaagcgcttctactgaccaagnagaggnantgcgtgtgagccanagtggattcagacattgaaagctcaatctcnctacacaacaccccccatccatgatgatgatgccaataggcctcccaaggagtagttccatgcttctngatgttgatgnattatgctgagcttgtgngaggaatgttgannatgactngttggtgcatgangttggtgtcatnganangaggtactttgatcctcaangaaaagtgcnct

SEQ ID NO: 28981 - DNA, 270 bp, Glycine max
  Clone ID: 701060807H1
agtgactggtggaaatggcaattggttagatggcagagtcacctagagctaactgatcccctttgctttagtctcagtagtggaagaactggttgaccagtgaccacttcccagcagcaacagcagcattgggattactttggagttagacagagatatttttcttccaatacgatggaaaaatggctaagtggttaagggccaccacaggaacaacactactttactctcattgaaggtgttcttgctgcaaacatttttgattgggga

SEQ ID NO: 28982 - DNA, 271 bp, Glycine max
  Clone ID: 701060808H1
gtccccaaagtaagtaaatccacaattcacaaacaaaacactctattactttttctttcctcacttcccttgttctcacaaagtcacaatggaccccctctctctcttctgcaccggagccctcctcgcccggcggcctctactggttcgtgtgcgttctgggccccgcgagcagaagggcaaacgcgcaccgatctttccggcggctccatctcgccgagaaagtccaagacaatacaaacagtactggtccttcttccgccgcccaaag

SEQ ID NO: 28983 - DNA, 266 bp, Glycine max
  unsure (1)..(266): unsure at all n locations; Clone ID: 701060809H1
tacgagctgtccatgaagctaactggatgaatgggatggagatcagtatctangactcgtggtttgatcctgtagtatcctccttgcctggacttattcctgatggttttatctatcttagggcaagtcctgatacttgccataagagaatgatgttaagaaaaagagcagaagaaggtggagtcgcctgactatctccgtgaccttcagaaaagcacgaaagctggttatttccctcccaaagtggtaaccatggagtattatca

SEQ ID NO: 28984 - DNA, 264 bp, Glycine max
  Clone ID: 701060811H1
gagagaatggcagcattggtgggaatcgtgatgtgacaggaagccagaacagcgttgagatcgatgctctagctccgctttgctgttgaagaacacaacaaaaaacagaatgcccttttggagtttgaaaaggtggtaactgcgaaacagcaagtggtttctggtacttgtacaccatcacttggaggcaaaagatggtgggcaaaagaggtttatgaagccaaagtttgggagaagtcatggttgaacttcaaggaggtgcaa

SEQ ID NO: 28985 - DNA, 264 bp, Glycine max
  Clone ID: 701060812H1
gcctaatagagggctaatccttcacttgtttgttttgtggtgtattattacattttgcaccatgccttctctcttcgctagaaaccagaggttctcattggctactctcctgcttcttctggaactattgacaggaaaccttcgcatggcagatgctcaaattgtgtgtgttatgggcatgctgggcaacaatctaccgtcagcaaacgagttataggtctttatagatcaaataacataaagagaatgagatctatgatccta

SEQ ID NO: 28986 - DNA, 271 bp, Glycine max
  Clone ID: 701060813H1
tgaaaacccaaagtgcttctctcctctgtctttttctctctcttgctatccttttggctagtgcgcactggctggcaagtgcaattccaagaagcgcagtgccaagccaccatgtttccaacattcaacagaagcctttttccttccacttttctctttggaattggttttctgcttaccaggcagaggagcagcaagtgtagatgggagaggaccaaggcatatggggacacctacatagacagcatactgaaaagatttgggatcatag

SEQ ID NO: 28987 - DNA, 263 bp, Glycine max
  unsure (1)..(263): unsure at all n locations; Clone ID: 701060814H1
tttgtttgtcgtttgcttctttctttgattaatgatgactagctttaaggttgcatgtgtggttgcgatgatgtgcatggttgtcgccatgagtgttacacccatggcacaggccgcaatcacgtgcgggcaggtcgccggcgacgtgtctccgtgcctcagttatcttcgaagcggcggaaaccgtcggacgcctgctgcaacggatgaagtcgctcagcggcgcggcgaagaccaccgcgacngccaggcagcctgcaatg

SEQ ID NO: 28988 - DNA, 266 bp, Glycine max
  unsure (1)..(266): unsure at all n locations; Clone ID: 701060815H1
ttagcagtgttacttagaacactcaaatgaacataatttatttgtattagatgtggagccctttgcttgttttagcaaggcatgttgttgacatagacttgttcaagtactcagcttccttacattaccttgctctatgcataattggctattgacatttttggtctattgcattctcattggatcgaacatctgattaaatttgattggntttttctatttttgcactgtggattattttctggttttggcaagcaagacatttg

SEQ ID NO: 28989 - DNA, 268 bp, Glycine max
  unsure (1)..(268): unsure at all n locations; Clone ID: 701060816H1
cnatgggaagcaacttgaggtttttgagtctttgcctcttggcattgattgcatcaactcatgctcaactttcagcttggtttttatgctaacagttgcccaaaagcagagcaaattgttttgaaatttgttcatgaccatatccacaatgctccatcactagcagctgcattaataagaatgcattcagactgttttgtaaggggatgtgatgcatcagtccttctgaactcaacaaccaatcaggctgagaagaatgctcctccaa

SEQ ID NO: 28990 - DNA, 272 bp, Glycine max
  unsure (1)..(272): unsure at all n locations; Clone ID: 701060818H1
cagaggcacacgtgttcaaggctgatattccagggctgaagaaagaggaagtcaaggttcagattgaagatgatagggttctcagattagcggagagaggaacgttgagaaggaagacaagaacgacacgtggcatcgcgtggagcgtagcagtggtaagttcgtgagaaggtcanattgccggagantcaaagtgantgaantgaaggctctatgaaantggggtcntcanngtnangttcctaaggaaaggttaagaagcctgatgtcag

SEQ ID NO: 28991 - DNA, 280 bp, Glycine max
  unsure (1)..(280): unsure at all n locations; Clone ID: 701060819H1
cacgaaactcaagaagatggnagaaagcgattcaacagacagaagattttgcttcatcatctcaaccctttcatcatccacccaccccaacgaattcatccttccctccatgcttcagcatgtgtggcgggggatagcgctgcttatcaaaggacatcgacattcggggacgatgtttgatcgtggctgcttatcgactgctcattgcaaagctaaacgaggtggtttcaaagacactcttcctgatgatctactggctcctgttttgaaggtgtaattg

SEQ ID NO: 28992 - DNA, 258 bp, Glycine max
  Clone ID: 701060820H1
gaaatggaagcaaagttccgcgttttgtctttcataaaaaaaatgttaaattattattttctatgataggattggtttcttgtcttttttctcttgtttaagaatttcggtgtattttaacagttgtaaagcactctgcgctctctctgcatgatcatgtacaactacaagcatgctctctgtagtttcaacctgctgcgcttgcaggggttgtaaaactaatcaatataattaaataaattacattctgtctctctc

SEQ ID NO: 28993 - DNA, 268 bp, Glycine max
  unsure (1)..(268): unsure at all n locations; Clone ID: 701060822H1
caacaagttaatagcattccgcaaaatgggctgccaccaccttagtctctgaagtcactctcccctacctcctccggccagcggaagatgccgctgatgggcctcggcaccgcgccggaagcaaccagcgcggttaccacanaagatgctgttcttgaggccatcaagcaggctacaggcactttgatntgttctgttatggtgtggaacagttgtggganangccatagctgaagcacttaagcagggactaattgcatccagagac

SEQ ID NO: 28994 - DNA, 264 bp, Glycine max
  unsure (1)..(264): unsure at all n locations; Clone ID: 701060823H1
tggagcctaacttaggtgggctcactgttgagcaggctatccaaaacaagaagttgttcatcttagatcaccatgactatctcatnccttatttgaggaaaataaatgcaaataccacaaagacttatgctacaagaaccatatttttcttgaaagatgatggaattgacaccattggccattggttaagtaagccacatcctcagggtgaagaatatggtcctgttagcgagtctacgtgcctgccagcgaggagtggaagct

SEQ ID NO: 28995 - DNA, 267 bp, Glycine max
  Clone ID: 701060824H1
aataagtccctccttcctctgccttataattcttgtgacccttttggctggtagcattgaaagtgcaccagcaaacgtgaagccaagccattatgctgcacccttcaataggagtgtttttccttctggttttctatttggaataggctctgcagcttaccagatgaaggagcagcagctatagtggcagaggaccaagtatatggggacactatactaaacagcaaccagggaagatttgggatcatagtgatggaagtctagcat

SEQ ID NO: 28996 - DNA, 262 bp, Glycine max
  Clone ID: 701060825H1
ctcataacacaaagcacaaagcaaagctcatccttgagttaaaaaatggcagcagcttcttccatggctctctcatccccatccttggctggcaaggccgtgaagctgggcccatcagccccagaagtgggaaggggagcatgaggaagaccgtcaccaagcagtctcctcaggaagcccatgtaggcccagaccgagtcaagtattgggcccattctctggcgagcccccgtcctaacctaaccggtgattcccaggcgat

SEQ ID NO: 28997 - DNA, 258 bp, Glycine max
  Clone ID: 701060826H1
aaacccccaattttccttccaaagcttcctcatttctctttaaagagctcccaaatgattcgctccaatggcgtcaggctccttcgatcgctgcccgaaaaactcctccgccacgccaacgaacgcatatacgaggaatgtgccaatggggttataggaattgagttcaggtctttgtatccatccagagttattgggaacttatctccaaatgttggaaatggtggtaatttgaagactatttgttttgggagccga

SEQ ID NO: 28998 - DNA, 258 bp, Glycine max
  unsure (1)..(258): unsure at all n locations; Clone ID: 701060827H1
ctaaatgcaggttgcagaattaatcaaggatgatttatggccaaatccactcacttatttcaacaacgtaagtnaaacttttcactttttgtatcttctctttcatgaatagctgttctactttcagattgcagtatttatcccatttattttttccatgtgtttctaatgctaattgctcggaacaggagcttgatgaagaggatgttgaagctgatgatgaggtaattgaagttccatttttcttacaaaaagtaa

SEQ ID NO: 28999 - DNA, 264 bp, Glycine max
  unsure (1)..(264): unsure at all n locations; Clone ID: 701060828H1
gtgagctataagctagtttatcgtgaggagaatatgaagttgtttgttttctttgttgctgcagtagttttggtagcatggccatgccatggcgcaggctaccaaaggttccctctccgaatgaaaactggctatggtgagcgttcttcggaggtaaaatggcaagttttaggcttgctgggaagcacacaacatccgagcnctttaaaaccatttcctgaagagtgcgttgaaccaacaaaggactacattaatggcgaacaa

SEQ ID NO: 29000 - DNA, 266 bp, Glycine max
  unsure (1)..(266): unsure at all n locations; Clone ID: 701060829H1
tcanaggctagtcttcctattatcacaaacaatgtctgacagtcaagaatctgacaagaacattgagatatggaagatcaagaaattgatcaaggctctggaagctgctcgnggtaatggtaccagcatgatttctctgataatgcctccacgcgatcaaatttcccgggtcactaagatgtgggagatgaatttgngaactgcttcacacatccaaaagtngggtgaancgacagtctgtgttgggagccattacttctggctca

SEQ ID NO: 29001 - DNA, 266 bp, Glycine max
  Clone ID: 701060830H1
atttttgttgcattatcacaaacacctcgtccctcacaatgcagctagcaatggcggccaacgctgttcgtttcaccgtcgccgttccgacctcagccctttctccggtcatccttctccggcgtctccgtcaagctcactccccaatccataacgctttcagctccaagcccctcaccgtttcgccgccaccaagaaggccgtcgccgtccttcaagggggacctccgccgtcgaaggcgtcgccactctcatccaagaagacga

SEQ ID NO: 29002 - DNA, 265 bp, Glycine max
  unsure (1)..(265): unsure at all n locations; Clone ID: 701060831H1
gaggcgttttcgaccctctccgaccatgggagcctgcttttccgccaccaaagtaagcggctcgaacgggcaatggcgtcaacgtcaacaaaaagcgcagggggaccacgaagaagccgaaatcagagacggcgaagcgaatccccaacggcacaaggcggcaattcgcgccacgtgccgtgggnngcgcaccgatttcggttacaagaaggatttcaatccagcgttatcgctcggaaaattgctcgggacaggccaatttggt

SEQ ID NO: 29003 - DNA, 280 bp, Glycine max
  Clone ID: 701060833H1
agcgcttctcctctttgtgttctgggctatgcttcttggcaagagttagatcggacgaggattgcgtgtacacggtgtacgttcggacgggttcgatccatcaagggaggcaccgattcagtaattggtctgaagctatacgacaagtccggctacggcatatacatcaccaactcgaggcatggggcgggttatggatccgggtcacaactactacgagcggggcaacctcgacatattcagtggtagaggcccttgcttggaagcacccgtttgcgag

SEQ ID NO: 29004 - DNA, 278 bp, Glycine max
  unsure (1)..(278): unsure at all n locations; Clone ID: 701060834H1
ttaatttctctctgtctcgtttacacatctctccaacctttcatttcgtttctncagttttattccgaatccctctctcaatctcctttccaaatgggccagcgttgaggttgcacagcaaacaccaacaacagttccagaaaatgaaacaaccgaggtaagcaagacccaganacaaccccagtcactgagctctgcaacagaacaaccagcagctgaggttcctgcaacnagaacaaccagccgctgaggctcctgccccagaatcaaccaccgag

SEQ ID NO: 29005 - DNA, 272 bp, Glycine max
  unsure (1)..(272): unsure at all n locations; Clone ID: 701060835H1
ggnattatgaaagcagggttgttttttctggtgttagtgttaggtcgaatcttaatcctgtagctgatcgttttgtatccatgcttgctcagtgtggattttatcctctcctccataattttccaacaaaatctcaaacataataaataaaaattacatttttattcaaaaatatcgggattcatctgttctcattttgcccccttttttcttcgctctcccgaatcagaaaccctaatcattgtttgggatttcagaggaaagaaatttaa

SEQ ID NO: 29006 - DNA, 275 bp, Glycine max
  unsure (1)..(275): unsure at all n locations; Clone ID: 701060836H1
cttgcagtcgcagaggaaaaccctagctagtagtctcagttcgtttgagagagaaaaaatggcagagggtctcgttctccgcggaaccatgcgcgcccacaccgacgttcgtgacggcgattgccactcccatcgacaatccgacatgatcgtgacggcgtcgcgcgacaaatccatcattctctggccctcaccaagaggacaagacctacggtgtcccccgccgnccgcctccaccggacattctncacttcgtccaggagtcgtcctctcat

SEQ ID NO: 29007 - DNA, 269 bp, Glycine max
  unsure (1)..(269): unsure at all n locations; Clone ID: 701060837H1
aaaaaatctaaaactttcgttctagaaaaccagaccaaactttctttctacggtggctccaatttggccttaacgaaacgaagaatctncgcatcgatcgcgattcgaacatcggaatctggaagcaagcgatgtcaacctcgagccagcaccagttccgatatacacaaaccccttccaaggtctgcaccttcgcaacctcccctgggaatgtccgaggaggagctcagagagctctgcagacccttcggtaagatcgtcaacaccag

SEQ ID NO: 29008 - DNA, 263 bp, Glycine max
  unsure (1)..(263): unsure at all n locations; Clone ID: 701060838H1
attcggtgatcactgatcagtggtttggtgttgttgatagagaaaatgcattccagccctttgcttcttgaggaacccattaggatggcatccatccttgagccatccaagcctactttttttccggctatgacganaattgttggcacacttggtccaaagtccgatcagttgatataattcccattgccttgatgcaggaatgtcgtggcaaggtttgacttttcaggggtgatccagaataccatcaagagacattggaa

SEQ ID NO: 29009 - DNA, 264 bp, Glycine max
  Clone ID: 701060839H1
gcagcctggaggggctttacaagatgttctccatttgcacgatgtactcgctagagtttctctagcgaagttatgttgtacaatatcaagggctagagctttagatgagagatccagatattagatctcagttcaattcagtgctctatcaacttctattggatcctagtgaaagagtctgtttgaggcaattttgtgtgtataggaaatatgataacactgagaggactgaggagcgtgcagctgggtggtatcgtttgacca

SEQ ID NO: 29010 - DNA, 262 bp, Glycine max
  Clone ID: 701060841H1
ttttctatatcacttctcaactttactccttcttcaatcagttgcatattctttgctattccaatggccactgttgaggttgtgtcagccaaggttgccctcccagaggacacaaaagaggcatcattgaaggttgacgaggagaagaacacagaagaagttttgagactccaacaccagaactgtggtcatgagcaaaccaaggaggaaagtactgaggccccacgacctgcagcttcagaagacaagccctcggttgaat

SEQ ID NO: 29011 - DNA, 264 bp, Glycine max
  unsure (1)..(264): unsure at all n locations; Clone ID: 701060842H1
aatacagtctcattctattctattttatctgccaagtntttgatactattttttttttatcgttatcgttagaatctgaaagtgtgaagagtgaagatggccgaagaaaaagaatcaacgtcaattcctcttagtcaaggggaaaatgcatctcgcgacgatcccgaagacccagccagtctccaccaagctcgcccaactcctccacttcggcaagggcttgctgctttgttctccagagttgggtctctaagaaatttatga

SEQ ID NO: 29012 - DNA, 261 bp, Glycine max
  Clone ID: 701060843H1
cacgggccaaaagagcacgccccagtcccagggagacgcttcccaagtcacctccgattcattcactttgctccgttttgcggatgaaatgaagaatgcaaagagaatagggcgcgtttaaggagttcatggttgggcgaagcagcgaagccactttttctccgccttcgacaaatatgagccataattcgatttctcggtgcttggaccccactggagagaatctcccgacagctccagaaacaagaagcggcaaaacat

SEQ ID NO: 29013 - DNA, 262 bp, Glycine max
  unsure (1)..(262): unsure at all n locations; Clone ID: 701060844H1
gnttggatgaatgcgcgaggggaagagagactctctctcctcntccttctanacgtttagagagaganangnttaattcgccacttcatcgaatggaacctncgggttgcgaacaagttccgncttggccgcaagantggnagcggatccttcgggcgagattatctcggtacgaataccagacaaatgaagaggttgcagttaactcgaaaatgttcanaacttaagcatccncaattgttgnacgaatcanattgnntaa

SEQ ID NO: 29014 - DNA, 258 bp, Glycine max
  Clone ID: 701060845H1
tcacagccctctgcgcatgatgcctttgtcggcaactggaagcctagcaagaatgatactatgggagaatcgtcttcctggatttggcactacaatgaacattctctatggggatggtgtttgtggacaagtgatgtggactcgatgaacaatatcgttcccattaccagtattatttgaccttctaggtgttggtcgagaacaggctgggccccatgaaatccttacatgcgctgagcaggttcctttcaacccact

SEQ ID NO: 29015 - DNA, 261 bp, Glycine max
  Clone ID: 701060846H1
cgagagtgaagaaatggcgcaagacttggcattggattggaggagcttcgccgcctccacagcatcgccaaaagacctcgaaccctctctcttctctcctccgaaattcgtaacctcgaaaagttatcgtcagaggaagcttctgcgcagattccggcgcgatttcgaccggaactaagtggcgccttcacctgcgctgaagtatgcgggcactcgcgtcgttcagttgggaccaggatagtgacaaagttaagatatatg

SEQ ID NO: 29016 - DNA, 219 bp, Glycine max
  unsure (1)..(219): unsure at all n locations; Clone ID: 701060847H1
cgttgattccaagtttcttcggcaccggacgaagaaccaacgtcttcgaccccttcttccctcgacgtgtgggacccattccatggcttcccggcaccaccgccctctccnctccggctccgagacggcggccttagccaacacgcgcatcgactggaagagacggcggaggcgcactgttcaaggcagacctgccggggctgaagaaggaagaggtga

SEQ ID NO: 29017 - DNA, 233 bp, Glycine max
  unsure (1)..(233): unsure at all n locations; Clone ID: 701060848H1
tgaatcgcgattgttctnngngancctaantaagagagagatcgaaaatngcgttggctttcgacgagttcggaaggccgttcataatcctgaaggagcaggagcagaagagcagactccgaggattggacgctcagaaagccaacattccgccggcaaagccgtggctcgcatctccgaaccttccctcggccccaaaggcatggaacaagatgctccagagccccgacggg

SEQ ID NO: 29018 - DNA, 268 bp, Glycine max
  Clone ID: 701060849H1
tgagaataccagttgctccagtagccggcataaacaacatggcggacaaggcagtcaccatccgaaccaggaagtttatgacaaacaggcttctctccagaaagcagttcgtcgttgatgtcttcatccagggagggctaatgtttccaaggctgaactgaaggagagtgggaagaatgtatgaggaaagacacaacactgtatttgtcttcaagttccgaactcattttggtggtggcaagtccatgggtttggtttgatctatgat

SEQ ID NO: 29019 - DNA, 269 bp, Glycine max
  unsure (1)..(269): unsure at all n locations; Clone ID: 701060850H1
gtgagctataagctagtttatcgtgaggagaatatgaagttgtttgttttctttgttgctgcagtagttttggtagcatggccatgccatgggcgcaggctaccaaaggttccctctccgaatgaaaactggctatggtgagcgttcttcggaggtaaaatgcgcaagtttaggcttgctgtggaagacacaacatccgagcntttaaaaccatctgaagagtgcgttgaaccaacaaaggactacataatggcgaacaattagatcag

SEQ ID NO: 29020 - DNA, 267 bp, Glycine max
  Clone ID: 701060851H1
gcgagggaaagatgaaaggacattgaaagtcatgatatgctaagacaaggtttcactcatgctttcttgatgacattcaatgggaaagaggagttcaacgcatttcagactcacccaaatcatcttgagttctcgggagtgttttcacctgctattgagaagatgggtgctggatttcccattaacctcgtcaaagcaccagcatgatctcaacttattcaagcaaataaacttttccatctttaaaagtgtatgcatgtgtgtgca

SEQ ID NO: 29021 - DNA, 137 bp, Glycine max
  unsure (1)..(137): unsure at all n locations; Clone ID: 701060852H1
ggtatcttgaatgagatagttataataaaaanattgtattaaatggaaacggtttaatgaaaatgacatatgttgtagagggcatttgctctcattggtaatgtttctgattaaaggttccagcacattgtgatgac

SEQ ID NO: 29022 - DNA, 258 bp, Glycine max
  unsure (1)..(258): unsure at all n locations; Clone ID: 701060853H1
ctcttcaaaagggagaagaaaaggaaagacaacttctcaaaaaactattatagcaatggcagaacaaaaccaaaaccaaacaactgaagctggaagggcaccaagaggttggtcacaagagccttctccagagtgatgctctttaccagtatattctggagacnagtgtctaccccagagaacctgattccatgaaaganctggagagttgnnngccaaaacacccaggaacatcatgacaaccttgnagacgaggga

SEQ ID NO: 29023 - DNA, 265 bp, Glycine max
  Clone ID: 701060854H1
ccctgaattacactcaggtgtctgtcttggcagatgacattctaaagaatgtggagtatgacgcattaaggattgttttcaacaaatttcattctgttgtacaatttttgccaacagtgtcaactgtactgtctcctgaggttattgagagagaggctgaatcaggaggaaagctcggggattggattcatatgagattgaaggtggcgaaacaaaagctgaaattcttcagaatctgggctgagttcccattttcttgtgtgag

SEQ ID NO: 29024 - DNA, 263 bp, Glycine max
  unsure (1)..(263): unsure at all n locations; Clone ID: 701060855H1
cacattcagaacacaagcagaatgcagagaggcacgcggtgagaaagccacacaccaacaccttccgatctcctcacttggtcggaaactcctccgccggattnnnnnnnnnnnnnnnnnnntcgctctggccagccttccgatagaatcagtaaggtttcacggcggccagctcaccgagaagaagctcagacgctagccaagagcaaaccatgcttcagggtataaaatgaaaganatgactggaagtggtatatttgctg

SEQ ID NO: 29025 - DNA, 262 bp, Glycine max
  unsure (1)..(262): unsure at all n locations; Clone ID: 701060856H1
tgaggcctctgagtctcagtctgacggagctaacctctatgtctatgcttcatcatcctcctggcttctcctggaacagatctcctaacatactaaaaaaagcttccatcccaggaccctcctttgtacttcccttcataggcaacgctancccattggtcggacccaaccaatttctggactccaatcctcttttgctaaatccaccccctcgggcttctccgccaactacatcatcggcaacttcatcgtcttcatcaga

SEQ ID NO: 29026 - DNA, 255 bp, Glycine max
  Clone ID: 701060857H1
cgctataagagttgctgcttcttcagccactccgcacctccgcagcctctgtgccctcaacaaccatggctgaaatcgaaactaccgttccagatccacccaaatcgacgtcaaactcttcaatcgctggagttcgaggatgttgaggttaatgatttctctggctgattacatggagtgtcccatcaaagcatgctacatatgttccttcacactgctggtaggtactcagtgaagaggttcaggaaagcgcat

SEQ ID NO: 29027 - DNA, 259 bp, Glycine max
  unsure (1)..(259): unsure at all n locations; Clone ID: 701060858H1
gtcggaatgtgcttcgctcgcatctgattctgtgaagattggctatctatcgcggatgttgacgcataactcgttcgacgttccgagtcaactcggccgcgttgatcgagatcgtcgtcgccgggacgcactcgccggagctacgcgcggaggtgagagtgtcgacgaaatctagacggagtggtggatctgctccggagcccgatctcgcaacccgcgncgcgctcaagattcgggatcaaggcttgttcgcgctttt

SEQ ID NO: 29028 - DNA, 253 bp, Glycine max
  Clone ID: 701060859H1
gaaggatatagttttgaagagctatgcatcaagaagaagccattgagggagaagagaagttttgtgcaaaatccttgggaacagtaattggttttgccatttcaaagctgggaaagaacattcaagtatttcaagttcctttgtcaataagcaagacaatacactgtggaaggtgcagaatcttggagacaaagcagtgatgtgtcataggctaaatttcagaactgcagtattttactgccatgaagtccgt

SEQ ID NO: 29029 - DNA, 259 bp, Glycine max
  unsure (1)..(259): unsure at all n locations; Clone ID: 701060860H1
ctttctccggcgacgatctcagattccggccactcctctcgccggagagcccttnactcttcccttcctccgtcgagccctctccgattcgaatcgttcccagcctcgcaccaccatgaatcccgaatacgatatttgttcaagcttttgctgattgggattctggtgtaggcaagcatgtcttctcctgaggtttgctgagatcatnaccttgacagctatatcagtaaccattggagtgggactttaaaatccgcat

SEQ ID NO: 29030 - DNA, 254 bp, Glycine max
  Clone ID: 701060861H1
tctgtctgcttcttcactttctctcgtttcaatcgaaaaaaatcatgggcagaaaattcttcgtcggtggcaactggaaatgcaatgggaccactgaggaggtgaagaagattgttactactttaaatgaagctaaagtccctggagaagatgtgagaagttgttgtgagcctccttttgtgttccttccttttgtaaaagtttgctgcgccctgatttccatgtctcggcacaaaattgttgggttcgcaaag

SEQ ID NO: 29031 - DNA, 261 bp, Glycine max
  unsure (1)..(261): unsure at all n locations; Clone ID: 701060862H1
tcgcatcacaacacttggttgtttgttaccatcttccaaaaatatcatgctcctaacgtaaaaatcctcggtttcaacgttcaactgcgatctctaaacaaaaccatggcatcactctcaggcatttgctcctcttccccaactctcaaaaaattccgaaccaatccccatcgttgaccgaccctctccgcaaagaccacgtgtcttcccccgcncggcggcgccgatcggactctcagcttcgcgccccttcctcgtggg

SEQ ID NO: 29032 - DNA, 261 bp, Glycine max
  Clone ID: 701060864H1
gtcatcatgaatatcatattggtgacggtgattcaataaatgtcatcaatgatgcatcaataatagcatctgttgctacaactgatgcacagtcaggtggcaatgctcctacaaagaaattggggtttggtctagttggttcagggaaaagaacatctgtccgttctgttttccatgaagggatgataatgaggccaaaaaaatgggccattggttccaattgattactcaactgaagaatgcaggcagttcaacctacgg

SEQ ID NO: 29033 - DNA, 136 bp, Glycine max
  Clone ID: 701060865H1
tgttgtgaaagcatttctttgttctatttaggtagcatgtttgtggtgtttagatgcgattgagtcaatgattggtggtacttaaattatacttttgcatcagctctataatttttagatagacatctacaaatgt

SEQ ID NO: 29034 - DNA, 271 bp, Glycine max
  unsure (1)..(271): unsure at all n locations; Clone ID: 701060866H1
ttccttacaaaagtttgttttcaaagtgtgttttgtttcccaaatcctactcttgtgaccacaacccttcctcctctttcttttgaaacctctttttttctattccccaaccaaacaagcaaacgctacttcactcatcatcactgagatcatggctcctaatatacactgtcaaaaccaccanaccgacgctcaagccaaggtcgccaccgatcatggtcgtgcctacgtcaccttcctcgccgggaaacggtgactatgtgaaaggtgc

SEQ ID NO: 29035 - DNA, 264 bp, Glycine max
  unsure (1)..(264): unsure at all n locations; Clone ID: 701060867H1
agctagttatcgtgaggagaatatgaagttgtttgtttctttgttgctgcagtagttttngtagcatggccatgccatggcgcaggctaccaaaggttccctctccgaatgaaaactggctatggtgagcgttcttcggaggtaaaatgcgcaagttttaggttgctgtggaagcacacacatccgagcctttaaaaccattcctgaagagngcgttgaaccaacaaaggactacattaatggcgaacaattagatcagactct

SEQ ID NO: 29036 - DNA, 267 bp, Glycine max
  Clone ID: 701060868H1
taccataataccattctttcaattgcttaccagaacaagcatggaagctacgggggaaaaagcatggcattctctgcatgtggttcggaatatggaagcaaattctatgctatttatggcataacaaccaccttgggtcttcattaatccctatgcaaatccatctagaagattaaccatgtccctatgtaagtaccctgaggctgaaacagtacccctttatatacccttcaaatctattgacatgttcacccttggaggaaagca

SEQ ID NO: 29037 - DNA, 258 bp, Glycine max
  Clone ID: 701060869H1
gattctcaggtggaggattcagttcctggagaagatatcaggaagctggactttaaccctggtgggataagcaccattgttcaggttaatgatctcaagaattctcctggccctgccaagtgggagcttagacaggctaccaaacaggccctccagtgttcaggataactatcctggtttgtagccaaacaggtgtttatcatgtgccttggtggtacttggcagtgaacaggatgataagcccttttcttactcaga

SEQ ID NO: 29038 - DNA, 260 bp, Glycine max
  Clone ID: 701060870H1
tgttgatcgagataactagaaacagtgtgatgaaatgaaggtccttgttttcttccgttgctacaattttggtagcatggcaatgccatgcgtacgatatgttccctctccgaatgaacactggctatggtgcccgtactccggaggtgaaatgcgcaatcggaggcttgctgtggagcacacaacatctttggctttgagacattcctgaagagtgcgttgaagcaacaaaggaatacatccatggcgaacaatatagt

SEQ ID NO: 29039 - DNA, 263 bp, Glycine max
  Clone ID: 701060871H1
aattgttgtaactttttgattcctaaattctctaaaattcgaaattctaatttcgttaggggaaagagattgtttgtgtgtgagtgagtatggctggaaaaggcgagggtcctgctatcggaatcgatttgggaacgacgtactcttgcgtcggcgtgtggcaacacgattcgtgttgaatcatagccaacgatcagggtaacagaactaccccatccctacgtggctttcaccggacacagaacggttgatcggcgatgcgg

SEQ ID NO: 29040 - DNA, 259 bp, Glycine max
  unsure (1)..(259): unsure at all n locations; Clone ID: 701060872H1
ctttctgtattgcaactgcaaaaggaaatggcattctcaacagccaccgtaaccactgctccttatggatcatggaagccccccatcaccagcgacgatgtctccggcgccaccanggaccttcggaggcaccaccatcgatggtcgtggccgcctcattggctcgaattccgtccanagaatcagggcggggagttcttgttttgagccggaaaacaatgggaggtgaagctgtggatattactctaaggagtttgga

SEQ ID NO: 29041 - DNA, 254 bp, Glycine max
  Clone ID: 701060873H1
cattcccttgtttcgtttcactctcacaatggactccctctctctcttctgcaccggagccctttctcgccggcggcctctactggttcgtctgtgttctgggccccgccgagcagaagggcaaacgcgccaccgatctatccggcggctccatctccgcgagaaagtccaagacatacaagcagtactggtcttcttcgccgccccaaggagatcgagaccgccgacaaagttcccgacttgtcgacaccttt

SEQ ID NO: 29042 - DNA, 259 bp, Glycine max
  unsure (1)..(259): unsure at all n locations; Clone ID: 701060874H1
agaaatttagaattgattatggtgagaagagataagagtgtatgaacagggaagtaaagaaggaccagtacaaccacaactgccaggttcaggggttccttggnngtagcattaanngacactgttccagatcttcccttcacacattcaccacgccaatggcaattcttgaaaaaccatgcaacaacaaaaagaaaagaaagtaactacttctttttataagaggaaagctgcattgatgtcttgatgattttagttg

SEQ ID NO: 29043 - DNA, 252 bp, Glycine max
  Clone ID: 701060875H1
atacgacagcacgaatccgtcgtttcttcaaaccgaaacgacaaggcgataaattaccgtttccgctttccctttctttctttgagaaggcgtcgtaacagaacacgacgactcctgaaggaagtgggcaaaaattgaagataaggatcagtggagagagagataacgaacagctagctatttggttatgttactcaaggatttacatattaatcttctgctgacttctgctgagtacaaaattgaaagcaa

SEQ ID NO: 29044 - DNA, 233 bp, Glycine max
  unsure (1)..(233): unsure at all n locations; Clone ID: 701060877H1
cgcaggtgtcctaagatgagctcaacgagaacagaaatctcgtgtggaacaaaagggtaaaanctcgtttgattctgatttccagtacgaatacgaaccgtgaaagcgtggcctatcgatcctttagtcctccggaatttgaagctagggtgtcagaaaagttaccacagggataactgggcttgtggcagcccaagcgttcataggcgacgttgctttttgnatccttcgat

SEQ ID NO: 29045 - DNA, 254 bp, Glycine max
  unsure (1)..(254): unsure at all n locations; Clone ID: 701060878H1
ctttcttgcggctagggttttagcgcanttcttctagatttaaggaagatgggtaaggaaaaggttcacatncagtattgtggtcattggccatgtcgactctgggaaatccactaccactggtcacctgatttacaagcttggaggcattgacaagcgtgttattgagaggttgagaaggaagctgctgagatgaacagaggtctttcaagtatgcctgggtgctggacaaattaaggctgagcgtgaaagag

SEQ ID NO: 29046 - DNA, 254 bp, Glycine max
  unsure (1)..(254): unsure at all n locations; Clone ID: 701060879H1
atcctcttgatttgaaggttgttttgtgcttatagataaaagttctgccaaattcaagaggggttttcagatcatannnnnnnnnnnnnnnnnntaaacaatggctaagttctttgctgctatgatctngcactcattgccatttccatgcttcaacagtggttatggctgcaatgagcaaggaggccacttgtatgacaacaagagcaaatatggaagtgggagtgtcaagagataccaatgcccatcacaag

SEQ ID NO: 29047 - DNA, 258 bp, Glycine max
  unsure (1)..(258): unsure at all n locations; Clone ID: 701060880H1
aatgggcattgttgtctgagtgtcgagactcgagagttttcaaatcgtaaaacctaaataaatacatcactgccttcagaaaacgactgcgcctagcttctagccaccctttaatcttcgtacaacgttattttccacctcgtacgagggantcaatggagggaaagggactgatgcagacaacacacagtcttactgggaaggctacaaagcgttttggtcagagaggttttcctttttgagcaactattcgaggtt

SEQ ID NO: 29048 - DNA, 266 bp, Glycine max
  unsure (1)..(266): unsure at all n locations; Clone ID: 701060881H1
tatgatatagtccttcctacatatagtggttttaaatatgtcacataatgatttctcctagaaagttacaattatcaaagagttttaaaactgaattgttagtttctagtgacttatccaattttccagtgggaaaatgtcatcgagaaagttttgggtattttagtttatagtttagtgcngatcacagattccaaaacaatacagtttcttttattcatggtaattaacttggtagaagtgaagttctaatttccaaaatgaac

SEQ ID NO: 29049 - DNA, 266 bp, Glycine max
  Clone ID: 701060882H1
gtgaatgactctggttatcatcagctcgtgagccattggttaaatactcatgcagtgatggaaccatttgccatagcaaccaataggcatctcagtgtgctccaccctatttataaattctttatcctccactaccgcgacaccataaatatcaatggacttgtaggcagtccctgattaatgcagatggcatatagagaaatcattttgcccggaaagtactccattgagatgtcttcatccgtctacaagaattgggttttcat

SEQ ID NO: 29050 - DNA, 260 bp, Glycine max
  unsure (1)..(260): unsure at all n locations; Clone ID: 701060884H1
tttctaaacaccaatgatgatgctattcgcaatctatttagccccaggataatcaaagagtttcatattaccagtttgtttatctactttgctactatttactgtcttgggataatcacttatggcattgctattccatccgggctcttcattcctgtcaacttgctggtgctgcctangccgtctctcggccggctcttcgaaagattaccgaactcgacagaggactctttgccttacttggagctgcttccttcctt

SEQ ID NO: 29051 - DNA, 261 bp, Glycine max
  Clone ID: 701060885H1
agggaatcttgcttcttatattcagaatcatgggagagttcagcaacaaatagccagaaaattcatgcagcagcttgggtctggtctaaaagtattacactcgcatgaccattattcacagagacttgaaaccagagaacattttgctatcaagccacgggttgaagcagtgctaaagtagctgattttggtctctcaaggactgtatgtccctggtgaatatgctgagacagtttgcggttctccatatatatggctcca

SEQ ID NO: 29052 - DNA, 244 bp, Glycine max
  unsure (1)..(244): unsure at all n locations; Clone ID: 701060886H1
cagaatcgcgtttgggagaagaagagcaaaatcgctgtgaaaatgagcggaacggtgaagaaagttagcgatgtagcattcaaggtgggaaggancatcgattgggatggaatggcgaacttctggttccgatgaggctcgcagggagtttcatctccgncgcnttncnngggtaatccaatccaaaccaanttagccaggaaccctgancntatttntnggnnnnntataagggntttggccc

SEQ ID NO: 29053 - DNA, 256 bp, Glycine max
  unsure (1)..(256): unsure at all n locations; Clone ID: 701060887H1
ctaataatgaattgaagccacctcagagatctgagcttgcaagtgatgagtttggacagcggcagaataaaccccgaagatattcagagatgaattttggtcagtgaatagggtgcagcttgtttgaaatttgaaataagcagatgaaggcctttcctggccctttgttctctacttttgatctggagcactttgggctacaataagttttcagatttttntagttatataatgcctgctcttgctgttcaccata

SEQ ID NO: 29054 - DNA, 260 bp, Glycine max
  unsure (1)..(260): unsure at all n locations; Clone ID: 701060888H1
gcaagaaatggcacttcgttgcttggtgatgtccctttctgttctcttcactcttggtcttgcgagagaaagccatgccagagacgaagatttttggcatgctgtttggccaaacactcccattccaagttcattgcgagatcttctaaagcctggcctgcaagtgttgaaatcgatntcaccctatgcaaattgaagaaacacagtacccgaaaaccttcttctataaagaagaccttcatccaggcaaaacaatgaaa

SEQ ID NO: 29055 - DNA, 254 bp, Glycine max
  unsure (1)..(254): unsure at all n locations; Clone ID: 701060889H1
cgatcctcngtcctcnncgaagctttcatcgttcnaacatattctccaccatcttcagtcatggggcctgctatcttgttttaggtctaccgtcctgagaaaatgttccaaaggaagctctggcatgtcaagattcctgtatacgaacaattttcaagaacttgatttcgtctggggcaatgaatcgtattatgggtatttaacaggagatcatacacttcactttatatgggaactggaatgtgggtgggata

SEQ ID NO: 29056 - DNA, 247 bp, Glycine max
  Clone ID: 701060890H1
tcatgggcaaggtcaagatcggaatcaacggatttggaagaattggccgtttggtggccagggtggctctgcagagagacgatgttgaactcgttgccgttaacgatcctttcattaccaccgatacatgacatacatgtttaaatacgaatgttcacgggcactggagcatcacgatgtcaccgttaaggatgagaagacccttctcttcggtgacaagccagttcatgtttttggacacaggaac

SEQ ID NO: 29057 - DNA, 248 bp, Glycine max
  unsure (1)..(248): unsure at all n locations; Clone ID: 701060891H1
tgttgtgagctataagctagtttatcgtgaggagaatatgaagttgtttgtnttctttgttgctgcagtagttttggtagcatggccatgccatggcgcaggctaccaaaggttccctctccgaatgaaaactggctatggtgagcgttctcgaggtaaaatgcgcagtttaggcttgctgtggaagcacacaacatccgagcctttaaaaccattcctgaagagtgcgttgaaccaacaaaggacta

SEQ ID NO: 29058 - DNA, 254 bp, Glycine max
  Clone ID: 701060892H1
atcacttcccttctccaacatgccaaacgacagcgttctgagtcttttcttcttcgttaccctcttcacatgccttctctctgctaattcccacgatgaccatattttcctaccgagtcaactccatgacgatgactcagtgagttgcactgctaccgacccaaaccttaatacaagccggtgatcggaatcctgaccaccccgggcgacggtgcctctggccggctcagcaacgccaccggggtttcttacac

SEQ ID NO: 29059 - DNA, 259 bp, Glycine max
  unsure (1)..(259): unsure at all n locations; Clone ID: 701060893H1
ggtggttcagccttaccttaccctcgcagagacagaaccggaagaggaaaaactagaaaagatcccaacagtgagaagccgagcgattttgtttaccttccaagagatgaagcatttggtccacttgaagtcatcagattttctcgcttatggaatcanatctgtatcccaagagtcttgcctgtcttgactgatgcattcgatgggaaatattttgagccttgagtttgataaatttngcngaagtgcanaaactcta

SEQ ID NO: 29060 - DNA, 256 bp, Glycine max
  unsure (1)..(256): unsure at all n locations; Clone ID: 701060894H1
aagaaaccctagcaagtggagcaatggcagacgttgaagtcgatgtggcggcagagcagcagcagggtgccgaagaagagaacgttcaagaagttcagttttcgaggcgtggatctcgatgcacttctcgacatgtccaccgatgaactcgtcaagatgttcagtgcccgcgtcgtagaaggttccagagaggcctcaccagaaagcccanggccttgatcaagaagctccgtaaagccgaaangggannctccac

SEQ ID NO: 29061 - DNA, 258 bp, Glycine max
  unsure (1)..(258): unsure at all n locations; Clone ID: 701060895H1
agccgccgaccttgatgtcttggaccatcccattctgaattttatatattacctgtttgtgcgaaatattgccttctactttggtccttttcattttgaggaagcttcctcccaagcgtggtatcacacaatatcacccaatacgctgaaaagactagcatatggagaaaatttagtcncgatttcgttggtggttctctgtttctttgatgtttctcacaccaccctaaaaggataatttctagaggacagagaagt

SEQ ID NO: 29062 - DNA, 250 bp, Glycine max
  unsure (1)..(250): unsure at all n locations; Clone ID: 701060896H1
taaaaatggggcacaccaaacccaacccaacccgacgatgggccctgacccactttcgcnggcaatgggaaagcccggagaacaccaccctctgccctcctactccgccgccgaggatcagcggcggaatgcggcgccttccgccgggatggccgtcggactccgatgctgtcgtcatgcttttctcggtcgcggtttcctctccccatcttctggctaccacctttcgctcacttcgcagatcccaaga

SEQ ID NO: 29063 - DNA, 255 bp, Glycine max
  unsure (1)..(255): unsure at all n locations; Clone ID: 701060901H1
gagtttgttgtgagctataagctagtttatcgtgaggagaatatgaagttgtttgttttctttgttgctgcagtagttttggtagcatggccatgccatggcgcaggctaccaaaggttccctctccgaatgaaaactggctatggtgagcgttcttcggaggtaaaatgcgcaagttttaggcttgctgtggaagcacacaacatccgagccttaaaaccattccngaagagtgcgttgaaccaacaaaggact

SEQ ID NO: 29064 - DNA, 216 bp, Glycine max
  Clone ID: 701060902H1
tcgtacctgttgcctcacttgcactctgggtgggcggttgatcaagcaatcctggcagaagaggagcgtctggtcgtgatccgtttcgggcacgactgggacgaaacctgcatgcagatggacgaggtgttggcgtcggtggcggagacgataaagaactttgcggtgatatacctggttgacataacggaggtgccggatttcaacaccatgtac

SEQ ID NO: 29065 - DNA, 223 bp, Glycine max
  Clone ID: 701060903H1
attacttaaataccaccctctttccactcaccccttcaatcccactccactctagcacacaaaacttgctatagcagtaagctataactcatttgaggctctgtgagaattgagaaatggctaaagatgttgaggttcaagagcaaggaggagagtactctgccaaagactaccatgaccctcctccagcacctttgttcgacccagaggagctcacacagtg

SEQ ID NO: 29066 - DNA, 252 bp, Glycine max
  unsure (1)..(252): unsure at all n locations; Clone ID: 701060905H1
caaaatgataactattaattctgacatctttgcngcgagtncctctcacaaacttagcagctaccatgncagtncatacgatccaggagtgtcacgttgtgggttgtattcaaccangtctccaccaacnntgtgacactcctgatcgtatgactgccatggtagctgctaagtttgtgagagaactcgtttgaaangttgtnaaattgntanctntcaattctgnntcgtgtgtgtgncatttagtttact

SEQ ID NO: 29067 - DNA, 246 bp, Glycine max
  unsure (1)..(246): unsure at all n locations; Clone ID: 701060907H1
ctaaatgtcttagtcttaagaggggggaaaaactggaattccaatgattcttaatttcttacaatccaatctgcaaactgagtgagatatataacttgtttttgatttcttcctcatcattttgcatacacaaagattaaaatggaagggttttttggaaattgcttcaatatgattttnctgatgttgtgcttcaccaacttgagcatagcttttgctcaaagtctatgaatggatttggagagc

SEQ ID NO: 29068 - DNA, 250 bp, Glycine max
  unsure (1)..(250): unsure at all n locations; Clone ID: 701060908H1
tagcatagagtgagaagtgagaagagaaaaatggcaatctccatacccagtagacaacttttcatagatggagagtggaaagtccctcttctcaacaatcggtttccgatcatcaaccccgctactgaagacatcatagggcatattccagccgctactaaggaagatgttgaccttgcggtggatgctgctaaaagagccttttcccataacaanggcaaagattggtcttcagctcccngggctctgt

SEQ ID NO: 29069 - DNA, 247 bp, Glycine max
  unsure (1)..(247): unsure at all n locations; Clone ID: 701060909H1
gaactcatcacttactggaagcnttgttgtgagtaagagaaaaggcttcctgcaccgagcacaccaacttgatacctctgattctttctttgcttagaattccacagaatatngaaactnannctantcaatnantnnccacctttggaattcaagggtnngagcaaggaggaggaagactcattgctagggcaagtggaaatatggaggaanntganatgnttcacggactccgcggccttgaaag

SEQ ID NO: 29070 - DNA, 242 bp, Glycine max
  Clone ID: 701060910H1
tcttcccttccaagacccttttgaagcaaccgatggaatttcagtttcttcccagattctaccttcttgtttccttatccattctgttccttgcaccctttcacgctcaagctaaaattaaagtgacttactgcgataagaaggcagactatgctgtgaaggtgtctggagttgaaatatcaccaaaccctgtggtgagtggccaggcggctacctttaagatctcagcaacttctggtaaa

SEQ ID NO: 29071 - DNA, 243 bp, Glycine max
  Clone ID: 701060911H1
ttcatcctttgcttcccaaagaaagagaaaataaaaagcaatgggtagccttgaagcggaaagaacaacagtaggattggcagcaagagacccttcagggattctctccccatacacctacaatctaagaaacacaggccctgatgatgtttacataaaagttcactactgtggaatttgccattctgatctccaccagattaaaaatgatcttggcatgtccaactatcccatggtcccagg

SEQ ID NO: 29072 - DNA, 241 bp, Glycine max
  Clone ID: 701060912H1
ctgctgcctcactctctcactctctcaggagtatataatctgagcgatgtcagatctcgaggctcccttgcgccctaagaggaagaaggtttgggtggactattttgttcagtttcgatggatccttgttatttttgtggtccttcccatctccttcaccatttatttccttacataccttggggatgtaagatccgagtggaagtcctataagacgcgtcagaaggaacatgatgagaat

SEQ ID NO: 29073 - DNA, 231 bp, Glycine max
  unsure (1)..(231): unsure at all n locations; Clone ID: 701060913H1
cagccagacataactgctcctggtgtgaacgtaattgcagcttttacacaaggagcaggtccgtctaatattgcatcagatagacgtcggtctcctttcaatgtgcaacagggaacttctatgtcttgccctcatgtcgctggcattgcaggtcttctcaaagcatatcatcctactnggagtccagcagctatcaaatcagctattatgaccacagctacaacactagac

SEQ ID NO: 29074 - DNA, 245 bp, Glycine max
  unsure (1)..(245): unsure at all n locations; Clone ID: 701060915H1
ctctcttcgcttattgttgcaccttcctcgtaaaagataactcccggtccggcgncgcatagccgccgattgaggcaaaaaaaaaacacaaaacacactntagctcatcacagccaaacgcggcgtcaacgatgacgagcttctgaaattccaacttngcccttctnctctgngtatatcctttttaattnattnatnatgatccctataatttttgnggngagtttancnccagnctnagnccc

SEQ ID NO: 29075 - DNA, 252 bp, Glycine max
  Clone ID: 701060918H1
aaaaatcgtgagcgaagatgatgcacatgaccttttactggagcaggaaggtgaatctcctaatagattcatggaagaccaacgattggacggagtatctcatcactctgctcgcatgcctcgtcgttgccgccttctaccagttcctagagaatcgccgcatccgcctcaagctcatcggcgccggaaatcccttcccggcagagatcgaggccccgcttctgcgacggaagcttgccggaaaccgcgccc

SEQ ID NO: 29076 - DNA, 249 bp, Glycine max
  unsure (1)..(249): unsure at all n locations; Clone ID: 701060919H1
ttcttgtcagtggtaaccatgacagttggttccttcttcataaggacctccagggttctcaacttcntcnaactttctgcttctctgcactgctcagtggtggtggtgnantngcatactcanantcacaatcaggagntgaacgtcctagtattgaancnaatgagcctgccaaanagaaagtggnggntcttggaacaggtgggctnctaccagtttcctnaaggatctggatgcttcatgatntgt

SEQ ID NO: 29077 - DNA, 246 bp, Glycine max
  unsure (1)..(246): unsure at all n locations; Clone ID: 701060920H1
ttcttcagcgactgcntttttggatcggaacctcttctgcggcgtanaatgggacactccaacgtttggaactctcacccaaaaaactacggtcctggttctcgcacttgccgtgtgtgtgggaatccacatggactgatcaggaagtatggccttatgtgctgcaggcagtgcttccgtagcaatgccaaggaaattggcttcatcaagtatcgctaaaagagcagttgtcaactacggaccaat

SEQ ID NO: 29078 - DNA, 248 bp, Glycine max
  unsure (1)..(248): unsure at all n locations; Clone ID: 701060921H1
ctttgtcgcaaagagaagagatctgcctcctttttccttcccaaatcaaatctatctcttcttcaagttgttcagccggctgtttgccaagaaagagatgcgtatactaatggtgggtctcgatgctgcgggtaagaccaccattctgtacatnctcaagcttggagagattgtcaccaccattcccaccattgggtttaatgtggaaactgtggaatacaagaacatcagcttcactgtctgggatg

SEQ ID NO: 29079 - DNA, 251 bp, Glycine max
  unsure (1)..(251): unsure at all n locations; Clone ID: 701060922H1
cnncaananggcttctagttcagaatctcaatctcagtctaaaccgctccaagaccgagttgcaatcgtcaccggctngtcccgcggaatcggccgagaaatcgcgcttcacctcgcctcactcggcgcgcgactcgtcgtcaactacacctccaactcggcccaagccgactcagtcgcggcgcagatcaacgccggttccgccaccacgncacngnngcgccgtcgtggtccaagccgacgtgtccgat

SEQ ID NO: 29080 - DNA, 246 bp, Glycine max
  Clone ID: 701060923H1
cttgtttatgttggggttctctctccactacccgtcttcggacacatgattttcaaattgcatacaaatttaccctaacgctccatcttattcatccatttgctttcaattcacacttaaacagatgagtgttgttaccgattctcccgtgcattcgtccagcagtgatgactttattgcatttcttgatgctgaactcgatgcaagttcaccggactcgtccccggataaagaagttgtaaaaca

SEQ ID NO: 29081 - DNA, 247 bp, Glycine max
  unsure (1)..(247): unsure at all n locations; Clone ID: 701060924H1
gaagattccacaacagtgggagggngatccaaaaagagagagtggaaaanatggcgcggttgatcacagtggtgtggtgcgcggtggcggtgctattatgcgccgcggccggtgcgtcgtgggtggaggaggcggcgaacccgatacgaatggtgtctggcgtggaggcggangtggttcgggtgatcggggagtgccggcgtgcnttgaagtntccnaggttctnaacnagtttctggaaaaattt

SEQ ID NO: 29082 - DNA, 176 bp, Glycine max
  Clone ID: 701060926H1
aacacggagtgatggctgtgcagctgtgggaaaccctgaaggaagccatcgtagcctacactggcttctctccttccaccttcttcacggtgctggcgcttctttttgccgtttactacgtcgtcacgggtctctttggctcctccgacgatcaccatcaccgccaccgccacgtc

SEQ ID NO: 29083 - DNA, 187 bp, Glycine max
  Clone ID: 701060927H1
tagtgcctccttgccagaagttaaaatggcccaagaaactttcctattcacatctgaatcagtgaacgaggggcaccctgacaagctctgtgaccagatctccgatgctgtgctcgatgcatgcttggagcaggaccctgacagcaaggttgcctgtgaaacctgcaccaagaccaacatggtgatg

SEQ ID NO: 29084 - DNA, 241 bp, Glycine max
  Clone ID: 701060928H1
cgagggattgcgctgcgtctcttcctcttctctttcgattcatccctcattcataatcttccaatccaacaacctcagcctcacactcacacatacacacatctgaacgcgtatcgtccctcccatggcttcaaagcgcatcctcaaggagctcaaggacttgcagaaagacccaccaacttcttgcagcgctggtccagtagctgaggacatgttccattggcaagcaacgattatgggt

SEQ ID NO: 29085 - DNA, 234 bp, Glycine max
  unsure (1)..(234): unsure at all n locations; Clone ID: 701060930H1
ctggaaaggnagcttccagccccaatcgcacccttgaccttgcatctgctcacagacattggttccagtggaaaccgagcttcaaatnaatgtgctggaaattccagctatatgagatctgtgatgacaatagcttttgaatttgcatttgaaagccatatgcaagancatgtagcatctatggcacgncaatatgttcggagcattatatcctnggnccaaaggggnnnttnc

SEQ ID NO: 29086 - DNA, 242 bp, Glycine max
  unsure (1)..(242): unsure at all n locations; Clone ID: 701060931H1
tccgaagcatgatgcattgtgcgagcattgtctcggctccgtcctacgcgttcccttttgctctctggctccgcttccactactccaactgcgatctcgctcactaagcgcagttggaagccacctccgagcatggcaaaaggcccagtcagagccaccgtttctatagagaaaganaccccggaggccaatngtcccgaaacgtttctnagaggatggacgaggcccantcttccanttng

SEQ ID NO: 29087 - DNA, 245 bp, Glycine max
  unsure (1)..(245): unsure at all n locations; Clone ID: 701060932H1
cttantcaaatcctctctcatctcttccttttcgctggcaattaactcacgagggctgcacatcgacaatgggtggggagcggaacaaggtcttctctttggccgaggtctctcagcacaacaatgccaaagactgttggcttgtcattcatggcaaggtttataatgtgacaaagttcttggaggaccaccctggaggggatgaggccctgttgtcttccacagggaaagatgcaaccaatgnt

SEQ ID NO: 29088 - DNA, 254 bp, Glycine max
  unsure (1)..(254): unsure at all n locations; Clone ID: 701060933H1
cgcacgtgccgctgccggatgagaaggagattgagnggaggcngctggagaagaagaagaaggatctgttgagtaggtacgcgagttnaggggcttgtggaggagcagattgaggctaaggacatgctcaacattcagcgttaggttggtgggtgggttggtttgttcttgccaaggtttttgaaatgcagtcacaaggtttttgaaatacagtcacaattgcagtcacaatttgtattcttctttatctaang

SEQ ID NO: 29089 - DNA, 248 bp, Glycine max
  Clone ID: 701060934H1
ttctctccgcttcttatctccagattgctggggcgaaagcacaaccgttgactagtctcaagcttaactctccgatccttcaggagtctattgctaaagagatcaatgaaaatcctgaggcaggatgggaggctgctataaatcctcatttctccaattatacagttgaacaatttaagcgccttcttggagtcaaaccaacgcctaagaaggaactgagaagtacacctgctatatctcacccaaag

SEQ ID NO: 29090 - DNA, 248 bp, Glycine max
  Clone ID: 701060935H1
caaatcaaagccatggccacctccaacttctctattgttctctccgtctccctagccttctttttggtgctacttaccaaggcacactcgaccgataccgtttctttcaccttcaacaagttcaacccagtccaaccaaacattatgctccaaaaagatgctagtatttcatcctctggggtgttacaactcaccaaagttggcagcaacggcgtgcccacctcgggatctctcggtcgtgcccttta

SEQ ID NO: 29091 - DNA, 247 bp, Glycine max
  unsure (1)..(247): unsure at all n locations; Clone ID: 701060936H1
cttctttctcttccaattccaaatcacaacccttcnttttccctanctagaatcttcttctccattcaattcctactnccttttttcnnnnnnnnnnnnnnnnnnnnnnnnnnnnnatggcttccgatctcgaagcaaaagccaaagaggccttcgtcgaagaccacttcgaactcgccgtggaccttctctctcaggccattcatctcgaacccaacaaagccgaattctacgccgaccgcgccca

SEQ ID NO: 29092 - DNA, 215 bp, Glycine max
  Clone ID: 701060937H1
caccatgtcacttgctgggaaaatcaccactgaaatcggggttcatgcaaccgctacaaagtggttcaacctcttcgcaacacaactccatcatgttcaaaacctaactgatagagtgcatggaaccaagctgcatcaaggtgaagactggcatcacaacgagacagtcaagcactggacttataccatagatggtaaggttacaacatgtctgg

SEQ ID NO: 29093 - DNA, 246 bp, Glycine max
  unsure (1)..(246): unsure at all n locations; Clone ID: 701060938H1
cagtgatgcccttttgcttgatccgtcatttgtcaagatancattaagagggtacatatgcttggtggtgatttgatacacaagaagaatgtngggtcgggctgcattttcccgaactgggagtttcaggcctgagantttaggccagaatgccatggccatgattgggaacgcttgcttctcattttttgttattggggttttggttttcaccattatggctgccacttatgaacctgaggatcc

SEQ ID NO: 29094 - DNA, 235 bp, Glycine max
  unsure (1)..(235): unsure at all n locations; Clone ID: 701060939H1
tgttgctgtgggagtcatcaagaacgtggagaagaaggatcctactggagcnnnggtcaccaaggctgcccagaagaagaagtgaatcgtgcggtttggttcatcaggggatgtcgtttcttatggttacaataaatgttggtttcttgcccttgtgtcttcgtttctaggtagcttgtttttcggacatagtttgaagtctccaccatcatctcgcaacttttgttcccagaat

SEQ ID NO: 29095 - DNA, 245 bp, Glycine max
  unsure (1)..(245): unsure at all n locations; Clone ID: 701060940H1
cggtctctcaccgcacgcactagcactgtctcactcnctcacgcacgcatcatctcaaacttgttcgcactttttcacggatctgatctaactaagttctcgccatgaatcgccaccacgatcccaatcctttcgaggaagaagaagtcaatcctttttcgaatggtggtgctgctcctgcatccaaatcacgtattccaccattagcatctcagccactgggctttggtcaaaggcangatgct

SEQ ID NO: 29096 - DNA, 242 bp, Glycine max
  unsure (1)..(242): unsure at all n locations; Clone ID: 701060941H1
ttgcgactaagagttgctgcttcttccgccactcagcacttcgctccctctgtgcttcaccaaccatggccgaaatcgaagctaccgttccagatccctctcaaatcgacgtcanacttttcaaccgctggagcttcgacgacgttgaggttactgatatgtctctggctgattacattggagtgtccccgtcaaagcatgctacatatgttcctcanactgctggtaggtactcagngaag

SEQ ID NO: 29097 - DNA, 239 bp, Glycine max
  unsure (1)..(239): unsure at all n locations; Clone ID: 701060944H1
tctgagangagntcctccttcttcctcttccatcaaattcaaattnaggaagatgntacgccgcgttcgccaatgagantcgcgagtangtgatcgttggcggcggaaatgccgcgggatatgctgcgcgcactttcgttgagcatggaatggctgatggtcgtctctgtattgtaacnaaanagccgtangnancttacgagcgtcccgctctgacgaaagcgtatttgttcccgncg

SEQ ID NO: 29098 - DNA, 239 bp, Glycine max
  unsure (1)..(239): unsure at all n locations; Clone ID: 701060945H1
agccatggccagaatcgcacttggaagcncccgagangccactcagccagactgcnttcaggccctcatcgttgaattcatagncaccttcctctttgtctttgttggcgttgcttcttccatggtcgttgacaagcttggtggggatgcactagtgggattgtttgctgtggccgnggcacangcacttgtggtggctgtaatgatctccgccgcccanatttctggtgggccacctg

SEQ ID NO: 29099 - DNA, 239 bp, Glycine max
  unsure (1)..(239): unsure at all n locations; Clone ID: 701060946H1
ctcttcttcatttcaatancacatatccattcacaacaancanccgacnnaaccaaaaaaganaaaagaaataacttttccgattcaaatatcggaaaccctgagaatctccctcgcaaggctactgtacaatccatcattctgcaattaaaaggnatagtggcagttgtaggattgcggcttttcagcgtangttgtagtaggaagacagtgtnatncatcttgggattgggcncctc

SEQ ID NO: 29100 - DNA, 242 bp, Glycine max
  unsure (1)..(242): unsure at all n locations; Clone ID: 701060947H1
attncnttctatgctatcacacatcatcaacaanaaaaagctcttgatagtactcaagcaagctaaggcattattatggcttatcaagtgttgctaatttgtttggtctccaccatagtgtttgcatacatactatggagaaaacaangcangaaaaaccttncaccaagtcnaanggngcttngcnngantnggngacntcaanctnggtgtccngattcncaannaagnttnttcnnggg

SEQ ID NO: 29101 - DNA, 240 bp, Glycine max
  unsure (1)..(240): unsure at all n locations; Clone ID: 701060948H1
tggaatgctgtgggaagttgaggggaagtgggttgttaagggagcagttgatgttgacattggtgcaaacccttctgctgagggtggagaagatgagggagtcgatgacgcanctgttaaggttgttgacattgttganacattcagacttcaggagcaacccgcttttgataagaaacagtttgttaccttcatgaagaggtttatcaagaatttgactcccaagctcgatgcagagac

SEQ ID NO: 29102 - DNA, 250 bp, Glycine max
  Clone ID: 701060949H1
taagctcaatttgtttccaaggttgctctgggaatccgaggttctaaactctgcaactaactttaatggcaactgggcaagtcattaataaacctccttcacttcctccgtaccctgagatgattcgggaggcaattgaagcactgaatgaagagaatggttcgaataaatcatcaatttcgaagtacatcgaatccacctatggtggattgcctcaggcccacaaggttttgctcaatgtgcacctcgc

SEQ ID NO: 29103 - DNA, 248 bp, Glycine max
  unsure (1)..(248): unsure at all n locations; Clone ID: 701060950H1
cttgtccacgtcatcgactgccaaggtttgaccctcaaactggaanactgactgggacaaatgatgggacacttgttaacttctttctaagaaatttaggccgaaagtccgaaaaggcactttgtatttatcttcttgctttccaggctatagcgtgctgtttatgtttcttgctacggtatttccttgctggttggtacaaatgaaagcacgaagggataaaagaaaagatatggatgagaaccacg

SEQ ID NO: 29104 - DNA, 249 bp, Glycine max
  unsure (1)..(249): unsure at all n locations; Clone ID: 701060951H1
cgnaaggnaaaatggcngttgttcttctacgcggtgttcggcggtttgggagcngttgttgcagtgacggagctgagcaagagcaacaaggaccgaatcancacctcttccgcattcaattccttcnagaacaactacctcatcgtctattccctcatgatggctggagattggctacaaggtccatatgtctactacctttacagtacatatggntatgggaagggagacataggacaactctncatt

SEQ ID NO: 29105 - DNA, 246 bp, Glycine max
  unsure (1)..(246): unsure at all n locations; Clone ID: 701060952H1
aactacatagaaaaataaaancaaacctttcttcctactactcccattcccacatttcgacaacatggacgaggncttcgacatgccgacggcggaggcaatgggcgaggacttcgacttcgccggcgccaccggcgggcgacctcgacggcagcagcagcaaccccatcttgaaggtcggcgaggagaaggagattggaaaagagggtttgaagaagaaactacttaaagaaggtgaaggatggg

SEQ ID NO: 29106 - DNA, 244 bp, Glycine max
  unsure (1)..(244): unsure at all n locations; Clone ID: 701060954H1
atcgagataactagaaacagtgtgatgaaaatgaaggtccttgttttcttcgttgctacaantttngtagcatggcaatgccatgcgtacgatatgttccctctccgaatgaacactggctatggtgcccgtactccggaggtgaaatgcgcaagttggaggcttgctgtggaagcacacaacntctttggctttgagaccattcctgaagagtgcgttgaagcaacaaaggaatacatccatg

SEQ ID NO: 29107 - DNA, 245 bp, Glycine max
  unsure (1)..(245): unsure at all n locations; Clone ID: 701060955H1
cttcttccataaccatgggtatctccaccatcgcttctccttttgnctccatcatcttcgatttggacgacaccttgtacccctccagcaccggaattgacaagtgcgtcaagaaaaacatccaactctttctcatccagaaatgcggattctcagaatccaaagccttgacccaacgagttgagctcttcaaaacctacggaagcacccttgccggcttaagagcacaaggcctcgatatcact

SEQ ID NO: 29108 - DNA, 241 bp, Glycine max
  unsure (1)..(241): unsure at all n locations; Clone ID: 701060957H1
ggttatcatttctccatttccattttctctctcacttttcaagaatcgtaagctatgggaaagtcttacccaactgtgagtgctgattaccagaaggccgttgagaaggcgaagaagaagctcagaggcttcatcgctgagaagagatgcgctcctctaatgctccgtttggcatggcactctgctggaacctttgacaagggcacgaagaccggtggacccttnggaaccatcaagcacc

SEQ ID NO: 29109 - DNA, 189 bp, Glycine max
  unsure (1)..(189): unsure at all n locations; Clone ID: 701060958H1
caagctagctaggttgaaaatagtttggttttgtagtaagtgaggtgaggtgccaaaatggtgaagataactcttggtacttcgtgactcttttggtgttgctctcttaaggctattggaagtcatcacctatttcggtcgtgtgtgtcagcacntacacgantaaaantnactgacacggtgtgatac

SEQ ID NO: 29110 - DNA, 239 bp, Glycine max
  unsure (1)..(239): unsure at all n locations; Clone ID: 701060959H1
tttctctctctttctccgatctgtnttgcttctggggctacccgctcctgcaatttgcttttgcgattggagtggaaggccattctcgcaacgtttganttcagcagatccagaatttttcagaaaccaggttaaggagaatgaagaatacggaacgaattgccaatttggctttagcaggtttaaccttagcgccgcttgttgtgaaagnagatccgaatttgaatgttattttgnct

SEQ ID NO: 29111 - DNA, 237 bp, Glycine max
  unsure (1)..(237): unsure at all n locations; Clone ID: 701060960H1
tgtatcagaggccattcatgaaggggaaactttacattcacttcactgtggagtttccagattctctaaaccctgatcaagttaaggccttggaggctgttctgccaccaaagccttcttcacaattgacagacatggagctggatgaatgtgaggaaactacactccatgatgtcaacatggaggaggagactaggaggaagcagcaacaagctcaggaggcatatgatgaggntg

SEQ ID NO: 29112 - DNA, 238 bp, Glycine max
  unsure (1)..(238): unsure at all n locations; Clone ID: 701060961H1
atcactgaagagcttccttcaatggcggtttcttctctctctgttactcctctttcgctctcaaattcttccccctctctatcttccaagccaaagtttccatctttgtgttttctctctggcaacaacaccacattgagggtaacatgcccaaaacctctgcactcatccactgttgttcatgttgctacngaagcgttggattcatcccctgatcccttggaccccctcgnganac

SEQ ID NO: 29113 - DNA, 236 bp, Glycine max
  unsure (1)..(236): unsure at all n locations; Clone ID: 701060962H1
cagggtttcgagcagcgacagangcaggagcagagaaaaacgtaggaaanngagcagaagcggagatagatacagggaaacgcggaggcgaacangagtagagagagacatagggatagtgaaaganggagacggaggagtagaagcntttctcctcgcaagcaacgcaggtccggagaaagacgcganttatagagggaaatcagtgaacgangaagggaaatttcctgattttt

SEQ ID NO: 29114 - DNA, 239 bp, Glycine max
  unsure (1)..(239): unsure at all n locations; Clone ID: 701060963H1
caagaatggcacttcgttgcttggtgatgtccctttctgttctcttcactcttggtcttgcgagagaaagccatgccagagacgaagatttttggcatgctgtttggccaaacactcccattccaagttcattgcgagatcttctaaagcctggccctgcaagtgttgaaatcgatgatcaccctatgcaaattgaagaaacacagtacccgaaaaccttcttcnataaagaagacctt

SEQ ID NO: 29115 - DNA, 243 bp, Glycine max
  unsure (1)..(243): unsure at all n locations; Clone ID: 701060964H1
ctgcttacattggcactcctggaaagggtattcttgctgctgatgngtcaacagggacaattggcaagcgtttggccagcatcagtgtagagaatgttgaatccaacaggcgtgctcttagggagctgcttttcaccgctcccggtgctcttaaatatctcagtggtgtcatcctctttgaggaaactctctaccagagnacagctncaggcaanccctttgtggaantcttgaaggagncng

SEQ ID NO: 29116 - DNA, 247 bp, Glycine max
  unsure (1)..(247): unsure at all n locations; Clone ID: 701060965H1
gttagggtttaacttataattgcgtgatcgattccgattcgattgattctcttctctctcacacgaagtagaaacacgaaactcagaatccatggcgacaccagcgacgacgaagcgaaaaccggtgttcgtgaaggtggatcagttaaaacctggcaccaacggccacacactgacggtgaaggtggtcagttncaagccggtgaagacggtgagcacccgcggcggtcgaccgacggtgctagcc

SEQ ID NO: 29117 - DNA, 246 bp, Glycine max
  unsure (1)..(246): unsure at all n locations; Clone ID: 701060966H1
ctttgttgtgagctataagctagtttatcgtgaggagaatatgaagttgtttgttttctttgttgctgcagtagttttngtagcatggccatgccatggcgcaggctaccaaaggttccctctccgaatgaaaactggctatggtgagcgttcttcggaggtaaaatgcgcaagttttaggcttgctgtggaagcacacaacatccgagcctttaaaaccattcctgaagagtgcgttgaaccaac

SEQ ID NO: 29118 - DNA, 187 bp, Glycine max
  unsure (1)..(187): unsure at all n locations; Clone ID: 701060967H1
ctttctctcagttccggtacgacattacataactctcagtttctcncgcttttctggaaacaaatacctgatgtccctgatcccatcctttaccctttaccctttacccaggaatcattccatttcccaccaattaccactctcacactccgagccaacattaaccaaaccttattcccttcctttc

SEQ ID NO: 29119 - DNA, 243 bp, Glycine max
  unsure (1)..(243): unsure at all n locations; Clone ID: 701060969H1
cnaaaaacttggacggtgaaattggaaggttttccgggatcccaaggccgaatcttggttcaatttacgaaaagagaagagagaggaacaacaacacccgttgttgaatcttcaagctgaatcaaatcatatagagagagaaagatcgagacccggataggaaaatagcgtttagagagagaaaggtgaagtgaggttgtttaaagtttgggtcttggtgggtgaaagggaaagatgacggnt

SEQ ID NO: 29120 - DNA, 240 bp, Glycine max
  Clone ID: 701060970H1
ttgctccagtagccggcactaaacaacatggcggacaaggcagtcaccatccgaaccaggaagtttatgacaaacaggcttctctccagaaagcagttcgtcgttgatgtccttcatccagggagggctaatgtttccaaggctgaactgaaggagaagctgggaagaatgtatgacgtgaaagacaccaacactgtatttgtcttcaagttccgaactcattttggtggtggcaagtcc

SEQ ID NO: 29121 - DNA, 241 bp, Glycine max
  Clone ID: 701060971H1
gagaagccaggaggaggaggagtgttatcggcgaaggaggcattcgagaagcttgaaaaggtgggagaagggacatatgggaaggtgtacagagcaagagagaaggccacggggaagatcgtggctctgaagaagactcgtctccacgaggacgaagaaggtgtccctcccaccactctccgtgaggtttccattctgcgaatgctctctcgcgatccccatgtcgttaggttaatggatg

SEQ ID NO: 29122 - DNA, 239 bp, Glycine max
  Clone ID: 701060972H1
ggatcgctaccaggtgactatggctttgacccactaggccttgggaaggacccagcattcctcaaatggtacagagaagctgagctgattcatgggagatgggcaatggctgcagttctaggaatctttgtgggccaggcatggagtggagttccatggtttgaagctggagctgacccaaatgcaattgctcctttctcctttggtactcttctgggaacccagttgattctcatggg

SEQ ID NO: 29123 - DNA, 239 bp, Glycine max
  unsure (1)..(239): unsure at all n locations; Clone ID: 701060973H1
ctactgcttcaatacatctttcaatcaccgagatcttgaattcttcagtttcaagacaataattgaagttcaaggccattagttccaacaagaaggaaaatggggttcactagtacaagtgaaaaagaagagatgttcatggcggatgcagaaagagcaaaggagctcaaagctnttgatgacacaaaacttggtgtcaaaggacttgttgatgcaggaattaccaagatccctcgcat

SEQ ID NO: 29124 - DNA, 236 bp, Glycine max
  unsure (1)..(236): unsure at all n locations; Clone ID: 701060974H1
tcgtcatcacaagcttgaagactcaacaaatttcagtaccaaaatccaaccaagtctctactattatccattattgtctgccacatcttcccttagtactagaaatgaggctgccacaactaaacttgttcttagtgtcatttttntngctctttgttgccagagcaaatggttctctgctcccattcatagatcctcccaccactctcttggctgatctctggtccgatcgcttc

SEQ ID NO: 29125 - DNA, 237 bp, Glycine max
  Clone ID: 701060975H1
ctagtttatcgtgaggagaatatgaagttgtttgttttctttgttgctgcagtagttttggtagcatggccatgccatggcgcaggctaccaaaggttccctctccgaatgaaaactggctatggtgagcgttcttcggaggtaaaatgcgcaagttttaggcttgctgtggaagcacacaacatccgagcctttaaaaccattcctgaagagtgcgttgaaccaacaaaggactac

SEQ ID NO: 29126 - DNA, 235 bp, Glycine max
  Clone ID: 701060976H1
gatttccagcctccaggctgattcgaattggtgggagatggaaaattccgattcggcgcagtgcgttcgagttgccgtcaacattcggcctctgatcacatcggagcttatgctcggatgcacagattgcatctcccttgttcccggtgaaccacaggtgcaaattgggtcgcatgctttcacttatgactatgtttatagctcgggatctccatcgtctacaatatatgatgat

SEQ ID NO: 29127 - DNA, 234 bp, Glycine max
  unsure (1)..(234): unsure at all n locations; Clone ID: 701060977H1
tttcattcaccgactccttttggttgctacagagacagggagacaagacagagtagtacagattactaccaatggctaccaaggtttacattgtgtaagacattcaaactttcctctttttttgtcctactttgatggtttagtcttaattactttactatngtattngtatagttcancgatttataaatcctcgtatcctgggtcggcttaattnnccccaatananngggg

SEQ ID NO: 29128 - DNA, 238 bp, Glycine max
  unsure (1)..(238): unsure at all n locations; Clone ID: 701060978H1
gatctctcgctcgcagcagcgaggacatcaaatcgaaaattcagactctcactcttctcttctcttctacccatcagcttccactcttagtagacaaaattctacatagacagagagaaaactgttgaagatggcaggaagagaagttcgtgaatacaccaacctcagcgaccccaaagataagaaatggggtaagggaaangataggnttgangatgangacttntttcccacggng

SEQ ID NO: 29129 - DNA, 234 bp, Glycine max
  unsure (1)..(234): unsure at all n locations; Clone ID: 701060979H1
ataactagaaacagtgtgatgaaaatgaaggtccttgttttcttcgttgctacaattttggtagcatggcaatgccatgcgtacgatatgttccctctccgaatgaacactggctatggtgcccgtactccggaggtgaaatgcgcaagttggaggcttgctgtggaagcacacnacatctttggctttgagaccattcctgaagagtgcgttgaagcaacaaaggatncatcc

SEQ ID NO: 29130 - DNA, 237 bp, Glycine max
  unsure (1)..(237): unsure at all n locations; Clone ID: 701060980H1
atganagcaataagtccctccttcctctgcttataattctngtnacccttttngctggtagcattgaaagtngcaccagcaaacgtgaagccaagccattatgctgcanccttcaataggagtgtntttcctnctggntttctatttggaataggctctgcagcgtnccanataganggagcagcagcnatncatgngcagnggncccagtattgggacnctatacnaannagnacc

SEQ ID NO: 29131 - DNA, 106 bp, Glycine max
  Clone ID: 701060981H1
gtttatctaaaaatggataataaatatgattcaatgagtaacactgcataagaaatacttcaataactcaatgtaatcaaatttattatccatttctagtttatct

SEQ ID NO: 29132 - DNA, 245 bp, Glycine max
  unsure (1)..(245): unsure at all n locations; Clone ID: 701060982H1
ttatacagctatgacttggacagtacaaaagaagaaaganatgctataagaactcaaaatagaaaggagtatgagaaactccgcagacaatgccgncaactgctaaagcccagcaatgggaactttaagttaaatgaaataggtgaaatcagctatgaaggagatagtgcaagtcttattcaagattatggttctcctagttctgaagatgcaacgagtgccaganaatctctttctagtgagga

SEQ ID NO: 29133 - DNA, 225 bp, Glycine max
  unsure (1)..(225): unsure at all n locations; Clone ID: 701060983H1
gnantangaanntgttnatgctaactcnactacagaacgctgcgctgtttgtagntgngccgaagactggnactacaacanaattatcatttccaacagatgtcanatagnagntgatcaanaatgntatggagcaaganatgtccgagatttnagatcttgggtttgtaaagcttgcgaaagannnggatgntnggnngttgtnttggtctgtaaaggtgggnt

SEQ ID NO: 29134 - DNA, 244 bp, Glycine max
  unsure (1)..(244): unsure at all n locations; Clone ID: 701060985H1
atgggatangatctatgagtattgatgtctacaatgacntgggcaacccggatagcggtgataaatatgcacgccccgttcttggtggttcagncttaccttaccctcgcagaggaagaaccggaagaggaaaaactagannagataccannagtgagaagccgagcgattttgtttaccttccaagagatgaagcatttggtcacttnaagtcatnagattttctcgnttatggaatcaaatt

SEQ ID NO: 29135 - DNA, 241 bp, Glycine max
  unsure (1)..(241): unsure at all n locations; Clone ID: 701060986H1
cagcaatcaaacgccgtttggggggtcgctatccatggttgtctcgagcatatgatccctgtactgagaggtactctaccttgtatttcaatcgtccagaagttcaganggcacttcatgccaatgtaactgggattccttattcatgggcaggatgcaatgatgttattgtggaaaattggggtgattctccgctatctatgcttccaatatatcaagaacttattgaaggtggtatcag

SEQ ID NO: 29136 - DNA, 242 bp, Glycine max
  unsure (1)..(242): unsure at all n locations; Clone ID: 701060987H1
ctttgtgctactcggtacactttttgtaattgatggatgtgttgtacgaggtaggtgtcaagttaacattgtagttattttgagatttagtataacatttaatctttcagttttggagcaagcaaaaagtggaaggataatcataacaacttcaaaattatacaacttatgtcacggatcttatctgcaaattaagatgcatgactatttctgntaggattatagattgtngngttgtaccc

SEQ ID NO: 29137 - DNA, 242 bp, Glycine max
  unsure (1)..(242): unsure at all n locations; Clone ID: 701060988H1
ccgcgagcncgctgcccttttgacttcaggtttcagccttgatgatcccaacacatttgcttcgaggattcacaggatgttgaagttgggtcttagcattgatgaggatgacaatggtggagacgatgttgatatgcccccattggaagaggacggtgctgaggagancaagatggaggaagtggactaaatgccaaaggtctcgtgttaaatgaattgtggttcgtgtctgttaaatggng

SEQ ID NO: 29138 - DNA, 240 bp, Glycine max
  Clone ID: 701060989H1
cacaacaatcgagcttgcaacttcacccaagtctcaaacaaccttttaaacctcatcaaacatgtctctgattccatcattgctaagcaacagaaacatcatggaccccttctccaccaacatctgggcaccctctgactccgacagcgaggtttccgccttcgtgaacgcacgtgtggactggaaggaaaccccggagtcgcacgtgttcaaggcggacttgccggggctgaaagaagg

SEQ ID NO: 29139 - DNA, 237 bp, Glycine max
  Clone ID: 701060990H1
caatctctcaatcgttttctacataatacaaacctctctaatttttgaagcttattatacccaatctcgatatgcagatcttcgtgaaaaccctaactggcaagacgatcaccttggaggtggagtcctctgacaccatcgacaacgtgaaggccaaaatccaagacaaggagggcattcctccggatcaacagcgtttaatcttcgccggaaaacagctcgaagacggcagaaccc

SEQ ID NO: 29140 - DNA, 237 bp, Glycine max
  unsure (1)..(237): unsure at all n locations; Clone ID: 701060991H1
gtttcacttagtagcgatcctttcgaagccctttccttccatcagaaaacacaaatcctgatannaagaagaaattgcacgttctaaagtgttaggnacgtcaacattcagaagcacaaaaatttcctcacccttttcaaatttctgtcacccttttactagaaagcatgcaggcatcaacttttggtgttgaagaagctacttttggggttcaaagtcgtagggggttggtgggtt

SEQ ID NO: 29141 - DNA, 237 bp, Glycine max
  unsure (1)..(237): unsure at all n locations; Clone ID: 701060992H1
tttgttgtgagctataagctagtttatcgtgaggagaatatgaagttgtttgttcttctttgttgctgcagtagttttggtagcatggccatgccatggcgcaggctaccaaaggttccctctccgaatgaaaactggctatggtgagcgttcttcggaggtaaaatgcgcaagttttaggcttgctgtggaagcacacaacatccgagcctttaaaaccatncctggnngngtgcc

SEQ ID NO: 29142 - DNA, 236 bp, Glycine max
  unsure (1)..(236): unsure at all n locations; Clone ID: 701060993H1
aacaattcagatatagccaaagtccaacccatatagtctcattgctttcaattttccaataccttttctgagtaccaaaacagaaggcatatccgcacatacacattccaacgtacaaaatgaggcactttttagtactagtaccactgatctngcttgtntttgctggtttcccatccaaagcaaaagggtctctgctaccattcacaaatcatccaaatnccctctnggnngtt

SEQ ID NO: 29143 - DNA, 237 bp, Glycine max
  unsure (1)..(237): unsure at all n locations; Clone ID: 701060995H1
caagantggcacttcgttgcttggtgatgtccctttctgttctcttcactcttggtcttgcgagagaaagccatgccagagacgaagatttttggcatgctgtttggccaaacactcccattccaagttcattgcgagatcttctaaagcctggccctgcaagtgttgaaatcnatgatcaccctatgcaaattgaagaaacacagtacccgaaaaccttcttctataaagaagccc

SEQ ID NO: 29144 - DNA, 239 bp, Glycine max
  unsure (1)..(239): unsure at all n locations; Clone ID: 701060996H1
acaaaatgctgctgctgtttggctgatgatgcgtccaaggactgatccatccgctcaataattctagatattgccgccagcaactgcttttnttgttagatctcaaagactgagttagaggaagagttactttggttggaaaagcttaacatcatgtgcaaaagaaagagtccaggctcagaattgaggccgccgagcaggcccaatcnccngagttatcancgtncgaaatcatcngg

SEQ ID NO: 29145 - DNA, 273 bp, Glycine max
  unsure (1)..(273): unsure at all n locations; Clone ID: 701061001H1
gaaagcaataagtccctccttcctctgccttataattcttgtgacccttttngctggtagcattgaaagtgcaccagcaaacgtgaagccaagccattatgctgcacccttcaataggagtgtttttccttctggttttctatttggaataggctctgcagcttaccagatagaaggagcagcagctanagatggcagaggaccaagtatatgggacacctatataaacagcaaccagggaagatttgggatcatagtgatggaagtctagca

SEQ ID NO: 29146 - DNA, 268 bp, Glycine max
  unsure (1)..(268): unsure at all n locations; Clone ID: 701061002H1
gcatttattattcacctgagaattgtatgaatcaggatggatgtgattcaccacctgggatgcacaaagaccctggaatgtcatctttggaagcatgccaacatcagacgttacgaagcataggttctcatgtgaancttaggatcaagtcatttagagtgccagagctttttatagaggttccagaaactgcaacaattgggtccttgaagaggacagtgatggatgcagtgactgctgtgcttggaggtgaattgcacattggtgt

SEQ ID NO: 29147 - DNA, 266 bp, Glycine max
  unsure (1)..(266): unsure at all n locations; Clone ID: 701061003H1
aagaacagtgatgttatccaaatggccagctatgctccactttttgttaatgcccaatgataggaggtggaacccagatgcaattgtattcaactcctttcagctctatggaactcctagctattgggtgcaagtatttttctcagagtcgagtggagcaacacttctaagtacatcacttcaagcaccttcctcaaattcacttgttgcatcagcaattacatntcaaaattctgtagataagaaaaattacatacgantaaagg

SEQ ID NO: 29148 - DNA, 164 bp, Glycine max
  Clone ID: 701061004H1
ttgaaaatcgtgagcttatcctttgttgttgtaataagtgtcttctgtcttgtgtgcctttgagaaaaatcttccatgcatgcattgtggattgtaattgctccagtgattgataactgtgtggctgtgtaattcatgtgaataaagtcctaccttcagagttc

SEQ ID NO: 29149 - DNA, 258 bp, Glycine max
  Clone ID: 701061005H1
agggttatcatttctccatttccattttctctctcacttttcaagaatcgtaagctatgggaaagtcttacccaactgtgagtgctgattaccagaaggccgttgagaaggcgaagaagaagctcagaggcttcatcgctgagaagagatgcgctcctctaatgctccgtttggcatggcactctgctggaacctttgacaagggcacgaagaccggtggacccttcggaaccatcaagcaccctgccgaactggctc

SEQ ID NO: 29150 - DNA, 257 bp, Glycine max
  unsure (1)..(257): unsure at all n locations; Clone ID: 701061006H1
cacanataatggcaattggaacacttgcattatgctacaataacattgaggtcttcagaggtgtagttaaaatgaggcgaggtaagancaaatattttganactaatttccttgtgatttgattttnaggcatactaaacataaagtcaaacttggtatatgtcagggaatgtgtctttgaagtcctaggaattgtgaattgctgcaatttgtatttcatgttatttcatgccgantcaatctccataaanttaatt

SEQ ID NO: 29151 - DNA, 254 bp, Glycine max
  Clone ID: 701061007H1
agggtttatatgctgcacgagttggtggtgatcgaaaagaatatacagttgtattagaatcgagaaaagcgttaatctccgatggcttcgtccagggacaaggaaccagcgccgccacatcatcacccacctcttctgagcagcctcgtcgtccgcccctcccatacggatgccgccgcagccgccggtggtggtcgggctgccgatttcgagcccggcgaactccaccgcgatcctcctcccccttattcccg

SEQ ID NO: 29152 - DNA, 254 bp, Glycine max
  unsure (1)..(254): unsure at all n locations; Clone ID: 701061008H1
gnagtgagtcactcttcctggcagaacccagatctgtagacaatatgggaagcactggtttgctacatttgatatgccttgtcattgctttagtaagtgtgtcgcttgtgcaagcagaagatgcgtataagtatttcacatggacggtgacttatgggactctttatcccttggctagtccccagcaggttattcttatcaatggtcagtttcctgggcctagacttgacttggtaactaatgaaaatgtaatt

SEQ ID NO: 29153 - DNA, 85 bp, Glycine max
  unsure (1)..(85): unsure at all n locations; Clone ID: 701061009H1
atctacatgatccaatggatggtcctannagannnttgttcttgncgttgcgaaatgaagcangcaancgagagttgctgnctnc

SEQ ID NO: 29154 - DNA, 249 bp, Glycine max
  unsure (1)..(249): unsure at all n locations; Clone ID: 701061010H1
ttccaactcttctctctctcgccgtctaggtttttctctcaaaatttcgaaaccccgattttctctcaattncgaatctgcgattcatcgtaacctaaattattagatagttatattatctctctgcgtttctttcagcaattttctattttctcctctcatggcttcagattccaaaaaggatttccctgctgatgacaaagctggaacagaagagagtaaaacatccaaagatgagacttcatctaa

SEQ ID NO: 29155 - DNA, 247 bp, Glycine max
  unsure (1)..(247): unsure at all n locations; Clone ID: 701061011H1
cgcgccttgctctaggaaaatcttgggatgaaatgacagttacatggacaagtggatatgacataaatgaagctgtgccttttgttgagtggggaccaaagggaggaaagaaaacacgatctcatgctggaacattgacatttaaccgaaacagcatgtgtggtgaacctgcacgaactgttggttggcgtgaccctggttttatacacacaagtttcttaaaagaactgtggccaattttnggtac

SEQ ID NO: 29156 - DNA, 250 bp, Glycine max
  unsure (1)..(250): unsure at all n locations; Clone ID: 701061012H1
ttcatattagtgttagtaactagcatgatatcatgatccaagcaaccaactgcatccacagcatncaattcccaaaccttgtacttcttcactttttctgtatccagaaacacttgaccttgtcttatatacaacttcactgnttcaaagtaacactaatactaatagtcacacattnnttctcaacaagtttgcttccacttttgtaactacnatggcttctnacagcatcattcaatgcatcccttct

SEQ ID NO: 29157 - DNA, 249 bp, Glycine max
  unsure (1)..(249): unsure at all n locations; Clone ID: 701061013H1
gaaaatttggtgtgaaagagnacggaatactattatcgaaagggaaataaatatttattgagaggaggatgagggtttccgcatagtagcagtgcttagtggcgcagaaaaataaacctaatttaccaaattcagacacagattctcattcctcaagatcttcttcttatttcttgtctcaaattaatcctcaaactttcctctctgtgtctctctaacaatgtgctccatttcctcactccaccaaaa

SEQ ID NO: 29158 - DNA, 248 bp, Glycine max
  Clone ID: 701061014H1
ttttttttgccataaaagatcattttattctaagacttgcattaatcaagtcacatgattacagttacagaactacttttaactcaaccaaaaccactaaaacatgattatctgaagcaactagaagcttagaaagtagatgttcagcccagctattagtacttctttttggcaatgagttgcttgaaccagtatgctgacatcttagggtatctcttgagggttttgaaatcaacatagacaatgcc

SEQ ID NO: 29159 - DNA, 252 bp, Glycine max
  unsure (1)..(252): unsure at all n locations; Clone ID: 701061015H1
cngaatcaaatttctcatcgacgatggcgaataccctacaacgcgccctacgcgccaccatggcccggcggttctccaccgacgcattggccgaaattaaacgaggcgagatcggaatggtttctggaattcctcaagagnaccttcgtaggagggttgtaatttactctcntgntagaantgcatctcaacaggggatctgggaaggttggaaaatggaagatcaacttcttatctacccaaaagtgggaa

SEQ ID NO: 29160 - DNA, 218 bp, Glycine max
  unsure (1)..(218): unsure at all n locations; Clone ID: 701061016H1
aggatgggattgaggctgcaaatctatnaaatatacatataaagcactgtatgtatctgttgcacacctaatcaaaggtatggattgtgaagatggtgctaaaaaggagcttcaaggagtggttgttggtgtaagaaaatcaaagggttttcctcttggtgggagtgggactagtctagcttctatggagttcttgtccatgcctcaggttcaggagg

SEQ ID NO: 29161 - DNA, 275 bp, Glycine max
  unsure (1)..(275): unsure at all n locations; Clone ID: 701061017H1
accccccgncnccgctncgttncacccgacggagtttacgtcatggtcgttttacagancagggatagcagagtttgtggccacttttctgtttctctacatcaccgtcttaaccgttatgggagtcgccggggctaagtctaagtgtagtaccgttgggattcaaggaatcgcttgggccttcggtggcatgatcttcgccctcgtttactgcaccgctggcatctcagggggacacataaacccggcggtgacatttgggctgtttttggcga

SEQ ID NO: 29162 - DNA, 265 bp, Glycine max
  unsure (1)..(265): unsure at all n locations; Clone ID: 701061018H1
caagtgaaagtnagaaaaaataaaaatcaaagagcataatgtcagggatcattcacaagattggggagacccttcatgtgggagggcacaagaaggaggaggagcataagggtgagcaccatgctggagaatacaaaggggagcaccatggtgaacacagtagtgagtacaaaggagagcatcatggtgaacacaaagctggagagtaccatggtgagcacaagccagagcacaaagaggggttcctagacaaatcaaggacaag

SEQ ID NO: 29163 - DNA, 264 bp, Glycine max
  unsure (1)..(264): unsure at all n locations; Clone ID: 701061019H1
tcaatctcctcttctcttccagccatngcctccttncctccgctctctccgccgccgcgatgtcgcctccgccttccctctctgcttatcgctcgttaacgggcagcaccaagccagcatatgtagctcacaactggtctagtttgtctcgaccattcagttcaaggcctgctggaaacgatgtcattggtattgatttgggtacaaccaattcatgtgtttccgttatggaaggaaagaaccccaaagttattgagaattctg

SEQ ID NO: 29164 - DNA, 263 bp, Glycine max
  unsure (1)..(263): unsure at all n locations; Clone ID: 701061020H1
aagcagagaaagagcatgaagctgcatttncagtngcctcactctccctctctctccccaccattttcccctnccgtccaacccaagaatatcccatcaaccacccttcaaccaaccaagctcaaagtcccaacccaagcctcatccntcacacacctttctntntccaccaccactcctcctccttccaaaacctccttcaaatccaccgtctccgccanccccctccacgcccctntctccctcgctccccaccgcccccg

SEQ ID NO: 29165 - DNA, 257 bp, Glycine max
  unsure (1)..(257): unsure at all n locations; Clone ID: 701061022H1
cttcctctccttttcgatggcaaagggttgctccaacaacacttatnaagaggctagaaaacaaagacttgaagaaaacaaaaagaggtttgaggatttgggaatttcgaggatttcaaaaaacttgactgaaatcgcaagttctgcaaagaagaagctgcgtcatgttcctaaacagaaaacaaagaagacaaatgttgaagtggaacctaggcgatcttctcgtgtgcgaaacccagttcgttcataccgtgaag

SEQ ID NO: 29166 - DNA, 254 bp, Glycine max
  Clone ID: 701061023H1
gcatcttccgcgggcgcaatggagcaagagaatcacaaaatcaaagcagtgagtttgcttcgaagcagaatctgtgatcccaaattcatcttcatcagtgaatctccagaaagcaactacagcaagctgaaattcatgatatcgagttcggtaacggaagcatgcaacaattctattcttcttctcggtccccgcggctccggcaagaatgcggttttggagcttgtcattcaagatttgctgcaagagtatcc

SEQ ID NO: 29167 - DNA, 253 bp, Glycine max
  unsure (1)..(253): unsure at all n locations; Clone ID: 701061024H1
tgattagtgctcagaagggtcatggaatgcagttcccaaagggtggttgggaaactgatgaatccatggaacaagctgctttaagggagaccatagaagaagctggagttgttggcagtgttgaaagtaaactgggaaaatggnantacaagagcaaacgccaacccataatgcatganggatacatgttccctttgcttgttaagaaggaattggataactggccagaaatgaacacaagaaaacgaagatg

SEQ ID NO: 29168 - DNA, 251 bp, Glycine max
  unsure (1)..(251): unsure at all n locations; Clone ID: 701061025H1
ccatcgcaaattgtctcccagttatcacattcacaaaaccattgacgaatcctatgcagttatcttcgatgctggtagcacgggaagccgtgtacatgtctatcgttttaaccaacaattagatctccttcgcattggccaagaccttgagttgtttgtcaagactatgccaggtttaagtgcttacgctgagaatccacaagatgctgcagaatctcttattccacttttggaggaagcngaagctgctg

SEQ ID NO: 29169 - DNA, 247 bp, Glycine max
  Clone ID: 701061026H1
acaaactttgacaggtctaattttttgggtaccaagttcactatttatgacagccaacccccacaaggagctgcaattcaaccagataatagatctagtaggagatttcattctaagcaggtatctcctagagttccagcatgtaactatgttgtaagcaccattgcctatgagttgaatgttctccgtgcaagagggccaaggagaatgcactgcaccatgaactccatatctgtctcagctgttc

SEQ ID NO: 29170 - DNA, 255 bp, Glycine max
  unsure (1)..(255): unsure at all n locations; Clone ID: 701061027H1
gncggttnctccttctcaaatattnttncagatncccattttctccgaagcaaagccatgggctaagggtcctggtctctantntgacatcgggcancgaaagctagggntctgctgttnaaggantaccacagtgaccagaagttcaccatnancacctngtcaccgactggagtgggctattanagcatcaggaaccaggaaaagtgaactgtttctggtgatgtccanacccagttggangaacaaaaactt

SEQ ID NO: 29171 - DNA, 246 bp, Glycine max
  unsure (1)..(246): unsure at all n locations; Clone ID: 701061028H1
tgccttcgagcgaaggagttgaagcttatatttggttattggcaaaggcttatgttgttgtaaatgactcgtgctaccatcaactcgttagccattggctaaacactcatgcggttgttgagccattcgtcatagcaacaaataggcatctgagtgtggttcaccctatttacaaacttttgtttcctcactatcgtgacaccatnaatattaattcacttgcccgcaaatccttggtcaatgcag

SEQ ID NO: 29172 - DNA, 248 bp, Glycine max
  Clone ID: 701061029H1
tttggttttctcttcttcgttcgtttcgttgaaaagcgactttttctctctgcaactctcccttttcttccttcgtagatcgaaagggaatcttcttccatggcctccaagcggattctgaaggagcttaaggacctccagaaagaccctccaacctcttgcagcgccggtcctgtagcggaagatatgtttcattggcaagcgactataatgggtccccctgatagcccttatgctgggggtgtttt

SEQ ID NO: 29173 - DNA, 251 bp, Glycine max
  unsure (1)..(251): unsure at all n locations; Clone ID: 701061030H1
cttaaaacgaccaataatggcgtntgctcacgacttggagttggnatcctcttcttcccctctggtgttctcagtacggaggagtgaaccggagctggtggctccggccaagcccactccccgcgaaattaagatcctatctgagatagattctcaggcgggtcttcgtacccaaattccaatcatacagttctaccgtaacgacccatcattggcaggcaaggacccagttcaagccattcgaaacgctc

SEQ ID NO: 29174 - DNA, 250 bp, Glycine max
  unsure (1)..(250): unsure at all n locations; Clone ID: 701061031H1
tgattagtgctcagaagggtcatggaatgcagttcccaaagggtggttgggaaactgatgaatccatggaacaagctgctttaagggagaccatagaagaagctggagttgttggcagtgttgaaagtaaactgggaaaatggtattacaagagcaaacgccaacccataatgcatgagggatacatgttccctttgcttgttaagaaggaattggataactggccagaatgacccnagnaacgaagatg

SEQ ID NO: 29175 - DNA, 271 bp, Glycine max
  unsure (1)..(271): unsure at all n locations; Clone ID: 701061033H1
ctagtttatcgtgaggagaatatgaagttgtttgttttctttgttgctgcagtagttttggtagcatggccatgccatggcgcaggctaccaaaggttccctctccgaatgaaaactggctatggtgagcgttcttcggaggtaaaatgcgcaagttttaggcttgctgtggaagcacacaacatccgagcctttaaaaccattcctgangagtgcgttgaaccaacaaaggactacattaatggcgaacaatttagatcagactctaaaa

SEQ ID NO: 29176 - DNA, 257 bp, Glycine max
  Clone ID: 701061034H1
caccgatagatagagagcgcggcataacctaaacctatctttcttctctctccgtgtgtgcgcttcaacggcaaccagaagcagccatggccactgcaaggactgtgaaggatgtttcacctcatgagttcgttaaggcgtactcctctcacctcaagcgatccggcaagatggagctgccagagtggactgatattgtgaaaactgcaagatttaaggagttggctccttatgatcctgactggtactatgtcaga

SEQ ID NO: 29177 - DNA, 264 bp, Glycine max
  unsure (1)..(264): unsure at all n locations; Clone ID: 701061035H1
gtgaatcagcaccacattcacctgagctttttgtgaggattccaaagcatggcttcccttgcagcatccactgctgctgcttcccttggcatgtcagaaatgcttggaaaccccatcaacctcagtggtgccacaaggccagctccatctgcctctagccctgcctccttcaagactgtggctcttttctccaaaaagaaggctgcacctccanaaaaagctgcagctgctgctcctgccaatgatgagcttgccaagtggtat

SEQ ID NO: 29178 - DNA, 239 bp, Glycine max
  unsure (1)..(239): unsure at all n locations; Clone ID: 701061036H1
gttctccaattccctccaactacaaccacnggggctggttacngcctttactgtgacctcanctttcaagtgatgagagggggtctcagaattttccatttcaggttgggatcagacacccttttgagcaattaagaaaacccagagagcaaaatctcaccttggtaaggttttgtaagtggggttgaacttctggtgctacaatggcttcacacccatgggggtttttggagcataag

SEQ ID NO: 29179 - DNA, 237 bp, Glycine max
  unsure (1)..(237): unsure at all n locations; Clone ID: 701061037H1
tctctcctctgtcctttttctctctacttgctatccttttgnctagtngcactgctgcaagngcaactccaagaagcgcagtgccaagccaccatgtttcaacattcaacagaagcctttttccttccacttttctctttggaattggttcttctgcttaccaggcagaaggagcagcaagtgtagatgggagaggaccaagcatatgggacanctacactagacagcatactgaaa

SEQ ID NO: 29180 - DNA, 256 bp, Glycine max
  unsure (1)..(256): unsure at all n locations; Clone ID: 701061038H1
ttgagnngttntcatcatagtcttaaanattaaaccttagcaaaactcaanaatgctagacatcaaaggctancntcgtactcttnttacntatggttcatatnaaccattntgntacgttccatnttcaaganacnancgcgtntaagantcccaccgggtcctcnaatttnantacncttgctgggncangcgccatatctncgttcantggtccannaagcattgtacagnntatcactgcgctatggagcct

SEQ ID NO: 29181 - DNA, 252 bp, Glycine max
  unsure (1)..(252): unsure at all n locations; Clone ID: 701061039H1
cggaaatttctctgcgtctctcctattttttctgaatctaacattaacaacaagaatggcatccaacaggggtcaaggtggaattcagcagctgttggctgctgaacaagaggcacaacggattgtgaatgctgcgaaaaatgaaaaattggctaggttgaagcaagccaaggaagaggctgaaaaggagattgctcaataccgagctcaactagaggctgagtttcaaaagaaagtgtcagacantactgg

SEQ ID NO: 29182 - DNA, 248 bp, Glycine max
  unsure (1)..(248): unsure at all n locations; Clone ID: 701061040H1
cnaacaaactctttctggattcagtttttgatgtgaaaatggcagtgactcttacatcaacactctttctggctttgcnatttgctgcttcagcttttgctgctcttcagcctagagtacctgaagcttacctccaaaatgggaactttgaggagcagccaaaccctaaatacctgaagaaaacaaagctctttggtaaatacgtttgcctaaatnggagatcaatgggctggtgagtaggtcnnggg

SEQ ID NO: 29183 - DNA, 249 bp, Glycine max
  Clone ID: 701061041H1
tttcccagatctgctccttcctcaccccacagaagtcagttgaagagcatgggtcgtggagttagcagtggtggtggtcaaagttccttgggttatctttttggcagtggagaggcccctgccgcaaaaccggcaacaaacaatgccccagcccaacctgaagtgcaggctgtaaataatgcgcctccttcaaaagcatctcctcctactaaaacaatagaccctaacaaggctgctggtataaacagt

SEQ ID NO: 29184 - DNA, 245 bp, Glycine max
  unsure (1)..(245): unsure at all n locations; Clone ID: 701061042H1
tccttaggaagcacttcangggaaagccatattacattgatcttcttgatttgtttaatgaggttgagtttcagactgcttcaggacagatgatagatctgatcaccacattggaaggagaaaaagacctttctaaatacacattaacactgcatcgacgtatagttcagtacaagactgcatactattcattttaccttccagttgcatgtgcattgcttatggcgggtgaggatctagacaaa

SEQ ID NO: 29185 - DNA, 246 bp, Glycine max
  unsure (1)..(246): unsure at all n locations; Clone ID: 701061043H1
ctgagagaagagagagagagagtcgtgtgccacaattttcccagctttaattggagtgatttctgatattttgtgttagagttcaatccagatcgtgactagagaagccnacanatccttgattttgctactgtttgaattttggggtccatagcaaaatgggggttatgtccaggcaggttgtgccgtctgtggnaacctctgttgcntctgtcctgctctgcgggcaagctccagacaaccggt

SEQ ID NO: 29186 - DNA, 246 bp, Glycine max
  unsure (1)..(246): unsure at all n locations; Clone ID: 701061044H1
ccaagtgaaagtnaganaaaataaaaatcaaagagcataatgtcagggatcattcacaagattggggagacccttcatgtgggagggcacaagaaggaggaggagcataagggtgagcaccatgctggagaatacaaaggggagcaccatggtgaacacagtagtgagtacaaaggagagcatcatggtgaacacaaagctggagagtaccatggtgagcacaagccagagcacaaagaggggttc

SEQ ID NO: 29187 - DNA, 142 bp, Glycine max
  unsure (1)..(142): unsure at all n locations; Clone ID: 701061045H1
gnttttnttgctaagaaacgaaangtcggtgacacttgtatgtggnagaaagtaccancgtactcttnctcnagtttagntaaactcccnaagcgcagntgcgcnactangtttntctggacctcgccgtgnatngcnanca

SEQ ID NO: 29188 - DNA, 247 bp, Glycine max
  unsure (1)..(247): unsure at all n locations; Clone ID: 701061046H1
acatatgaaaatggcctatttccatagtacctgctttctggtttttatgcttatcgcatcactgttggtccccggcagaggcggtgactacggtcccgaagaagaaaaacttctatcaaaaactataggcattcaaggcattgtctattgcaaatctgcctctaaactcaccccacttgaaggggccttgacaaggatagcatgcgaggctgttgangaatatgggtttgaaacgacaccgttttct

SEQ ID NO: 29189 - DNA, 251 bp, Glycine max
  Clone ID: 701061047H1
cttagatagttcaatttccacccctgctcgtcccaaaaggcgcagaaccaaaagcaggaagaataaggaagagattgagaaccagagaatgactcacattgctgtagagcgcaacagaaggaagcaaatgaacgagtatctctctgttcttcgctctctaatgcctgaatcttacgtccaaaggggtgatcaagcatctataattgggggtgctatcaactttgttaaggagctggagcagaggctgcaat

SEQ ID NO: 29190 - DNA, 252 bp, Glycine max
  unsure (1)..(252): unsure at all n locations; Clone ID: 701061048H1
agatattgcaagcnatagacaacaacactgatggtctagtggatttccgggagtttgtagtngctacattacacgtgcatnaattggaggaagactctgacaagtggcagcaactgtcacaggctgcttttgagaaatttgacctagataaagatggctatattactccggaagaacttagaatgcatacatgcttgagaggctccgttgatccttgctagaggaagctgatattgacaaagatggaaaaat

SEQ ID NO: 29191 - DNA, 263 bp, Glycine max
  unsure (1)..(263): unsure at all n locations; Clone ID: 701061050H1
agcaagggtgttgtagtatagttagagatatcactactacaccaccctgcatagtttgttcagctataatactacttgagcttctttacctacttttcaaacctacattgcacacaaaatggcaacctcttggtcatgtcatctacttgcattgcttctttttatgtcaactattgtatcagagagtagagtggcaaggnaggacttgggcctggaccttggtgggttgggggttggacttggactgggtttgggcctgggga

SEQ ID NO: 29192 - DNA, 263 bp, Glycine max
  unsure (1)..(263): unsure at all n locations; Clone ID: 701061051H1
ccaagaccaacgaaccaacctcttcctccgactaccgttctncntcctattttgaccttagtccatgggaaactgcagcagcngggccggagcccccaccacctactccgacgaccatccccaccacaacggcatnaccgtcctccctcccaantcaaacccttcaccccaantccccaagcccccaccgacctcctcctcntcctcctcgctgggccgggttttgggccggcccatggaggatgtccggtccatttacatat

SEQ ID NO: 29193 - DNA, 257 bp, Glycine max
  unsure (1)..(257): unsure at all n locations; Clone ID: 701061052H1
gtggtctgcaactatgagcaaggattatctaatcatactttctctccttctttccacggngcntgcaactncaaagnnnnnnnnnnnnnnnnnnnnncctctatcttgggaagggctctcccatcgcaaattgtctcccagttatcacattcacaaaaccattgacnaancctangcagttatcttcgatgctggtagcacgggaagccgtgtacatgtctatcgttttaaccaacaattagatctccttcgcatgg

SEQ ID NO: 29194 - DNA, 256 bp, Glycine max
  Clone ID: 701061053H1
cttgtgctccccacgatttactttcacctcactcccgaacactaccctaattgccctattctctcttccttcgtcccagcgaccacaaatcactgcaattcaaggtttgaacttcaaatggcgagcgctgtagatgcttcagcaaaccctatcccaacgtcggcggtgttgatggcgtcgtcgaagcacattgggataaggtgccactccgagaatttggagtttctgaagtgcaagaagaaggatcagaaccctg

SEQ ID NO: 29195 - DNA, 253 bp, Glycine max
  Clone ID: 701061054H1
atttaatggagttaaagccaacactatttgctggtgtcccacgggttttcgaaaaagtctatgaagggatcaagaaagcagtggaagaactcaatccagtgaggagaacagtttttggcatgctctacaactacaaacttggttggatgaaaaaaggatacaaacatagacaagcatcacgtttagccgatttattagccttcagaaaggtcaaagctaggcttgggggtcgtgttcgactaataatatctgg

SEQ ID NO: 29196 - DNA, 250 bp, Glycine max
  unsure (1)..(250): unsure at all n locations; Clone ID: 701061055H1
aactagtctaagcagaaatggcctcttcagtgatggcatctgtggccctcaaacctgcccctttcactgttgagaagtcctcagttagaggccttccctccctctcaaggaactcctcttcattcagagttgtggccagtggtggcaagaagatcaagactgncaagccttatggaatnaatggtggcatggctttgagggaaggagttgatgcatctggcaggaaaggaaagggaaagggcgtttacca

SEQ ID NO: 29197 - DNA, 251 bp, Glycine max
  unsure (1)..(251): unsure at all n locations; Clone ID: 701061056H1
ccccaaacgaagaaaaaagactgagagcaattgcatcaacaacaaattgaaaggatgtcgatcttcgagtacaacggaagcgccgtgntggctatggtcggcaagaactgcttcgccattgccagcgaccgaagctcggcgttcagctccaaaccatagccacggatttccaacgcatttccaagattcacgacaagctcttcatcgctctctctngcctcgccaccgatgctcaaacattgtatcagcgt

SEQ ID NO: 29198 - DNA, 249 bp, Glycine max
  unsure (1)..(249): unsure at all n locations; Clone ID: 701061057H1
gcttctctaaattctctgtctacttnaccaagcanttttggttgcagctttggttnatttccaatatggtgtttnctctnntatctntctttgctttactcnntcttgnagtggtggcnacccatgcagaaaccttggccccctgaagtttactggaagtcgaagcttcccaccactcnnatgccgaaagccattacagatatncttcacccagatttggcagaagacaaaagcacctctgtggccgtg

SEQ ID NO: 29199 - DNA, 246 bp, Glycine max
  unsure (1)..(246): unsure at all n locations; Clone ID: 701061058H1
acaagccaagtgaaaganagaagaaaagtcaaagacaatgtcagggatcattcacaagattgaggagacccttcatgtgggaggccacaagaaggaggaggagcacaagggtgagcagcaccatggtggagaatacaaaggggagcatcatggtgaacacagtactgaatacaaaggagagcatcatgttggtgagcacaagccggagcaccatggaggagangagcacaaagaggggttcctaga

SEQ ID NO: 29200 - DNA, 247 bp, Glycine max
  unsure (1)..(247): unsure at all n locations; Clone ID: 701061061H1
ctcgtagtggggttaacgggacaacagaggcagagcaaganagtgttcggagaaaatgaacactgttctttcaccttcttcagcgtttcctacgttgtccaaaacctatgtttcttttggtcccttattttccagtttcgnnnnnnnnnnnnnnnnnnnnnngcacattgaacttccccgcaaaaggggttctcaaaacactggacttcgctgcaactgtagcatctggccaggtggccctggctct

SEQ ID NO: 29201 - DNA, 250 bp, Glycine max
  Clone ID: 701061063H1
tgtttttgaataaaatagattcatttgtcttgatagaagacatcattgatggggaatcgagcacttttcagtctgttattgaaagagccacccttgctgctgctattcttccctgcaaagatgttcctgtggttttcacaatcaagagccatgatattccaagttcaatggaattagctcaatttactgaggcagtatccaaatatcttgaagcagtttctcattttacaaagagaatagttgcattcta

SEQ ID NO: 29202 - DNA, 264 bp, Glycine max
  unsure (1)..(264): unsure at all n locations; Clone ID: 701061066H1
caaaaataaaancaaacctttcttcctactactcccattcccacatttcgacaacatggacgaggacttcgacatgccgacggcggaggcaatgggcgaggacttcgacttcgccggcgccaccggcggcgacctcgacggcagcagcagcaaccccatcttgaaggtcggcgaggagaaggagattggaaaagagggtttgaagaagaaactacttaaagaaggtgaaggatnggacactcctgaagttggtgacgaattcaa

SEQ ID NO: 29203 - DNA, 259 bp, Glycine max
  Clone ID: 701061067H1
tgttgtaagactttgtaattgaggtgctgcaatggcttcaagtcaggaagaggtgactcttttgggagtaattggaagcccatttgcttgcagggtgaagattgcccttaagttgaagggagttgaatacaaatatgtggaagaaaatttggccaacaagagtgatttgcttctcaaatccaacccagttcacaagaaagttccagtttttattcacaatgagaagcccatagcagagtctcttgtgattgttgagtac

SEQ ID NO: 29204 - DNA, 186 bp, Glycine max
  Clone ID: 701061068H1
tgattgaagaagatgccgatcagaaacatcgccatcggaaggcctgaagaggctactcaccccgacacgttgaaggcggggttggctgagttcatctccaccttgatcttcgtgttcgccggttcaggttccggcatcgcctacaacaagctcaccgacaacggcgccgccactcccgccggcctc

SEQ ID NO: 29205 - DNA, 253 bp, Glycine max
  unsure (1)..(253): unsure at all n locations; Clone ID: 701061069H1
tgagctataagctagtttatcgtgaggagaatatgaagttgtttgttttctttgttgctgcagtcagttttggtagcatggccatgccatggcgcaggctaccaaaggttccctctccgaatgaaaactggctatggtncccgttcttcggaggtaaaatgcgcaagttttaggcttgctgtggaagcacacaacatccgagccttaaaaccattcctgaagagtgcgttgaaccancaaaggactacattat

SEQ ID NO: 29206 - DNA, 88 bp, Glycine max
  unsure (1)..(88): unsure at all n locations; Clone ID: 701061070H1
cacacacagctctttccctctttttttnagagagagaaaatgcagagttaaccaccttaaccttaattgcttctccaaaccttaatcc

SEQ ID NO: 29207 - DNA, 251 bp, Glycine max
  unsure (1)..(251): unsure at all n locations; Clone ID: 701061071H1
ctttcctcacttcaaacttgacaaaaatggcaacagaattggcatcntctcccaattgggttccaagcgcagccaacatgtttggcagcctttgccgccctccttctcctcttnnnnnnnnnnnnnnnnnnnnnnnnatacaacctccccccaggcccaaagccctggcccatcataggcaacctaaacttaattgggtcccttccacatcggtcgatccacacgcttagcaaaaaatacgggcccatcat

SEQ ID NO: 29208 - DNA, 222 bp, Glycine max
  unsure (1)..(222): unsure at all n locations; Clone ID: 701061072H1
tttntctcctcaaaaccctaancctaancctcaatnccncagagtgtgcgaagctctgcaatggtgtatgagacncccgatcaagattcaggttgcgatccgaagaccccaacgcgcctctacaagccctacaaggatctcgnagtncccattngcaacctctaccagctccnaantnnccggnncanttcttngtngangaggnnggnngnaattttgntt

SEQ ID NO: 29209 - DNA, 245 bp, Glycine max
  Clone ID: 701061073H1
aacaaccttctttctttttctgtgagcctttctttcaggttcttaacttgatcagtgtgcagtgtccaaatcataagggtagttgcaaattgcaatggctaagcatgatgttgagggtggttccttctctgcaaaggactaccatgatcctcctccagcaccgttgattgatgctgaggaactcacacagtggtccttctacagggctttgattgctgagttcattgccacaatgctcttccttt

SEQ ID NO: 29210 - DNA, 244 bp, Glycine max
  unsure (1)..(244): unsure at all n locations; Clone ID: 701061074H1
cacctttctcctaaaacatctccagtgggttcttcttcttctattacaacaacgtcgtcccaagaccatgaccatggccatggccacgatcctgctcctgttcacggtcttcgcggtttcatcggccctagacatgtcgataatctcgtacgacaacgcccacgccgccacgtcgcgcagnnagtggagctgatgtccatgtacgagcagtggctagtaaagcacggcaaggtgtacaacgcgc

SEQ ID NO: 29211 - DNA, 220 bp, Glycine max
  unsure (1)..(220): unsure at all n locations; Clone ID: 701061075H1
tcagatctggagcaggagaatagcgttggcagcgtttgcntttgctctgctgttccaatcggcctcagcagacgacgtcgttgtgctctctgaagataacttcgagaaggaagttggtcaggacagaggagctctcgttgagttctatgctccttggtgtggacactgcaaaaagcttgctccagaatatgaanagcttggnagcagcttcaagaaagcc

SEQ ID NO: 29212 - DNA, 243 bp, Glycine max
  unsure (1)..(243): unsure at all n locations; Clone ID: 701061076H1
ttcattttgctctttcttcaagccaacctcttcccaactctttgttcctttcttcctctcactctcaccatgattacagtaagcgtaagatggcaaaaggagattttcaaagatgtagaacttgacactacccagtctccttatgtttttaaatgccaattgtatgatttgantggtgtgcctcccgaaagacaaaaaattatggtcaagggtggtcttttgaaggatgatgctgattggtca

SEQ ID NO: 29213 - DNA, 244 bp, Glycine max
  unsure (1)..(244): unsure at all n locations; Clone ID: 701061077H1
ggaaaccaagtaaggtataccatttgaaaatggcttcttgtgtgtcatccatgtcttctaccatnctcatcctaattgccatctgcacactgtcctcacttctgtcagctgcatctgcagcaacagaggagggacgaacaaggcccttcaaaagggtctatgcctttggagactctttcacagacactggcaacaccaaaaatgccgaagtccaagtggctttggtcatgtttcaaactctccc

SEQ ID NO: 29214 - DNA, 245 bp, Glycine max
  Clone ID: 701061078H1
gaatcttcgctctcaagcactctctccctcgctctagggtttccatgagcgtctccgctggatctcaggcttccgttcaccaggctttgttcgccgattacaaggcctgcacttcattcctcttcccgggccagggtgctcaagctgttggaatggggaaagaagctcaaaatgtgcctgctgctgcggttttgttcaacaaggcaaatgacattttggggtttgatcttcttgatatatgcatc

SEQ ID NO: 29215 - DNA, 247 bp, Glycine max
  unsure (1)..(247): unsure at all n locations; Clone ID: 701061079H1
gttccaccagttgtagttcacataaactgtgcaatgggaatgtgaactctgatgagggaagatctcactacctacaaaatgaagtgaagtttagtaaagtcttgaagagcaaatggggaactgatccnctgtttttaggctcatacagttatgttgcagtaggatcaagtggtgatgatttagatataatggcagagccattgccaaaagataacaacagttgtcaagcttcttctgcagcttcatc

SEQ ID NO: 29216 - DNA, 252 bp, Glycine max
  unsure (1)..(252): unsure at all n locations; Clone ID: 701061080H1
caaaactacaaactttatttcctctccgtattctcacatttccacaacatggacganntggtcgacatggcggcggcggagcccatgggcgaggacttcgacttcgccggcagcggcagcaaccccgtcntgaaggtcggcgaggagaagganattgggaaagagggtttgaagaanaagctcctgaaagaaggtgaaggatgggacacccctgaagctggtgacgaattcaagttcatatactgggacgtt

SEQ ID NO: 29217 - DNA, 235 bp, Glycine max
  unsure (1)..(235): unsure at all n locations; Clone ID: 701061081H1
ctgntcgantttataaantaattantaacncnataccantacgcatgtagattccttcnnctggtgtgaatatgcgttacngcacannctcaatctcccngtcttaattgacgtttngtnaatctttnactntnnctgtgtcagntnanatatgnancntnaatttagccagattaacatntctgttacatggaggtgaaagaaattgttgtcgagnggaatataggggccaatg

SEQ ID NO: 29218 - DNA, 229 bp, Glycine max
  unsure (1)..(229): unsure at all n locations; Clone ID: 701061082H1
ctaaaatnacanccantctcttttttcccttnacacggaaccgnganngtgtcgancgacagcnncgaagacgagctcntccagatggcgctgaaggagcaagcgcagncgatgtcaantacggcggcaaatcctnctncaattcccgaaagccggtggcaaactacgtcnagccgctgaagaaacccgctcntncnccgaaacagtcgcagggcaaaggcagagtnac

SEQ ID NO: 29219 - DNA, 257 bp, Glycine max
  unsure (1)..(257): unsure at all n locations; Clone ID: 701061083H1
ccaagactctgacttacctggcccaggagaaaaccctagaatcgagcttcgttcgggacgaggaggagcgtcccaaggttgcctacaacgaattcagcgacgagatcccagtgatttctcttgccggaatcgacgaggtggatggacgcagaagagagatttgtgagaagatcgtggaggcttgcgagaattggggtatattccangttgttgatcacggtgtggatcaacaactcgtggccgagatgacccgtctc

SEQ ID NO: 29220 - DNA, 253 bp, Glycine max
  Clone ID: 701061084H1
tcggaaacaagcttttctttgataagcgccatgggtcgcagctcgatttgctctctgttcatgaaacctcgcaggagccattgcctgagtcgaaggatgatattaactctgcccattcgttgagcgttgaggctgcttatatcaaccagaatttctctcagcaggtgcttattagggatgggaataaggttacttttgatgaggctaacccttttgctaatgaaggtgaggaggttgcttctgtcgcttatag

SEQ ID NO: 29221 - DNA, 254 bp, Glycine max
  Clone ID: 701061085H1
cgatcacccttgaggtggagtcttctgacaccatcgacaacgtgaaggccaagatccaggacaaggaaggcatccctccggaccagcagcgcctcatcttcgccggaaagcagctggaggacggccgcaccctcgccgactacaacatccagaaggagtccaccctccacctcgtcctccgtctccgcggtggcgccaagaagcgcaagaagaagacctacaccaagcccaagaagatcaaacacaagcacaag

SEQ ID NO: 29222 - DNA, 253 bp, Glycine max
  unsure (1)..(253): unsure at all n locations; Clone ID: 701061086H1
ctcaaacacctcaacttcatttctctgctccaaagtctcaatctttnatccaaaaactgcaaatgggcatggccacaatcacaatgggaggaaaccacaattcctccatcactccacgccactacaacacccacaaggtgttccttttctgcaactacattctcttgggtgcagcttctagctgcatcttcctcaccctctctctgcgcctcattccctctctctgcggcttcttcttcatccttcttcaggt

SEQ ID NO: 29223 - DNA, 248 bp, Glycine max
  unsure (1)..(248): unsure at all n locations; Clone ID: 701061087H1
aggaaacgagattgacgaaccctaagctgaaagaagaaaaaatgtctggcgtgaagagagcactgaggcagttcaccttcggaaccggcaagaccgccggtcgcaactcggcggggcgcataacgtccttccaccgcggcggcggagcaagcgcttgcaacgaaccgtcgatcacaaacggaataccgnttcttctctcggcgtcgtcgaaaggatcgagtacgaccctaaccgctcctccaaaatcg

SEQ ID NO: 29224 - DNA, 218 bp, Glycine max
  Clone ID: 701061088H1
ctgaggctatgcaattaaactgaaggaaacaacgatgttctgttttattgctattacatttgcggttgttagggccatgttgatggaacaccgccgaattatgtatctttatcacagtcgtgcttttcggaaaggaaaaggataacttagagtgaaaacttttacagttgatatatgtagtttgggattctgttatgaaatatttgttttcgttgggt

SEQ ID NO: 29225 - DNA, 242 bp, Glycine max
  unsure (1)..(242): unsure at all n locations; Clone ID: 701061089H1
ggagagaaatcgcgatctggaacagagtttagctgaaaganaaagaatcgagttgaaatgggtttctttggtaccattttggggtttttgggatttggggttgggatttcgattggtctcgtggctggctactttctcttcatctacttccaacccaccaatgttgaggatcctgaaatgaagccattggcggagcaagagcaagagactctgcaacgaatgtttcccgagattcctctttg

SEQ ID NO: 29226 - DNA, 244 bp, Glycine max
  unsure (1)..(244): unsure at all n locations; Clone ID: 701061090H1
taanacagcaggacgntggtcatggnantcgaaatccgctaaggagtgtgtaacaacttcacctgccgaatcaactagccccgaaaatggatggcgcnaaagcgcgcgacctatacccggncntcggggcaaggaccaanccccgatgagtaggagggcgnggnggtcgctgcaaaacccatggngngagncgggncggacggtcgtcggtgnagatcttggtngtagtagcaantattcaaat

SEQ ID NO: 29227 - DNA, 245 bp, Glycine max
  unsure (1)..(245): unsure at all n locations; Clone ID: 701061091H1
cgcagcatggggcggagacctggcgaggtgttataggcaaattaagaacaagccataccccaagtcacgtttctgccgtggtgttcctgatcccaagatcaggatttatgatgttggtatgaagaagaagggtgttgatgngtttcctttctgtgtccatctggttagttgggagaaggaaaatgtttcaagtgaggccctggaagctgctcgcattcccttgcaacaagtacatggccanattt

SEQ ID NO: 29228 - DNA, 244 bp, Glycine max
  unsure (1)..(244): unsure at all n locations; Clone ID: 701061092H1
gaagnagccgctccagccgaagaanaagctcagccagcagccgaacaggatgctcccacagatcagggtgctgctcgctnnnnnnnnnnnnnnnnnnnnnnnngtagaccaaggtggttctcctatggacatctaataatttaaaattaagtactagaggtgttgaataccgatatttaaagctgagtaggtttcatgtgtcatgggacaagatatctcttcaatggattttctttccttaaaa

SEQ ID NO: 29229 - DNA, 243 bp, Glycine max
  unsure (1)..(243): unsure at all n locations; Clone ID: 701061093H1
ttgactgcaacctttgccgtcatgcagaatggcagggcggagaaccagcaagaattcgcatccaccatggggntactacttagctatgctctgaacattactagtttgcttaccggtgtgctgaggctggcaagtttggctgagaatagtttaaacgcagttgaacggattggcacttacattgatttgccctcggaggctccctctatcatcgatgataatcgccctcctcctggctggcct

SEQ ID NO: 29230 - DNA, 245 bp, Glycine max
  unsure (1)..(245): unsure at all n locations; Clone ID: 701061095H1
tttatctttggcagttcacttttaacatnattttttcttctaattacattattttattgatggtacattgttggtataaatgtcctgtggtatgtctccttcgctgttgtctatttatagcataaatctatctgggagcagggagcttcagtacccattgctggccttcgatgattacccttccttcctgatgtcatctncatgttattttacctataacaattgaagcatttgcanatctcatc

SEQ ID NO: 29231 - DNA, 279 bp, Glycine max
  unsure (1)..(279): unsure at all n locations; Clone ID: 701061101H1
cttctttcatcgcttcgnatcttcaatctcatctccnatctcaaaatgcccgctgtntatggancnccgcttgaccaccttcgaagactccgagaaggagagtgaatacggttacgttcgcaaggtttcaggacccgtcgtcgttgcggtggcatggctggtgctgctatgtatgaactcgtgcgtgttggtcatgatantctnatnggnnnattattcgtcncgaggggntttggcnanccncccattttgagngngaacggnngtgttgngntgnaa

SEQ ID NO: 29232 - DNA, 262 bp, Glycine max
  unsure (1)..(262): unsure at all n locations; Clone ID: 701061102H1
ccgatctacaaagtcagatgatgcncatggnncncaattagttctgcaanatcggctcananacacatacataccctttagaaagtncttcatactcttccagaagcagaaaanngtgcctttttttttnnattcttnacntgaagctttcggtgttgtgcngccatggccgggacacagttcaaccccacttgctcaaanactcatctncactcatctcagctcccttttctatcgaggnnncttcctagacntcgccacg

SEQ ID NO: 29233 - DNA, 274 bp, Glycine max
  unsure (1)..(274): unsure at all n locations; Clone ID: 701061104H1
gcaaataagcggctggaacttgatgcaaaggaccatcctgagaattatgatattgaagagttaactggaaatgaatcggaagttattgaaatggatttgatgcttggtgtagctgatctccatacacaagaggcagtggctgctgtgaatctgcaatttccacttgtcagcctgtgattccattggctgcnganggtagtgaaacagatttggaagaaagtagtactgataatgacagtgatgatgatatnaataacagtgatgattatttagc

SEQ ID NO: 29234 - DNA, 270 bp, Glycine max
  Clone ID: 701061105H1
gtggtgttagatctgtacccgcctagccattgatttggaaaagtccaagcttcacaagatgagtaagcttcagagtgatgctcttagagaagctatctcaggaatcatgactgattccaaggaaaagaacaggaaatttgtggagaccattgaactccaaattgggctgaaaaactatgatccccagaaggacaagcgttttagtggctctgttaagttgcctcacattcctcgccccaagatgaagatttgtatgcttggagatgccca

SEQ ID NO: 29235 - DNA, 279 bp, Glycine max
  unsure (1)..(279): unsure at all n locations; Clone ID: 701061106H1
ctctcacttacaagcgtaatcaacgaacttgcctctttctgttnnttattttttattttttcgtattttcggtattagaaaaggaaataataacgagagagctctagaggcgcttgcgtaacggtaattgcgaaagaagatgcaaccancatcgaacggctctgactcgaaagcgacggagcagcggacgccgccgcctcagccagtggccntgccccccatggattccgatgcaanatcccnggcggcggnnttggtaatgcagcaccatatcgtccc

SEQ ID NO: 29236 - DNA, 281 bp, Glycine max
  unsure (1)..(281): unsure at all n locations; Clone ID: 701061107H1
tagataaatactacatggtggggaatggaaataatagnaggaattaaaagangaacatgaaaagggtctctgaatctaatcctatttcttcttctcctttcccctttgtaatcgactntcatgctcagaagcgtttcgnttgtcctctaaaacccacataccatcaaccaaactcctaaagtgatatccagaagagtgagagaatggttactgggtggngaagagcgttctgcacatccatccccananacagagaaaccaaagtgttaacagagaaacca

SEQ ID NO: 29237 - DNA, 278 bp, Glycine max
  unsure (1)..(278): unsure at all n locations; Clone ID: 701061108H1
tttagtcttgttcttagagatggcttgtgaaaccaagtcatgnttggttatgtnaccttgtnttcttggttgctaattgcatgcaacattgtgtccacggggtgtctcaagtgccttgcctttttatctttggggactctatgtctgatagtggaaacaacaatgaacttccaaccacttcaaaatccaatttcagaccatatgggancgactttccattaggaccaactgggagatataccaatggccgaacagaaatgacataatcatncaattnc

SEQ ID NO: 29238 - DNA, 281 bp, Glycine max
  Clone ID: 701061109H1
ctggtcttctccaagaacattaaatgaagcatctccttttgtgacaatgatgctttcacctactcaaggagtttctacccaaagttctgattggaatggatatcaggcatctgtctacttacctgagaggagcattcatccaccttctactttgtcatgaacaacccagcaattgatacaaatgtttacatgcaccatcaaaagcagatgcctgttgatgagtttccagaaaggcctggtgaacctgaatgcagcttcttcttaaaaactggggattgcaa

SEQ ID NO: 29239 - DNA, 279 bp, Glycine max
  Clone ID: 701061110H1
ctcaagcccagattcaaccagttaaacttggaacccaaggctttcaggtactattaactacattacttgctcttattttgataattgatacaattaatctcattctaggtttcaaaattgggattcggatgtatgggccttactggagcgtacaatgaccctctccaagaacaggatggcatatctgttatcaagtatgcgttcagtaagggaatcacattttttgatactgcggatgtttatggagccaatgctaatgaacttttggttggaaaggct

SEQ ID NO: 29240 - DNA, 280 bp, Glycine max
  unsure (1)..(280): unsure at all n locations; Clone ID: 701061111H1
aaaaattggaaagagtacaaatttaagaggaaagataacattaccaaccttgggagctggcgaacaagcatacgatgtnaattttgaatgggacagtgacttcggaattcccggtgcattttatattaagaacttcatgcaaaatgagttctacctcaagtctctaattctcgaagacattccaaaccacggaaccatncacttcgtatgcaactcctgggtttacaattcaaaaaactacaagactnatcgcattttctttgccaacaatacatatcnt

SEQ ID NO: 29241 - DNA, 278 bp, Glycine max
  unsure (1)..(278): unsure at all n locations; Clone ID: 701061112H1
tgagctataagctagtttatcgtgaggagaatatgaagttgtttgttttctttgttgctgcagtagttttggtagcatggccatgccatggcgcaggctaccaaaggttccctctccgaatgaaaactggctatggtgagcgttcttcggaggtaaaatgcgcaagttttaggcttgctgtggaagcacacaacatccgagcctttaaaaccattcctgaagngtgcgttgaaccaacaaaggactacattaatggcgaacaatttagancagcctcc

SEQ ID NO: 29242 - DNA, 276 bp, Glycine max
  unsure (1)..(276): unsure at all n locations; Clone ID: 701061113H1
ataagcctntagttnancgagatttaatcnccaatgagangcagcaattgcgccanagtgtgaagtatttgcaggctnaactttgttctcgggtaggagctcctgctgatgaagtgcgggttctcaaggaaaggattgcttggcttgagtctactaatgaggacctctacagagaacttcataaatatcgcagtagatgtgcttttgtagagagatgtgaaattgatgaacctaatggacacattattctcatgaaaaccgatgggcttgagaggc

SEQ ID NO: 29243 - DNA, 250 bp, Glycine max
  unsure (1)..(250): unsure at all n locations; Clone ID: 701061114H1
catcataccgtcacgaaanactcccgaattgactacanacncacccgtttcctgtttcgcttgtctcnncctacattgtgctaganntcttgcgctctactcaanttccntnnttggctnttctngaattcttcgtgtcccgttttcacgttttntttgtgttcttatgcgtctatggatannngtagaagtncntggggaanggtnntgtgngggtttnanaggttgtntgtgngtnnnggggggttgt

SEQ ID NO: 29244 - DNA, 278 bp, Glycine max
  unsure (1)..(278): unsure at all n locations; Clone ID: 701061115H1
caaagcacttagtgctattcaataattacgaaaaaccaacagcgagtnttgtttttgtctggtccaggctggaccagggaatgaatagagatgagaggctttcggttgaagagaactgagttaagcggcgaaccaaacgcagaatcggggcagaaattgccaccggaagcacgtcgaagacggtgaaccaaacacaaaattccatccagcanttctcntttcaatccccaactcaaatctgtgaagaaaatctcantttctaaatggnattcttagcc

SEQ ID NO: 29245 - DNA, 269 bp, Glycine max
  unsure (1)..(269): unsure at all n locations; Clone ID: 701061118H1
aactttgttactctcacacatgtctcgctccgtgcctttggtttcaaccatttttgtcttgcttctgcttctggtggccactggtaggcctttctttcttgacgctaattaatatctacacttttgggtttcttttattgtnatcttagttagttaacaagctattagctactgttcttacaccttaattnctncacgtacttgtgtgtaatattttatnggcctggatcaatatttctggtangtaatattntagtgtngaggtttcc

SEQ ID NO: 29246 - DNA, 275 bp, Glycine max
  unsure (1)..(275): unsure at all n locations; Clone ID: 701061119H1
gcgttctatatattattgnattgacaatgaggcctgctcttgctttgcttcctccttctatttgctttctngttagctgccactacagaattcaagaaaagatacaggggaatattggaaaatgatcatgaaagatcaggaaatgccaganggacttcaaggtcttgtttcatttcaatctganaatnnnccttaggnncccaggggggntnggaanggncccaaacncncngggtgnggtgccngttgtnnnntgaccccnggtgngngggngt

SEQ ID NO: 29247 - DNA, 273 bp, Glycine max
  unsure (1)..(273): unsure at all n locations; Clone ID: 701061120H1
ttaagtagtaccccgactaagagaaagcgagttccttttgcatcaagtggtgaaacaagtacaagaacagatcttgttgttatgccatctaaacaatcttggtggagtaagaagtttgatgagttcagggagaaggtgaaaggccatccagtatccaagcgattccttaagtatagtgacccagtgaagacaaagggccaggagatantagaggacttgcgggaaagatatgagaccagtgacagccccattattcacaaaatacaggatatc

SEQ ID NO: 29248 - DNA, 273 bp, Glycine max
  unsure (1)..(273): unsure at all n locations; Clone ID: 701061121H1
cttgctaccaacactgagcttaaccgagcttcgcaaagatgaatcgggaaaagttaatgaagatggccggttcggttagaactggaggaaagggtactgtgagaagaaagaagaaggctgtccacaagacaacaaccacagatgncaaaaggcttcagagcaccctgaagagaataggggtgaatgccatccctgctattgaagaggtcaatatctttaaggntgncgtattanccagtttctaantcccaantttcaagcttcctttgngtt

SEQ ID NO: 29249 - DNA, 276 bp, Glycine max
  unsure (1)..(276): unsure at all n locations; Clone ID: 701061122H1
aatttctaaatccaccancacaccctctnttctcttctcttctctccactcaacanaacgtagggttnttcttntctcgaaanatccagngcaatgancacngcgnagcgagaagctctccgctctnaaatncgccgtcgccggattgaacgaaatcagtgagagtgagaagaacggattcatcagcntcgtcagccgctatctcagtggcgaaggcagnatgtggaatggagcaagatccagangcctanggacgaagtggttgtgccttacgac

SEQ ID NO: 29250 - DNA, 276 bp, Glycine max
  Clone ID: 701061123H1
ctctatcgagtaaattaactatgaagcctaccctactattatccctttccttcctgcctctctttgctttcctgggctctttcagaagatgttgaacaagttgtggacataagtggcaaccccattttcccaggtggcacatattacattatgccatcaacttggggcgctgccggtggtggattgaaactaggccggacaggaaactcaaactgcccagttactgttttgcaagattactcagaaatcttccgtggcacaccagtcaaattcagc

SEQ ID NO: 29251 - DNA, 271 bp, Glycine max
  unsure (1)..(271): unsure at all n locations; Clone ID: 701061124H1
caagaaatatgtttatttccgacagatttttcccacagaaaaatttccataagaatttttcaaaaaaatgacggatcatacagacggtcaattatttcatcggaaagttcacatttctaacgaattanaccgatggaatggggatcgttggaaaccaaaattccccaaaacaaaagacgncaaccctagccatcngaatcatgggttgtgnnggtggnnttccccggncgngtctgnnngttggtgtggtggatgggtacncngggagntg

SEQ ID NO: 29252 - DNA, 273 bp, Glycine max
  unsure (1)..(273): unsure at all n locations; Clone ID: 701061126H1
gaaattganccagctctaaaanagcagcntatcatctctacagtactcatgactgttggaattgcaattattatttggattgctctgccaacatccttcacaattntcaactttggtgctcagaaggaagtaaagagctggcagctgttcctctgtgtgggtgttggtctatgggctggacttattattgngtttgttactgannactatacaagcaatgcttacagtcctgtacaagatgttgctgattcctgccggactgganctgcaacc

SEQ ID NO: 29253 - DNA, 275 bp, Glycine max
  Clone ID: 701061127H1
ctcggaaccacctactcttgtgtcggtgtgtggcaacatgaccgagttgaaatcatcgccaacgaccaagggaacagaacgacgccgtcttacgtcggcttcactgataccgagcgtctcatcggtgatgcggctaagaaccaagtcgccatgaaccccatcaacaccgtcttcgatgccaagaggttgattggtcgtagattcagtgactcctctgttcagagtgatatcaaattgtggccttttaaggtcattgctggtgctgctgacaagcc

SEQ ID NO: 29254 - DNA, 273 bp, Glycine max
  unsure (1)..(273): unsure at all n locations; Clone ID: 701061128H1
cttggttgataaattgaacaggtgcacctaggagatactccccanaacttggctgaaagtnatttcgaacatttggctcgcaagacagaggggttttcaggttcagatatatctgtctgtgtaagtntgactnctatatttaatacctggttagaataatgatcattttatttggattagtgttaaaggtaattggacctattctacaggtgaaggatgttttatttgaacctgttcgcaaaacccaagatgccatgtttnctttaggaatcc

SEQ ID NO: 29255 - DNA, 275 bp, Glycine max
  Clone ID: 701061130H1
cgctcagcaaagcacttgcttacaaacagctactgaagttgcccgtggtgatgtgggtgtcagtagtacaaactatggggaagaacttttcaatgcagaaactgtgactgctcaggctcgtgatggaatcagtttgggcatcagtggagggagtgttggaatgtgtgctagtcatgaagctgaaatccacggggctgatatatatgtgcacagagctgatagtgttgttggtgaaatggaacagagagtagaagatgctgaaaaccagggacaga

SEQ ID NO: 29256 - DNA, 274 bp, Glycine max
  unsure (1)..(274): unsure at all n locations; Clone ID: 701061131H1
gggcattaaattcatagaataaagacgaagggtgtcactggttagaaggataagagtggcttctgttaggtaccagcattcaagatttgtgacatagcttttgttggccaccctacatacaaggagtatgaccaaggcttgtcagtattgcgctttctagtttggtttttttccccttgtttttcttgttctctacncttatccacttattcaagttttgattattttagggtgagaaagaggtttctttttaagaaggttttaaaggacaatg

SEQ ID NO: 29257 - DNA, 272 bp, Glycine max
  unsure (1)..(272): unsure at all n locations; Clone ID: 701061133H1
ggcatggattgttgagcattcacatgcctgcatattctgattctattattaagggggtctctacagtcatggtttcatactccagttggaatggtgtaaggatgcatgcaaatcgtgatctagtcactggtttcctcaagaatacccttaagtttaaggggtttgtcatctcagattggcaaggtattgacagactcacatcaccacccagttcaaatnacacatactctgtccaggcttccattgaagctggtgttgatatggngatggtc

SEQ ID NO: 29258 - DNA, 267 bp, Glycine max
  unsure (1)..(267): unsure at all n locations; Clone ID: 701061134H1
aatcccgagagatttgactgaggcgtggttatcaggagcgggattatccatagtggcagctttggttatgatgtttttacttggaatggtcctcatactcttatatgttaaattctcctttcggattcgcatttctcttctccaccgcaacacacccaccttcaggattttggtggttgttttgacagtatttgagagagttggtgatacttttatatcatggaaaatggactttagggatatnggncatgatgcaatttaatgagg

SEQ ID NO: 29259 - DNA, 246 bp, Glycine max
  unsure (1)..(246): unsure at all n locations; Clone ID: 701061136H1
ccaacgcgttgctaacctttgccgtaaccattctggcgcttatgtgcgctatggcttctgtatccgacaacttcaacacccccactccctctgcacaagtccaggttctgaacatcaactggtttcagaaacaacccaatggcaacgacgaggtcagcatgacgatgaanatttccgcagacttgcagtcccttttcacatggaacacaaaacaggtttttgtttttctagctgctgagtatgaaa

SEQ ID NO: 29260 - DNA, 195 bp, Glycine max
  Clone ID: 701061137H1
tgattgaagaagatgccgatcagaaacatcgccatcggaaggcctgaagaggctactcaccccgacacgttgaaggcggggttggctgagttcatctccaccttgatcttcgtgttcgccggttcaggttccggcatcgcctacaacaagctcaccgacaacggcgccgccactcccgccggcctcatctccgct

SEQ ID NO: 29261 - DNA, 268 bp, Glycine max
  Clone ID: 701061138H1
cttccgtggcagtggtagttgccaaactagtagcaagaagtaagtcacgtttttctccgttttcattcatcacaatattaaagcccctagtttccttcagtatgggggacacttacgttttggccacaccgaagcgcaacgttccgatgacgtggacggcggcgaggcgaagaagtggctgttgcagcagggcgaggcagacccggcggcggcgctggcgagcgcgcggcacgagttcggggagcacggcggggtgaacatgtcgatc

SEQ ID NO: 29262 - DNA, 261 bp, Glycine max
  unsure (1)..(261): unsure at all n locations; Clone ID: 701061139H1
tgttgctgtgggagtcatcaagaacgtggagaagaaggatcctactggagccaaggtcaccaaggctgcccagaagaagaagtgaatcgtgcggtttggttcatcaggggatgtcgtttcttatggttacaataaatgttggtttcttgcccttgtgtcttcgtttctaggtagcttgttttncggacatagtttgaagtctccaccatcatctcgcaacttttgttcccagaattgggntcttgatcgacggtggcaaga

SEQ ID NO: 29263 - DNA, 270 bp, Glycine max
  Clone ID: 701061140H1
cagcagacaagtttgctgctgatgctaacagcaagactgtgccagcatcaagcatcccagacgggtggatgggattagactattggtcccgattccatcaagacatttggtgaagcattggataagacccagaccgtcatttgaatggaccaatgggtgtttttgagtttgataagtttgccacaggaacagaggccatagccaagaaactggcagagctgagtgggaagggagtaacgaccatcattggaggaggtgactctgttgccg

SEQ ID NO: 29264 - DNA, 270 bp, Glycine max
  Clone ID: 701061141H1
taatatctctaaggaatgcttaccatggtaatgcaactgggacaatggcagccacagctcaaagcatctggaaatttaatgtagtgcagagtggcgttcatcatgcagtaaatccagacccttatagaggcattttcggtttgatggagagaagtatgcaagagatgtccaagatatcattaactttggaacttctggaaatgttgcagccttcatatctgaagccatacagggagtggggggtatcattgaattggctcctggttactt

SEQ ID NO: 29265 - DNA, 106 bp, Glycine max
  unsure (1)..(106): unsure at all n locations; Clone ID: 701061142H1
cnctctctctctctctgaagatggcttcacgcaggctgcgtatctncctctgattcgatcctcccttcgtagattctcaatcgaagccctcaatttccncatanna

SEQ ID NO: 29266 - DNA, 270 bp, Glycine max
  unsure (1)..(270): unsure at all n locations; Clone ID: 701061143H1
ctccttattctttctgtgatttaagaaagcagaggagaagggggnacaaagagaagctagcaagcatggattgttgtgtgtgtacaactatgccattgntattgaggcctccgaggaatacaatatgtggggcttgttatgaaggagttaggagcataatcaacatgatgagcaatgtcgaaagtgagaaagtaaaagcaanggctanccaaatccaaacagttctccatttccgcggcgaattncgaaccctnggtgttgtataagatg

SEQ ID NO: 29267 - DNA, 271 bp, Glycine max
  unsure (1)..(271): unsure at all n locations; Clone ID: 701061144H1
ctactcttagccgcagatctctcagggcttgcatcttctcagttntgaagatgtacacatcaaggaagaaaatccacaaggataaggatgctgaaccaactgagtttgaagagtcagttggacaggcattgtttgatctgnaaaataccaaccaggagcttaaaagtgatctgaaggatttatacataaactcagctgtgcaagttgatgtttctgggaaccgcaaggctgttgttattcatgtcccttacagattaaggaaggnttccgt

SEQ ID NO: 29268 - DNA, 269 bp, Glycine max
  Clone ID: 701061145H1
ttaggaaggatctgtatggtaacattgttcttagtggtggctcaactatgttccctggtattgctgaccgtatgagcaaagaaatcactgcacttgctcctagcagcatgaagattaaggttgtggctccaccagagagaaagtatagtgtttggattggaggatcaatccttgcatccctcagcaccttccagcagatgtggatatcgaagggtgaatatgatgagtctggtccatccattgtccacaggaagtgcttctaagtccaa

SEQ ID NO: 29269 - DNA, 273 bp, Glycine max
  unsure (1)..(273): unsure at all n locations; Clone ID: 701061146H1
catagagtnagaagtgagaagagaaaaatggcaatctccatacccagtagacaacttttcatagatggagagtggnaagtccctcttctcaacaatcggtttccgatcatcaaccccgctactgaagacatcatagggcatattccagccgctactaaggaagangtggaccttgcggtggangctggctaaaagagcttttcccatagcangggnaaagnttggtctnnngnccccgggctctgttcgggcccgnanttttggancanngnt

SEQ ID NO: 29270 - DNA, 273 bp, Glycine max
  unsure (1)..(273): unsure at all n locations; Clone ID: 701061147H1
cttnttcttcccatttcacccctcgtctttccttgtttccggtnngggccaaccacaacatatgttaaacaaggaacaacctccaaaacataacatcctacgccaaacaaaactttgacctccttcagatctataccctnnnnnnnnnnnnnnntctattttcaaattctacatcatgggcacggaggttctacggccacaagattgtttcacccaacgcatcggtgttccaccgcctggctntccccggcgaagaactagggtnacccacca

SEQ ID NO: 29271 - DNA, 267 bp, Glycine max
  unsure (1)..(267): unsure at all n locations; Clone ID: 701061149H1
ccgttcgctcttcctctcccagacanacacatggtaatgctattgatctctctctgtttttcgattttctctccacattcatttcattcttttgttttcgtcgcaggctttgcccaatcagcaaaccgtcgattaccccagcttcaagctcgtcatcgtcggtgacggtggcacaggaaagacaaccttcgtgaaaaggcatctcactggtgaattcgagaagaaatatgaaccgaccattggtgtggaggttcatccgttggattt

SEQ ID NO: 29272 - DNA, 264 bp, Glycine max
  unsure (1)..(264): unsure at all n locations; Clone ID: 701061151H1
aaatctagaatggctttgaagcttgtaaatctagggtttcactcatcgattccgtgttctccgaggcccttgaaagatcggttcgtgcttcggtcttctaaagtggagcaaatatcgtttacggaatctgagaactcactcatcgaagcccttcttggcatccaaggacgcggacgttcttcttctngtcancagctcatngctgttgagcgncctgtcnaanncctgnancgttnnggggntncccctgcnccaaaaaanntt

SEQ ID NO: 29273 - DNA, 220 bp, Glycine max
  unsure (1)..(220): unsure at all n locations; Clone ID: 701061152H1
tcaatttcgttgatggcgtcacaagcaagcctcctccttcagaagcagctcaaagatctttgcaagaaccccgtcgatggcttttccgccgtttggtcgacgaaaccaacatttttgaatggagtgtgactataattggacctcccgatactctttatgaggggggatttttcaatgccattatgagcttccnnccnactaacccaannnagtcaacnat

SEQ ID NO: 29274 - DNA, 267 bp, Glycine max
  unsure (1)..(267): unsure at all n locations; Clone ID: 701061153H1
tagaattacagancattttccaacacgattacacganccgaatcaaacccctctttctctccgaagctgcttttaatatcgtactggccttcgattgttctcctctttaatacatactgttctctcttcgatttgagggaacagtacaagagtctgagcatcggttaacccaactgcacaggtagtctccaaataatggagcctcatgatgagactggatgccaggctcctgaacgccccattctttgcattaataattgtggctct

SEQ ID NO: 29275 - DNA, 268 bp, Glycine max
  Clone ID: 701061154H1
gcggtacccttgctctccaagaagatcgtgaagaagcgcgtcaagaagtttatacgcccccagagtgatcgcaagatctccgtcaagccaagctggcgcagacccaagggtattgattctcgtgtcaggagaaagttcaaggatgcactttgatgcccaacattggttatggctcagacaagaaaacccgccattatctaccaaatggtttcaagaaatttgtcgtgcacaatgtgaaagacctggaacttctcatgatgcataacag

SEQ ID NO: 29276 - DNA, 268 bp, Glycine max
  unsure (1)..(268): unsure at all n locations; Clone ID: 701061155H1
gtgagtttntngatcgagataacnagaaacagtgtgatgaaanntannggtccttgntttcttcgttgctacaatntnngtagcatggcaatgccatgcgtangatangttcccnctccgaatgaacactggctatggtcccgtactccggaggtgaaatgcgcaagtnggaggcttgctgtggaagcacacannatcttnggcctngagaccattcctgaagagtgcgttgaagnaacaaaggnatacatccatggcgaanaatata

SEQ ID NO: 29277 - DNA, 269 bp, Glycine max
  unsure (1)..(269): unsure at all n locations; Clone ID: 701061156H1
ctcagaattctctaaaagagatctttttctgctctttgaagaaagaagggtctttgcttnattttggagatgtctctgcnctcagatctcatcaaccttaacctctccgataccaccgagaaggtgatcgcagagtacattggatcggtggatcaggaatggacctgaggagcaaagcaaggactctcccaggaccagttagcgacccttcagagcttcccaagtggaactatgatggttccagcanaggtcaagctcctggtgaagac

SEQ ID NO: 29278 - DNA, 268 bp, Glycine max
  Clone ID: 701061158H1
catggccatgccatggcgcaggctaccaaaggttccctctccgaatgaaaactggctatggtgagcgttcttcggaggtatgcgcaagttttaggcttgctgtggaagcacacaacatccgagcctttaaaaccattccgaagagtgcgttgaaccaacaaaggactacattaatggcgaacaatttagatcagactctaaaacagttaaccaacaagctttcttttatgctagtgaacgcgaagtccatcacaacgacatatttatt

SEQ ID NO: 29279 - DNA, 267 bp, Glycine max
  Clone ID: 701061159H1
ttccattgatttcttgcttctatatattacttgcttcttttcttgatcatgtcccttgctggtaaaatcagctctgaaattggtgttcaggcaaccgctgcaaagtggttcaacctcttcacaacacaacttcatcagttcaaaatcttactgatagaattcatggaaccgagctgcatcatggtgaagactggcatcacaatgagtcggtcaagcactggacttataccatagatggcaaggttacaacttgcaaggagagtattg

SEQ ID NO: 29280 - DNA, 266 bp, Glycine max
  unsure (1)..(266): unsure at all n locations; Clone ID: 701061160H1
cgcaagcaaaaagaaagaatcccaggcgaggagaaagatggaggggaaggagcaggatgtgtcgttgggagcgaacaagttccccgagagacagccgattgggacggcggcgcagagccaagacgacggcaaggactaccaggagccggcgccggcgccgctggttgacccgacggagtttacgtccatggtcnttttacagagnagggatancagatttntgncattttcctgtttctccaaatcaccgttttacccgtntgggg

SEQ ID NO: 29281 - DNA, 267 bp, Glycine max
  unsure (1)..(267): unsure at all n locations; Clone ID: 701061161H1
tcctgaatctgctgaaggagaagtaaaagaaaatgttccttctggaaacaggggaggtgaattctctgcttctgcaggtggacacggtggcaatccttcaattgagaatggttctcaaagaaattttattcatcatggagcttcctatgtantgaaggatgatggtgcagtcagtagtataagcaaagggaaaccttccaagaaaagtgttgggcatagtgctcacgagaagcaagtctgggtccataaatcttcttcagggtcata

SEQ ID NO: 29282 - DNA, 268 bp, Glycine max
  unsure (1)..(268): unsure at all n locations; Clone ID: 701061162H1
gttgatcgagataactagaaacagtgtgatgaaaatgaaggtccttgttttcttcgttgctacaantttngtagcatggcaatgccatgcgtacgatatgttccctctccgaatgaacactggctatggtgcccgtatccggaggtgaaatgcgcaagttggaggcttgctgtggaagcacacaacatctttggctttgagaccattcctgaagantgcgttgaagcaacaaaggaatacatccatggcgaacaatatagatcagacc

SEQ ID NO: 29283 - DNA, 267 bp, Glycine max
  unsure (1)..(267): unsure at all n locations; Clone ID: 701061163H1
cagattagtgagcccaagangccctctgacaagcccctcaggcttccccttcaggatgtgtacaagattggaggtattggaactgtgccagtgggacgtgttgagaccggtgtcttgaagcctggaatggtggtgactttgcaccaactggactgacaactgaagtcaagtctgtggagatgcaccatgaatctcttacagaggcacatcctggtgacaatgtgggattcaatgttaagaatgttgctgttaaggatttgaagcgtg

SEQ ID NO: 29284 - DNA, 270 bp, Glycine max
  unsure (1)..(270): unsure at all n locations; Clone ID: 701061164H1
ttatggntagncggtggattaactggactttcatttgtaccttattggcacaaatcagactacctatgagaacttccgctacagagccgataacaggatcaatgtttacaaccggggttgtttaaacaatttcctagagtattttgtacaaaagtgaaaccctcaaggaacaatttccgagcttttgttcaagaggaggtaccgaggccacctcctccggtcatttcccgggaanctgaaccagatctgggtggtggagatcctcgttct

SEQ ID NO: 29285 - DNA, 278 bp, Glycine max
  unsure (1)..(278): unsure at all n locations; Clone ID: 701061165H1
cnnctcncnnngnatgananngcgangaanagaganagaganatcttctcaaaccatcttgcaggtgtnnctttgcagtgnatgntctacngctgggtaattggaaggctaaccaggagctgcttcattcctcaannattcttcaaactttctaagttcatattcntcagtgttctctagtgtcatcaccaaaatcagggaatgctgaaagatgtgcttgatagttaagaattccttcactgaggctaatgagtccgtgcctccatctgagctagcct

SEQ ID NO: 29286 - DNA, 264 bp, Glycine max
  unsure (1)..(264): unsure at all n locations; Clone ID: 701061166H1
tgatggcaaaccaagcttcactctccttctcttcggggtctccagttcacgcgcctctgaagcgcgtgggcacgcacaacggaagcttccactgcgacgaggcccttggctgcttcatgattcgcctcacgaacaaattcaacagcgccgaaatcgttcgctcccgagaccctcaggtgttggaggatcttgatgctgttcttgatgttgggggagtgtatgaccctgctcgagatcggtatgatcatcatcaaaaaggattng

SEQ ID NO: 29287 - DNA, 263 bp, Glycine max
  unsure (1)..(263): unsure at all n locations; Clone ID: 701061167H1
ttcttcggaggtaaaatgcgcaagtnttaggcttgctgtggaagcacacaacatccgagcctttaaaaccattcctgaagagtgcgttgaaccaacaaaggactacattaatggcgaacaatttagatcagactctaaaacagttaaccancaagctttcttttangcnagtgaacggganccccntcagagngtcntntntntttnnggcaganatnncncggtacncnctantatcccatnctatgaaaancnnggggggg

SEQ ID NO: 29288 - DNA, 266 bp, Glycine max
  unsure (1)..(266): unsure at all n locations; Clone ID: 701061168H1
ctttttcccatcgatctcgtttctcccaaattcgagtcntccttcntttccaagtcagcgttaaggntttagtttggcgcgtgcgatgaagatcgaggaattggacgatggagagtgtagtagggaccatgaagagaagtttgagaggcagattgtnagcgttgatgccaaganagcgttgnttggagnnggccctnggatcntgttctntcccacacttcnngtanantgnncttcgnaacnagattgaagctgagtgcaggggg

SEQ ID NO: 29289 - DNA, 263 bp, Glycine max
  unsure (1)..(263): unsure at all n locations; Clone ID: 701061169H1
tttgacaaaatgataggcagttaaaatatgcatatgcttcagaaaacgcaggcgagcattcatccaaacactcgaatcgtctctagtacctcaatcaagcgttgttcatgaactccctcaagttacagacactactttctggctttgttctcgtgcaatcccttgagaaaagtttctgtnctgtgcttggtgacgcatgcgcactttttcattngcatttaagaaggggttttggganatggggaancctttgttttatgaga

SEQ ID NO: 29290 - DNA, 267 bp, Glycine max
  unsure (1)..(267): unsure at all n locations; Clone ID: 701061171H1
ttaaaagaagagcatcactgaactaacaaagcaaccctatgtcgaaggtggtttgtntcaccggagccagcggcnccatcggatcatgggtggtcctactcctcctccagcgtggttacaccgtccatgccaccgtccaagatatcannggatgaaaatgagacgaaacatttggaggaaatggaaggngcaaagagtcatctccatttttttgaaatggatcttcttgacatcgactccattgccgctgccataaagggttgttcc

SEQ ID NO: 29291 - DNA, 266 bp, Glycine max
  unsure (1)..(266): unsure at all n locations; Clone ID: 701061172H1
cggcaatggcacttggcaggctttcatcttccttcaacaagcctttacgtcctctcttcaatgctggctcagtttactacaagtcctctttgcctgctgaagctgcgtacgacaatgagaaaagctgtgatacggaatgaatgctccacttgaggttgttgatcctgagattgctgatataattgagcttgaaaaagctagacaatggaagggactggaactgataccctccgagaatttcacttctgtctctgtaanncanccat

SEQ ID NO: 29292 - DNA, 269 bp, Glycine max
  unsure (1)..(269): unsure at all n locations; Clone ID: 701061174H1
atttcttacctcttggcatggccattcaaatgtcttcttttgtctttgtttctcttacaattttattttgcttctccttccttggagaagagttttgcctttcaaacaacaaaggagntcnacagaaagcaacaatcttcatcaatatactcatcttgttcacctcagctcactccttccttcatcttcctgcagctcttctgccaaaggtcgcaaaagaaaagcatcattagaagtggtacacaaacatgggccatgctcccaactga

SEQ ID NO: 29293 - DNA, 269 bp, Glycine max
  Clone ID: 701061175H1
cagaattagggttttccaattcacagagcaacacaacgaaccaacaatggcgcagctccagccgcagttcgcagccgcagcacgggcaagcagcgctggagcaggtgcagtgcttcggtcgcaagaagaccgccgtggcgtgacctactgcaagcgcgggcgcggtctcatcaagatcaacggctgccccattgagctcgtggagccggagatcctccgcttcaaggccttcgagcctatcctcctgttgggtaagagccgctttcgcc

SEQ ID NO: 29294 - DNA, 264 bp, Glycine max
  Clone ID: 701061176H1
cttaatacatatcactttcttcaccgttcgctctttctttctcccctacacaaaacatggctttgcccaatcagcaaaccgtcgattaccccagcttcaagcttgtcatcgtcggcgacggtggcacaggaaagaaaccttcgtgaagaggcatctcactggtgaattcgagaagaaatatgaaccgaccattggtgtggaggttcatccgtggaatttttcacgaactgtggaaagattcgcttctattgttgggatactgct

SEQ ID NO: 29295 - DNA, 264 bp, Glycine max
  Clone ID: 701061177H1
attgcctctttcaagaagcatctgagtgtttattattcgtaatatatagtcactcaagcttctaggatttctgccagctacatgaaaatgggaagcaacttgaggtttttgagtctttgcctcttggcattgattgcatcaactcatgcccaacttcagcttggtttttatgcccagagctgcccaaaagctgagaaaatcattttgaaatttgttcatgagcatatccacaatgctccatcactagcagctgcattgataaga

SEQ ID NO: 29296 - DNA, 263 bp, Glycine max
  unsure (1)..(263): unsure at all n locations; Clone ID: 701061178H1
tttatcgtgaggagaatatgaagttgtttgttttctttgttgctgcagtagttttggtagcatggccatgccatggcgcaggctaccaaaggttccctctccgaatgaaaactggctatggtgagcgttcttcggaggtaaaatgcgcaagttttaggcttnctgtggaagcacacaacatccgagcctttaaaaccatncctgaagagtgcgttgaaccaacaanggctacttaatggcgaacanttnagntcagcctctaa

SEQ ID NO: 29297 - DNA, 265 bp, Glycine max
  unsure (1)..(265): unsure at all n locations; Clone ID: 701061180H1
tggaactatcctctattgatggctacatggaaagttgctcctgctctagctgctggttgtacagcaatattgaagccatctgaattggcatctgtgacctgtttggagctggctgaaatatgcagagaagttggccttcctccaggggtattaaacattgttactggattaggcaatgaagctggtgctcctttgtcatctcatcctgacgtagacaagatttcctttactggaagctctgcaactggaagcangattatgacag

SEQ ID NO: 29298 - DNA, 279 bp, Glycine max
  unsure (1)..(279): unsure at all n locations; Clone ID: 701061181H1
ttttctggttatctcccttacactttgcaacctctgatttnatngnncnnanttantcatggcagannggctnnctgattttcngccnggtnaantccanttnncngaatccactgacatgttgcacaatgggaatacntcaaatctgaaatgatgtccagtncagcaggnnagcctttgcaagcagatggccataccattgatgatggatttgccccgccacagacatacaaacagttgcctgatacaacaattaaggngaatccaaagttatcacag

SEQ ID NO: 29299 - DNA, 261 bp, Glycine max
  unsure (1)..(261): unsure at all n locations; Clone ID: 701061183H1
ctcaattaaccttctttttgcgtcaatcttgatatcttagatttgcttgcaagattatgtcaagaccctttcttgcctcctctcattaggataattggctttcccaaatttgcaagtnttttgggtttacttacatggggtattganaaaatactttntcgctgaagctctgaataacagaccatcatcgacagatggggtctgaaggtcctccagcagctgtggcaacagttcatgtaacaggtttcaggaaattccatg

SEQ ID NO: 29300 - DNA, 263 bp, Glycine max
  unsure (1)..(263): unsure at all n locations; Clone ID: 701061184H1
ctccatcactagcagctgcattaataagaatgcactttcatgactgntttgtaaggggatgtgatgcatcagtccttctgaactcaacaaccaatcaggctgagaagaatgctcctccaaatctcacagtaagaggctttgacttcattgacagaataaagagccttgttgaagctgaatgccctggtgtggtctcttgtgctgatatcctcactttggctgccagagacactattgtagccacaggtggacctttttggaaa

SEQ ID NO: 29301 - DNA, 262 bp, Glycine max
  unsure (1)..(262): unsure at all n locations; Clone ID: 701061185H1
cacttctgataaggaaaatgcaatgcacgattccaacagcattgtttatgatacattttctgttgtccaaggttaattttcagttttggttttttgggcggctccaatggcaacctctcaaatcactgcatcatgaggaacttgcctgcatttgaaaggtttcaaccttcagcgcttcgattttcttctgctgggcacgtcagaattggaacactcacgcaacctcgtttcccctctttcgtngtcaaagccgcnangttgt

SEQ ID NO: 29302 - DNA, 261 bp, Glycine max
  unsure (1)..(261): unsure at all n locations; Clone ID: 701061186H1
tgagctataagctagtttatcgtgaggagaatatgaagttgtttgtnttctttgttgctgcagtagttttggtagcatggccatgccatggcgcaggctaccaaaggttccctctccgaatgaaaactggctatggtgagcgttcttcggaggtaaaatgcgcaagttttaggcttgctgtggaagcacacaacatccgagcctttaaaaccattcctgaagagtgcgttgaaccaacaaaggactacattaatggcgaac

SEQ ID NO: 29303 - DNA, 266 bp, Glycine max
  unsure (1)..(266): unsure at all n locations; Clone ID: 701061188H1
cttggttgcaaactgtagagcgaagagcgttcgagtagtgagcgaaagacgttttctttcttctttcccgttgtcntcgcggcggaaccctagctactccggtggtgcgacaaagggtgtgtgaganagaaaggggtgtgagagagaaagcgagagagananagacantcacgatnagtggnaagggcggtnanaaggngtgtcngcgacnattccagnctcgtccgcggaanatngttcagagcttnacnggagattgtntcccc

SEQ ID NO: 29304 - DNA, 267 bp, Glycine max
  unsure (1)..(267): unsure at all n locations; Clone ID: 701061189H1
cactcacctgcctcttcctcacccctttctccancctaacgagtaaggaaaaatggcgcgtaagaagatcagagagtatgactcaaagaggttgttgaaggagcactttaagagactttctggcaaggagttgccgatcaagtctgcacaaattactgcatcaactgatttcactgagctacaagagaaggaaccctgggctttcatcttctaaattggttgtgaaacctgacatgttatttggaaagcgtggcaaaagtggtttgg

SEQ ID NO: 29305 - DNA, 263 bp, Glycine max
  unsure (1)..(263): unsure at all n locations; Clone ID: 701061190H1
tcatagggcattgaaatcagcagacaatgttagacaacaacttgtgcgaatcatggctcggtttaacctgaagttatgcagcactgatttcaatagccgggactactatgtcaacattagaaaggcaatgctagcagggtattttatgcaggtggcccatctggagcggccaggacattacttgacagtgaaagacaaccaggnggtgcacttgcatccatcaaattgcctggaccacaagccggagtgggtaatatataatg

SEQ ID NO: 29306 - DNA, 264 bp, Glycine max
  unsure (1)..(264): unsure at all n locations; Clone ID: 701061191H1
ttggggangctgccaagaatcaggcagctgtcaacccagaaaggaccatctttgatgtcaagagacttatcggaaganagttcgaagataaggaagttcaaaaagacatgaagcttgttccttataagattgtcaacaaggatggaaaaccttacattcaggtgaaaattaaggatggtgagaccaaggtgttcagccctgaggaaatcagtgccatggttctgatcaagatgaaggaaactgcggaagcattcctcgggaagg

SEQ ID NO: 29307 - DNA, 257 bp, Glycine max
  unsure (1)..(257): unsure at all n locations; Clone ID: 701061192H1
gccttatgtaaatnagtttcaatgcataatggttttnaagtcgagagattatnccacggctttcaaatttacattttcatctaggatgcagaattcaattaacattttcactngcgcattttaatatactataagangctttacatatttngtcatggttcttgtctgtttgggcagaattttggaaggtnctcatgcctctntngnggagacagtaccattcaagaccatagctggcattnacagccttacagnna

SEQ ID NO: 29308 - DNA, 264 bp, Glycine max
  unsure (1)..(264): unsure at all n locations; Clone ID: 701061193H1
cacgaaggagcgagtttcacagtagtgtccaaactcaaatgcagagaggcacgccagtnagaaagccacacaccaacacctccgatctcctcacttggtcggaaactcctccgccagaatccgccgccaccgtcgcctccgccacccgctctggccagccttccgatagaatcagcaaggttctccatggcggccagctcaccgacgaagaagctcagacgctagccaagagcaaancatgttcagggtataaaatgaaagaat

SEQ ID NO: 29309 - DNA, 262 bp, Glycine max
  unsure (1)..(262): unsure at all n locations; Clone ID: 701061194H1
aagaatcttgggagatcagggaggtcatcgtcgtcatttctgcgctcaagattaacataacgacctcgcgcacccaggaacaggcacggtccccccccttccatttttttgttgtttttaatngaaagagggagaggcgaaagtgaagaatgaagaggaatgagaaatagctaataagtgttaattggttgagcagggtattgtgttgtgtagctgaaggacatggagagaagcaatccggtgaggaagccacacattcaat

SEQ ID NO: 29310 - DNA, 265 bp, Glycine max
  Clone ID: 701061195H1
aattgcaagaatggcacttcgttgcttggtgatgtccctttctgttctcttcactcttggtcttgcgagagaaagccatgccagagacgaagatttttggcatgctgtttggccaaacactcccattccaagttcattgcgagatcttctaaagcctggccctgcaagtgttgaaatcgatgactcaccctatgcaaattgaagaaacacagtacccgaaaaccttcttctataaagaagaccttcatccaggcaaaacaatgaa

SEQ ID NO: 29311 - DNA, 268 bp, Glycine max
  unsure (1)..(268): unsure at all n locations; Clone ID: 701061196H1
ctctattcttcaagattcaggtactgcgtttcggaagcagacacagatggctcgtacgaagcaaaccgctcgtaagtccacaggaggaaaggctcctaggaagcagcttgcaaccaaggctgcacgtaagtctgcaccaactactggtggtgtgaagaagccccaccgttatcgtcctggtaccgtngctcttcgtgagattaggaaataccagaagagtaccgagcttttgatccggaagctccccttccagaggctggttcgtgaa

SEQ ID NO: 29312 - DNA, 170 bp, Glycine max
  unsure (1)..(170): unsure at all n locations; Clone ID: 701061201H1
ctcaagcattgcatncctcttgatttgtagtttgttttgtgctttagataaaagttctgccaaatcaagaggggttttaagatcatagtgtgtgttttgcaacaatggctaagttctttgctgctatgatcttggcactctttgccatttccntacttcaaacagtggta

SEQ ID NO: 29313 - DNA, 160 bp, Glycine max
  unsure (1)..(160): unsure at all n locations; Clone ID: 701061202H1
cagcaanctctggccnatctntaatntgnntggnnannnncangatgtgtgcgttgggagcgaacaagttccccgagagacagccgattgggacggcggcgcagagccaagacgacggcaaggactaccaggagccggcgccggcgccgctggttgaccc

SEQ ID NO: 29314 - DNA, 126 bp, Glycine max
  unsure (1)..(126): unsure at all n locations; Clone ID: 701061203H1
tatcattctccatacctcaacgaagaggttaaagagacggcaacactttgnngtccgccttgaccgagcagagcttcgtcttggccctcgattttgccctaangtactctcagtcacaacagacac

SEQ ID NO: 29315 - DNA, 166 bp, Glycine max
  unsure (1)..(166): unsure at all n locations; Clone ID: 701061205H1
ctttccatgcggtaccgtgttttctttgcatcaacggctactatntttgaacttgtcataattagtctctatttctaattagtatcgaatacacncacacaccttaaacgtaantggtcactatttgttccacactattatgccncnactctcagaagcctaccga

SEQ ID NO: 29316 - DNA, 168 bp, Glycine max
  Clone ID: 701061206H1
gggtaggaacaattcccagtgttctcagattggaatcccattgactctaccatggccacgcccttctgatccttccaaccaagaagctgttgtaagaaggagaaacaacggaccccctattaagttcctccttcctctcatatatgcccctgttctccctctaattcg

SEQ ID NO: 29317 - DNA, 169 bp, Glycine max
  unsure (1)..(169): unsure at all n locations; Clone ID: 701061208H1
gaaanntggtnccgctgnaactgncagaagcggctcgcagccagcgtcctncaagtgtggnagaggaaaggtttggcttgaccccaatgaagtcaacgaaatctccatggctaattctcgccaanacataaggaagctggttaaggatgggtttattatcaggaagccc

SEQ ID NO: 29318 - DNA, 170 bp, Glycine max
  Clone ID: 701061209H1
gagcctttcagaagaagcttttgacattaactctgtgcctaaggaggtcaagttccagcctcttggcagaaaagaaagcccctggtaaaaagccaactggtttgggtgctcccccaagtggtcccccatcaactgcagatgcatatgagaggatgctttcaaccattcca

SEQ ID NO: 29319 - DNA, 168 bp, Glycine max
  unsure (1)..(168): unsure at all n locations; Clone ID: 701061210H1
tgcttganaccgttcaatcagtgaaatggccaaggaagatgtgtttganttcctcgggaacgttcctgctgctacagaggcttcctggctcgtctgtaaggnagatatctgagcttgtnattctcaaacactatgagccgggagagtatgttgttcgtgagggagaac

SEQ ID NO: 29320 - DNA, 169 bp, Glycine max
  unsure (1)..(169): unsure at all n locations; Clone ID: 701061213H1
gnataatggggcccacatatatttctgtggtctgaaagggatgatgccagggatccaagatacgctgaagaaggttgctgagcaaagaggagaaagttgggaagagaagctttctcaacttaagaagaacaaacaatggcatgttgaagtctattgagattctctagtt

SEQ ID NO: 29321 - DNA, 169 bp, Glycine max
  unsure (1)..(169): unsure at all n locations; Clone ID: 701061214H1
caatacctctcccctagaccacagtttcttcactacaaaccgaantctcgaatggaactctgcagggaaagggaattggatgacagcttcatatctggaagcttttcagatacagaagtcactgaggattcccagtctgaagtctcacagaaggaatcggaggatgttt

SEQ ID NO: 29322 - DNA, 162 bp, Glycine max
  unsure (1)..(162): unsure at all n locations; Clone ID: 701061215H1
cagacagcagcagcaacaacanacnaactctttctggattccagtntgtgatgtgaaaatggcagtgactcttacatcancattcttctggcgttgcnatttgctgcttcagcttttgctgctctcagcctagagtacctgnagcttacctccaaaatggga

SEQ ID NO: 29323 - DNA, 166 bp, Glycine max
  unsure (1)..(166): unsure at all n locations; Clone ID: 701061217H1
cgngatntcagtgagtgatcggtgttcacttgatctcatcataatcgtcagcgtcaattgaagaagatgccgatcagaaacatcgccgtcggaaggcctgaagaggcgactcaccccgacacgttgaaggcggctttggctgngttcatctcaaccttcatcttcg

SEQ ID NO: 29324 - DNA, 163 bp, Glycine max
  Clone ID: 701061218H1
ttcggatgatggagagcaaggcaaatgaggagatgaatggcagtgagtggcatgtacctatactggccatgacagctgatgtgatccttgctacgtacgacaagtgcgtgaaatgtggcatggatggatacgttctcaaagccatttgaggaagagaatctgt

SEQ ID NO: 29325 - DNA, 162 bp, Glycine max
  unsure (1)..(162): unsure at all n locations; Clone ID: 701061219H1
tcaggtttgcctganattgtgcaaatggctcatgctaatgctttgatcgggttgttcttcatcgatagtgtctaattttggaggagttcatgcgggttcnaattcgagcagtgcaaatctttcactagggaaaagaggggaagcatgtggaagtactgtagt

SEQ ID NO: 29326 - DNA, 159 bp, Glycine max
  unsure (1)..(159): unsure at all n locations; Clone ID: 701061220H1
cgttacgggaattgcagattccgttcaagatccatatcgtgaaggatcatgacatgaaggagaggctttgcttggaggtggagaggctnggctgagtgctgttatnatggggagtagangcttggcgctgtgaggcgnggcagcgatgggaagctggga

SEQ ID NO: 29327 - DNA, 162 bp, Glycine max
  unsure (1)..(162): unsure at all n locations; Clone ID: 701061221H1
cctctctgaattcctcttattcaggaatttggagagtattgatatatcaaggtaggataaaccagtagncaaggaagatatggagttttctctgattntcattgttagcancattatgctgcttttcagttcagcatttgccaaaactgctagtcctccctc

SEQ ID NO: 29328 - DNA, 162 bp, Glycine max
  unsure (1)..(162): unsure at all n locations; Clone ID: 701061222H1
ctagtttatcgtgaggngaatatgaagttgtttgtnttctttgttgctgcagtagttttggtagcatggccatgccatggcgcaggctaccaaaggttccctctccgaatgaaaactggctatggtgagcgttcttcggaggtaaaatgcgcaagttttagg

SEQ ID NO: 29329 - DNA, 164 bp, Glycine max
  unsure (1)..(164): unsure at all n locations; Clone ID: 701061223H1
tgtatcagaggccattcatgaaggggaaactttacattcacttcactgtggagtttccagattctctaaaccctncatcaagttaaggccttggaggctgttctgccaccaaagccttcttcacaattgacagacatggagctggatgaatgtgaggaaactac

SEQ ID NO: 29330 - DNA, 168 bp, Glycine max
  unsure (1)..(168): unsure at all n locations; Clone ID: 701061225H1
caatacaaagaaacgagataaaaaaaagaaacaaaaaaaaaactccctaaaaaaccaantcattaaaatatccaattccaatatcngaaaacagnggaaacatgtcncngtttgnaccccngttgtngaaccanagggaccccttngacnatttccgngccttactgg

SEQ ID NO: 29331 - DNA, 159 bp, Glycine max
  unsure (1)..(159): unsure at all n locations; Clone ID: 701061228H1
ttccacttgtaatcgtaaangctttgctagaagaagagacaaagtgtgtctgtgngtgtgaganagagagnaatggctggctcgtgggcacgncgttctctgattgttctagncatcatttccttncggatgtactatttgncgatttccattgctaag

SEQ ID NO: 29332 - DNA, 166 bp, Glycine max
  Clone ID: 701061229H1
caaatggtcgtccatttcctcctctatttaacttcaaacaggaattatctgaagcatctccagtgcttgttaacaaattgatacctgaccacgtgaagcggcaaatagggctgcaatttgttcctccagcaggatcatgatgatgagctttaggggggctttagtg

SEQ ID NO: 29333 - DNA, 167 bp, Glycine max
  unsure (1)..(167): unsure at all n locations; Clone ID: 701061230H1
ttccattcgttcaccgccccaatctctgcagcgccttcgatctagaaaacatgactaagagaacaaagaaggctggcattgttggaaancacggtacccgttatggtgccagtctgcgaaagcagattaagaagatggaagttagtcagcacagcaaatttttctgt

SEQ ID NO: 29334 - DNA, 169 bp, Glycine max
  unsure (1)..(169): unsure at all n locations; Clone ID: 701061231H1
tttttcgcgtcacataaacaaaaaanaatnaactggggagaagcatgttgttgatgttgggactatgcttcctattgttctctgcatttccacttgcgttctctgagagatgccacccacaagacaagaaagcgttgctccaactccagaaggacctcggcaaccctta

SEQ ID NO: 29335 - DNA, 170 bp, Glycine max
  Clone ID: 701061232H1
ttttacactcttttcttcttctcgttgttgcttcgctgttgaatcatggatcagaaggtcgatttcagcgctccccattccatgggaaccactatccatcggcgttacttacaacggcggtgtcgttctcggagccgactctcgaaccagcaccggagtgtatgttgcca

SEQ ID NO: 29336 - DNA, 136 bp, Glycine max
  unsure (1)..(136): unsure at all n locations; Clone ID: 701061233H1
ttcgagccgtgtctatgtctttcttactctcanntctctcannnctttctctctcttctctantttctaacntcgaagcaagaaatggactctaacagcgtcgtttcttggcngaggttgccggaaaacatcgacg

SEQ ID NO: 29337 - DNA, 162 bp, Glycine max
  Clone ID: 701061234H1
agtttgttgtgagctataagctagtttatcgtgaggagaatatgaagttgtttgttttctttgttgctgcagtagttttggtagcatggccatgccatggcgcaggctaccaaaggttccctctccgaatgaaaactggctatggtgagcgttcttcggagg

SEQ ID NO: 29338 - DNA, 162 bp, Glycine max
  unsure (1)..(162): unsure at all n locations; Clone ID: 701061236H1
ctacattanttgcaagantggcanttcgttgcttggtgatgtccctttctgttctctncactcttggtcttgcgagaccaagccatgccagagacgnagatttttggcatgctgtttggccaaacantcccattccaagttcattgcgagaccttctaaagc

SEQ ID NO: 29339 - DNA, 110 bp, Glycine max
  unsure (1)..(110): unsure at all n locations; Clone ID: 701061237H1
gtgtnttcncgggtgtggttcacttcactgttgantcnnggcacgctgtggtggaggaactagcggagtttggtgccanagtgtaacacttgannnnccaggaanngaat

SEQ ID NO: 29340 - DNA, 162 bp, Glycine max
  unsure (1)..(162): unsure at all n locations; Clone ID: 701061238H1
ccagcagcagtaggnaaaaatgtcgagttccatgatgacgctctcaaggaggctctattgntctctggcttcgaanccccaatgcatatcgccacttctccaccgatcaccttttcgactcggacgaggncgacncagcacccgnnncacccgcacccgacg

SEQ ID NO: 29341 - DNA, 145 bp, Glycine max
  unsure (1)..(145): unsure at all n locations; Clone ID: 701061239H1
aaaaaatttctagagcgagaaagtgagaggagagagaaagnngctgatcctccatcgcctcccaccaaggaacgcgaaaactttgtctacaccgccaagctcgccgaacaagccgaacgctatgaagaaatggtggaagcaatga

SEQ ID NO: 29342 - DNA, 164 bp, Glycine max
  unsure (1)..(164): unsure at all n locations; Clone ID: 701061242H1
ccttcttcaaccccttttctttctctctctgtctttcgcactttcattctctcttaaaaatctaaatcccttttggtcttcatctttacntctaanccaggtatggcttcnanacgcatcctganggngctcaaggatttgcnganggntcctcctacgtnatg

SEQ ID NO: 29343 - DNA, 164 bp, Glycine max
  Clone ID: 701061243H1
caatttcactccctcctacgccatcaatattcctcgccaggttaatgtttggaggtgatgccctcggggatttgaacctaaaaatggtagaggttgctagacaggttggagctgcatcaaaatttactcaaaaagaaggatttgtgatactacctattgaacct

SEQ ID NO: 29344 - DNA, 163 bp, Glycine max
  unsure (1)..(163): unsure at all n locations; Clone ID: 701061244H1
cgagangcgttctatatattattgnattgacaatgaggcctgctcttnctttgcttcctcttctatttgctttcttgttagctgccactacggaatcaagaaaagatccaggggaatattggaaaatgatcatgaaagatcaggaaatgccaganggacttca

SEQ ID NO: 29345 - DNA, 165 bp, Glycine max
  Clone ID: 701061245H1
cagagaagcactcatcattcttcgtttgtctaagatccgccttctctgaattgtaaaaatgtcgctcggagaaactgcttgttcatacgcagctctcatccttcatgaagatggaatcagtgtaactgccgacaagatcagcaccttgttggaaactgcaaaggt

SEQ ID NO: 29346 - DNA, 167 bp, Glycine max
  Clone ID: 701061247H1
ttgagaatacatattgtacacactcactgctctgtatctctatcactaaatttcaaaatttgctctctctaatcttaaacttgattgcatcagtgaggaagaatggaacgttcaattccagaggctgcagaatgtgatctctccattccaattccaaggggtggacc

SEQ ID NO: 29347 - DNA, 170 bp, Glycine max
  unsure (1)..(170): unsure at all n locations; Clone ID: 701061248H1
aaanaacagaagatggcagganagaaaatcccagatgtgtngctgaattcaggacacaaaatgccagttataggcatgggnacttcagtggagaatcgtccatcaaatgagacccttgcttctatctatgttgaagccattgaggtgggttaccgtcattttgacactgc

SEQ ID NO: 29348 - DNA, 131 bp, Glycine max
  unsure (1)..(131): unsure at all n locations; Clone ID: 701061249H1
gttctattctcttctctttctccaccncttcacctcttctctcccctgtcttcttcttaattagcntctctcattgcgtgcaccaccccaaaaaaaatatacatatacatatatacataaaanaaacngng

SEQ ID NO: 29349 - DNA, 160 bp, Glycine max
  Clone ID: 701061250H1
aaggcaagatgtcgaagagaggacgcggtggttcggcggggaacaagttccggatgtcgctgggtctgccggtggcggcgacggtgaactgcgccgacaatacgggggcgaagaacctctacatcatatcggtgaaagggatcaaagggcgtttgaaccg

SEQ ID NO: 29350 - DNA, 160 bp, Glycine max
  Clone ID: 701061251H1
tttgttgtgagctataagctagtttatcgtgaggagaatatgaagttgtttgttcttctttgttgctgcagtagttttggtagcatggccatgccatggcgcaggctaccaaaggttccctctccgaatgaaaactggctatggtgagcgttcttcggag

SEQ ID NO: 29351 - DNA, 163 bp, Glycine max
  unsure (1)..(163): unsure at all n locations; Clone ID: 701061252H1
acaactcacacatccactacncatccaacacnccaaaagtcttagctacctagctagtagcaatttgtgcctcaaattgaaactagctttagatatggctaattctcttaatagccacttttttgtagtagtatttntnctttctctcttggccttttctagg

SEQ ID NO: 29352 - DNA, 126 bp, Glycine max
  unsure (1)..(126): unsure at all n locations; Clone ID: 701061253H1
tnntgatttaagncataatagccacaanagagagagantcnaganggnatgagaanatgaatgaatgatctccatnatcattacacttcnncncgagatgtgncaatcctntactactagggattt

SEQ ID NO: 29353 - DNA, 145 bp, Glycine max
  unsure (1)..(145): unsure at all n locations; Clone ID: 701061255H1
attctagccaaggaagcagagaaaancaacctacaagctaaatcaaangaaaaccacgaggcagagatcaggctattgaggaagagtatggcattcaaagnaactccaatgccaagtttctataaggaaccacctcccaaagttg

SEQ ID NO: 29354 - DNA, 164 bp, Glycine max
  Clone ID: 701061256H1
ctgtctatctctcgttgtagcgtaggcaagcagttgaatttggaaaacaagatgtctcaccgcaagttccgagcacccgagacacggttcccttggctttctcccaaggaagcgagcttctcgtcatcgcggaaaggtgaaggctttcccaaaagacaatccta

SEQ ID NO: 29355 - DNA, 165 bp, Glycine max
  unsure (1)..(165): unsure at all n locations; Clone ID: 701061257H1
cttttttctctctcttggcaaaacctaattttcatttcttccctcanatttcaaaatgcgtganatccttcacatccagggtggccaatgcggcaaccagatcggcgccaagttctgggaggtggtttgcgcggagcacgggatcgaccctaccggaaggtacgg

SEQ ID NO: 29356 - DNA, 162 bp, Glycine max
  Clone ID: 701061258H1
aaacataataatgggttcacaaaattgtatggataggaagcactatgttctggtgcatggggcatgccatggagcttggtgttggtataagctcaagccacgcttggaatctgcaggccataaggtcacagtacttgaccttgcagcttctggaaccaacat

SEQ ID NO: 29357 - DNA, 164 bp, Glycine max
  unsure (1)..(164): unsure at all n locations; Clone ID: 701061259H1
aagcgcagggtccgacccgatacctcatctttcgccctagtnctcgttttcagagctgcaaaggaatcgacacagaaagtgattaaaaaagggagaagatatctttggtgtcaaacgctccctgattcttccgctgtggactccacttctctactgttccacct

SEQ ID NO: 29358 - DNA, 163 bp, Glycine max
  unsure (1)..(163): unsure at all n locations; Clone ID: 701061260H1
tnagcacacgtgttcaaggctgatattccagggctgaagaaggaggaagtgaagctggagattcaagatgacagaattctttcagataagtggagagaggaacgttgagaaggaagacaagaacgacacgtggcaccgcgtggagcgaacagtggtaagttca

SEQ ID NO: 29359 - DNA, 165 bp, Glycine max
  Clone ID: 701061261H1
cttgacaaaatggccgtaacagaagcaaacctaaagaaggctggcttccacacatgggagcagttaattctcaaggatccacatcttatcactccaaatgcactttcatacaaatcagcaatgagagagaatctgttgaggcagggatacagaattgttggaatc

SEQ ID NO: 29360 - DNA, 169 bp, Glycine max
  unsure (1)..(169): unsure at all n locations; Clone ID: 701061262H1
gtttctttcttcaacgtttccatcatacacagatccnaatcctctctcaagccctaatttcccctcatttccatggccacagaagagnnanactgtncgcggtggaacccgctcccgaacctgcctccgccgatcctcccccggaggagaaggaggagaccaaacctga

SEQ ID NO: 29361 - DNA, 168 bp, Glycine max
  Clone ID: 701061263H1
cagtagagaagcactcttcgttcttcgactgtctacgatctgctttctctgaattgtgaaaatgtcgctcggagaaactgcttgttcatacgcagctctcatccttcatgaagatggaattagtgtaactgctgacaagatcagcaccttgttgaaaactgcaaaggt

SEQ ID NO: 29362 - DNA, 168 bp, Glycine max
  Clone ID: 701061264H1
ggcgttttgcgaaaagggttcgtttgattccgcattatcagtgtttcaagagattgaggagaagggtttgagccctgattccatcacgttcaacactttgcttgatgggttgtattcaaagggtcgttttgaggagggtgagaaagtgtgggagcaaatgggtgtgaa

SEQ ID NO: 29363 - DNA, 159 bp, Glycine max
  Clone ID: 701061266H1
tcatattcctctctcattctcactataaacacaaaacccttcccatcctaattaaggtgaaaatgaaggcatcacccattgcttggttcactttggtggttgtgtttcttgtggctgaagttcaagtttcaatggcagtgacatgcagcccagtgcagc

SEQ ID NO: 29364 - DNA, 159 bp, Glycine max
  unsure (1)..(159): unsure at all n locations; Clone ID: 701061267H1
tanagaggacncaattcnttctctagttcaaggtctannggngaagatctctatggctgttgcagttaangtttctcggtttgaaggcatanctntggtcgcntcctgatccaattctaggagtttctgaggcatttaaggtggacaatagtgatntca

SEQ ID NO: 29365 - DNA, 113 bp, Glycine max
  unsure (1)..(113): unsure at all n locations; Clone ID: 701061268H1
accaactgaaacatncttccatgcatctacgaacgaccataaattttctctctttccctttccctctctctgtctgtgttttttcttaaaaaattctgtgagaggcatagngg

SEQ ID NO: 29366 - DNA, 160 bp, Glycine max
  unsure (1)..(160): unsure at all n locations; Clone ID: 701061269H1
gtttctttcttcaacgtttccatcatacacagatccnaatcctctctcaagccctaatttcccctcatttccatggccacagaaganngncactgtcgcggtggaanccgctcccgaacctgcctccgccgatcctcccccggaggagaaggaggagacc

SEQ ID NO: 29367 - DNA, 156 bp, Glycine max
  unsure (1)..(156): unsure at all n locations; Clone ID: 701061270H1
gtccctccttcctctgccttataattcttgtgacccttttngctggtagcattgaaagtgcaccagcaaacgtgaagccaagccattatgctgcacccttcaataggagtgtttttccttctggttttctatttggaataggctctgcagcttacc

SEQ ID NO: 29368 - DNA, 160 bp, Glycine max
  unsure (1)..(160): unsure at all n locations; Clone ID: 701061271H1
cgcgaacgtagaaaagaagtgaacgtaagcgtcacattatttattatcctttttcctttcaactttcaaaaanaagnactcatgttttctaacaaatctattggattatgaattttttattactattgtgattgtnacacaaatctcggcagtntaccga

SEQ ID NO: 29369 - DNA, 162 bp, Glycine max
  Clone ID: 701061273H1
gctaaaggagttgaaagccaaggcgcaacagaagggaagctttggaggttctgggctcaagaaaagtggaaagaaataagggctctttatcatgattgtatgcattcaatattgagccctgtaattacagttgctaccatgataacttctcttattattgtg

SEQ ID NO: 29370 - DNA, 92 bp, Glycine max
  Clone ID: 701061274H1
tgattgaagaagatgccgatcagaaacatcgccatcggaaggcctgaagaggctactcaccccgacacgttgaaggcggggttggctgagtt

SEQ ID NO: 29371 - DNA, 161 bp, Glycine max
  Clone ID: 701061275H1
tgcagactcaggaatattttctcccggataagatggtacttcctttggcagatgaggccattgatcctcatatgcgtgctccacttgcttctgcctttgatgcatatttacctccaggtgtgaggcagataacacccttcgaaagatttaatgtgcaaccc

SEQ ID NO: 29372 - DNA, 161 bp, Glycine max
  unsure (1)..(161): unsure at all n locations; Clone ID: 701061276H1
ctagaaacagtgtgatgaaaatgaaggtccttgttttcttcgttgctacaattttngtagcatggcaatgccatgcgtacgatatgttccctctccgaatgaacactggctatggtgcccgtactccggaggtgaaatgcgcaagttggaggcttgctgtg

SEQ ID NO: 29373 - DNA, 162 bp, Glycine max
  Clone ID: 701061277H1
ctgtgtatttccctacctctcccttcaagatgcagatcttcgtcaagaccctcaccggcaagaccatcacccttgaggtggaaagctctgacaccatcgacaacgtcaaggccaagatccaggacaaggaaggaatccccccggaccagcaacgtctcattt

SEQ ID NO: 29374 - DNA, 164 bp, Glycine max
  unsure (1)..(164): unsure at all n locations; Clone ID: 701061278H1
cgccaagcaaaaggcggagaaactaattgagcttctgcggcaaccaaggtccggcaacggcgctgctcgaagtacatcagaagtgntggcgtagacgccagcagtaataaatttattcaccttggtggtgtctcaccgtgcgtgagtgtgtacaaacaccacgt

SEQ ID NO: 29375 - DNA, 165 bp, Glycine max
  unsure (1)..(165): unsure at all n locations; Clone ID: 701061279H1
gtctctagctgtaacgccgattatttatttattttaattattatcatctcatctcacccaattcaattcacgtaccttggaatcgattcttagggtttctgactcctttatgtgtttgtctcgcaattgatcatcgcaaccacaangtccggtcccctcgatcgt

SEQ ID NO: 29376 - DNA, 167 bp, Glycine max
  Clone ID: 701061280H1
accaaattgatacacaagatcactgtttttttagagagagattgagagaggatgtttggttcaaagaaaactcctctgagagatgctaaacctagttctgttggccatgcccataacccctttgattctgatgaagagacaaacgataaaaagtataattccctcta

SEQ ID NO: 29377 - DNA, 171 bp, Glycine max
  unsure (1)..(171): unsure at all n locations; Clone ID: 701061281H1
caaccanaaagacaacaacctctgncaatctttaatgggtgtgattgatttctacaacactggtgctttgtgctgggttaagtccaacgccaatctgaagcagcaagtgggtttggcaccaagacccatttgttcatttgaggggaataatcagaggaagtttgtggcaat

SEQ ID NO: 29378 - DNA, 158 bp, Glycine max
  unsure (1)..(158): unsure at all n locations; Clone ID: 701061282H1
gtgtttttnttccctctctctttgtagcacaacaacatagtcattagttaatacttaatagcctctgttttcttcttgctaccaaaatctcacnccttcattacatcatcattcataaatggctcaccccacctcatcatcaggtcaatccaatgatc

SEQ ID NO: 29379 - DNA, 155 bp, Glycine max
  Clone ID: 701061283H1
gaatatagtagttgtgtgattcttttctgtcattaaaaccaaattgatgctcataatattgtgaagagattgaggtgggacaagagtcaatatacttttttttgatttagggttctttagagctagacaaagactccactgagtttggaatggga

SEQ ID NO: 29380 - DNA, 158 bp, Glycine max
  unsure (1)..(158): unsure at all n locations; Clone ID: 701061284H1
ctcttccttcttcaagatncccccaatcaagttcacaaagctcttcatcaatggggaatttgttgattccctttcagggagggagtttgaaacaagagaccctaggacaggggaggtgattacaagaatcgcagaggncagcaaaagaagacgttnat

SEQ ID NO: 29381 - DNA, 160 bp, Glycine max
  unsure (1)..(160): unsure at all n locations; Clone ID: 701061286H1
gatcaatggacttgttcggagagatcgacgagcaggtatcgtcgatggcaatggacgtggacgacgtcgacccttcttcgagatcttcgccgngggcgtcatcgccgccgacaacaaactcgccgacgccgatttcttcaacaatttccaagacgatttc

SEQ ID NO: 29382 - DNA, 161 bp, Glycine max
  unsure (1)..(161): unsure at all n locations; Clone ID: 701061288H1
cctttcttcacttcccttcacatggcagctcttgtgaaaccaatttccaatgtcactcccaaatttgtgcagcagccccagaatgggctcatcacactcctccaaattcagcaccatantaagaatgtctgccactgccaccccaccaccatccacctcca

SEQ ID NO: 29383 - DNA, 160 bp, Glycine max
  unsure (1)..(160): unsure at all n locations; Clone ID: 701061289H1
cagaaatggcggcggctacggcaatttctcagcttggctgcttctccgccgtccaccgcagctcacaccttccggcggcgctcgcttctattcccntgccctcgctccaagttatcagttgttatgagtctggagaggcatgacacagatactgctgggt

SEQ ID NO: 29384 - DNA, 160 bp, Glycine max
  Clone ID: 701061290H1
cttagccatatctttacttcccaaaacttgctctacaatgagtttccttcgttcttttgcaagaaacaaggatatatcaaaagtaggacgcagaggtatccattgcatgcagaaactatgtgcagaaaaaatatctcctgattcactagagaaggcccaa

SEQ ID NO: 29385 - DNA, 217 bp, Glycine max
  unsure (1)..(217): unsure at all n locations; Clone ID: 701061291H1
gntattcanaggaggatcgaaaagattcccatnaaaaaggggattcagnaancaaagaacacagttcagnagcaccaaaaagttttggcttgactttgttaaaaatgnaggggcactttgcccattgttccttaagggtgcacatttgcaccgttgtnctaaggattncaggaaaggganaactnanaggcaatttccctacccatggcagnccctc

SEQ ID NO: 29386 - DNA, 102 bp, Glycine max
  unsure (1)..(102): unsure at all n locations; Clone ID: 701061292H1
gaaattagcgtgaaaaatgttgggtgtgttcagcagctccatagtgtcgcccccggaggagctcgttgccgccggctnccgtacaccgttcgccgaagatga

SEQ ID NO: 29387 - DNA, 161 bp, Glycine max
  Clone ID: 701061293H1
gcagcttctcaagtggagcaaaagaatagcaagcagcaggttgatgctcatggaacatcttataaaagtttagaaggtacaagtataggacaatcatcagcttcccaaaaaaagccaattgttaagtcgcatttagaccaaagaaagcttatggagcaagg

SEQ ID NO: 29388 - DNA, 163 bp, Glycine max
  Clone ID: 701061294H1
cagacagcagcagcaacaacaaacaaactctttctggattcagtttttgatgtgaaaatggcagtgactcttacatcaacacttcttctggctttgctatttgctgcttcagcttttgctgctcttcagcctagagtacctgaagcttacctccaaaatggga

SEQ ID NO: 29389 - DNA, 164 bp, Glycine max
  unsure (1)..(164): unsure at all n locations; Clone ID: 701061295H1
gtcgacgccactgaatcactcaagttttatgctgcagacagcttgatctcctacgcgagtntcggcagatcgtggcgattgtttccgaagtagcgaanagagttttaagaagaaagggatgcacgctcctgcgtggaggaagcgcgattacatgctcgcgaagt

SEQ ID NO: 29390 - DNA, 293 bp, Glycine max
  unsure (1)..(293): unsure at all n locations; Clone ID: 701061302H1
ttttgaacaagcttctcgcttccctagcttagcacctacatcacagatctttaacgataaaataaaaatggatccaaacgcggtgaagtccactcttccaatctggcgtttggaaacgtaatggcagcagtgcccgtgatatcagaaggaattgcttgctcaagagnagactccagggatcaagtttcagtacatgagngggtgacttgacgattaattggatgaanctggagtnngaaaattnccngcagtaaggatngcnngcnttaagaaagaagcagagaacgggaggt

SEQ ID NO: 29391 - DNA, 293 bp, Glycine max
  Clone ID: 701061303H1
cttcaagaaagccaaatctgttttaatcggcaaggttgactgtgatgagcacaagagtttgtgcagcaaatatggagtctctgggtacccaacattcagtggtttccaaaaggatctcttgaacccaaaaagtatgaagggccacgcactgctgattcacttgctgagtttgtaaatacggaaggaggaacaaatgtgaagattgctacagctccttccaatgtagtggtgcttacatctgaaaattttaatgaggttgtcttagatgaaaccaaagatgtcttggttgagtt

SEQ ID NO: 29392 - DNA, 285 bp, Glycine max
  unsure (1)..(285): unsure at all n locations; Clone ID: 701061304H1
gnattttctgctcctcaagaggaaagaaataaanagtcttggtatttgtgcacattcactgatgaaatccagccaaagttgcacgttcttggtttggtaactgatattataaagaatgtttgctggttccaaggctattccatctgaatttaatgaatgacagcntgcacttgttccaatgcaccaagttctctgaaacggtggctcttgtcctttttctttnatnattttnatgggcattcaaaaattgggtagtagtaattaacttggatctcatccaatctg

SEQ ID NO: 29393 - DNA, 287 bp, Glycine max
  Clone ID: 701061305H1
ctctctccaacaaccacaatggctctcttgggcgccgcctcctcctccgctcgcatcattccctccgtctcactctcttcctcttctcgctcttcttctcactctcatcctcttcttccaaactccaatgcttgcgctcctctcctcgtatttcgcacctctttctcaatcagcgaagagcggaggttcgcgtttcgagtggaggatacggaactgtgtcggcaccgaagtcagttgcgtctgatcctgatcagttgaagagcgccagagaagatatcaaggagctt

SEQ ID NO: 29394 - DNA, 284 bp, Glycine max
  Clone ID: 701061306H1
aaagtaatgcacagacacacaacacatcttccttaatttctccgtccatttccctcccataaataaatctttcatttccatctttcttggtgatccaatggcgacccttttccagggattgggagttgtgaacccatcattggcttcttcaaactccaacaagttccatcttccttctcgtacatccctctcagagaggaaagatggcatttttgtggtcagatctgatgcaacaagggtaagcagccaggttctgaaggctggagctcgtaagcatgaattgt

SEQ ID NO: 29395 - DNA, 98 bp, Glycine max
  unsure (1)..(98): unsure at all n locations; Clone ID: 701061307H1
tggctagtggtcgcnatttgaagancgctgtgaagcgtttttggttcctcttccctccatcttcttctacctctcattcctcaaccantannntancc

SEQ ID NO: 29396 - DNA, 282 bp, Glycine max
  unsure (1)..(282): unsure at all n locations; Clone ID: 701061308H1
ggcctcttcagtgatggcatctgtggccctcaaacctgcccctttcactgttgagaagtcctcagttagaggccttccctccctctcaagaactcctcttcattcagagttgtggccagtggtggcaagaagatcaagactgacaagccttatggaattaatggtggcatggctttgagggaaggagttgatgcatctggcaggaaaggaaagggaaagggcgtttaccagtttgtagacaaatacggtgctaatgtcgatggttacagtccnatctacgac

SEQ ID NO: 29397 - DNA, 275 bp, Glycine max
  unsure (1)..(275): unsure at all n locations; Clone ID: 701061310H1
tggggtgattcgtcttcatccttcatcggcattgcgcttcacaaattctcagtctacgacttggtggatttcattaagttgtgataacatgggaaaagactcaaagccaaaggagtccggaggcaagggaaagggganaccggctgcaagtggnagtgntgagaatgcttctangggannggaaaaggtgggaaaggtggagatgggcttggtacttgcacctatgtcaaagctaggcatatcctatgtgaganccaaggtaagatcatgaagct

SEQ ID NO: 29398 - DNA, 279 bp, Glycine max
  unsure (1)..(279): unsure at all n locations; Clone ID: 701061312H1
gcgtattgaaggaccgcaacaaaccaataatcttcaccatggcaaggcttgaccgtgtgaagaacatcacggggcttgtcgagtggtcgggaagaacgcacgcctccgcgagttggtgaacctggtggtggtggctggagacaggaggaaggngtcgaaggacttggaagagaaggccgagatgaagaagatgtatggcctcatcgagacctacaagttgaacggccaattcagatggatatcctctcagatgaaccgtgtgaggaacggagagctcta

SEQ ID NO: 29399 - DNA, 220 bp, Glycine max
  unsure (1)..(220): unsure at all n locations; Clone ID: 701061313H1
gctgctgcccttcagtccttcagcaatggtttacgtgaagtcacagaaatcaaaagcctacttcaagaggtatcaagtcaagttcaangaagaagagagggaaaaaccgattaccgtgccaggttcggttgatatcagcagacaataanaccgaatacgttgtgtcgttagacaagcatgtnaatatntgtacatgtggttgctgtggttnctgntcagt

SEQ ID NO: 29400 - DNA, 281 bp, Glycine max
  unsure (1)..(281): unsure at all n locations; Clone ID: 701061314H1
agcagaacgaggagaagcagaaggagcaaaagcaatggcgccgaagaagccgagaaccacgacaaggaaccctgatttggttaggggnttggcaagtattcgaggtcgcagatgtaccacaagaggggcatctgggccatcaaggccaaaaacggtggcgttttgccccgccacgatcccaagcccaagcccgaggccccggcccagaagccgcccaagttctaccccgcggacgatgttaagaagcccctcgtcaacaagcacaagcccaaacccgcgat

SEQ ID NO: 29401 - DNA, 279 bp, Glycine max
  unsure (1)..(279): unsure at all n locations; Clone ID: 701061315H1
atganagcaatangtccctccttcctctgccttataattcttgtgacccttttngctggtagcattgaaagtgcaccagcaaacgtgagccaagccattatgctgcacccttcaataggagtgtttttccttctggttttctatttggaataggctctgcagcttaccagatagaaggagcagcagctatagatggcagaggaccaagtatatgggacacctatactaaacagcanccagggaagatttgggatcatagtgatggaagtctagcaattg

SEQ ID NO: 29402 - DNA, 254 bp, Glycine max
  Clone ID: 701061316H1
caccatgtcacttgctgggaaaatcaccactgaaatcggggttcatgcaaccgctacaagtggttcaacctcttcgcaacacaactccatcatgttcaaaacctaactgatagagtgcatggaaccaagctgcatcaaggtgaagactggcatcacaacgagacagtcaagcactggacttataccatagatggtaaggttacaacatgtctggagagtattgaatccattgatgaccagagcaaaacaatcac

SEQ ID NO: 29403 - DNA, 288 bp, Glycine max
  unsure (1)..(288): unsure at all n locations; Clone ID: 701061318H1
acgaatcgaaaaaagaaagatcatggcgatggcaaacttggctcgacggaagggttacgccgtcgttttgtcgtcgaggtcgtcgctttgtctacaaggtggagggggttcgcgtccggatctgacgaaaacggacgtcgtggtcatcggcggcggtccggcggtacgtggcggccattaaagcggcgcactgggtctgaaaaccatttgcatcgaaaacgtggcattccggcggtaacttgcctcaagtcggatgcancccttccaaggcattttncnttcttccca

SEQ ID NO: 29404 - DNA, 111 bp, Glycine max
  unsure (1)..(111): unsure at all n locations; Clone ID: 701061319H1
gcagccaatattgtccaacactatacccacaagtngtgtccccaatatcactgttccatcnacaacannatcncnnanaaccataccttcancccattctcancaccccat

SEQ ID NO: 29405 - DNA, 286 bp, Glycine max
  unsure (1)..(286): unsure at all n locations; Clone ID: 701061320H1
gagtttgttgtgagctataagctagtttatcgtgaggagaatatgaagttgtttgttttctttgttgctgcagtagttttggtagcatggcangccatggcgcaggctaccaaaggttccctctccgaatganacctggctatggtgagcgttcttcggaggtaaaatgcgcaagttttaggcttgctgtggaagcacacaacatccgagcctttaaaaccattcctgaagagtgcgttgaaccancaaaggatacattaatggcgaacaatttagatcagactct

SEQ ID NO: 29406 - DNA, 284 bp, Glycine max
  unsure (1)..(284): unsure at all n locations; Clone ID: 701061321H1
gactccccacattcaccaaagctcaatctgaaagtctcaaaggttcatatgattttcttggtataaattattacacctncaaatttcgtggatatgctccaccaaccaccactaacaagacctatttcactgatatgctagccaaactttcttcgaccaggaatggtgtacccattggcacaccgactcctctgagctggctctttatctatccggagggaatttataagctcatgacatacataagggacaatacaataatccaccagtgtacattaccgaaa

SEQ ID NO: 29407 - DNA, 264 bp, Glycine max
  unsure (1)..(264): unsure at all n locations; Clone ID: 701061322H1
ggnaaganaganggagatgcatggcattggcctattgagagtgaaggaacatggtttcccacaatangccttacactgtagccaccctctttttctcgcattgttccttannnnnnnnnnnnnnnnnnnnnnnaccagaacaatcttcaccccgctccctccatccatcagattctacatccacctcccagccatttctcgcctcgccctccaacttttctcgcctctcctcctttcgccccacatctctcggcacatgaacca

SEQ ID NO: 29408 - DNA, 273 bp, Glycine max
  unsure (1)..(273): unsure at all n locations; Clone ID: 701061323H1
cttctcagcagcttcggctagggttcagaaacgaaanagggttcggtgttctnttcgcgatgagagccaagtggaagaagagcgtatgaggaggttgaagaggaagcgccgaaagatgagacagagatccaagtagtgcgttaaacctagtttgtttctgttgcttttacaattgcttatgttgtcgaatgggacacccagttgttagtggcactggtttctcctttttgatgtttgatacattttgttggattcaagtagtttatgttcgtc

SEQ ID NO: 29409 - DNA, 284 bp, Glycine max
  unsure (1)..(284): unsure at all n locations; Clone ID: 701061324H1
ttcacacagtaacttgggacaccaactcactctctcaccaacaaaacaaaatccaatggcgccgtctttcgcaatcaacggtggtttccccgcgccagantcactcctccttccgtnaccngncgnttnnttgccgtctacngcnangtccaanatanctgcatcgnccacganctccctctnccctccgttctcaaaaaccctttcatcatcgtcgacggtccccaaagctccgccgccggcaaccctgaggagatcgcgaantgttcccgaaactgttcggg

SEQ ID NO: 29410 - DNA, 278 bp, Glycine max
  unsure (1)..(278): unsure at all n locations; Clone ID: 701061325H1
cgacgtcgtctcccaaaggcgttgtccacngccaccgtggaacgtttattgttgcagtggactctcttattgattgggcggttccgaaaacccggtttatctctggacgcttccgatgttccacgctaacggctggagcttcccgtatgggattgctgccgtgggtggaactaatatctgtgtccgcaagttcgacgctgagattgtttactctctcataaaacgccatcacgtgactcacatgtgcggcgcgccggtggtgctcaacatgttaacca

SEQ ID NO: 29411 - DNA, 281 bp, Glycine max
  unsure (1)..(281): unsure at all n locations; Clone ID: 701061326H1
gttgatcgagataactagaaacagtgtgatgaaaatgaaggtccttgttttcttcgttgctacaattttngtagcatggcaatgccngcgtacgatatgttccctctccgaatgaacactggctatggtgcccgtactccggaggtgaaatgcgcaagttggaggcttgcngtggaagcaacacaaacntcnntgggcttgaagacantcctggangagtgccgttgaagcaacaaaaggataccnccangggggaccatatagatcagactccaaacagt

SEQ ID NO: 29412 - DNA, 280 bp, Glycine max
  unsure (1)..(280): unsure at all n locations; Clone ID: 701061327H1
ttgaatcacttggcatcgcttctcctctctcccaaganagaatcatcaatggcgattcggncacgaagacgatctcaaagacgagaagaccctcgacctctcgacgaggatgacatcgccctcctcaagacctacggtttgggaccttactccacaagcataaaaaaggcggagaaggaaatcaaagatatggccaagaaagtgaatgacttatgtggtataaaggagtctgatactggtttagctgcaccaagccagtgggatcttgtttctgataagg

SEQ ID NO: 29413 - DNA, 278 bp, Glycine max
  Clone ID: 701061328H1
tagataagccttcctctctgcagagtgcagagctttctctccccgttgcttcattcattctcaacaacaaaccaatcctttcttagaaatgagggggggcttgtggcaacttgggcaatcgatcactcgccgtcttgcccatggagataagaaggctgttgctcgtcgatgttttgcctcagaagctgagctgaaaaagacagtgtttcatgacttccatgttgctcatggtgggaagatggttccatttgctgggtggagcatgccaatccaataca

SEQ ID NO: 29414 - DNA, 279 bp, Glycine max
  unsure (1)..(279): unsure at all n locations; Clone ID: 701061329H1
ctgactcatggctnnagattgaactgaaaactgcacctgctgattttcgttttcctacnacaaatcaaaccagacattgtttcactcgtacatagagtttcacagatgcttggcagcaaagggtgaaaactctggtgaatgtgagagatttgctaaatattaccgctccctttgcccgggtgaatgggttgaaaggtggaatgaacagagggagagtgggacttttccaggacctctttgaaatcatgtggcattggatatccttctgaggcatgagaa

SEQ ID NO: 29415 - DNA, 286 bp, Glycine max
  unsure (1)..(286): unsure at all n locations; Clone ID: 701061332H1
canaaggctctctcacgcagtcgcagtgagtgaaaaggaaaaccctaattgcggtattctcagtgccttcgagagaaagaaaaaatggcaataatcttgttctccgtggcaccatgcgcgcccacaccgacgttgtgacggcgattgccactcccatcgacaactccgacatgatcgtcaccgcctcacgcgacaaatccatcatcctctggcatcttaccaaggaggacaagacttacggtgtcccccgccgccgcctcaccggccattctcattttgtccagga

SEQ ID NO: 29416 - DNA, 271 bp, Glycine max
  unsure (1)..(271): unsure at all n locations; Clone ID: 701061333H1
gtgaccacaaaacaacactctgcacgttgttcccaccaccaccataccttcttcactcactctcgggagcgtcgaaaagaaaaatgttcacattgccactcttcccaagtactgttaagacttcagccaccgcactcgatggagccaatggccactcactcacctaactccgtnccggcaacgctcctcttcgccacgtcactctangcgttaagcctantctcgtcgtantcgcgttaaaccgcatcgttaggctgtgatcggtcaanca

SEQ ID NO: 29417 - DNA, 287 bp, Glycine max
  unsure (1)..(287): unsure at all n locations; Clone ID: 701061336H1
gtctctccgcagcagccacacttcttcgccgtttcagctgaagagccatccgcaggtaagcaatggttaagcataataatgttatccccaagggcacttccggaaacactggcnaaactatgtgaagacttggnttaatcaaccagcccgaaagaccagaagacggttggctcggcagaagaaggctgtcaagattttccccaggcctactgctggatctctcaggcctattgttcatggccagactctggaatacaacatgaaagtcagagccgggagaggntttc

SEQ ID NO: 29418 - DNA, 284 bp, Glycine max
  Clone ID: 701061337H1
tgttgaggttttttgtagcagaattcagtgcggtgtgttgtagcagcgattagaaggaaggaggaaagatgaacacagacatcactgcacgacgaagccagagtacccagtcattgatcgcaaccctcctttcaccaaagtcgtcggcaacttcaacaccctcgactatctccgattcgtcacaatcaccggcgtttccgtcaccgtcggctacctctccgggattaagcctggaattaggggtccttcgatggtgacagggggtttgatcggtgtgatgggtg

SEQ ID NO: 29419 - DNA, 284 bp, Glycine max
  unsure (1)..(284): unsure at all n locations; Clone ID: 701061338H1
gcgntctctctntctgtctcctacgnttcgttttgccccntttgttgccctaatttcaaccatgcctcgccgtagctccngtngaagactgaccgtcctgctacctcgggcagctcctcgtcctgctccagtncaccatgntccttnctncagnccctgctcagagtggtggtggatctatgcttggtggcattggttnaaccatagctcaaggtagggcttntggcaccggaagtgcagtggcacacagggctgtggatncagtcatnggtcctcgtaccatt

SEQ ID NO: 29420 - DNA, 281 bp, Glycine max
  Clone ID: 701061339H1
ctcttattgttttcttcatatcttccttgtcactgcccgtgtgtcgccgccatggccaccgtcaccacccaagcctccgccgcaatttccggccatgtacctcgaaatcgaggtttttgaccggctcttccggtaaacttaaccgggaagtgactatgcggccaatggggtgccctccttctgcctctttcaaggttgaagccaagaagggagagtggttacctggcttggcctccccaacttacctcaatggcactcttcctggtgacaatggatttgac

SEQ ID NO: 29421 - DNA, 282 bp, Glycine max
  unsure (1)..(282): unsure at all n locations; Clone ID: 701061341H1
gggaagaaccaccactaccttatccatttccactcctcaccaagccnccaccatggcctcaaccaacgccctctcttcagcttccattcacgctctcccaaccgccagtctctgaccagaagagcgaaccacaacggaagagtaaattaccgtcaaccgaatagccgtttctccgtcaaagcctccgccaaagagattgcctttgaccagcattcccgctctgctatgcaggccggcattgacaagctcgccgacgccgtcgggctcactcttgggcccagg

SEQ ID NO: 29422 - DNA, 277 bp, Glycine max
  unsure (1)..(277): unsure at all n locations; Clone ID: 701061342H1
ggcagctccactcctcatggttattatggaaatcctgcatatggtgtcgggatgtcttacccaggaagtccaatggcaaactctgtgtatccacttccccagttggatctgcaagtcctgttaaggcacaatgaactggaatatgcgttnttgcntcngganntgaggaatttnggccgggggtcatgggacnnggcntgcagatannggnacattgntgaangtttngcctcctccctgttggngagtttnacnncnatnaaacaaatgttttnag

SEQ ID NO: 29423 - DNA, 278 bp, Glycine max
  unsure (1)..(278): unsure at all n locations; Clone ID: 701061343H1
ctccctcagaaaaattccttacacaactatatccattttcaggcagtgtaacttggattttctattttcttcaccatcagaatggctcatacaancctcatctaaaactcatgatcatcatcatggctttcatgccctcacctcttctttcatcatattcacaagaacctattcccaaagttcccacactctcatcttcaccagcaacattaacggatcctcctccatctccctcttcactatctcctttccaagagctgtccccagacattgctcca

SEQ ID NO: 29424 - DNA, 277 bp, Glycine max
  Clone ID: 701061345H1
tccaagagaaactatgcaaacaacgttgctgagtacaacactgttttgggttctctcactgcacaaagaaggaatttcttgctgaggatgtgtacgatgatatgatgcttgatggggtaaagcctacgcgtgacactttccattcccttgttgttggaaccatgaaaggagctagaatgcaagatgctttctacttcgtggaacaaatgaaaatcatgggtttgcttcctgatgttactttatacaactttctaatttcgacttgtgggaaatgcaa

SEQ ID NO: 29425 - DNA, 277 bp, Glycine max
  Clone ID: 701061346H1
agctaacaaatatcaaaaagatgtctctgattccaagtttcttcagtggcccaaggagcaacgtgtttgatcctttctcacttgagtgtgggatcccttcaaggattttcactttcccacttctgtttctgctgaaaattctgcatttgtgagcactcgggtggattggaaggagaccccagaagcacacgtgctcaaggcagatattccagggctgaagaaagaggaagtgaaggtgcagattgaagatgatagggttcttcagataagcggagag

SEQ ID NO: 29426 - DNA, 280 bp, Glycine max
  Clone ID: 701061348H1
atgaagagaagcaggattgtagtgggaggctttctgaagatagggaaagtgtcccacaaggtagttctgaagagagagaagtggataatcaagtggagctttgagggaaaatattaacggacaagaatttgattctgaagggcatcatgataacagcaaagctgaccgtagtcctagagaaatggagaaatcacatatagagccatcaaaaagtcctgatgatgatgacgacgacacaattgctgagatttctgatgatgtgcctctgagcaatggaaac

SEQ ID NO: 29427 - DNA, 291 bp, Glycine max
  unsure (1)..(291): unsure at all n locations; Clone ID: 701061349H1
gagtaaattaactatgaagcctaccctactattatccctttccttcctgcctctctttgctttcctggctntttcagaagatgttgaacaagtttggacataagtggcaaccccattttcccaggtggcacatattacattatgccatcaacttggggcgctgccggtggtggattgaanataggccgggacaggaattnaacttgcccagttatggtttgcaagattattcagaaatcttcgggggcacaccagtcaattcagantacctgggataagccctggaatcat

SEQ ID NO: 29428 - DNA, 296 bp, Glycine max
  unsure (1)..(296): unsure at all n locations; Clone ID: 701061350H1
cagctagcgggtnaaggtttttgcgccgcgccttatatcacaccgtcgtccgaaagcntcgttgccgtgaaaccctagaaagancacgacgagtaaatggaggtggancccgtggagccgcagtcgctgaagnaagctaaagcttcaagtctctgaagcgcgctctcgatctcttctctccccatccacggacaccttcgctantcccgatgcccgaaagcaagaaaataggcactaagccacaaggtgaacgtngagtatgntggantcaaaagcactgccatcaacctctcctc

SEQ ID NO: 29429 - DNA, 289 bp, Glycine max
  unsure (1)..(289): unsure at all n locations; Clone ID: 701061351H1
ctcgtgcctctagggttatcatatctccatttccatttcctctctctcngtttccaagaatcttaagctttgggaaagtcttacccaaccggagcgctgattaccagaaggccgttgagaaggcgaagaagaagctcagaggcttcatcgctgagaagagatgcgctctctaaatgctccgtttggcatggcactcntgtggaattacgccgtgagctcgaagacgggtggtccttcggaaccataaagcacccctccgaattcgnttcacgggntaaacaacggtctt

SEQ ID NO: 29430 - DNA, 285 bp, Glycine max
  Clone ID: 701061352H1
caaattctcttaattattttctttttcttgatgaaagcaagctaaaaaaccaggcatcaccttcatggtagtaatcatcatcaaaagcacacatgccaggtggaggagacagtccctatgatgaccctttcttgaattcttgttgctgctgctgccactgttttcttgctatctcatacattttcagtgctttccaaagatgcatccttttttttccttgttaccctctcttcaagtgctttgggtggaatgaatctgctcctagatatcaacatcatcacatcc

SEQ ID NO: 29431 - DNA, 282 bp, Glycine max
  unsure (1)..(282): unsure at all n locations; Clone ID: 701061355H1
cganaatcctcaattttctgagcagccaaacactctctctctgtctctcgaaaattctcagtttgcagagaaaatctgaatcatgtacgggcaancgtatgtcgacgatcaccttctgtgtgacatcgaaggtaaccacctcactcacgctgctatcatcggccaagacggcagcgtttgggctcagagtaccgacttccctcagttcaaacctgaggagataactgccatcatgaatgactttaatgagcctggatcacttgctccaactggattgtatct

SEQ ID NO: 29432 - DNA, 281 bp, Glycine max
  unsure (1)..(281): unsure at all n locations; Clone ID: 701061356H1
ctaaattctctgtctacttcaccaagcacttttggttgcagctttggttaatttccaatatggtgtttcctctcctatctatctttgtttactcaatcttgcagtggtggcaacccangcagaaaccttgccccctgaagtttactggaagtcgaagcttcccaccactccaatgccgaaagccattacagatatccttcacccagatttggcagaagacaaaagcacctctgtggccgtaggaaaggggggcgtaaacgttaacgcagggaaaacaaagc

SEQ ID NO: 29433 - DNA, 273 bp, Glycine max
  Clone ID: 701061357H1
ctctgtctcgtttacacatctctccaacctttcactttcgtttctcagttttattcgaatccctctctcaatctcctttccaaatgccagcgttgaggttgcacagcaaacaccaacaacagttccagaaaatgaaacaaccgaggtaagcaagacccaggaaacaaccccagtcactgaggctctgcaacagaacaaccagcagctgaggttctgcaacagaacaaccagccgctgaggctctgccccagaatcaaccacggagcaccaaag

SEQ ID NO: 29434 - DNA, 272 bp, Glycine max
  unsure (1)..(272): unsure at all n locations; Clone ID: 701061358H1
gccacatagagacacaatacagagtgagttgttgctccttcgccacaactctctgccaacatgggtatctccagagattctatgcaaagaggcgtgccactggtggcaagaagaaggctggaggnaaaagagaacntntgagcttggtcgccagcctgctaacactaagctgtcaagcaacnagacgtccaggnngatccgtgttagangtggaaatgtgaaatggcaggcttgagnttggtactggaaattatcctggggaatgaagctgt

SEQ ID NO: 29435 - DNA, 276 bp, Glycine max
  unsure (1)..(276): unsure at all n locations; Clone ID: 701061360H1
tcgagataactagaaacagtgtgatgaaaatgaaggtccttgttttcttcgttgctacaattttngtagcatggcaatgccatggtacgatatgttccctctccgaatgaacactggctatggtgcccgtactccggaggtgaaatgcgcaagttggaggcttgctgtggaagcacacaacatctttggctttgagaccattcctgaagagtgcgttgaagcaacaaaggaatacatccatggcgaacaatatagatcagactccaaaacagttaa

SEQ ID NO: 29436 - DNA, 281 bp, Glycine max
  unsure (1)..(281): unsure at all n locations; Clone ID: 701061362H1
ctcctttgacatgaaaggaatatgggaggctatggaagagtgttacagattgggcttagccaagtctattggtgttagcaacttcggcatcaaaaagctaagccagctcctggaaaatgcaaccatccctcctgctgtcaatcaggtggaaatgagcccagcatggcagcaggggaaactcnaagaattctgcaagcagaaaggaattcatgtgagtgcatngtcaccactaggagcttacaaaagtgctcaaggtacaaatgcagttatggagagcccaa

SEQ ID NO: 29437 - DNA, 281 bp, Glycine max
  unsure (1)..(281): unsure at all n locations; Clone ID: 701061364H1
ggagttccagtggcaaagactttccctgttcttgagggtaggggctactaggatantcattcgactagtagcatcnaatagtgggactnnctngancattcaacaaataaggccactgatacaattgatgttgcatatntggtntngaggccattaccatctnaagatggtgntgctatcagaagacttctcatgactgctgatggagcttcattaatcaaagcaatggtctcgaaggagggaaagtttttccgccaacaactctgcaagatcatagttga

SEQ ID NO: 29438 - DNA, 293 bp, Glycine max
  unsure (1)..(293): unsure at all n locations; Clone ID: 701061365H1
ancagcattacttttttcagccttctatattacggttgatatttggggtttgacattcttgttcttgcctttgaaatggattggcatgaatccatgcttgtttatgtcatggcagctgagggnatctttgctggattcattaatgggtggtattatggtgaccctccataacacgnggatcaattggatccaaaaccatgtctttnattaaggttgngcattcaacgagagtaggcatccggttgtatgtgatcttggcggagatcctattctgggctgtngttgcaaggcat

SEQ ID NO: 29439 - DNA, 100 bp, Glycine max
  unsure (1)..(100): unsure at all n locations; Clone ID: 701061366H1
gtgaactggctactggctgtcatcccntcatncatcgncttccagtgtctgtctacactacggatagagnnnttgtcacaccacagctaaagnggtggaa

SEQ ID NO: 29440 - DNA, 287 bp, Glycine max
  unsure (1)..(287): unsure at all n locations; Clone ID: 701061367H1
ctcattctctttcctctttcctttttccttagaagaatcgaaaacgtcttcaaaaaaccaagccanctattaatggctgtcgatnccttttccagaaagaacatcaaattcgggagtttgtggacgggaatggnaacgnagctgtcggtttgaagttgcataataaaccaagtaatgatggccttnaacgacagnttcnctagagattccgccggtttcnatttgaagagattcacttnccagcaggatgcacgggtccacatactaaagatgtttatagtattccg

SEQ ID NO: 29441 - DNA, 280 bp, Glycine max
  unsure (1)..(280): unsure at all n locations; Clone ID: 701061369H1
tgcacgagcagtactcaactatggaatccattgcttaacaggtaacagtaagactcagcacgcaacagttaaatctaatccagggaagcgantcacaaaccctcgttccatttccccttctcgaaggtttgtgactttcttcaagcaaagatcgcaattgcatttgtgggaatcggcgagaaaaatgcagggttggttctcggggcagagcagcgaggaggnggcgaacngacgtcgtcgttgctcgccgattggaatcctacgcatccgcccaatcctt

SEQ ID NO: 29442 - DNA, 279 bp, Glycine max
  Clone ID: 701061370H1
ttttcttcctctaaaccctaaacaactctttctcttcttccttcgctcgttgttctccctcgcgtagatcgacaatggcggagaagagacgtttgctttccaggctgagatcaaccagctcctcagtctcatcatcaacaccttctactccaacaaggagattttccttcgtgaactcatcagcaacgcctccgatgctttggacaagattcgatttgagagtttgacagataagagcaagctcgatgctcagccagagttgttcattcatattattcc

SEQ ID NO: 29443 - DNA, 277 bp, Glycine max
  Clone ID: 701061371H1
caccaccctattattacaagtctccacctccacctgaaaagtctccaactccatccccctattactacaagtctctgccatgtgataaggatgtgttgggtgacaaggtggagaaagttgtggtgtctgatcgtgttgtggattctccttgctgtctcgtgactggtgaatatgggtggacagccaacatggaaaggattatgaaagcacaggcattgagggacagcagcatggctggatacatgtcgagcaagaagaccatggagattaacctgag

SEQ ID NO: 29444 - DNA, 276 bp, Glycine max
  unsure (1)..(276): unsure at all n locations; Clone ID: 701061372H1
angctggantttnngagcttgataagattattggattcaagctctctcctgattgcttagaagtgcgggcgaggatgtttattgtcttaaggnttatggcagtgccataanagatatcagggcantgttaactttggaaccaaattatataacttcaaatganaagatctcagggaaatacttggttcatctccttagccatgtggtacagcanaagagtcaggctgaatgctggatgcnattatacgaaccatggncttctgtagatgatgttgg

SEQ ID NO: 29445 - DNA, 278 bp, Glycine max
  unsure (1)..(278): unsure at all n locations; Clone ID: 701061373H1
atcctctatatatagttctctggcaattaaggtctcatccaaataagcacaaatgggtagccagagttacttcaaggctttgatatttgccttatagcactaattggatcaactcaagcttcaattgcagcttggtttctatggccaaangttgtccaaaggcctgagcaaataattctgaagtacgttgttgagcntatccacaacgctccatcactagcagctgctctcataagatgcncttcccatgattgttttgtccatggttgtgatggatc

SEQ ID NO: 29446 - DNA, 276 bp, Glycine max
  unsure (1)..(276): unsure at all n locations; Clone ID: 701061374H1
gaagacacagagagcatagtaatacttactgagtgcttgcagttgctgcgtcgcaaggtaccggcggcgacggagagctatctctcaatttccgatcactgcattggttctgttgacgagggttttgttctacttgacttgcatacttgatggcgtcaagttgcagaagttgcagtccggcagcatgtcaagcatctcaaatttgtntccagtcgtggaantaataattacaggcaattgcnggnacagaacaagcaacacattccaggagnctcc

SEQ ID NO: 29447 - DNA, 276 bp, Glycine max
  unsure (1)..(276): unsure at all n locations; Clone ID: 701061375H1
cttctaaagcctctccctgcaggtgttgnaatcgatgaactccctangcnaattgntgatacacagtncccaanaacattcttctataaagannaccttcatccaggcaaaacnatganagtacnattcaccaagcgtccctatgcncaaccttatngtgtatatacatggttaacggatattaaagacacctctaaagaaggatatngttttgaagagatntgcatcaaganagaagcgtttganggagaagagaagttttgtgcaaaatcctgg

SEQ ID NO: 29448 - DNA, 187 bp, Glycine max
  unsure (1)..(187): unsure at all n locations; Clone ID: 701061376H1
gncagaannaaangaagaatggcttccgaaactcnaaangcaaaagccgttctaccatggncaacccgcgtttcaatttccttctctctaccctaacggacttttcacnccgctctancggcactgttantcnccgtctcatnaacttcctcgatcgcaaaacccaagccaacgccaaacccgttaa

SEQ ID NO: 29449 - DNA, 216 bp, Glycine max
  Clone ID: 701061378H1
tgattgaagaagatgccgatcagaacatcgccatcggaaggcctgaagaggctactcaccccgacacgttgaaggcggggttggctgagttcatctccaccttgatcttcgtgttcgccggttcaggttccggcatcgcctacaacaagctcaccgacaacggcgccgccactcccgccggcctcatctccgcttccatcgcccatgctttcgccc

SEQ ID NO: 29450 - DNA, 277 bp, Glycine max
  unsure (1)..(277): unsure at all n locations; Clone ID: 701061379H1
cccgctccctctccatcccatcacatagacaacagagattcncattattagcagatcggactcaancgatgaagttgaagccgcgtgntacaaaccagaataattgncgcatcatcaattagatcgagctgctagaaatgaaggatgaggacgggcttccgacgaccgccgccacgnagaangnnngcatggnttcgagtctgtntggncangggaggtacnaattctgggcnttnnggccntcttgcttctggcgttctggtccatgttcaccggc

SEQ ID NO: 29451 - DNA, 280 bp, Glycine max
  unsure (1)..(280): unsure at all n locations; Clone ID: 701061380H1
cccatctgcttctcactgatctccattcccattccatggcttccactgaatcatcccctntcaagaaaattcagattcaaagggagacactacatttgacgcatatgtggttggaaaagaggatgctcctggaattgttgtgattcaggagtggtggggtgtggattacgaaattaagaaccatgccgtgaagatttctcagcttggtagtgggtttaaagctcttattccagatttatacagaggncaaggttggtctggatgttgctgaagctcagca

SEQ ID NO: 29452 - DNA, 274 bp, Glycine max
  unsure (1)..(274): unsure at all n locations; Clone ID: 701061381H1
ctcactcgctcattcgctctcttcacaatttccagatctgaaatcanaatcgaaatcgaaaccgaagagagagaaaacgtgaaaccgagaggngagagagagagatgagggaaccatcgtcggtgggattcgaaggcaacggcgtcgnttctntcggcgccgcagctctcatcgagagctgnnagactacggccagaagagnttttggcctctggtacgactctcccggagaacgganttctcgtcaagccttgaattagncttgagattgccg

SEQ ID NO: 29453 - DNA, 290 bp, Glycine max
  unsure (1)..(290): unsure at all n locations; Clone ID: 701061382H1
tatgccccatggaaggtccttagttttctctctcttcatctcaaagtttcannnnnnnnnnnnnnnnnnnnnnnnnnnnnnnnnnnctgtctgtgctgttttttcagggtacaacaaaattgggtgctttcggttaaaactgtgatgtctccgccagtgctgagcataggggaggaggagggtanaagccatgtcactttgtgggtttctcatcaaaccacaagggaaagtgtgtggtctncaagagcttagnatttaaagagcgcaataccatgggattatctgattgt

SEQ ID NO: 29454 - DNA, 280 bp, Glycine max
  unsure (1)..(280): unsure at all n locations; Clone ID: 701061385H1
gantatctgagagtnagatacaganaagaaaaaggaaaccctagctggataggtcaaacatcatcatgtcggacgnagagcaccattcnagtccanggcngacgccggtncctccaanacctacnctcancnngccggtaccattcgcnagancggctacatcgtcatcaaaggacgcccctgcnaggntgtggaagtttcgacttccaaaactggaaagtncggtcacgccaagtgccactttgttgnaattgatattttcactgcnaagnnacttgag

SEQ ID NO: 29455 - DNA, 278 bp, Glycine max
  unsure (1)..(278): unsure at all n locations; Clone ID: 701061386H1
ttgaagatccctctgcaccccatggccttcgccttgtgatagaggactacccttatgctgttgatggacttgaaatatgggatgtattaagacatgggttcatgaatatgtctccttgtattacccaacanatgcagcagttcaacnagatactgaactacaagcatggtggaaggaagctgtggagaagggtcatggtgacttaanagaaaagccttggtggcctaaaatgcagacnactgaagatctcattcaatcatgctctattatcgtttggt

SEQ ID NO: 29456 - DNA, 278 bp, Glycine max
  unsure (1)..(278): unsure at all n locations; Clone ID: 701061387H1
cagatgtggcgcaccactttagacagcagcaccatgagagccctgcgccttcgttccttcctcttctcttcatcttcttcctcttctctncttgttgttcactcatcaacattnnnnnnnnnnnnnnnnnnnnnnnnnnnnttanganttngnctacaatcatctctcactcttnncttcttttcccccaacgacgcgcgtnttgttcaccgactcgcgcngcttnggctcccctgttccgggnngntttngtaccctccccaccctagactggaagg

SEQ ID NO: 29457 - DNA, 279 bp, Glycine max
  unsure (1)..(279): unsure at all n locations; Clone ID: 701061388H1
ctcatcacttactggaagccttgttgtgagtaagagaaaaggcttcctgcaccgagcacaccaacttgatacctctgattctttcttgcttagaattccacagaatatggaantncannnnatcaatcactccccacctttggaattcaagggtttgngcaaggaggaggnagactcattgctagggcaagtggaaatatggaggtacatgacatgcttcacggactccgtggccttgaaagctgtcatagagcttcgtatagcggncatactagaccg

SEQ ID NO: 29458 - DNA, 274 bp, Glycine max
  Clone ID: 701061389H1
gaaaagagttatttgtttacgatctcattagtcattacaatctgccaagtctctaatctaagctaacaaatatcaaaaagatgctctgattccaagtttcttcagtggcccaaggagcaacgtgtttgatcctttctcacttgacgtgtgggatcccttcaaggattttcactttcccacttctgtttctgctgaaaattctgcatttgtgagcactcgggtggattggaaggagaccccagaaggcacagtgctcaaggcagatattccaggg

SEQ ID NO: 29459 - DNA, 274 bp, Glycine max
  Clone ID: 701061390H1
ttcattcatctatggctacccttattgctcccagcaaccactctccccaagaagatgctgaagctctcagaaaggcttttgaggatggggggctgatgagaacactgtcatagtaattttgggtcatagaactgtgtatcagaggcagcaaatcagaagagtttatgaggaaatttaccaggaggatcttgtgaagcgcctagagtctgagatcaaaggagactttgagaaagccgtgtaccgatggatactggaacctgcagatcgtgatgct

SEQ ID NO: 29460 - DNA, 274 bp, Glycine max
  unsure (1)..(274): unsure at all n locations; Clone ID: 701061391H1
aacacaacaacactctctcttctcgctcttggcttttcgctcttcactcactctccattcattcatttccaccgttcatggatcngtaagcgtgtggggtaacacgcccttggcgacggtggatcccgagatccatgacctcatcgagaaggagaagcgccgtcaatgccgcggaatcgagctcatcgcctccgagaacttcacctccttcgccgtcatcgaggccctcggcagcgctctcacgaacaaatactccgagggcatgccgggcaac

SEQ ID NO: 29461 - DNA, 274 bp, Glycine max
  unsure (1)..(274): unsure at all n locations; Clone ID: 701061392H1
tcgagataactagaaacagtgtgatgaaaatgaaggtccttgttttcttcgttgctacaattttngtagcatggcaatgccagcgtacgatatgttccctctccgaatgaacactggctatggtgcccgtactccggaggtgaaatgcgcaagttggaggcttgctgtggaagcacacaacatctttggctttgagaccattcctgaagagtgcgttgaagcaacaaaggaatacatccatggcgaacaatatagatcagactccaaaacagtt

SEQ ID NO: 29462 - DNA, 276 bp, Glycine max
  unsure (1)..(276): unsure at all n locations; Clone ID: 701061393H1
cagcaacgtaaaggtgaagtttgccagaaacaagatgggaaggaaccattttcagcagcaacactgtgctgatgggagcatgtgatggagagtcagggtcagcaacagagctatgccttccaagaagagtcttggagccctgataacaactatggccacaaccacaagcaattcccaggcatgcnnnnnnnnnnnnnnnnnnnnnnnnnnnnnnnnnggcttggtgcttttgctgctgtggactctgacttctcaatgcaaaaacatcatcatggg

SEQ ID NO: 29463 - DNA, 277 bp, Glycine max
  Clone ID: 701061394H1
gactctatctctcttcgttttgttcttccttgcgctcctcctcgttcgttcgttctccctcgcgtagatcggcaatggcggagccgagacgtttgctttccaggctgagatcaaccagctcctcagtctcatcatcaacaccttctactccaacaaggaaatcttccttcgtgaactcatcagcaacgcctctgatgctttggacaagattagatttgagagtttgacggacaagagcaagctcgatgctcagccagagttgttcattcatattatt

SEQ ID NO: 29464 - DNA, 278 bp, Glycine max
  unsure (1)..(278): unsure at all n locations; Clone ID: 701061395H1
cactcntataatactctgtatcatttcatttcgataatcatccatagctactgaagaaaatggcaaccatctctgctgctatcaaaccccatcgatctcccgcgcaactcttgtgcaaaagcgggtctcatctcccgttcttggtttgccagcaatgggtaaggtgggaagagtgagttgctccatggaggaaaaaccttattctgtgaaggaaagcagctctagcatgttggggatgggggcatctctgatggcagctgccagcgctgcagccatgt

SEQ ID NO: 29465 - DNA, 280 bp, Glycine max
  unsure (1)..(280): unsure at all n locations; Clone ID: 701061396H1
ctctaatccgttatgagaagctgaaccttcctctgcacaatctccttcaaaaagcttctcatccatggcganaacgctcatttcgctcaatcgttcatcggcacaccgctcccctcactccctcgccaccacctccccgaccgcaccaggctcgtcgccaccanagtcctcgncagcctccacgaaattcccccaatccactccataanccgcaacattgacttcgccggaatcgtgnctagagccgaagggttntctacacgctcgcngatgctgnggt

SEQ ID NO: 29466 - DNA, 308 bp, Glycine max
  unsure (1)..(308): unsure at all n locations; Clone ID: 701061401H1
ttgcttcgattaggatcagncaccatgtatcttcagtttgacatanangataacggtgacanagttnacaccactangaaagattcgccgctagggntacntananaatctgctcatccagcccggttttcagctgatgataaatattcaaggcagagagttcttctgaagaagcgttttgngattggtaccgacccagcagccacctcncaaagtatngagtgatatagaagctctactttttgaagtngtctntngttccatgttnaagncnanaatttngggaacaagtgctggtgctggtgtaa

SEQ ID NO: 29467 - DNA, 301 bp, Glycine max
  Clone ID: 701061403H1
ctgaaagcactcagtagggtttgcggtttcagagtttgtgacgcacgcatccatggccaccaccaccaacgccgccgcagccccgccgcgccagcttctcccagaaggaagccgacatccagatgatgttagccgccgacgtccacctcggcaccaaaaactgcgacttccaaatggaacgttacatcttcaagcgccgcaacgacgggatttacattattaaccttgggaagacatgggagaagcttcagttagcagctagggttattgttgcaattgagaaccctcaggatatcattgt

SEQ ID NO: 29468 - DNA, 296 bp, Glycine max
  unsure (1)..(296): unsure at all n locations; Clone ID: 701061404H1
ctttgttttgtgctttagataaaagttctgccaaatcaagaggggttttaagatcatagtgtgtgttttgcaanaatggctaagttctttgctgctatgatcttggcactctttgccatttccatacttcaaacagtggtaatggctgctaatgaacaaggaggccacttgtatgacaacaagagcaaatatggaagtggaagtgtcaagagttaccantgcccatcacaatgctcgaggagatgtagccagacccaataccanaagccctgcatgttttnctgtcagaagtgctg

SEQ ID NO: 29469 - DNA, 294 bp, Glycine max
  unsure (1)..(294): unsure at all n locations; Clone ID: 701061405H1
ctgnaacacgccacactcttcttaccatgggcctcctcgancacttgtgggatgacaccgtcgccggtcctcgcccggagaacggccttggcaagctccgaaagcaccacaccttcgctttccgatctgcctcccgcaagggtacgcatgcgcatgcccttgctgaacttaatttcccaaattcattttagttattcnnnnnnnnnnnnnnnnnnnnnnnnnnnnnnccgcagcaagaattagttcttatgatctcacgcgatcataaaacgaagcaagatttgtgaggttttt

SEQ ID NO: 29470 - DNA, 289 bp, Glycine max
  Clone ID: 701061406H1
gcccttcatcagagataacttgacaaataaaatcaccatgtctatcatcccaaacttgttcggtggtagacgaagcaacgtcttcgacccattctctctggacgtatgggaccctttcgaggggtttcctttttccacaggtcacgtgccttcctctggtggggaaagcagtgccatagccaacactcgcgtggactggaaggagactccggcggctcacgtgttcaacgttgatcttcccgggttgaagaaggaggaagtgaaggttgaagttgaagatgggagggtg

SEQ ID NO: 29471 - DNA, 290 bp, Glycine max
  unsure (1)..(290): unsure at all n locations; Clone ID: 701061407H1
aacttatcagatatataaaattcttgcacaaaaagangcaacgcaaggntgcagaatactacaagaaacaagagaggctccttgaagggtataatgacatggatacaatgactgaaactggttgttttccaggaagtctcactgaggatgaaatgaagcaattagcaagaagtgagagcctggcagttaatgtgtcaaatgcagctaacttggtgctatttgcagcaaaggtttatacttccattgagagcagatcattagcagtcattgcttccactatggattctctc

SEQ ID NO: 29472 - DNA, 119 bp, Glycine max
  unsure (1)..(119): unsure at all n locations; Clone ID: 701061408H1
cttgggacggaagtgttcatggtattttgatgcattgagcaattccnggtngtattgtataaataagtgatatagactatttctataaaccaaatgtactcgaaaatcacaagattttg

SEQ ID NO: 29473 - DNA, 289 bp, Glycine max
  unsure (1)..(289): unsure at all n locations; Clone ID: 701061409H1
ancaattccttccacacccttgagaaannccaaaggaaatgggttctctggaagcaatcaagaagccccatgccgtgtgcgttccattccctgcacaaggccatataaacccaatgctgaaactagcaaaactccttcacttcaaaggctttcacataacctttgtcaacactgagtacaaccacaaacgccttctcaaagcgagaggccctgattcccttaatggtctctcttcatttcgttttgagaccctcgccgacgggcttccccagcctgacattgaaggcac

SEQ ID NO: 29474 - DNA, 285 bp, Glycine max
  unsure (1)..(285): unsure at all n locations; Clone ID: 701061410H1
cggagtnaagcagcagagggaggagcggcattaaaaatgcagatcttcgtgaaangcctaacggggaagaccataaccctcgaggtcgaaagcagcgacaccattgacaatgtcaaggctaagattcaagacaaggaaggcatccctccggatcagcagcgtttgattttcgccggaaagcaacttgaagatggaaggaccttggccgattacaacatccagaaggaatcaacccttcaccttgtcctcaggcttcgtggtggcatcatcgagccttccctcatg

SEQ ID NO: 29475 - DNA, 284 bp, Glycine max
  unsure (1)..(284): unsure at all n locations; Clone ID: 701061411H1
cnaganaagaagaggaaaaggagagtggagaggaagaaaaggattgaagttgttgctgtgaganagagaaagagtgaaatcggagtttgggaaggaaccgcaatcaatggatgtgataaagacgcagcaaatctcatctcgaccaatcgagaaggtggtggttcaccctctcgtgcttctcagcatcgtcgacaactacaacagagtcgccaaanacactcgcaagcncgtcgtcggcgtcttnctcggctcctccttcaaaggcancgtcgacgtcaccaaca

SEQ ID NO: 29476 - DNA, 284 bp, Glycine max
  unsure (1)..(284): unsure at all n locations; Clone ID: 701061413H1
ggagaatatgaagttgtttgtnttctttgttgctgcagtagttttngtagcatggccatgccatggcgcaggctaccaaaggttccctctccgaatganaactggctatggtgagcgttcttcggaggtaaaatgcgcaagttttaggcttgctgtggaagcacacaacatccgagcctttaaaaccattcctgaagagtgcgttgaaccaacaaaggactacattaagggcgaacatttagatcagactcctaaaanagttaaccaacaagtttcttttangc

SEQ ID NO: 29477 - DNA, 289 bp, Glycine max
  Clone ID: 701061414H1
ctattatcatccgcagctgcttttattcgcaccgcaaacagtgagccatggccgtcggaaagaacaagcgcatctccaaggggaagaagggtggcaagaagaaggcagctgatccctttgccaagaaggattggtatgacattaaggctccttctgtttttcaagtgaaaaatgttggcaaaaccctcgtctctcgtactcagggtaccaagattgcttctgaaggactcaagcatagagtgtttgaggtctccttggctgatcttcaaggggatgaggatcatgcatc

SEQ ID NO: 29478 - DNA, 274 bp, Glycine max
  Clone ID: 701061416H1
ctacgattcgttttgccccttttgttgccctaatttcaaccatgcctcgccgtagctccggtggaagatctgcccgtcctgctcctcgggcagctcctcgtcctgctccagttcaccatgctcctcctccagcccctgctcagagtggtggtggatctatgcttggtggcattggttcaaccatagctcaaggtatggcttttggcaccggaagtgcagtggcacacagggctgtggatgcagtcatgggtcctcgtaccattcaacatgaaac

SEQ ID NO: 29479 - DNA, 298 bp, Glycine max
  unsure (1)..(298): unsure at all n locations; Clone ID: 701061417H1
aagagctagggaagaaagcaatttatttgggtgtgccttttattgctgagtggtttagaaacaaagggcactctattaaatctcaagttacagcagcaacaggngcaattgctttaatccaattgcaggaggatatgaaaaagcaactcagttcagaaggggactatactgnagaagagcttgaagaatacatgcaaaatcacaaganattaatgattgactcattgtggaagcttaatgtggcagacattgaagccactctttcccgcgtttgtcaaatggttctncaagacaacgg

SEQ ID NO: 29480 - DNA, 277 bp, Glycine max
  unsure (1)..(277): unsure at all n locations; Clone ID: 701061418H1
gttatttctcagcgcgtaaagcaacggctttgttggtggananaaccacgagtggtcgcnngtacaaggtcaaggacctttcccaggccgacttcggccgcctcgagatcgagctggccgaggttgagatgcccggcctcatggcctgtcggaccgagttcggcccctcccancccttcaagggggcccgcatcaccggctccctccacatgaccatccagaccgccgttctcattgagaccctcaccgcccttggcgccgaggtccgctggtgctc

SEQ ID NO: 29481 - DNA, 295 bp, Glycine max
  unsure (1)..(295): unsure at all n locations; Clone ID: 701061419H1
caantctgcttcccctggcaaccttcttcttagttctctccgcttcttatctccagattgctggggcgaaancacaaccgttgactagtctcaagcttaactctccgatccttcaggagtctattgctaaagagatcaatgaaaatcctgaggcaggatgggaggctgctataaatcctcatttctccaattatacagttgaacaatttaagcgccttcttggagtcaaaccaacgcctaagaaggaactgagaagtacacctgctatatctcacccaaagtcattgaaattgcc

SEQ ID NO: 29482 - DNA, 291 bp, Glycine max
  Clone ID: 701061420H1
ctgaaacatgacgttttgtacttgggagctctcggctcgctaaccccagctacttctccctcatccactcacaaaatgtgccaggccctctccgccccatcgcctccgtgtacggctcttctctccttccttttcttcctcctcacggtggtgggcccggtctcggtctcggcatggcggccgtggccccagaaaaacaatatgaacaccaccgattacgccttcggggactccaagaaatacgaggggtcctcggagttcgtgaagctgaggtaccacatgggacggtct

SEQ ID NO: 29483 - DNA, 290 bp, Glycine max
  unsure (1)..(290): unsure at all n locations; Clone ID: 701061421H1
ctcttataatgcgctggtcgcccgtaaacttgctgacagacaaaggggtgaaatttcggtaacaattgcaaatgcaatagagcaanagtcactgagagtggagcttaagcaaaagcaaagttacttagtcaaacgaggtcagagttcttgtgccaagtgtgcgaatgcagaaattcgctacaacagaagagttccaggttcanatggtttgcttcaccgcccctttatttattcaatgctagctgttgcagctgtttgtgtatgtgtttgtgtgttcttccgtggtcgcc

SEQ ID NO: 29484 - DNA, 290 bp, Glycine max
  unsure (1)..(290): unsure at all n locations; Clone ID: 701061422H1
ctgaagccacagctaaaatcacgaatganaaagatgaccctgaaaatnccatgctcccctgacaggtctagccaagaagttgttaaatctgctgaagtggagcatgataaagaggaaatgggggcacagataaaagagattctatcggtttgtcctactgaagaaagtttcaagtagcatatagcatattttctccagcatttcatacccgtgttcttatatacagtcttccaagtgagtgtttctacagtacttggcagattttgattgtagtaatagtcctgtgatcc

SEQ ID NO: 29485 - DNA, 287 bp, Glycine max
  unsure (1)..(287): unsure at all n locations; Clone ID: 701061423H1
cgccaagtgaaagtnagacaaaataaaaatcaaagagcataatgtcagggatcattcacaagattggggagacccttcatgtgggagggcacaagaaggaggaggagcataagggtgagcaccatgctggagaatacaaaggggagcaccatggtgaacacagtagtgagtacaaaggagagcatcatggtgaacacaaagctggagagtaccatggtgagcacangccagagcacaaagaggggttcctagacaaagtcaaggacaagatccatggtgagggcggc

SEQ ID NO: 29486 - DNA, 285 bp, Glycine max
  unsure (1)..(285): unsure at all n locations; Clone ID: 701061424H1
cttagagttagatggagtcgcgcggacactcaaacccgcttctgncattttccagcttcatccatcaacactgcgtccgcttagggtctgacctcgcgactcgtttggatgacacgaaacgagccctagctcaagctcatcataatcttctattccccaaacacgccctcgccgccacttctactctgggctccctgcacgtggctaagtccctcgtcggcacctctgtttacaccgtcagcaattccaacaatgagttcgttcttatctctgacgctgatggag

SEQ ID NO: 29487 - DNA, 281 bp, Glycine max
  Clone ID: 701061425H1
ctcgcagcaaaaccaagccacccactaacttgtttggtccaagacatggctctgatcctgcatgctaccaaaacaaacaagaatgccttcaagactctgattgcggcagagtacagtggcgtccaagtggaattggcccctaatttcgagatgggtgtctctaacaaaactcctgaatttctcaagatgaatcctattggaaaggttcctgttttggaaacgcccgatggtccagtctttgagagcaatgcaatcgctcgttacgttgctcgataaagggc

SEQ ID NO: 29488 - DNA, 278 bp, Glycine max
  unsure (1)..(278): unsure at all n locations; Clone ID: 701061426H1
atagtggcctgcaaccaattgaaacattatctgctgttaagtctcagcaaataaaggataataaccctcactttggcattgattgtaatgatgttggcactaatgacatgcgtgagaaaatgtctttgaaactttgatcggaaagcagcaacagctcctactcgctactcaagttgtcaagatgatactgaaaattgatgatgtcatctccccatctgagtactgatatntttaaactcagtcatggtctacgtcaagatgctgaatnggtgatcctc

SEQ ID NO: 29489 - DNA, 280 bp, Glycine max
  unsure (1)..(280): unsure at all n locations; Clone ID: 701061427H1
ggtgtacccattggcacaccgactcctctgagctggctctttatctatccggagggaatttataagctcatgacatacataagggacaactacaataatccaccagtgtacattaccgaaaatngcgttgcggaatcaaagaatgactcacttgcaatcaatgaagcccgaaaggntggtattcgaattagataccatgatggccatctcaaatccctgcttcatgcgatcaaagatagagttaatgtgaagggctactatatanggtcattttcagata

SEQ ID NO: 29490 - DNA, 279 bp, Glycine max
  unsure (1)..(279): unsure at all n locations; Clone ID: 701061428H1
tttgttgtgagctataagctagtttatcgtgaggagaatatgaagttgtttgtnttctttgttgctgcagtagttttggtagcatggccatgccatggcgcaggctaccaaaggttccctctccgaatganaactggctatggtgagcgttcttcggaggtaaaatgcgcaagttttaggcttgctgtggaagcacacaacatccgagcctttaaaaccattcctgaagagtgcgttgaaccaacaaaggactacattaatggcgaacaatttagatcc

SEQ ID NO: 29491 - DNA, 282 bp, Glycine max
  unsure (1)..(282): unsure at all n locations; Clone ID: 701061429H1
ctataagctagtttatcgtgaggagaatatgaagttgtttgtnttctttgttgctgcagtagttttggtagcatggccatgccatggcgcaggctaccaaaggttccctctccgaatgaaaactggctatggtgagcgttcttcggaggtaaaatgcgcaagttttaggcttgctgtggaagcacacaacatccgagcntttaaaaccattcctgaagagtgcgttgaaccaacaaaggatacattaatggcgaacaattnagatcagactctaaaacngtt

SEQ ID NO: 29492 - DNA, 287 bp, Glycine max
  unsure (1)..(287): unsure at all n locations; Clone ID: 701061430H1
gatgctctgtttcancccctcagattcgcccatttcagtttcagaacttgaacggtctccgacaactcgccgaaacgcggcgtttcaaggtatggttgctggaccagttcggagtcctccacgatggaaaacaaccttaccccngtgccatttcaaccttagaaaatatagctaagacgggtgctaagatggtgatcataagcaactcatcgagacgttcatcggtgactattgagaaagtcaagggtcttggatttgatgcctctctttttctgggtgccatcact

SEQ ID NO: 29493 - DNA, 288 bp, Glycine max
  unsure (1)..(288): unsure at all n locations; Clone ID: 701061431H1
cttccttttctcttctctgtctaagggntgccctgagatcacattnaacaatggtgaaggctgtggccgttcttggcagcagtgagggtgtcactggaactattcacttcgttcaggagggaagtggtccaaccaccgtaactggatctcttgctggtcttaagcctggtctccatggtttccatgtccatgccttggggganatanccaatggttgcctctcaantggatcacatttcaanccnaataacaaggagcatggtncccctgaggatnagatcgtcatgt

SEQ ID NO: 29494 - DNA, 292 bp, Glycine max
  unsure (1)..(292): unsure at all n locations; Clone ID: 701061432H1
gctaactgtatgaagaagaaaggtcggggaatgtccatatttgtctctatactagatggggattaccatgaatgtgctgaagatgccaagactgcttgcaaacaacttagcacctacatcgattacaaaaattgtgaaggtgtggctgagattgttgttgcccctaacatgtctgaaggcttccgtggcattattcagacaatgggccttggcaatctcaagccgaacatngtggtgatgcgttatccagaatttggcggagggaaacttgatagaaatccctgccaccttt

SEQ ID NO: 29495 - DNA, 296 bp, Glycine max
  unsure (1)..(296): unsure at all n locations; Clone ID: 701061433H1
caacgtgagacacatggcttccttaagctccttagtgctgctccttgcagctctaattctatcccctcaagttcttgcaaactatgagaatcccccagtgtacaagcctcccactgagaaaccancagtttataagcccccagtnnagaagcctcctgtttacaagcctccagttganaagccnccaatttanaagccnccagtagagaagccaccagtgtacaagccnccagttgngnatnccccagngtacaggcnccagttgaaangnaccagngttcnggcccnagtgggnt

SEQ ID NO: 29496 - DNA, 292 bp, Glycine max
  unsure (1)..(292): unsure at all n locations; Clone ID: 701061435H1
tagcctcagtaatctgagagagaaacaaaaacaatgaaggtttccattgccaagttccactcccttcccctatgttttttccttctcttggccttcaacacaaaacccctcctagcagcagaancagagccagtggttgataagcaagggaaccctttggagccaggagtagggtactacgtgtggccactttgggctgatgaaggaggcctcacactaggccaaacaaggaacaagacatgccctctttatgttatccgtgacccttcattcattggcannccagtttcat

SEQ ID NO: 29497 - DNA, 287 bp, Glycine max
  unsure (1)..(287): unsure at all n locations; Clone ID: 701061437H1
ggttttttttcattatcttcctcagtaagcaatgtcttctcccgcggagttttatcactctcttccgcnaataacnaaanancaaannaccgtttgcctgttggctaccgcaacttaccatcttggantatatcatccagcttacattgcactattctacgataangtgttctacggttttcaggtttggaggttgttcacaaacttatttttccttggaccattctctatcaattttgggatccgtctcctaatgatagtaaggtatggtgtccaacttgagaaag

SEQ ID NO: 29498 - DNA, 287 bp, Glycine max
  unsure (1)..(287): unsure at all n locations; Clone ID: 701061438H1
ttcnctttcccttgactattgtttncgcagttttaaaacgataatttgantcactactgacgtaatagctagctagcnaatcatggnaatcttncannccacagcaganaancatggagattaatcccaaganatttacaacattattcnttgttaatcatnngctcanaacgttacaaacaatggttttcccgttgggaggnagagtccacaatactanatcggatgatgagattgagactcacttaagaacaagacacaatgataccgtgtcggtggtacgtaac

SEQ ID NO: 29499 - DNA, 283 bp, Glycine max
  unsure (1)..(283): unsure at all n locations; Clone ID: 701061439H1
caacacagcaatagcttctggtgatctcgttttctcacattgctctcttccccctttctctctcctctttctctctcttccattgcttctccataagcaacgccacgcgaggtcaattgcgcaatcgccatgactgtnatgactcctgctcccattgaccagcagcaggaggacgaggagatgcttgtcccgcacacggatttagctgagaataatcaccaacccatggaagttgtggctcaacctgatgctgccaacactgtggagagtcagcctgtcgagg

SEQ ID NO: 29500 - DNA, 282 bp, Glycine max
  unsure (1)..(282): unsure at all n locations; Clone ID: 701061440H1
ctcttgtttgcttcccaagtctctcgaagcatctttctttctcttcctgcagaagctatccgtgttacttgttcccaagtctccaacaagcaaagtacatggttgatttggaaatccaggtccccagcgcattcgacccgtttgccgaggcgagagaatcagatgcccccggggcaaaggagtatgtgcacatacgaattcagcagaggaatggaaagaagagtctgacaacagtgcaagggctgaagaangagttcagctacgagaagatcctcaaggacc

SEQ ID NO: 29501 - DNA, 281 bp, Glycine max
  unsure (1)..(281): unsure at all n locations; Clone ID: 701061441H1
catcttcaaaccttttctctctctatttcctctctcctccggtggcaatggaggacctgtggaagcgcgcgaagaccttcgccgaagaggccgcgaagaaatcccaatccctcancccttcctcctcccggatcgccgatctcgtcnccgaaancgccaagaaatcgaaggagctcgccgccgaagcctccaagaaggccgacatcctcaaatccgccgcgctccgccaggccgaccagatcaagtccttctccganaccatcgccattctccccaattcg

SEQ ID NO: 29502 - DNA, 277 bp, Glycine max
  unsure (1)..(277): unsure at all n locations; Clone ID: 701061442H1
ctacttttggtgaatctgaagagcaagggtattgatggctccagngttcagaaggtgttggaatcagttcacattgcagctaacaaaaacacagttccaggagatgtgtcagctatggttcctggtggtatcagaatgggaactcctgctcttacttctaggggatttgctgaggaggattttgttatggtggcagagttttttgatgcagctgtaaatttagctgtgaagatcaagtcagagacaaaaggatcaaaattgaaggacttcttggcca

SEQ ID NO: 29503 - DNA, 277 bp, Glycine max
  unsure (1)..(277): unsure at all n locations; Clone ID: 701061443H1
caggaggttgagtagttcttcatcatagtcttanacattaaaccttagcaaaactcaacaatgctagacatcaaaggctacctcgtactcttcttcctatggttcatatcaaccattctgatacgttccatcttcaagaaaccacagcgtctaagnctcncaccgggtcctccaatttcaatacccttgctgggacacgcgccatatctccgttcactgctccaccaagcattgtacacgtatcactgcgctatggacccttgatcnangtcatgat

SEQ ID NO: 29504 - DNA, 279 bp, Glycine max
  unsure (1)..(279): unsure at all n locations; Clone ID: 701061444H1
cgcaggctaccaaaggttccctntncgantnnaaactggctatggtgagcgttcttcggaggtaaaatgcgcaagttttaggctanntgtggaagnanacaacatccgagcntntaaaagcattcctgaagagtgcgttgaancaacaaaggacncnattaatggcgaanaatttagatcagactctaaaacagttaaccatnaagctttcttttatgctagtnaaggcgaagtccnatcacaacgacntatttatattcggcatagntaacaccgtac

SEQ ID NO: 29505 - DNA, 279 bp, Glycine max
  unsure (1)..(279): unsure at all n locations; Clone ID: 701061445H1
tttgttgtgagctataagctagtttatcgtgaggagaatatgaagttgtttgtnttctttgttgctgcagtagttttggtagcatggccatgccatggcgcaggctaccaaaggttccctctccgaatgaaaactggctatggtgagcgttcttcggaggtaaaatgcgcaagttttaggcttgctgtggaagcacacaacatccgagcctttaaaaccattcctgaagagtgcgttnanaccancaaaggactacattaatgggcgaacatttagatc

SEQ ID NO: 29506 - DNA, 285 bp, Glycine max
  unsure (1)..(285): unsure at all n locations; Clone ID: 701061446H1
ctcttttgtctccctcantccctcttcttccttctctcaatctccactttccctcttcaacgcgcctcctagctngcagtttcttctcaganaccgttcccattgataacaaggaaaaggaanaanttgtaacttctgtcaaacctacttantcccctantcctccnaatcgncaccttcgaactcctcanagcggctancatttcgatgggactagtcgcaaattcttcgagggttggtacttcaaactttccatncngggaagggaggcagagtttttgnttc

SEQ ID NO: 29507 - DNA, 291 bp, Glycine max
  unsure (1)..(291): unsure at all n locations; Clone ID: 701061448H1
cagaaggagcaaaagcaatggcgccgaagaagccgagaaccacgacaaggaaccctgatttggttagggggattggcaagtattcgaggtcgcagatgtaccacaagaggggcatctgggccatcaaggccaaaaacggtggcgttttgcctcgccacgatcccaagcccaagcccgaggccccggcccagaagccgcccaagttctaccccgcggacgatgttaagaagcccctcgtcaanaagcacaagnccaaacccgnccaaantcagggctagcattactccaggg

SEQ ID NO: 29508 - DNA, 296 bp, Glycine max
  unsure (1)..(296): unsure at all n locations; Clone ID: 701061449H1
ggaggagtganattgttggaaganagactgaangtgttcgcgatcggagactttgaaaccctcctttcacccattcatcccaagcattcaacaatgtctccgttatcgaagctctcgttgctgatactgatggtgttcatctcctccgcgatggcctcctccgacgagagantgagcgaattgctctccctggcaatccagatccanatcgngcgtaatccggctgaacgaccaatcccttcgnccggttctcacctccggtgaaaacccctngccctnatccatnctcctttnct

SEQ ID NO: 29509 - DNA, 290 bp, Glycine max
  unsure (1)..(290): unsure at all n locations; Clone ID: 701061450H1
cttctctaggctttttaagttaattcaattgacatttcaaagtaggttatgcgctaaacagtgctttattattgcaatatgtctctgtaaactgggtttgacttttgaggttctcagtttatttatacaggtttgctctcctttttagtttgcttacgcttttttcttattgggtctttgcataaattttattaaattnatagtcaagtcccaacctaccaccataaattcttatatctccatgtaaacaacatcttgcctcctggacaaaatgtattgtatgcatatcc

SEQ ID NO: 29510 - DNA, 286 bp, Glycine max
  unsure (1)..(286): unsure at all n locations; Clone ID: 701061451H1
tcgagataactagaaacagtgtgatgaaaatgaaggtccttgttttcttcgttgctanaattttngtagcatggcaatgccatgcgnacgatangttccctctccgaatgaacactggcnatggtgcccgtactccggaggtgaaatgcgcaagttggaggcttgctgtggaagcacacaacatctttggctttgagaccattcctgaanagtgcgttgaagcaacaaaggaatacatccatggcgaacaatatagatcagactccanaacagttaaccaacaagc

SEQ ID NO: 29511 - DNA, 287 bp, Glycine max
  unsure (1)..(287): unsure at all n locations; Clone ID: 701061452H1
cggagannatagtncaacttctctgtcncaatcatttcantntagtttnctctcccttccaatnanagngatntcnagaattagggtancgtgattnctgtctcantggaagatnaagaagaagaattgnttatctanatctgaatccatgangccggaatcatcctctttgaatccatatgcagcctcatatgtncctctctctaaaaggggggcagatngtagaatacctttgacaagaaaaagattccaagacttgtgatgggacaatgtggnttcagatgncc

SEQ ID NO: 29512 - DNA, 284 bp, Glycine max
  unsure (1)..(284): unsure at all n locations; Clone ID: 701061453H1
caattaaagtaagaatacagaaganacttcaagttcctgatgatgagtttgtcaagtggaaatttgcctttttttcattagggcgtcctgaatatcttcaggattctgacattgtatccagtcgttttcagaggagagatgtttatggtgcttgggagcagtatcttggcttggagcatactgacaatgctcctaaaagatcatatgctgttaaccagaatcgccacactttcgagaagccactnaagatttataattaggaaactggtattgatgagtactca

SEQ ID NO: 29513 - DNA, 259 bp, Glycine max
  unsure (1)..(259): unsure at all n locations; Clone ID: 701061455H1
caccatgtcacttgctgggaaaatcaccactgaaatcggggttcatgcaaccgctacaaagtggttcaacctcttcgcaacacaactccatcatgttcaaaacctaactgatagagtgcatggaaccaagctgcatcaaggtgaagactggcatcacaacgagacagtcaagcactggacttataccatagatggtaaggttacaacatgtctggagagtattgaatccnttgatgaacagagcaaaacaatcacctac

SEQ ID NO: 29514 - DNA, 279 bp, Glycine max
  unsure (1)..(279): unsure at all n locations; Clone ID: 701061456H1
catcgagataactagaaacagtgtgatgaaaatgaaggtccttgttttcttcgttgctacaattttngtagcatggcaatgccatgcgtacgatatgttccctctccgaatgaacactggctatggtgcccgtactccggaggtgaaatgcgcaagttggaggcttgctgtggaagcacacaacntctttggctttgagaccattcctgaagngtgcgttgaagcaacaaaggaatacatccatggcgaacaatatagatcagactccaaaacagttaa

SEQ ID NO: 29515 - DNA, 81 bp, Glycine max
  unsure (1)..(81): unsure at all n locations; Clone ID: 701061457H1
cttttctatctataggatcatgaaaattgtanccaagnantagtaatatcctttcaatcaagtatntcttttttcataatt

SEQ ID NO: 29516 - DNA, 275 bp, Glycine max
  unsure (1)..(275): unsure at all n locations; Clone ID: 701061458H1
atctacttaacttcagttcatttttctttggcttactaattagaagtaagantttttcttttgggaaactgattgaactatgtctcttgttatgatgcagggtcagtccattcctgggttcactttttttattttgtgatatcttttgttgaggaggtggattgagtttaaggatttagttaagggaaacactgtagaggaaataattttncagggtaggtaacaagangggataaaaagtgggntnagttttgtttnacaccaagtgggggtnc

SEQ ID NO: 29517 - DNA, 277 bp, Glycine max
  unsure (1)..(277): unsure at all n locations; Clone ID: 701061460H1
tcagccacagtttcggaggagaagaaaatagtcgttcgagatggcccgtacgaagcaaactgctncgtaagtccacaggaggaaaggctcctaggaagcagcttgcaaccaaggctgcacgtaagtctgcaccaactactggtggtgtgaagaagccacatcgttaccgtcctgntaccgttgctcttcgtgagattaggaaataccagaagagtaccgagcttttnatcaggaagctccccttccagaggctggttcgtgaaattgctcaggactt

SEQ ID NO: 29518 - DNA, 278 bp, Glycine max
  unsure (1)..(278): unsure at all n locations; Clone ID: 701061461H1
cttgttccggcaatcgctcacatgtacaaaactgaccgggccaannatgaggccactgcacgcagctggacccagaagtatgccatgggctgatttgtgtttggataatgtatattgaaatggattgcatctatgaaaacttttgtgggtttgcttttcacttcctgttttctgggtaagattatgttnctgttatgaggggctagggaagggaggtgtcttaattngataaaaaaaataactgtgttcaacaaccactgtgatgtttttatcatgat

SEQ ID NO: 29519 - DNA, 290 bp, Glycine max
  unsure (1)..(290): unsure at all n locations; Clone ID: 701061463H1
gataataganacagtgtgatgaaaatgaangtccttgttttcttcgttggtacaattttngnaagcatggcaatgccatgcgtacgatatgttccctctccgaatgaacactgggctatggtgcccgtactccggaggtgaaatgcgcaagttggaggcttgctgtggaagnacncnagatctttgngcttgagaccattccncgaagagtgcgttgnaagcaacaaaggaatanatncatggngancaatatnggtccagcctccaaaacagttaaccancangcttnc

SEQ ID NO: 29520 - DNA, 284 bp, Glycine max
  unsure (1)..(284): unsure at all n locations; Clone ID: 701061464H1
tggagcttttctaccttcaaagantgcacctttacccttcaggatattttcaattgtcaagaaaatggttggacctaacttcatggatgagatagactgcggcagttctttgaccacatcgacgaccttctcgattttcccgtcgaggacgtcgacggcggcgctgccaccntgccttccgtctccgccggaaacagcaactcgctggcgagcatctggccctccgagtcgaatcgtttccngcctccgattcggtgtttccggcaaagtgcttcggactctcg

SEQ ID NO: 29521 - DNA, 294 bp, Glycine max
  unsure (1)..(294): unsure at all n locations; Clone ID: 701061465H1
ttctagctaacatccccttttcttcttctcacttctctccaagttttttcttcacatttctctgcctttgatctgcacacacaacaacatccctctaaaaaacatagagggataaaataagaacatgangaaattngtactcaagtnagatttgccagatgacaagggcaaagcagaaggccctganaacagtttcaacactttcagggattgatgccatctctnatggacatgaaggagaagaaatnaacagtgataggnacngttgatccagtgaatgttgtgagcaaactc

SEQ ID NO: 29522 - DNA, 291 bp, Glycine max
  unsure (1)..(291): unsure at all n locations; Clone ID: 701061466H1
cggagaaaatagttcaacttctctgtctcaatcatttcattatagttttctctcccttccaatgcanagcgatctccagaattagggtttcgtgatttctgtctcactggaagatcaagaagaagaattgtttatctacatctgaatccatgaagccgcaatcatcctctttgaatccatatgcagcctcatatgttcctctctctaaaaggggggcagatggtagaatacctttgacagaaaaagattcnaagacttgtgatgggacaatgtggtttcagatgactcatc

SEQ ID NO: 29523 - DNA, 285 bp, Glycine max
  unsure (1)..(285): unsure at all n locations; Clone ID: 701061467H1
cactctcatagctgtagcggcgacactaanatcggagaaagaatggcgaaaacgacgtcgttgctgctctttacactgctcctcttcggaaccctagctctcatccaggcgaagaaatcgaaggaggatttgaaggaggtgacccacaaggtttactttgatgttgagattaatggaaaagaagcaggtcgtattgtaatgggtctttatgggaaggctgttccaaaaactgcagaaaacttccgagcactttgcacaggggaaaagggaactggtaaaagtgga

SEQ ID NO: 29524 - DNA, 282 bp, Glycine max
  Clone ID: 701061468H1
cgaagtgttcgggatagtcaccgtaaggttagggatagccatgatgggctcatcattcaaagaaacatggccctatttttctctggtggggatagaaaggaactgaagctcagagtcacaggaagaatatggaaggaacaacagcaacagaattcggaagctggggtgtgcatgccaaatctctgtagttgacacgttatttgaaggggaatttttatcgtgtgtttctgacactcttttgagatatatttataccaactttgcgcatgttgtaatagatta

SEQ ID NO: 29525 - DNA, 281 bp, Glycine max
  unsure (1)..(281): unsure at all n locations; Clone ID: 701061469H1
acctttctctctcctcnctttcctctctcttggaacaaacgacaagttatggtagtatttgtcattcatttcacaaaactggttcantcnntggacccatggcttctaaaaactccacgttgttccagtctcgcttcttcctcttcggcttctattgctgggactgggagtttctcancgctcttctcctctttagttcttcttcctaatcaaataancttctccaccatacataaacntnntntttttgtctttggtacttaaatgtctcattactanat

SEQ ID NO: 29526 - DNA, 278 bp, Glycine max
  unsure (1)..(278): unsure at all n locations; Clone ID: 701061470H1
cgaaaactatacgattcgattccttgttttcaatggacaccttcttcaannnnnnnnnnnnnnnnnnnnngagaagccgctggagttacgatactctcaagaatttccgtgagatctctccgctggttcagaatcacatcaaacgggtttattttacgttatgttgcgctgtggtggctgctgctgttggagcttttcttcatgttctgtggaacattgggggttttctcaccacgttggcttccattggaagcatggtttggttgctatctacaccc

SEQ ID NO: 29527 - DNA, 270 bp, Glycine max
  unsure (1)..(270): unsure at all n locations; Clone ID: 701061471H1
ggaccttaagcttctaatgcntgtantagnttgagtagtagcttgagctctctcaananntctgnatgantntntnaacagcttnantctnattaagatgaagccctnnccagntnnaagnntattanatgntttggnttaatgagagggaatatgttgagggagggatagagaattgttggantcattggagagtaatggagngatatgttggagagnanagaggtgaaagnaggagctttaagcttctaatagatgtagtaattgagt

SEQ ID NO: 29528 - DNA, 278 bp, Glycine max
  unsure (1)..(278): unsure at all n locations; Clone ID: 701061472H1
ctgnaacacgcnatactcttcttaccatgngcctcctcgatcacttgtgggatganacccgtcgccgntcctcgccnggagaacggccttggcaangctccgaaagcaccacaccttcgcttgccgatctgcctccggcaagggtacgcatgcgcatgcccttgctgaacttaatttcccaaattcatnttagttattcnnnnnnnnnnnnnnnnnnnnnnnnnnnnnnccgcagcaagaattagttcttatgatctcacgcgatcataaaacgaagc

SEQ ID NO: 29529 - DNA, 273 bp, Glycine max
  unsure (1)..(273): unsure at all n locations; Clone ID: 701061473H1
ccttcaacatccttgctgcttgctatagaaggccatggtgagaaagaaagattgcgccgcaaaatgatggtttttcacaagcttcatgatcatgatcttacgttggaagcagcatggcctcaattatttgttgaccacaaaggaaaatattgggatgtccctgagtctttatctgttgatttgtcatcccttntgtctgaatctggattgcgatatcactttgggatacataaaaatggtggtaatccccaggcaatgaatgcaaccgatggt

SEQ ID NO: 29530 - DNA, 269 bp, Glycine max
  unsure (1)..(269): unsure at all n locations; Clone ID: 701061474H1
ttttgttctcattctgtgactctgtgcttagttaacgttaacagtgacttaagatggcggattctgcagatgtcacccacgatgttgtgtccctcctctcttctcctcaaagggactttcttcttcgaaacaacggcgatcacgttaaaattgacagcttgaagggtaagaaactggtttgtatttttcggcatcctggtgtggtccatgtcaaacattacgccaactttggtggatgtgtacaatgaggttgcaaaanaaggtgactt

SEQ ID NO: 29531 - DNA, 273 bp, Glycine max
  unsure (1)..(273): unsure at all n locations; Clone ID: 701061475H1
ttggggctttgctttttgtgtgaaggagagaaaatttgagcactgagttgatgagaagagagaaactataatgtgtggcgagagacaacgagtttctgcttgtgctgcctgcaccaacaactgtctactgttccacaaaacaaaanaaccnaananntacctcttnctncaagctcatcactaaacgagaacatttaacaacttngtanatccctcctgcttttngtagtactgtgtcagacttggttaataagaaaattgcncncnctgatc

SEQ ID NO: 29532 - DNA, 275 bp, Glycine max
  unsure (1)..(275): unsure at all n locations; Clone ID: 701061476H1
cngaatntccctatcctccctgcttttcgattcgcagggcccacacancattgcaaaaaaacanatacaaaccaccancaacctccgcnngcaccctccctccctccancgccaacccgtatataaatacnancttttgaanccaaaaaccaaacantcgctataatcgcaatggccatggctcttcctcttngcagantctcctccaccctcaanaaacctctcgccagcgctattccatttatcatcgcatgtcctcctcgctctccgctcag

SEQ ID NO: 29533 - DNA, 276 bp, Glycine max
  unsure (1)..(276): unsure at all n locations; Clone ID: 701061478H1
acatcagtgctggtgttatgaagtcattgaatattccgaggggcgtacgtcgtgtgctcttccgaacattaaatncttacaggcggcntatgtatcagaaggaatttgacacaagctatgtgggattcacagaagatggagcaaattggctagtggagaacactgacattaagcttgtgggaatagattatctatctgttgctgcttacgaccacttgattccagctcaccttgtttttctgaaaggcagggaaatcattctcgtggaaggcctga

SEQ ID NO: 29534 - DNA, 285 bp, Glycine max
  unsure (1)..(285): unsure at all n locations; Clone ID: 701061480H1
gagttattacaaccagcagnaaccgccggtcggagttccgccgccgcaaggttatccgccggaggggtacggaaaggagggatatccaccgccgggatacccgccagcgggatacccgccagcnggatacccaccgccgggatatccgccanaanaaggctatcctccgccgccctacccggcgcaggggtatnctccgccctacgctcctcaatacgctcagcctccgccccgtcaanaaaatncnantggccctggttgtttggaaggctgtttggctgtctc

SEQ ID NO: 29535 - DNA, 273 bp, Glycine max
  unsure (1)..(273): unsure at all n locations; Clone ID: 701061482H1
cttttgaggacagatcaattaactttgatcaggttgatatgtagggaaaactgcacttctttatataacagctcctgcctactgatgactgatgacttcgatcaagtcgatagacctaaggttttgctaactttattttggcgcgtantctacaacggagctatgaaaatcaaccaagaacttttnattgtntactttggtgagtagaaattcttttncatgtagtatggtaatttgaatancnaaagattttcaacgnnggccnnctccatg

SEQ ID NO: 29536 - DNA, 279 bp, Glycine max
  Clone ID: 701061483H1
caattttccctcttttcattttccattgctgaaaaatcataccttgaaatcgaaagcccctgttttgtttttcttttcgctggtgttgtgagagaaatgtgccctttaaggtttatcttggtgttcttctccgccgtgctggcgggttattttgcgtggaaaacggtgcgttctaacccgatcgaggtgttttccgaggattctgccgatgaagataaatcctccaagaagggagattttgatttcaagaagatgattcagaatggattttggggtttc

SEQ ID NO: 29537 - DNA, 278 bp, Glycine max
  unsure (1)..(278): unsure at all n locations; Clone ID: 701061484H1
gattcggnccgggttagcgttatcggataacttcgcccataaattctctgttnacggggcgnaaatgacagtattcttagccacgaggctcgtgttgcggagatccccggcgcttctctggcggcgcagttttctcgggcggcggtagaggccgaaaagganantgttgccgtgccgtcgcttccgttgttcgattantctccgcctccgtatgcggggccnancgctgacgagattctggcaaagcgcaggnagtatctgagtccttccatcttgca

SEQ ID NO: 29538 - DNA, 267 bp, Glycine max
  unsure (1)..(267): unsure at all n locations; Clone ID: 701061485H1
atcgagataactagaaacagtgtgatgaaaatgaaggtccttgttttcttcgttgccacaatnntcgtagcatggcaatgccatgcgtacgatatgttccctctccgaatgaacactggctatggtgcccgtactccggaggtgaaatncgcaagttggaggcttgctgtggaagcacacaacatctttggctntgagaccattcctgaagagtgcgttgangcaacaaaggaatacatccatggcgaacaatatagatcagactcc

SEQ ID NO: 29539 - DNA, 238 bp, Glycine max
  Clone ID: 701061486H1
ttgttttcatttactaatgatgctttggtacaaggctgttatatcgtgggtgtttgagcagtgttgacatctaaagcttctattggatagtttaacccttatttttttttgttgcttttcgcctgttgttggtcaacatgaaaggggtgagtctgttcatccaatttatgtcgagaaatttgttttaacttcttgccacattcgttgagtgagtcattgttatattaacaagatcgca

SEQ ID NO: 29540 - DNA, 273 bp, Glycine max
  Clone ID: 701061487H1
cgctttcttcagagcctgcacttgttccacccttcaacataccactcctcctcttccccaattctcttatccgtaatctggcactcttcagagaagactttgtaagataaaaagagaaatggccttagaccagtattttgatgaggctgtgccccagttggattccttggaagataaatcgtctctcgaaacatggaaatgtggcagtgacgatattgcagattcggatagaaatgcctctggtggctttgattgcaacatatgcctggagtg

SEQ ID NO: 29541 - DNA, 278 bp, Glycine max
  unsure (1)..(278): unsure at all n locations; Clone ID: 701061488H1
ccacaatttcaacgccacaccaaaaantccactgcaccaccaccctcnnccatttgtacttttcttctcattctctttccactcccctgcattctnccacacaatctagctntancgtgcttctgggcaaccgcataaggttaaactgttaagcatatcattgaaatccttttgggattggaacttgatatgatcatttgtattggggagtaagaccttgttacttttgcaaatgctaaattttaataggatcagaagtcagcccaggacaaccagat

SEQ ID NO: 29542 - DNA, 272 bp, Glycine max
  unsure (1)..(272): unsure at all n locations; Clone ID: 701061489H1
catgaggttcctggtgcaaagaaagatattcaaaggcgacgggtgcagcaggggctattctcaatcagctctgtctcgtcgattgatgagaaacggcgaacacagcatggctagttttctcttgctggagagtagtcctgtaatgctggcaccttggcacagtctgagtgctcgcgtcatggccaatggcaacccctcatttgcaaaggctcacggtgaagacgtgtggcgctatnctgccgcaaatctcgatcacagcaacctcatcaacg

SEQ ID NO: 29543 - DNA, 272 bp, Glycine max
  unsure (1)..(272): unsure at all n locations; Clone ID: 701061490H1
ccctccctttcaacaaccatggggtgttggtacatggttaaaggaaattaaagacactactaaagaaggatatagttttgaagagctatgcatcaagaaagaagccattgaggganaagagaagttttgtgcaaaatccttgggaacagtaattggttttgccatttcaaagctgggaaagaacattcaagtactttcaagttcctttgtcaataagcaagaccaatacactgtggaaggagtgcagaatcttggagacaaagcagtgatnt

SEQ ID NO: 29544 - DNA, 273 bp, Glycine max
  unsure (1)..(273): unsure at all n locations; Clone ID: 701061492H1
ctgaaagtnaganaaaataaaaatcaaagagcataatgtcagggatcattcacaagattggggagacccttcatgtgggagggcacaagaaggaggaggagcataagggtgagcaccatgctggagaatacaaaggggagcaccatggtgaacacagtagtgagtacaaaggagagcatcatggtgaacacaaagctggagagtaccatggtgagcacaagccagagcacaaagaggggttcctagacaaagtcaaggacaagatccatggtg

SEQ ID NO: 29545 - DNA, 278 bp, Glycine max
  unsure (1)..(278): unsure at all n locations; Clone ID: 701061494H1
ctaatcttaagtggaaccttctgcgaaattagccttccttcgtcccttgattgaagtataaattaggggtgttgaaattcaaagccatatccgtcattaaccaaatttgtgtttctccgattgcaagcaatggactccttcaattccttcttcgattcaacaaaccgatggaattacgatactctcaaaaacttccgtcaaatttctccggtcgttcagaatcacctcaagcaggtttatttnactctgtgtttcgccgtggttgctgcggctgttgg

SEQ ID NO: 29546 - DNA, 282 bp, Glycine max
  unsure (1)..(282): unsure at all n locations; Clone ID: 701061496H1
cactccccatttctctcttctgctcattcctttgactcctcattatcagggaaatggctctcactgggttactcttgttggcctttctcacgatgttctcctctgctcatgcctatggtggagggtggactaatgctcatgccacattctatggagggagtgatgcatctgggacaatgggtggggcatgtgggtatggggaactctaacagccaagggtatggaacaaacactgctgctctgagcactgcactcttcaacaatggcttaagngtggccctt

SEQ ID NO: 29547 - DNA, 270 bp, Glycine max
  unsure (1)..(270): unsure at all n locations; Clone ID: 701061502H1
atgnagagnnnaatgatatgttactccagtctagaaaganatgtaatcttacatgnnaaggagaagatgaagatgtaaaaatatacatacactgatctaaacatgcaaataaatttaaatagcatatttagatcaaacagcggaaattaaaaggaattacaagcgtacctccagccattgcaaatcgaacgggaagcggctcacacacgaacctgaaagacagttttgttcttccagacccttactcatctgaatagatggtgtattttg

SEQ ID NO: 29548 - DNA, 280 bp, Glycine max
  unsure (1)..(280): unsure at all n locations; Clone ID: 701061503H1
tgatgaggacgacgatgaggaagaagaggtggataacgacgagggtgattttgtggagcctgagagaaccgggaggttgcctcctcctgaatcttcccaccttaagaggaagaggnnnnnnnnnnnnnnnnnnnnnnnnnnnnnnnnnnnnnnnnnnnnnnnnntggtagcattcacgaatcacccaagaagcatcattgacgacgtgttctaatatatcatgttgttgttctgtttcangcttccatgtgttggaagcagggaaacctcctcagtttag

SEQ ID NO: 29549 - DNA, 279 bp, Glycine max
  Clone ID: 701061504H1
cgggttttgaagaagaagcagttcaattgatcaactcagatttcagggacctaagtctagctgctaatagactcgcccatcatgccatcaaacttggtggcattggctttggagcctcttttttcggattgtttgctgccattgctgctatttatctgttgattttggatcgtacaaactggaaaacaaatattctcacagcactactcattccatacattttcttcagcttgcctcattaattttcgacgtcttcaggggagagcttggaaaatggat

SEQ ID NO: 29550 - DNA, 280 bp, Glycine max
  Clone ID: 701061505H1
cttttacttctcagcagcttcggctagggttcagaaacgaaaaagggttcggtgttctgttcgcgatgagagccaagtggaagaatcagcgtatgaggaggttgaagaggaagcgccgaaagatgagacagagatccaagtagtgcgttaaacctagtttgtttctgttgcttttacaattgcttatgttgtcgaatgggacacccagttgttagtggcatggtttctcctttttgatgtttgatacattttgttggattcaagtagtttatgttcgtcc

SEQ ID NO: 29551 - DNA, 279 bp, Glycine max
  Clone ID: 701061506H1
ttagtggcagtagcactactcccttattgtgctctttgttctttatttcttccttactttttgcttcctgcacccatgcctcctcccaggcacctcctccaattgtggatggactttcatgggatttctataggacgagctgtcccatgcttgaagggatagtgagcaagcatctccagaaggtgttcaagaaggacaatggtcaagctcctgccttactcaggatcttcttccatgactgctttgttcagggttgcgatgggtcgatattgttggatg

SEQ ID NO: 29552 - DNA, 107 bp, Glycine max
  unsure (1)..(107): unsure at all n locations; Clone ID: 701061507H1
cgcaaccacttctgaagccgctcacgttatccacaacactctcaacncctgccttnaancctaaccaatcnnaaccatggcttcttctncccacnttcactggcaat

SEQ ID NO: 29553 - DNA, 284 bp, Glycine max
  unsure (1)..(284): unsure at all n locations; Clone ID: 701061508H1
cttccagtgaaagaaaggcagcgatggaagaagacttcgacatncccggcggcgaggaaatggatcttcggcgaagacgaggttcggcgaggagagggagatcggctctggcggcctcaagaagaagctcctcaaggaaggtcaaggctgggaaacccccgaagtcggtgacgaagtccaagttcattacacggggactttgctcgacgggactaagttcgattcgagccgcgacagggattctcccttcagcttcacgctcggacaagggcaagtantaaagg

SEQ ID NO: 29554 - DNA, 284 bp, Glycine max
  unsure (1)..(284): unsure at all n locations; Clone ID: 701061509H1
caaacacaagccaagtgaaagtnagacaaaataaaaatcaaagagcataatgtcagggatcattcacaagattggggagacccttncatgtgggagggcacaagaaggaggaggagcataagggtgagcaccatgctggagaatacaaaggggagcaccatggtgaacacagtagtgagtacaaaggagagcatcatggtgaacacaaagctggagagtaccatggtgagcacaagccagcgcacaaagaggggttcctagacaaagtcaaggacaagatcctg

SEQ ID NO: 29555 - DNA, 284 bp, Glycine max
  unsure (1)..(284): unsure at all n locations; Clone ID: 701061510H1
cttgggaattaatcgccactttttttgatataacagatcaaactgaagacgctggtcacaataagtgaataaagctcagatcgagtttcatcagagtcacaataatgaagcaagaagtggttccaaggtnnnnnnnnnnnnnnnnnnnnnnnnnnnnnnnnnnnnnnnnaaaattcagggtcttctcaagaccaagagcagaagagagtgtcacaaaccgagaaatcgccagttttggagggcaaaagagggtcgtgggaggagggaccacttccttgtgntat

SEQ ID NO: 29556 - DNA, 281 bp, Glycine max
  unsure (1)..(281): unsure at all n locations; Clone ID: 701061511H1
gtcttaagctgacatctgtactcttctgcagtaaccataccancaggcataaataatcgaactatcaaagaaaagagagcagaatagtgagagtgagagatggatcagtttttgtggagggtgttgcctttgcttacaatccttgtttcctttggagtgttcttctacttgcaggattcttacacagcacagttatttcctctcataaagttaccgcgggataagtgcagccttcttccccatcgccacttctggatatccagcaaacgtattgtgacccc

SEQ ID NO: 29557 - DNA, 278 bp, Glycine max
  unsure (1)..(278): unsure at all n locations; Clone ID: 701061512H1
ctctttgtcgcaaagagaagagatctgcctcctttttatcaaatctatctcttcttcaagaatagttgaaaatggngctgtctttcaccaagttgttcagccgactgtttgccaagaaagagatgcgtatactgatggtgggtctcgatgctgcgggtaagaccaccattctgtacaagctcaagcttggagagattgtcaccaccattcccaccattgggtttaatgtgganactgtggaatataagaacatcagcttcactgtctgggatgttgga

SEQ ID NO: 29558 - DNA, 279 bp, Glycine max
  unsure (1)..(279): unsure at all n locations; Clone ID: 701061513H1
gttagcagttttgtagattcaacctcaatttgcagagttacgttctaatatatttacacaagactgataagagaaaatgtctctgattccaagtttcttcggtggccgaaggagcagtgttttcgaccctttctccctcgatgtgtgggaccccttcaaggattttccatttcccagttctctttctgctgaaaattcagcgtttgtgagcacacgagtggattggaaggagacaccagaagcacacgtgttcanggctgatatcccngggctgaanag

SEQ ID NO: 29559 - DNA, 205 bp, Glycine max
  unsure (1)..(205): unsure at all n locations; Clone ID: 701061514H1
ccaaggccaacgtagactatgaaaagattgtccgcgacacatgccgcgaaattggattcatctctgatgatgttggtcttgatgctgacaaatgcaaggtgttggtcaacattgagcaacagagcccggatatcgcccagggtgtgcacggccacttcaccaagcgcccagaggaggttggtgctggtgaccagggtcacntgtt

SEQ ID NO: 29560 - DNA, 161 bp, Glycine max
  unsure (1)..(161): unsure at all n locations; Clone ID: 701061515H1
tcgtaccataaaagcctatctaatatcttaaacttatgactctaattcttctgctgaatgatatgccaaagacaccccaaaactaagaccatttatcctctttctctttttccccttccaaacatttcaaagnnnagcatcatccaagactaaatccagcc

SEQ ID NO: 29561 - DNA, 209 bp, Glycine max
  unsure (1)..(209): unsure at all n locations; Clone ID: 701061516H1
ttatcttatttgagtgtgatcgatggcatacccaaacccttatccggngaaaccgtatccctcnacctccgtnccgatnccggnggtgcccaccgccgtnatcggccccnanttctntgngccctacccgctggatctggcgntggtgaanaaggtgatgacnctctcnganggnaatttgnggtnaccganntnaanggcatttcttt

SEQ ID NO: 29562 - DNA, 285 bp, Glycine max
  Clone ID: 701061517H1
caaatattatttacacccacccttcctatatatataaaaaagaaagccccctaagcctcatgggaaaggaaagccatcgagaaaccaaaaaccaaaatcaattagaggaaagttggaagaagcatggattctaggcggcgtagtaaaaaagcagctatgcaacgcaagttgcaacaacttcgatcggttacaaattccagtgctgtgaacaaagcctcaattattgtggatgccaccagatacatagaggagctgaagcaaaaagttgatgggttgaactcagag

SEQ ID NO: 29563 - DNA, 280 bp, Glycine max
  Clone ID: 701061518H1
gagatcaaccttgcatcagggttagggaatggctgctatcttagctcggaaatcactccttgctcttcgtgcgcgccaattggctgtaagcggtcaagggctgcacagctcccaaaactatggccttcgattaagtgcacactcctactctaccaaaagagaggatgaagaaagggagcaactcgcaaaggaaatttcaaaggattggagttctgtttttgaacgtagcatcaacactctctttctcactgaaatggttcgaggtctaatgctgactctg

SEQ ID NO: 29564 - DNA, 277 bp, Glycine max
  unsure (1)..(277): unsure at all n locations; Clone ID: 701061519H1
ganatggaagttgtgaagggtttggatttgcaaaggtacatggggcgttggtatgagatagcctctttcccttcaaggaatcagcccaaggatggtgagaacaccagagccacatacactcttaggaatgatggtactgtgcaagtgctcaacgagacttggagtaatggcaagagagggtacatacaaggaactgcttataaggttgaccccaaaagtgatgaggccaagttcaaggtcaagttttatattcctcccttcttgcccattataccta

SEQ ID NO: 29565 - DNA, 277 bp, Glycine max
  unsure (1)..(277): unsure at all n locations; Clone ID: 701061520H1
tccttatctatattcacctccatcttaaaacagttcccctagaaacttcgatctgaagatgggtggcattgcatttggacgctttgatgattctttcagtttaacctcaatcaaggcctatattgctgagttccattcaaccttgctctttgtttttgccggtgttggttcagccatagcctatggtaagttgacatcagatgcagcacttgtnncctgctgggttactggcagttgctatttgccacggttttgcactctttgttgcagtttctgt

SEQ ID NO: 29566 - DNA, 186 bp, Glycine max
  Clone ID: 701061522H1
gcttgtctgaattcagcatgccaatggtgtactatttgagtctcagctaaaaatttgcgtgataatgcttcagatctggaaggaaatatttacagcatgatgtggcattctgtaattttggatgttcagttgtaagctaactcattttttcccctatccttttcatttataataatagcgaatata

SEQ ID NO: 29567 - DNA, 277 bp, Glycine max
  unsure (1)..(277): unsure at all n locations; Clone ID: 701061523H1
gttnntganagaaagttctctctgcttctntctcttagactcaanaccctattgcgtgctttgnaatcgaccccgattatggncaacagtaacctccctcgaagantcatcaagganacgcagngtttgctcagtganccagcacntggaattagtgcgtccccttcggaagacaatatgcggtntttcaatgtgatgntccntggcncaactcagtcgcnttatgaagggggagttttcangtnggaatnattnttgccagaagnatntccnatgg

SEQ ID NO: 29568 - DNA, 280 bp, Glycine max
  unsure (1)..(280): unsure at all n locations; Clone ID: 701061524H1
caaactgcgatttctctgcagtttcttctaccctccaactctgacctttctttacgcgattttggctttcatcaacttcttatncgaaatccttcctcagtcttctcccattttccagagttcttaaaaattgatgcttccttacaagtctttctgagcattccgtttccttcctccagggaaaagttagcgtgtctttaggtcacaggattttgagagatttactttttaatctgcctctgaatcaattctgcaagaagatatataatgtttggttcaa

SEQ ID NO: 29569 - DNA, 277 bp, Glycine max
  Clone ID: 701061525H1
tgtctttgaggctgacatagtgtttgtctctgtcaacaccccaaccaaaactcagggtcttggagctggcaaagcagcagatttgacatattgggagagtgcagctcgcatgattgctgatgtctcgaagtctgacaagatcgtggtggagaaatccacagtccctgtcaaaactgctgaagccatagagaagattctgacccacaatagcaagggaatcaaattccagattctatcaaaccctgaattccttgcagagggaatgcaatcaaagatc

SEQ ID NO: 29570 - DNA, 277 bp, Glycine max
  Clone ID: 701061526H1
caccgtgttctctgccgcacgagataactagggtttagaatctcgcagttacagaaaacatggcgactgtggtgccaacctccgaagaagacgctgcactctccgtcgttcgattcgcctctgaacttgcctgggccgatgccggtcctgaggttgctgagccccaagttagcagactctgcacggaggctgaagagttcattgttatgggaaagtggttggagttagcatcattgatgattacctctgctgaattgattttctcaaaggtttctga

SEQ ID NO: 29571 - DNA, 278 bp, Glycine max
  unsure (1)..(278): unsure at all n locations; Clone ID: 701061527H1
cgagataactagaaacagtgtgatgaaaatgaaggtccttgttttcttcgttgctacaattttngtagcatggcaatgccatgcgtacgatatgttccctctccgaatgaacactggctatggtgcccgtactccggaggtgaaatgcgcaagttggaggcttgctgtggaagcccacaacatctttggctttgagaccattncctgaagagtgcgttgaagcaacaaaggaatacatccatggcgaacaatatngatcngactccaaaacanttacc

SEQ ID NO: 29572 - DNA, 274 bp, Glycine max
  unsure (1)..(274): unsure at all n locations; Clone ID: 701061528H1
gccacttataggttgggaagaagcagcttcaattcagagagtgagtgctttttctctggcccatgagattccatggcttcatttggtgcagtcaattacaaattcttcttgtgcctacttctatggctctggaactttctacctctatctcaaggtaatcagcactggcatgaaaatagatacccttttatcagaaatgcaagctcattcncatcaccatnatttcaatangacagccataatncctatgactncataatagttgggggcggcc

SEQ ID NO: 29573 - DNA, 274 bp, Glycine max
  unsure (1)..(274): unsure at all n locations; Clone ID: 701061529H1
caagaatggcacttcgttgcttggtgatgtccctttctgttctcttcactcttggtcttgcgagagaaagccatgccaganacgaagatttttggcatgctgtttggccaaacactcccattccaagttcattgcgagatcctctaaagcctggccctgcangtgtngaaatcgatgatcaccctatgcaaattgaagaaacacagtacccgaanacctacttctataaagaagaccttcatccaggcaaaacatgaaagtacattcagcagcc

SEQ ID NO: 29574 - DNA, 191 bp, Glycine max
  unsure (1)..(191): unsure at all n locations; Clone ID: 701061530H1
aaacgcaagctgcttgtttgatagggaagagaagaaagagagaaaacaaagggcggtggtgagtgcttctgcttcatcatcatcagagaatggcggctactgtgtcttctgcttggtcaaagcccggcgcgtgggccctagattccgaggaacacgaagccgagctccttcaacagaacaacaacancccc

SEQ ID NO: 29575 - DNA, 278 bp, Glycine max
  unsure (1)..(278): unsure at all n locations; Clone ID: 701061531H1
ctgagggtacagcaattgcagacctgtttaagccggatcgagtcctcatcggaggcagggaaaccccagagggtcaaaaggctattcattctctgaagagtgtttatncccattgggttcctgaggacagaatcctttgcaccaatttgtggtctgctgaactctcaaagcttgcagccaatgctttcctggccnagaggatctcctctgtgaatgccatgttcggcgtttgcgaggcaactggtgctgatgtctcccaggtgncacactnantnggg

SEQ ID NO: 29576 - DNA, 254 bp, Glycine max
  unsure (1)..(254): unsure at all n locations; Clone ID: 701061532H1
tcagaaattcggtatcatcaagggtaccatgaccaccactcactcctacaccggtgaccaaaggcttcttgatgcgagccaccgtgacctgaggcgtgcaagggcagcagcactcaacattgtccccacttcaacaggagcagcaaaggcagtggcccttgtcctcccaaccctcaaaggcaaactcaatggcattgcactccgtgtgccaacaccgaacgtctcagtggtggactccgtcgttcagntnnnaa

SEQ ID NO: 29577 - DNA, 281 bp, Glycine max
  Clone ID: 701061533H1
ctgcaattcactacttgagagtttgaaaatggtacttgtgctatggtcaagagggactaagaacatggacttcctaaccctcttcactcttctactcttgttattcattcatacagcactctcttctacccaatatcatgatgggaacatcttactcactcatcgtaagatcttccccaaacaggaagctatcacctcgtacgctgtcatctttgatgctggtagcactggtagccgtgtgcatgtcttccatttcgaccagaacttggatctccttcgta

SEQ ID NO: 29578 - DNA, 279 bp, Glycine max
  unsure (1)..(279): unsure at all n locations; Clone ID: 701061534H1
ctgcaagtnttgaaatcgatgatcaccctatgcaaattgaagaaacacagtacccgaaaaccttcttctataaagaagaccttcatccaggcaaaacaatgaaagtacaattcagcaagcctccctttcaacaaccatggggtgttggtacatggttaaaggaaattaaagacactactaaagaaggatatagttttgaagagctatgcatcaagaaagaagccattgagggagaagagaagttttgtgcaaaatccttgggaacagtaattggttttg

SEQ ID NO: 29579 - DNA, 190 bp, Glycine max
  unsure (1)..(190): unsure at all n locations; Clone ID: 701061535H1
ctgtggtggacattgctaatctgataaagattgatccagaaatggtatatgatctctccattttggccagtnaatcttgtggtgccatctcgaggcatccaaggagacaccttgaaaggaaaattagtgcaccggttgctcttggttgatttgcaatctatgcatcccccacattctggtaggataactg

SEQ ID NO: 29580 - DNA, 282 bp, Glycine max
  unsure (1)..(282): unsure at all n locations; Clone ID: 701061536H1
cctgaaangtttggactttgaagactctgttccctcttttatgcgggcatcaccaacaacacccttagcggttcttgcaacaaagtagcaatggcttcctgttacttcaatcctatccctactagttctcatctcattttggctgacttatctagacagttcaagattcccaagcttcttcacaggaaaaagaggtttgatggctcacctagatcctcaaaaatcgctgcattttatggcttgacgacccctccttatgaacttgatgccttagagccttat

SEQ ID NO: 29581 - DNA, 274 bp, Glycine max
  Clone ID: 701061538H1
gcgtcgctcggcgcggagaagctgattctgctgaccgatgtggcgggaattctggaagatcggaacgaccctgacagcttggtgaagaagattgacataaaaggagtgaagaaaatgatggaagatggaaaagttggtggtggaatgatacctaaggttaattgttgcgttaggtccttggcgcaaggggttattacagcgagtattattgatggtagggttccgcattctttgttgcttgagattttgactgatgaaggtgctggaactatga

SEQ ID NO: 29582 - DNA, 275 bp, Glycine max
  unsure (1)..(275): unsure at all n locations; Clone ID: 701061539H1
aagagaggaacgaagactgaaaaatggcgtcatggaattcatttccgcttcaagttacctacgaggctctgggttggttcgccttcgtttcctgntccatcagtttctatcctcaagtcatcttgaattttcgcaggaagagtgtggttggactcaacttcgatttcgtggtgctaaatctgaccaagcacagttcctatctcatatacaacgcttctctctacttcagctctgctattcagaagcagtactttgagaaatacggttatggagag

SEQ ID NO: 29583 - DNA, 278 bp, Glycine max
  unsure (1)..(278): unsure at all n locations; Clone ID: 701061540H1
cccaattccactgcttttcaatcccaaaggggtgtagcagtgaantgggttgatgacgcaatgcagagatcacggaaagctccttctggaaagaagggctatacagaaggcnacaagtgggaggaactatgtctatctgtataaagtttctctgtcgttggtttttgttttgtggggtctggtcttcctcttcagcttatggacaagccatggccatggttatggagatcatgaatctagagaagttccagttggtgtatcaaattggaatgaagatg

SEQ ID NO: 29584 - DNA, 278 bp, Glycine max
  Clone ID: 701061541H1
ctcacctgcttcttcctctttttttcatttctcttcaacttcctcttctttcaattctccttcagtctctctccgccttcccaaaatggtgaaccctagatgcttcctcgacgtcagcatcggcggcgagttagaaggccggatcgttgtggagctcttccacgacgtcgttcccaaaactgccgagaatttccgcgccctctgcaccggcgaaaagggcatcggtcccaacaccggcgtccccctccactacaaaggcgtgtgtttccaccgcgtga

SEQ ID NO: 29585 - DNA, 61 bp, Glycine max
  unsure (1)..(61): unsure at all n locations; Clone ID: 701061542H1
ttcgtccatggaagcatatggattaacattagccctgattaaacggncacttttcattacg

SEQ ID NO: 29586 - DNA, 273 bp, Glycine max
  Clone ID: 701061543H1
cgtgcttttgtgggggcaaatagtagatagtagatctgtcgcagagcaaagaatcgtcggcgacggcgaggctgcactataaccgcgattaactatgattagccttcgccggagcgtaaacaagatcccggcgaaatcgaagcgattcaaatgccgattggtgaagttcgaggagctgccggagtacttaaaggacagcgagttcatattggactattaccgctctgaatggcccgtgaaggaagccttgtggagcatcttcgcgtggcacaa

SEQ ID NO: 29587 - DNA, 274 bp, Glycine max
  Clone ID: 701061544H1
ctctgctcgtgcctctagggttatcatatctccatttccatttcctctctctcagtttccaagaatcttaagctatgggaaagtcttacccaaccgtgagcgctgattaccagaaggccgttgagaaggcgaagaagaagctcagaggcttcatcgctgagaagagatgcgctcctctaatgctccgtttggcatggcactctgctggaacttacgacgtgagctcgaagaccggtggtcccttcggaaccataaagcacccctccgaatcgct

SEQ ID NO: 29588 - DNA, 272 bp, Glycine max
  unsure (1)..(272): unsure at all n locations; Clone ID: 701061545H1
atggcattgaaccagtagaaagtccaatactgtctggaggaaaacctgggtgtcagatctacccacatctgaacatctttttaccttgaaggcgctgccatcagatctcccattgtctgtcaagtttgttgtctctcctctttctccatgctctgaaattttcttggagaatccaatcatataaaacaangttggtattattcaagggnantcaaaatncattttacnggatcatnggtttctcatantacggaaactgttgttgaattcaa

SEQ ID NO: 29589 - DNA, 274 bp, Glycine max
  Clone ID: 701061546H1
gccacatgcactgttgacaccattaccacttcaaggccatatcaacccattgttgagattagcaaagctgcttcatctgagaggctttcacataacctttgtccacactgaatacaacattaaacgcttgctcaactcaaggggtcctaaagcccttgatggccttcaagactttcattttgagaccataccagatagtcttccccccacatatggtgatggtgatgtcactgaagacgcatgtctcttgctaaatcagtgagagagaagatgc

SEQ ID NO: 29590 - DNA, 188 bp, Glycine max
  unsure (1)..(188): unsure at all n locations; Clone ID: 701061547H1
gctttttcttgcttccgtagttcatatggcgtgtgttcaagtcatcacagtttttctctttgcattggctctagctaaaatttacccctcaacatgtcaagtggtgcagggaaaagtctcctgcgttgactgcactcacaactatgacttatctgatattanggttcggtgaggtgtgatggaaaaaa

SEQ ID NO: 29591 - DNA, 274 bp, Glycine max
  unsure (1)..(274): unsure at all n locations; Clone ID: 701061548H1
cattcccttcaagtccaagtgnttcantnaaacggttncatgcttaatcaagttgngnnnnnnnnnnnnnnnnnnnntccaagccaatgtttgtgggttttggtttcatttcattaagatgatctgttantctcttttcttctttttaaaatttaaagtctttgtattttgtatgtaaagatgtaaaattatgattattaggtggtgcatgtgtcgcgtcatgggcnaatgtnaccctctgctttaagttggaagnggccnaatctgtgtgggg

SEQ ID NO: 29592 - DNA, 276 bp, Glycine max
  unsure (1)..(276): unsure at all n locations; Clone ID: 701061549H1
gtagtattatttcattgatttctccctcttcgctctctctcagtgaccagagacagatgatgatggagatggcgaacgaaacgctgtcgttgcggcactcgcggcgttggtgctactcgcggcgagtgtggcggtggatgctcaggagaactcggacgtgaagacgctngtgaagtacaagcacgggaagaagtactgcgacaaaggatgggaatgtaagggctggtcaatttactgttgtaacctcaccattaccgattatttccagacctacca

SEQ ID NO: 29593 - DNA, 274 bp, Glycine max
  Clone ID: 701061550H1
ccggcaccggcactggcaccggcaccaccactggtaccactccatacagcacaacacctggagtattaggaggcattggcagtggcatgggaccttcaggatccggcatgaacgatgaaagtcacggtggcattagatttgttcacagcagtagtttcttctcgatcgcgatcgccctcatctctgccttcatgatgctctgctggggttgagaatgaaaatggcttgacctgggtatatggtgcaaaatgccttatttcactgtattaatgtg

SEQ ID NO: 29594 - DNA, 262 bp, Glycine max
  unsure (1)..(262): unsure at all n locations; Clone ID: 701061551H1
gcgtaactggcccttcttggttggattcgccgtcaccggaactctcatcaccaaactttctcttggtctctctgctaannnnnnnnnnnnnnnnnnnnnnnnnnaacctccaaaattggatttttgttctgagtctgatttcccttttcgcagaggaggaagccacaaagtcaaaattcgtccaggcacacaagangtgactttggaatggnagactgcngtnacttgcacattgtattanatgtgtgaagagagctttgct

SEQ ID NO: 29595 - DNA, 273 bp, Glycine max
  Clone ID: 701061552H1
gtcgcgttgtgttgcgtcgtgtcgtgcgctgttcctctgtctgtcgtttttgttttcagaccaaaccctagctccgcatcgcaaccatgtcgaccaagcaaggtggaaaagctaagcctttgaagaaacccaagtctgataagaaggattacgacgaggttgacatggctaacattcagaagaaaaaggaagaggagaaggcgctaaaggagttgaaagccaaggcgcaacagaagggaagctttggaggttctgggctcaagaaaagtggaa

SEQ ID NO: 29596 - DNA, 204 bp, Glycine max
  unsure (1)..(204): unsure at all n locations; Clone ID: 701061553H1
aattgagcacattagagatnncggttagtgtcacactcgcctcaccctctctntgtctctcccctgcggctagggttttgtctttcactcactctcttctctcntcttttcttctcatttcccttctctttcgatctgaacaacaataattaaccatggaaccgtcgctgagttaacctttttcttctgcgcggtgctgttctc

SEQ ID NO: 29597 - DNA, 275 bp, Glycine max
  unsure (1)..(275): unsure at all n locations; Clone ID: 701061555H1
gcatataacaagatggcttcttttcatatccttgtgctcgtggttgctatggtcacattgatgatccctacgaatgcaaacctctctccccatttctatgataaagtatgccctcaggcattgccagtccataaagtcagtggttcaacgagcaattatccgtgagcgacgcatcggagcatctcttctgcgcttgcatttccatgattgttncgtaantgggtgtgatggatcaatattgctagatgacacccgaaacttcactggcgagaaga

SEQ ID NO: 29598 - DNA, 273 bp, Glycine max
  Clone ID: 701061556H1
cagaagaacaagtagttgagaactaagaaggagaagcaaatggcttcctccaatgatctcttccccagctgttaccactgtcaaccgtgccggtgccggcatggttgctccattcactggcctcaagtccatggctggcttccccaccaggaagaccaacaatgacattacctccattgctagcaacggtggaagagtgcaatgcatgcaggtgtggccaccagttggcaagaagaattcgagactctttctacctgccagacttgatgatgc

SEQ ID NO: 29599 - DNA, 271 bp, Glycine max
  unsure (1)..(271): unsure at all n locations; Clone ID: 701061557H1
ggctggaaggattccattgtgactttacaanccacaaaggcattgcctttgtggtcagaggacttagcaatttcaagcagatgcattgaggcaattgcctcaaaggccttaagccacccatcaaaggtgagtttgtcacacanccattcccggaggtgagggatgatgtgtcttcatgcaccggaagcgaaagttgagacacaaatcaacaagcagaggttggtgggctgaggatttagcngatttgagcatagacttgtattggagaacc

SEQ ID NO: 29600 - DNA, 176 bp, Glycine max
  Clone ID: 701061558H1
caatcttccgtttcataccatataatggagattggacatctaatcgttttagctttattatgtgtaactctcaagggagctgatgcgtcgcaatccgcgaaagattattggcactccgtttttccaaacactcgtctgcccaagcctctctgggatctagtgttgccttcccctaa

SEQ ID NO: 29601 - DNA, 272 bp, Glycine max
  unsure (1)..(272): unsure at all n locations; Clone ID: 701061559H1
caaacaggcagaagcagagaagattaggaaactacataatgttgacagcaatactggagttgatggtgacaaggagaaggacgacggccgtggtaaatcaacaaaggtgaacaaggaagaggatgagaagatgaggacaaatgctgcaaatgttgctgctcgtgctgcttatggggganatgacatgatgtcaaaatggcaacttatggctgagcaagccaagcagaaacgtgaagggggggtggatgtgtcatctggttctcaaccagcta

SEQ ID NO: 29602 - DNA, 271 bp, Glycine max
  unsure (1)..(271): unsure at all n locations; Clone ID: 701061560H1
agtttgttgtgagctataagctagtttatcgtgaggagaatatgaagttgtttgtncttctttgttgctgcagtagttttggtagcatggccatgccatggcgcaggctaccaaaggttccctctccgaatganaactggctatggtgagcgttcttcggaggtaaaatgcgcaagttttaggcttgctgtggaagcacacaacatccgagcntttaaaaccattcctgaagagtgcgttgaaccaacaaaggactacattaatggcgaac

SEQ ID NO: 29603 - DNA, 271 bp, Glycine max
  unsure (1)..(271): unsure at all n locations; Clone ID: 701061561H1
gatttgcatctccctgtggtntctcatgagtatggaaatggtttggctgtggagagtgcttggattgggaccagggattatagtgctcagttggtggttccggccgcggtggagtttgttaaccggtttgaagcagggattgaggggatcaagaagaggaatcatgaggctgttgtggagatgggggagatgctggcgaaggcgtggnggactcggctagggantcccccgcatatgtgtgctnagcatggttatggttngctnccggctt

SEQ ID NO: 29604 - DNA, 125 bp, Glycine max
  Clone ID: 701061562H1
ctccctctttcctatcacactttctagatagctagcctgtaagatatatatatagatatttcatatatatcctatggtccgtgagtgcccttgttctgtaccaaccctttcttccacatgttgag

SEQ ID NO: 29605 - DNA, 188 bp, Glycine max
  unsure (1)..(188): unsure at all n locations; Clone ID: 701061563H1
cgagaattaaatgctcagactgtgaaacatttggacacgcttcatgagtatcttggattaatgttggctgttcatagtgcattctcggatcgttcaagtgcattattgacggtgcagactcttctgtcagaattgtcttctttggagtcaagagctgaaaaacttgaagtggcctcatctaaaattng

SEQ ID NO: 29606 - DNA, 271 bp, Glycine max
  unsure (1)..(271): unsure at all n locations; Clone ID: 701061564H1
ttctctctcacttttcaagaatcgtaagctatgggaaagtcttacccaactgtgagtgctgattaccagaaggccgttgagaaggcgaagaagaagctcagaggcttcatcgctgagaagagatgcgctcctctaatgctccgtttggcatggcactctgctggaacctttganaagggcacgaagaccggtggacccttnggaaccataaggcacctgcnaattggctnangcganaaaagnntttaaacntngntgtaantttnggncc

SEQ ID NO: 29607 - DNA, 274 bp, Glycine max
  Clone ID: 701061565H1
gtagaactgaacaagggtttctctttctctttctctgtctgcttcttcactttctctccgtttcaatcgaaaaaaatcatgggcagaaaattcttcgtcggtggcaactggaaatgcaatgggaccactgaggaggtgaagaagattgttactactttaaatgaagctaaagtccctggagaagatgttgtagaagttgttgtgagccctcctttgtgttccttccttttgtaaaaagtttgctgcgcctgatttccatgtctcggcccaaaat

SEQ ID NO: 29608 - DNA, 272 bp, Glycine max
  unsure (1)..(272): unsure at all n locations; Clone ID: 701061566H1
gggaagcagaatcagcgtgatggcgagaaactgggtggttcgatccttggcgcttcgtcacgcaatgaagaatagggttctcacactctccttcaaccgaattcttccctcactcccatcaaaatcctctctcttagnnnnnnnnnnnnnnnnnnnnnnnnnntctcagctctccctcctcccctccttccaccactctcgctccctctcctccgcctcagctccttccgacgttgtccttgttaatccgaggaagagttcaacaatatcct

SEQ ID NO: 29609 - DNA, 274 bp, Glycine max
  unsure (1)..(274): unsure at all n locations; Clone ID: 701061567H1
ccctcatcttctccctcttgaatcagcgtcactcactttctctctagcttcattttgtacctacgttctgctgaanncggaaanttaaatataattaatattattatattgatcgatagaaacaggctgacanatttaagcgtagatcggcatcgtggtgctgtatccacttgtccaatcgcaaattcggaaaccctagctagctagctagcagcagcagcagatctgatctcacgttcgttcgtggttatggcgccaaggaaacctcgcgagc

SEQ ID NO: 29610 - DNA, 268 bp, Glycine max
  unsure (1)..(268): unsure at all n locations; Clone ID: 701061568H1
gtaggttaaacactcttcttcatcgtcgtcgcaatgggacgtgtgatccgtgcgcangtaagggagcaggctcggtcttcaagtcccacacgcaccaccgcancggccctgcccgcttccggagcctggatttcggagagcgcaacggctacctgaagggtgtcgtcactgacgtcatccacgatcctggccgtggcgcgcctctcgctaaggtcgccttccgccacccgttccgctaacaagaagcancgcgagtcttcatcgccgc

SEQ ID NO: 29611 - DNA, 271 bp, Glycine max
  unsure (1)..(271): unsure at all n locations; Clone ID: 701061570H1
ctaacggcgacacctcaggttccggtgtccggncatgtggggatngatgactataaatagcganacagcgtcctttgctgattcccacatcacagcaaaggagtgatttggagtttggagcgactgaactaatcattaatttgcactcgctgtttcagnttcatcanccttcttttgcatcattnatatctcttgagaaatggcacangaaacctntctattcacatctgaatcngtanacnagggtcaccccgacaagctgtgcgaccag

SEQ ID NO: 29612 - DNA, 271 bp, Glycine max
  unsure (1)..(271): unsure at all n locations; Clone ID: 701061571H1
gcgaaaccggcaaggtagccagctgggctacatcctttaaattcaacattttcgcacccaacaaatcaaactcagctgacgggcttgccttcttcttggcacccgtcgggtctcanccccaatccgacgatggatttcttggtcttttcaacagtcccttaanggacaagtctctccaaaccgtggcgattgagttcgatactttctcgaacaaaaaatgggatcctgcaaaccgacacatcggcattgacgtgaactcgatcaagtccgt

SEQ ID NO: 29613 - DNA, 271 bp, Glycine max
  Clone ID: 701061572H1
ggaaagaatcccaaagttattgagaattctgaaggagctcgaacaacaccatcagtggttgccttcaaccagaaagcggagttcttgttggtacaccagccaagcgtcaggctgtgacaaacccaacaaacactctttttggaaccaagcgtttgataggtaggcgttttgatgattctcaaactcagaaggagatgaaaatggttccatacaagattgttacgcgtcccaatggagatgcttgggttgaagccatgggcagcagtattct

SEQ ID NO: 29614 - DNA, 271 bp, Glycine max
  Clone ID: 701061573H1
cctacttgatcattcaccacatttcatttacacaaatcatcaatggcctctcttgtatcctcaagtgttcttttacacctctttctcataatttccgcgctccatttgggcgcagagcaagaattctgagtgaaaaggaccaacaacaacaattgcagttccaataccacaaaggccctcttctcagtggcaaaatctccgtcaatctcatctggtacggtaacttcaagccttcccagcgagccatcatctccgatttcatcacctccct

SEQ ID NO: 29615 - DNA, 243 bp, Glycine max
  unsure (1)..(243): unsure at all n locations; Clone ID: 701061574H1
ggcagagtgttattttnagtatcagcatcaatncgctccaatacccagtgggaaacgtgattccagacgganttttggcttacttggatgaagaaaacaaaccccaaactgtctccattcactctctcgccaccggcaagaaagtcatcatctttggggttcccggtgccttcactcctacttgcagcttgaagcacgttcctggcttcattgagagagcagaagagctgaaagggaagggtg

SEQ ID NO: 29616 - DNA, 269 bp, Glycine max
  unsure (1)..(269): unsure at all n locations; Clone ID: 701061575H1
cctaaccctcacgaaagcccttttcgattccgataactctcgttgttccgaaaccctaaccctaaccgggttttttcgtttgtttggattgaattggcatcggagggaggcgatcgattggaaattggtagtagtagtttagcgttgaagnacgatgtctgctgctgtgtgcggaagcaagagatctttcttcgaagagcttcctccttctccgccactctccaagaggctccgttgttcctcttcgccgattcgattccctcctcctt

SEQ ID NO: 29617 - DNA, 248 bp, Glycine max
  Clone ID: 701061576H1
acagagttgacagagaaacatcactcacagcgaaaatggcaaagagaacgctgctgaagctaaagccaagtctccacgttccgttacgtttcttccgcagctccactttggccctgacccgacccgttgccccgcttgcccgacccgaatccccctcgatatccctcttcaaaccctccaccgttcacttcccgggcatactcgcaaggcaaatggtcactgcgagatcgccacgtggtgcttcaaaa

SEQ ID NO: 29618 - DNA, 112 bp, Glycine max
  Clone ID: 701061578H1
atgttgggtgttataaggcacaagagtattcgccctgccttctccgcaatcagacacttgtcttctgcagctaaagagattactgtcagggaggctctgaactccgcactcg

SEQ ID NO: 29619 - DNA, 271 bp, Glycine max
  unsure (1)..(271): unsure at all n locations; Clone ID: 701061579H1
gcaaaaacaaaatcccagtatcaaaattcttctctttttttcatatttcgcaaagacatggatttcagagtgatgggtttggagtctccactgttccacacgctgcaacacatgatggacatgtcagaggacggtgcaggagacaacaagacacacaatgctccaacatggtcatacgttcgagacgcgaaagcaatggctgcaacacctgcggatgtggaaggagtntccgntttcttagtgttcganatcgacatgccgggtataaatg

SEQ ID NO: 29620 - DNA, 268 bp, Glycine max
  unsure (1)..(268): unsure at all n locations; Clone ID: 701061580H1
ttgtttaaagtgagaganaaaganagaagaaaatggcaaactttccagttgttgacatggggaaacttaacaccgaagagagagcagcagccatggagattataaaagatgcctgtgagaactggggtttctttgagttggtgaaccatgggatatccattgagttgatggacactgtggagaggctcacaaaagagcactacaagaagactatggagcaaaggttcaaagaatggtggccannaagggcttgagtcattcantcana

SEQ ID NO: 29621 - DNA, 287 bp, Glycine max
  unsure (1)..(287): unsure at all n locations; Clone ID: 701061581H1
gnnantccgntcgagnagatgccttccctccaaaccacgtcatcaaaccaaaacccttcatgggtggatgagattcttgagttctcagtggcgaggcgcggggccccccggcggtcggtgagcgactccgtcactttcctggaggcaccattgctggaccaccatcattgcaaaggtggcagtgttgttggtggtggcggcggcaacaacgagttcgagaggttcgatgatgaacaattcatgtccatgtttagtgatgaagcttcagggaacaataacaataataa

SEQ ID NO: 29622 - DNA, 272 bp, Glycine max
  unsure (1)..(272): unsure at all n locations; Clone ID: 701061582H1
cttcttctttcacaattacacccaaanccaatccncttcctcttcccacaaatcgtgacacntttctctctttcccttctctattccgcgcgattcgcaaacnccccagattgagacccgcccgcgcgcaaattgaagaagagaaggccaaaagatttgatctttcaatcgaggggtttctggggtgtccgaggatgaggctcaacggtgaaatctcaagtggagaagaagaggagaaacaaacgggaacgacgacgttttcgtcgcagaaa

SEQ ID NO: 29623 - DNA, 268 bp, Glycine max
  unsure (1)..(268): unsure at all n locations; Clone ID: 701061583H1
cgcgaatttacaaaactagccaggaacaggccctgtctttccgatattcaccatctcnttctctctaatccaaaaaaaaatctgttgtgaacaaacacacattattgtttgttttcatcccacggaaaaatcgatcaggcaaaacaaacaaaggtgaaactgaataggtgcgtgtttgtnttgatgggctaagaggacagagaaaaagaaaganagagtataanatcaaatctggcaaatctcgtggggttgagggctcggtcttcgt

SEQ ID NO: 29624 - DNA, 267 bp, Glycine max
  Clone ID: 701061584H1
ccaaatcgtagatctacggttaaattggtgtagtgtggtaagatgggaggaggatttagagtgcttcacttagttaggccatttctctcgtttcttcctgaagttcaaactgctgacaggaaagtgccatttagagagaaggtcatatacactgtgatctctcttttcattttcctggtttgtagtcagctccctctatatgggatacactcaacaacaggtgctgatccattctattggatgcgtgttatctcgcttcaaaccgtg

SEQ ID NO: 29625 - DNA, 265 bp, Glycine max
  unsure (1)..(265): unsure at all n locations; Clone ID: 701061585H1
tcttcttttctttccaantctagaatattcctattcttcttctcatttcaactcttggttcttttctcgtcacgctagtaagcgtagttcggtgttggagaatcaggttccagtcccagaatactgctattctcgaataactgaattgtgtttctaggttatcttctctgaattgcaattgcaaatgaatgatcgttgaaaaactatgaagaaggtgaggagaaagatcggcaagtatgaggtgggtcgaacaatggcgaaggca

SEQ ID NO: 29626 - DNA, 267 bp, Glycine max
  unsure (1)..(267): unsure at all n locations; Clone ID: 701061586H1
cacagtcttgcgagtnaacacaagttacaacaatggctttctttggtagaattgggaatttgttacgacagacagcgagcaggcaggtcagttcaaaattgcgttcgcccccttcattttttcaggctatacgctgtatgtcatctgccccaagcacaaaactgtttattggaggtgtttcatattctactgacgagcaaagcttgagggaagctttttcaaaatatggtgaagttgttgatgctcggataattatggatcgtgaaa

SEQ ID NO: 29627 - DNA, 235 bp, Glycine max
  Clone ID: 701061589H1
gaggtaatttgcaatggctgaaccttccaaggtcattcacgttcgaaatgtggggcatgagatatctgaaaatgatttgcttcaactatttcagccttttggagtaataacaaagcttgtgatgttgcgtgccaaaaatcaggctcttcttcaaatgcaagatattccttctgcagttaatgctttacaattttatgcaaatgtccagccaagcataagggggagaaatgtttat

SEQ ID NO: 29628 - DNA, 265 bp, Glycine max
  unsure (1)..(265): unsure at all n locations; Clone ID: 701061590H1
ttctctgcactttgcagtttcttcttgcttgcattctttgggagttcaggacagataatggcttatgttggcatagatctaagctctcctactcttgcatcagccatgcttaatctcattccagctttcacttttatacttgctctcatttttaggatggaagaagtacattggaaacattccagcagccaagccaagttcttaggaacaatagtatcaattgctggagcatttgttgngatactgtacaagggcccacccatct

SEQ ID NO: 29629 - DNA, 266 bp, Glycine max
  unsure (1)..(266): unsure at all n locations; Clone ID: 701061591H1
tttctctctgtctcgtttacacatctctccaacctttccactttcgtttctcagttttattcgaatccctctctcaatctcctttccaaatggccagcgttgaggttgcacagcaaacaccaacaacagttccagaaaatgaaacaaccgaggtaagcaagacccaggaaacaaccccagtcactgaggctcctgcaacagaacaaccagcagctgaggttctgcaacagaacaaccagccgtgaggctcctgccccagaatcanc

SEQ ID NO: 29630 - DNA, 200 bp, Glycine max
  Clone ID: 701061593H1
caaagccgttcttctgccacgtgtgcagtcagaggatcacgtgctccgatgagtcggaacccttctgcccgatctgtatggaaagtttcgtagaagaatgcaaccctaacaaccctaaccctaatcttttcaccgagaatgaggaatcttctgattccgaaatctccttctccctgctccctctctttctctcctccgta

SEQ ID NO: 29631 - DNA, 266 bp, Glycine max
  unsure (1)..(266): unsure at all n locations; Clone ID: 701061594H1
ctaaatgttatgagggagatatcatatcaaagccattaggttatgctgctcaaaagataagggaagcagttaacgcggttacgggtgagtatgtaaagtcacaattaagtgttggtttagggcaagagcaagtggatcacattagggcttttttcatgggacaaggacacggtacaaaaccggcgtatgctagggatcataacattctcctcacaagctggatgaacatgccagtgtatgaanctgttttggtnggggaaacctnc

SEQ ID NO: 29632 - DNA, 171 bp, Glycine max
  unsure (1)..(171): unsure at all n locations; Clone ID: 701061595H1
gaatccactctcgattgctaccattccaaattcaagcttcttacgagagattcgttcattgcttcttcttnntntcctttcattttatacggcatacagcancagactttccttcatgggcatggcaatttttccataaaaattcgttttttatttcctctctttttaaaa

SEQ ID NO: 29633 - DNA, 219 bp, Glycine max
  unsure (1)..(219): unsure at all n locations; Clone ID: 701061596H1
ccaaaaccctaccgacaccacactcaatcgaaattcttcattctcttctcatcgatggggcagaagtctctgatctacgcgttcgtgtcgcggggaacagtgattctcgcggagtacaccgaattcagcggaaacttcaactccatcgccttccagtgcttcagaagctcctggccaccaacaacaagttcacctanattgngangcacacacttttnt

SEQ ID NO: 29634 - DNA, 276 bp, Glycine max
  unsure (1)..(276): unsure at all n locations; Clone ID: 701061601H1
cgcagngtcaganagagagattcactgaaacagancgcagannaaaatacataaactaatnccaganaatgancagcggcgctggaaaggtggtgtgtgtcaccggcgnttccggttacattgctcctggatnnttcaaattccncctcaatcgcggctacnaccntaaggccaccgttcgcnnacacaagtnnatcccgnaaaaaataacccanttggttngcctacnacggtggctnaaggagaggntgcacctttancaggcgaagnttcttt

SEQ ID NO: 29635 - DNA, 267 bp, Glycine max
  unsure (1)..(267): unsure at all n locations; Clone ID: 701061603H1
aaattctacaccatgggcacngaggttctacggccacaagattgtttcacccaccgcatcgctgttgcaccggcggggcnttcccggagnagaacctctgggatcacacaacaacaattacttcaggggcacgcggaagccggttacccgacccgaacagagaaaacgggttgnggagaaaaggcccagcttcgntgatttcgaggttnttcgaggtttgagntgnagaangtcaccattctccggagnggggaaatcgctcgattc

SEQ ID NO: 29636 - DNA, 259 bp, Glycine max
  unsure (1)..(259): unsure at all n locations; Clone ID: 701061604H1
gaaaanccttcacagtactttataccacnctcatcaactactatggattcaacaacttccacaganngtgaagtagcctatgacatcncntccattcncanagtcnacntagacggncgcatanaaaggctcgnangcttcgnggcngtncctcccgggtctcgannncgaaactaaangtggantcgagagatcntcgtaatcgacgnaaaagcacngcgtatcngctangntttacattgnnataancacttaccca

SEQ ID NO: 29637 - DNA, 264 bp, Glycine max
  unsure (1)..(264): unsure at all n locations; Clone ID: 701061606H1
cgantatcaaccttggatcaggtttagggaatggctgcaatcttagctcgaaaatcactccttgctcttacgtgcgcgccaattggntgtaagcggtcaagggctgcacagctcccaatactatggccttcggttaagtgcacactccttctctaccaaaagagaagatgaggaaagggagcaactcgcaaaggacatttccaaaggattggngttctgnctttgaacgtagcattnaacactctctttctccactgaaatggt

SEQ ID NO: 29638 - DNA, 260 bp, Glycine max
  unsure (1)..(260): unsure at all n locations; Clone ID: 701061609H1
canaaatgaccaagatcttctttgtattgctgctatgtctgatcatagcagcttcttctgggtttgtgaattgctttgatgtnganaagaaggnanagnttggnctatntganntcaataaacgtgacctttctttgaagntcaccaactggggtgcttcaatnttntccctggngattcctnatangaanngaaagttgagtgangtngnnctnggananaatctgtnaaggattntctaatgatacaacatnttttcc

SEQ ID NO: 29639 - DNA, 262 bp, Glycine max
  unsure (1)..(262): unsure at all n locations; Clone ID: 701061619H1
gatcanccccagtttcttcatctctgcatatgaataatccgtattgatntcaatctttgctgtatcgaacatctcctgnacacttcattcccaaagccactcttttcnctgccgtntcngcactgttttgagtaagtagatgatgananaggnttanccacatttgagngggcatcaaagttgncatanncagaannggaatcagctctngtttcaancaacnngancntagatgccnaanccanagnaaangcatgtnncc

SEQ ID NO: 29640 - DNA, 262 bp, Glycine max
  unsure (1)..(262): unsure at all n locations; Clone ID: 701061621H1
ctttcttcnaaaccctatggccgacgaagccaaagccaaaggcaacgcagccttctacctcncggggactatcctnaccgccatccaccacttntccgatgctcatggccctggntcnctccaancatgtcctctattncaaccgntccgtgcatacgnntacctcaaaaactacgcagatgcattancggatgccanaaaganagttgaagtcaagcccnantggtccnagggttacagccgtctcggtgncgcgcanctt

SEQ ID NO: 29641 - DNA, 246 bp, Glycine max
  unsure (1)..(246): unsure at all n locations; Clone ID: 701061622H1
caaattagttcattctctttgcgcacttccctacctctccantcaagatgcagatcttcgacaagaccctcaccggaaagaccatcacccttgaggtggaaagctctgacaccatcgacaacgtcaagggccaagatccaggacaaggaaggaattnccccggatcagcaacgtntgcatgcttncgccggaaagcagntncgaggacggncgtaaccctncgccgactacaacattccagaagga

SEQ ID NO: 29642 - DNA, 256 bp, Glycine max
  unsure (1)..(256): unsure at all n locations; Clone ID: 701061623H1
tgagctataagctagtttatcgtgaggagaatatgaagttgtttgttttctttgttgctgcagtagttttngtagcatggccatgccatggcgcaggctaccaaaggttccctctccgaatgaaaactggctatggtgagcgttcttcggaggtaaaatgcgcaagttttaggctgctgtggaagcacacaacatccgagcctttaaaaccattcctgaagagtgcgacngaaccaacaaagnattacattaatgg

SEQ ID NO: 29643 - DNA, 263 bp, Glycine max
  unsure (1)..(263): unsure at all n locations; Clone ID: 701061624H1
aangaggaagggcgcaagaacgacgaccacgtgtccctgcgtgaagcactacagatccaaggtcgagaacgagctccacgcaggtctgcgccagcatcctcaacctcctgcgactccaacctcgtaccctccgtcttcgccagcnagtccaaggtcttctacttgaagatgnanggcgattancaccgctatctcgcagagtttaaggttggggatgagngaaaaaccgctgctgaggataccatgttgtcttacaaggncng

SEQ ID NO: 29644 - DNA, 262 bp, Glycine max
  unsure (1)..(262): unsure at all n locations; Clone ID: 701061625H1
aaacatttcactaaatagagagacataagcataatattgaganataatggagggttgtacttattgtgtgaagttgctatgccttgttgggtttgtggtgcttgtgagtactattgcaggggtggagagtgctggtgaatgtgggnaatctaccaccccagataatgagggcttataagcttgcaccatgtgcctcagcagccacaagntgagaatgctatgtttctcaganttgctgtgcntcaggtgaaagaaantgggc

SEQ ID NO: 29645 - DNA, 262 bp, Glycine max
  unsure (1)..(262): unsure at all n locations; Clone ID: 701061626H1
tgcggtttttggagtgttatcggtcttnctaanatggctcctcgagaagaaaatggcagcggatgagccagcatttgcttntattacgattacaaaagctaatcatgtccgtnttcttcatcttccccaaacnctcgccgcaaaggncaantanccaacntnctgatacatacttnncaanttcnacacaccacanantanctaacggncaggaacncnttggtcngtgtagacctncnntgcntttgancncanatcntnt

SEQ ID NO: 29646 - DNA, 111 bp, Glycine max
  unsure (1)..(111): unsure at all n locations; Clone ID: 701061627H1
ctagggtntagcagagactctaagaaggcgaaccnttnnganngnantctcgtggaattggtagncaatggngangatcaaggtttncgagcncgaggcagaagacgaagg

SEQ ID NO: 29647 - DNA, 265 bp, Glycine max
  unsure (1)..(265): unsure at all n locations; Clone ID: 701061633H1
ttggccatctagtatgagttttaagttgtaaatcgcatgaaacaatatcaaatttataaaacctttcaggaaatgtaaacacaggttaaaccaggttgagtattttagttggtccaaaggtgtttgaccctcaattatgttttgagactgaattataattggacaagtgtccaattaatggtnaagctggttggactgcctagtccagcaattactctatcacttgaacatggantattaagttgttataacatggncatcnngt

SEQ ID NO: 29648 - DNA, 259 bp, Glycine max
  unsure (1)..(259): unsure at all n locations; Clone ID: 701061634H1
gtattttcattcgagttgcagtttggcggttaaacgtcttcttctcttctcttctctgcatccatcagatccnaattttctcgcgatacgagggagcaatgtcagatgctaaggttgaggatttgaagaaggaagaggaggttggtgatgattctcctaggaacgaattgacagtgaaaaatctgcggatgatctgaaagattcggatnncgataaaagcgatggaaaccccatgccctcatcccagcaggaggaagca

SEQ ID NO: 29649 - DNA, 264 bp, Glycine max
  unsure (1)..(264): unsure at all n locations; Clone ID: 701061635H1
cttgcaaccacgctcagagcgacaagttcagtgttgggatcattcgggtttttgttactcggttcattcgaatggcgacatccttgccaaacgtgtttttgaagggaatcgcagctcgttctctcagcagaccnttaaatgggttgttttattgcacaagatactngaatactgtgtccacatgattactgacacgcatgatgacttacaagccanctaatanggntgaaggntctggccattngtttgtctaatgttattanc

SEQ ID NO: 29650 - DNA, 259 bp, Glycine max
  unsure (1)..(259): unsure at all n locations; Clone ID: 701061637H1
gtttttatcacagaaactagttccatcattttatacatcagggatgttgagaagctcgttctccaatcaccaaggttatataatttactacaaaaaatgataaagaaactatgcaggttcagtgttgatccttggttcccagatattagattcagaagatgattgcaaagaagttgatgaaaggttctctgcactattccacacaacatacgacaggccnagnancggnnngnnnanaaatcacngaggnganagtnaa

SEQ ID NO: 29651 - DNA, 263 bp, Glycine max
  unsure (1)..(263): unsure at all n locations; Clone ID: 701061638H1
gttagcgtcaaccgtccctctcgggccttcgttcagcacagttagganatacataaagaagaaacgcgttttgtcgtccntnnctgagcgtaactctttgtttcgganttgancnctaaattcgnggccattncnaccacatcanntnnctnttttctntaaattccnaatccctttcccagtttcnagnnaaacctaaanctcaaacctaaacctccaanctagaagatgaaatgagtttncccgaatccccngtcccnatt

SEQ ID NO: 29652 - DNA, 258 bp, Glycine max
  unsure (1)..(258): unsure at all n locations; Clone ID: 701061639H1
ctcatcctccgtaacctccgagctctgcaccgaagaacgaagccatngggaagacacatggaatgggatctgctcgcaagctcaagtcccaccgcaggaggcaaaggtgggctgncaagtcatncaagaaatcacatcttggaaatgaatggaaganaccttttgctggttcatcccatgnccaagggaattgtccttgaaaagataggtattgaggctaagcagcccaactctgccattcgtaagtgtgccagggtt

SEQ ID NO: 29653 - DNA, 136 bp, Glycine max
  unsure (1)..(136): unsure at all n locations; Clone ID: 701061640H1
tctaaatagaactttgtaattccactggaattgggntataactcaattctgactgctttactggtggtattttgcaaaanaaaaaanaanaacaaaaaaaaagggcggcnncngccaanncacnnncncncncngg

SEQ ID NO: 29654 - DNA, 260 bp, Glycine max
  unsure (1)..(260): unsure at all n locations; Clone ID: 701061641H1
cagaantanangnttaanttatcaaaaacaaaacaagccaagtgaaagagagaagaaaagtcaaagacaatgtcaggggttcattcanangattgaggagacccttcatgtgggaagccacaagaaggangaggnncacaagggtgagcagcaccatngtggagatacagaggggagcatcatggtgaacacagtactgaatncaaggnnccccatnntgttggtgagcacaanccggngcnccatgggaggagaaganc

SEQ ID NO: 29655 - DNA, 255 bp, Glycine max
  unsure (1)..(255): unsure at all n locations; Clone ID: 701061642H1
cgcaaatcccaacggtgaaagtgtgagcnattaaatttcaaaaaccatatccaattttcatgaaaatccaacggttaatgaaactaggatcgtagttttaccgagacagttttgggtttctgcgggaaaataaaaggctacaatgtgaagggtttttctctaagctcagatatggttttaaaattcccaactgtgagactgtttggaattgggttgtgaacgcgctactaagatttcacggtgatccaaggtgga

SEQ ID NO: 29656 - DNA, 262 bp, Glycine max
  unsure (1)..(262): unsure at all n locations; Clone ID: 701061643H1
tttctccatttccattttctctctcanttttcaagaatcgtnagctatgggaaagtcttacccaactgtgagtgctgattaccagaaggccgttgagaaggcgaagaagaagctcagaggcttcatcgctgagaagagatgcgctcctctaatgctccgtttgggcatgggcactctgctggaacctttgacaagggcacgaaagaccggtggacccttcggaaccattcaagcnaccctgccgaactggctcacagcgcta

SEQ ID NO: 29657 - DNA, 258 bp, Glycine max
  unsure (1)..(258): unsure at all n locations; Clone ID: 701061644H1
taggtgttgagtttgcaaagagtgcagttactattccagctgtgtggaatattcaagtcagcacctggcttacgtncattatgtttacncnaaggcttattcagactgggaagaaacctggtttcattacagctacttgccanccagaccgttagtgctgtttggcatggcttgtaccctggatacatagtattcttgttcatcagcattaatggttgctggttccagagtcatttacagatggcagcaagccgtact

SEQ ID NO: 29658 - DNA, 254 bp, Glycine max
  unsure (1)..(254): unsure at all n locations; Clone ID: 701061646H1
aaaaccgcaacacccttccctctcctctcccncataaaacccacaagnnccttcttcccattgggtacngcagnggcatggccaacaagagaaaatccatatccacnngcctcgacgaggtggatcganccatctantcttccttctgccagnnccgncanttccctctctcanntctacactctctccatgaaccaccagaaantctccttccaagccggtgaacgncatccttgaaaaatctatccgtgggt

SEQ ID NO: 29659 - DNA, 258 bp, Glycine max
  unsure (1)..(258): unsure at all n locations; Clone ID: 701061647H1
cctgaaccctcacgaaagcccttttcgattccgataactctcgttgttccgaaaccctaaccctaaccgggttttttcgtttgtntggattgaattggcatcggagggaggcgatcgattggaaattggtagtagtagtttagcgttgaagaacgatgtctgctgctgtgtgcggaagcaagannatctttcttcgaagagcttcctccttctccgccatctccaagaggctccgttgttcctcttcgccgatcgntt

SEQ ID NO: 29660 - DNA, 263 bp, Glycine max
  unsure (1)..(263): unsure at all n locations; Clone ID: 701061648H1
caactcacgagagtcacatctacgccatgaacaaatcgcagtcgaagaactccaagtcctgcgactgcagttcgactcgccgctcagcttctactccccgatgcacggggacggtaccgagtcgccggagtaccggtcgccggaaaactggccggagaagcgcgacaactccatggccatcgtgaccgccggcaagctcaagcagttcacgccggagaagcgcgcagagcaccggaagccgccggaaaatccgncgtcgacgg

SEQ ID NO: 29661 - DNA, 145 bp, Glycine max
  unsure (1)..(145): unsure at all n locations; Clone ID: 701061649H1
taaanagatgtcattatattcagatcatcactgtggaaaaactcagataccttctatgacatcncagntattagagagcncgcgatgatgtagtnnggtatgnacaatttncgnatantngtgcttattanggtncannancntc

SEQ ID NO: 29662 - DNA, 263 bp, Glycine max
  unsure (1)..(263): unsure at all n locations; Clone ID: 701061650H1
cttgtnatcaagggagagaganaatttcaagcacaaaanatggcggnnaagaaagtggtgatcctaggangtggtgttgccggtgccaaccttggcaaaaactatacaacgtcaagccaacgtcacccttattgatccgaaggcntnttttganattccatgggcaagtttgaggggattggttgagccaacttttnctgaaagggtagtgatcaaccataganngtacttcaaaaaagggtaaaccttgntgnanccagtgc

SEQ ID NO: 29663 - DNA, 258 bp, Glycine max
  unsure (1)..(258): unsure at all n locations; Clone ID: 701061653H1
gttngctacctaaaccctagtctccatacatcaacttgggaggttaaagagacggcaacgttgtgctgtccgccttgaccgcgccagagcttcgtnttggccctcgnttttgccctgtaaaactaatnccagttcacaacanacctnntcaatggcaccnaaacagaccaagagctgagaagaagatcgcttacgatgcgaantgtgcgacctcatggaagagtncgggccaaatcntcgttgtaaatccgacaacgt

SEQ ID NO: 29664 - DNA, 256 bp, Glycine max
  unsure (1)..(256): unsure at all n locations; Clone ID: 701061657H1
ctataagctagtttatcgtgaggagaatatgaagttgtttgttttctttgttgctgcagtagttttggtagcatggccatgccatggcgcaggctaccaaaggttccctctccgaatgaaaactggctatggtgagcgttcttcggaggtaaaatgcgcaagttttagggcttgctgtggaagcacacaacatccgagccttaaaaccattcctgaagagtgnctgaaccaacaaaggactacattaatggcgaac

SEQ ID NO: 29665 - DNA, 262 bp, Glycine max
  unsure (1)..(262): unsure at all n locations; Clone ID: 701061658H1
caaggtttggtcttgttaggttacctcctgtgacatttgtgttgttagttcgtngttgncggatgacacccagagaggatngacagcaggnaaaaaacaaaaaggcgcagatgggtagcacaggtttctccatggaaattggnggatcatccaaagcttccaaagggtaagactgtggctgtggtngtgttggatggttggggagangccacacccatgagtacaactggcntccacaaggctgaaacaccctggctgggnt

SEQ ID NO: 29666 - DNA, 256 bp, Glycine max
  unsure (1)..(256): unsure at all n locations; Clone ID: 701061661H1
ggcttccactgcacatcatcccctttcaagaaaattcagattcaaagnggatgacactagatttgacacgtatgtggttggaaaagaggatgctcctggaattgttgtgattcaggagtngtggggtgtggattacgaaattaancaccatgttgtgaagatttctcagcttggtantgggtttaaagctcttatcccagaatcaccgcttcatgcttatctggttgcattgttacattttgcatntagtctcctc

SEQ ID NO: 29667 - DNA, 263 bp, Glycine max
  unsure (1)..(263): unsure at all n locations; Clone ID: 701061662H1
tcaactctttcaaaagggancaganaaggacaggaaacanaacgcacanagggttattntagcaanggcagaacaaaaccaaaaccagacaantgaagctgnnaaggcaccaagangttggccacaaganccttctccagagtgntgctctttgccagtatgttctggagaccagtgtctagcccaagagaacntggattccatgagcagacntgagagagttgnccagcanaacanccatggaacaccatgncaannctctg

SEQ ID NO: 29668 - DNA, 263 bp, Glycine max
  unsure (1)..(263): unsure at all n locations; Clone ID: 701061663H1
cggacaccttaaacgcaatggnagctgggattattcanagaagtatcantgatgcgatactccaagtatcttagttcaaagacttcatatcttggcagtnnaggatgatgatcttgaaagattactaaatggtgtcataagggnagaagttgaagatncattcctgagaatgttacgtatgcagtgncagtccttggagctttcgaaagtctagtaccngattttatgaagccaagcattagtgangttgatgagctgctggc

SEQ ID NO: 29669 - DNA, 258 bp, Glycine max
  unsure (1)..(258): unsure at all n locations; Clone ID: 701061664H1
gaatgntacgtatgcagtncagtccttggatgcnttcgaaagtctagtacctgattttatgaagccaagaattagtgaggttgatgagctgctggctcttggggtcaacgtgactgtntacagtgggcaagtggatctcatttgtgcaaccaaggggactgnanctggctttacaaaactcgagtggacagggcttcaaaatttcttggagaaagacagaacccccctctactgtggaagtgacaaaacgancaaagg

SEQ ID NO: 29670 - DNA, 253 bp, Glycine max
  unsure (1)..(253): unsure at all n locations; Clone ID: 701061665H1
aaaggctctctcacggcagtcgcagtgagtgaaaaggaaaaccctcaattggcggtattctacantnccttcgagataaagaaaaaatggcagatnatcttgttatccgtgggaccatgcgngtnccacaccgangtnntganggggttggcanngcacatgggacaaattcngncngatngnnaacgcctnatggganaaatncatcanncnctgggnancttaacnaggnngtccgagattgcngtgtacc

SEQ ID NO: 29671 - DNA, 78 bp, Glycine max
  unsure (1)..(78): unsure at all n locations; Clone ID: 701061666H1
cttnnnactantcanctgacttaccttgntatntaaatattgagtgtntaatggcagatccttgnctgtcaaggatga

SEQ ID NO: 29672 - DNA, 256 bp, Glycine max
  unsure (1)..(256): unsure at all n locations; Clone ID: 701061667H1
ttacctctgtgacatttgtgctgctagttcatatatttncggctgacaccgagaaggaaagcaggaaaaaaacaaaaaggagcagatgggtagctcaggtttctcatggaaattggcggatcatccaaagcttccaaagggtaagactgtggcngttgnggtattggntggttggggagaggccacacccaatgagtacaactgcatccacaacgctgaaacaccctggcatggattcacttaaaaagggtgctct

SEQ ID NO: 29673 - DNA, 261 bp, Glycine max
  unsure (1)..(261): unsure at all n locations; Clone ID: 701061668H1
gcctgataaaccatanccgnnccgnaccaccgttttnctttgctttgcgttctacaatgnccgaaaacanncagagattattacatgcaaagctgctatttggctggggaatangaaaacctgtgactgtggaagagatacaagtagaccctcccaaagccaccgaagttcgagttncagatgctttgtgccagtatatgntccacagacatctctagcncaaaggattnccacatancaattttcntatgagcacttggg

SEQ ID NO: 29674 - DNA, 255 bp, Glycine max
  unsure (1)..(255): unsure at all n locations; Clone ID: 701061669H1
gttaatagcaatttcgataagaaaagttccaaaattcagctaagagaaaatgtctctcattccaaacattttcggtggccgtaggagcaatgtgttcgatcccttcaaggattttcctttcccaaattccgtctctacttccttccctgagttttctcgggaaaattctgcgtttgtgaggcactcgtgtggattggaaggagaccccagaacngcacgtgttcaaggccgatattcccgggctgaagaaggagg

SEQ ID NO: 29675 - DNA, 252 bp, Glycine max
  unsure (1)..(252): unsure at all n locations; Clone ID: 701061670H1
gtaacgtatgtnttgcatcatttgattggagctgcagtggaatttgcaagtncagtggagaagattaaatatgtccactgcaaagtgtggtgaaggagatgaagctgtttggagtgctttattttagattgtttcaaagggagatggttttttctggttcggagagggatgattatttaattgcagctgggacaaagtcaattttcagatttgagatgaagcaaatagatataacatgaaaagatctcgtnc

SEQ ID NO: 29676 - DNA, 142 bp, Glycine max
  unsure (1)..(142): unsure at all n locations; Clone ID: 701061672H1
cggagattacttntttgcngcggtgctngtngcggagactcccncgccggaatataccttcccacgcctcctcctacnatctccntcacctncntcnncttcttcgcngnagcgttgnaaaacaacgtnntctctctngcat

SEQ ID NO: 29677 - DNA, 167 bp, Glycine max
  unsure (1)..(167): unsure at all n locations; Clone ID: 701061673H1
cgaagtttgggctgaccaccgctcagattcntagggttgtgaagaanctggacctgcgcgggcatgctggatgcctgcnactgncncatnttgnanancngttctcancttcccncaacagngttgcttgactgangcnngtgggcanacgntgagcagatctncta

SEQ ID NO: 29678 - DNA, 253 bp, Glycine max
  unsure (1)..(253): unsure at all n locations; Clone ID: 701061675H1
tgaaactaattggtaagctacaagatggtaccgcttttttgaaaaagggccatgatgaagaagagaagctgtttgaattcaaaacagatgaggaacaagttgttgatggacttgataganctgtattgactatgaagaagggtgaggttgccgttgttgaccattgcacctgattatgcttcggtacatcagagtcccaacaggagttcgctgtnagttcctcctcaatcagccgtgtattttgaattgagct

SEQ ID NO: 29679 - DNA, 254 bp, Glycine max
  unsure (1)..(254): unsure at all n locations; Clone ID: 701061676H1
tgagctataagctagtttatcgtgaggagantatgaagttgtttgtntnctttgttgntgcagtagttttgngtagcatggccatgccatggcgcaggctaccaaaggttccctctccgaatgaaaactggctatggtgagngttcttcggaggtanatgcgcaagtnttaggcttggctgtggaanncacacaacatncgagcctntaaaaccattcntggangagtgcgttgaacccaccaagggnaacatt

SEQ ID NO: 29680 - DNA, 255 bp, Glycine max
  unsure (1)..(255): unsure at all n locations; Clone ID: 701061677H1
cctgagctttttgtgaggattccaaagcatggcttcccttggcagcatccactgctgntgcttcccttggcatgtcagaaatgcttggaaaccccatcaacctcagtggtgccacaaggccagctccatctgcctctagccctgcctccttcaagactgtggctcttttctccaaaaagaaggctgcacctcccaaaaaaagntgcagctgntgctcctgccaatgatgagcttgccaagtggtntggtcctgca

SEQ ID NO: 29681 - DNA, 255 bp, Glycine max
  unsure (1)..(255): unsure at all n locations; Clone ID: 701061678H1
cntgttcaccatacatggactctggcctgactatnntgatggaacctggccgtcctgntgctctggatctagtttcgatccaaaagagatattgacattgactaatantttagagcaatattggnccatcattgaggctgtagcaagccatcattatgccatngtgggaaaggaacattttgggctcatgagtgggagaaacatggcacatgctcttgtcctgtgtttcnaaatgantatgattatttgtggccc

SEQ ID NO: 29682 - DNA, 259 bp, Glycine max
  unsure (1)..(259): unsure at all n locations; Clone ID: 701061679H1
cccgctccctctccatcccatcacaaagaaaacagagcttcgcattattagcagatcggactcaaccgatgaanttgangccgcagtgaaacaaaccagaataattgacgcatcatcaattagatgcgagnctgctagaaatgaaggatgaggacgggcttccgacgaccgccgccacgaagaaggnaagcatggattcgagtctgtttgggaaagggaggtncaaattctgggcgttacggccatnttgcttctgggc

SEQ ID NO: 29683 - DNA, 263 bp, Glycine max
  unsure (1)..(263): unsure at all n locations; Clone ID: 701061682H1
ctaaaccaaanctctcactcgccgtcgtagggtttntcctttcgtttancaacaacaacaatggttgcagccaagaaaaccaagaagacccatgagagcatcaacaacaggctcgctacttgttcatgaagagtggaaaattcaccctcggtntacncgacggttctcaanttcanttaggagctcccnagggnnattngttatcntgctnaccaacngncccccctttgaggaantcngagattgaatactatgnctagatt

SEQ ID NO: 29684 - DNA, 258 bp, Glycine max
  unsure (1)..(258): unsure at all n locations; Clone ID: 701061683H1
gcggcaatgttacatcacagaagagttggatctttctcaccttcttgaaaggctaattcaaggaaagggtcagccaaacaccttgactcaatcagagaaactagatctatggagtagactcaaaattctgagttttacaagaatgacattgtcagtatgggctacaacaatgcttagcttntatacaaaagttcaagtcnatattctagggaaggcatttatacattgattacaggcacgtatntcggantctctggt

SEQ ID NO: 29685 - DNA, 251 bp, Glycine max
  unsure (1)..(251): unsure at all n locations; Clone ID: 701061684H1
atttctccctcttcgctctctcncagtnaccaganacagatgatgatggagntggcgaaangaaaacgcngtcgttgcggcactcgnngcgttggtgntactcgnggcgagtgtggcggtggatgcttcagganaactcggacgtnnagacgctggtgangtacnagcacgggaagaagtantgcgacaaaggatgggatgtaagggctgatcaattatgttgtaactcaccattagcggatcatntcccc

SEQ ID NO: 29686 - DNA, 253 bp, Glycine max
  unsure (1)..(253): unsure at all n locations; Clone ID: 701061685H1
cctcgctcgctcgctcctatcttcacatatctcaccaattctctcttctattcgtggtggtgactcacttgttgtttgagcaaagctgcgtgtgatcaattttcgtgttccttcttcgttcccagcttcaggcaccgagtgaggatgaattatccaactatntattagantctgagacgttatntgancgctgctgtggacttactttcacgaacaatcgangatgctcgctgttgttgaagtagaatattct

SEQ ID NO: 29687 - DNA, 254 bp, Glycine max
  unsure (1)..(254): unsure at all n locations; Clone ID: 701061686H1
ctgagatatttcccatacatttgaaggggantgctggaagcttggtggttttggtggcttggctaggagcttgggtagtttcatatactttcaactttcttatgagntggagttntcctggtacattgtttttgtatgntggatgntccctcttnactattctatttgtagcannattagtcccagaaaccaaaggaanaactttggaagagatccagggcttgtatttagttctagngatnanagattcaana

SEQ ID NO: 29688 - DNA, 257 bp, Glycine max
  unsure (1)..(257): unsure at all n locations; Clone ID: 701061688H1
ccagaagcaaagcaaaggcatgntgaggttattagggttttagagatgatgaantganaagtcgaatggcatcatcgtncatcggcatttctggtgatcnncatcctgcactgcgttaatcgcagtggcatgtggggggctgatgatgttctacatgaaggaggtctacaccttcggccacggagtgcaagncgccaccaagtcttgggatccacgccgcaacgacnagtttctcgnccaagacctccgatnccttc

SEQ ID NO: 29689 - DNA, 253 bp, Glycine max
  unsure (1)..(253): unsure at all n locations; Clone ID: 701061690H1
agttgttacttgccacgacccgcgacggcggtggtgtacgaagagagcgagancaggaggtgagcggcactctctccgactacagatatcttcaccacaacagataaaatgaggtacatgaagcccttgccattgtttcntgatttgaagaatacaactcctcagcgcggaaggttgcttggtttggatgtcggggataaatatgttggccttgctctttctgactttgataacaatattgcttcacctttca

SEQ ID NO: 29690 - DNA, 251 bp, Glycine max
  unsure (1)..(251): unsure at all n locations; Clone ID: 701061691H1
agcttgcctggtgatgtgatatttgacaattcatcaggctttagctttacatgtgatttgagtgataacattgntgcaccctggccttcttcatcatcttcatttgcatctatgtcactctgtgcacctgagatgtcattacctgctctcccaacttcttctcagacattanaaaataatggttgtacttctgatggagtgggattggcttgtgcttattttttcatctttcatcttcagtacatgntgta

SEQ ID NO: 29691 - DNA, 253 bp, Glycine max
  unsure (1)..(253): unsure at all n locations; Clone ID: 701061692H1
ttgtttttgaggatgttgaccttgacaaggctgctgaatggaccatatttggttgcttctggacaaatggtcagatatgcagtgcaacttcccgccttattgtacatgaaagtatagcaacagaatttttgaatacgattgtgaaatgggtcaaaaacatcaaaatttctgatcccttggaagaaggttgcagactaggcccttattgttagtgaaggacagtatganaagatattgaagtttatctcanatg

SEQ ID NO: 29692 - DNA, 253 bp, Glycine max
  unsure (1)..(253): unsure at all n locations; Clone ID: 701061694H1
gcatcatcacatgcacccgcgattcctacgatcccttcccatggtctcttctctgcaccctcgccgtaccttctagaaccttccctcagatctcaattccccttccgctttctcctttcatggaaatggcttccactccccgcaccgtcgaagagatcttcaaggactacaccgcccgcagaaccgccatcgttcgcgntctctctcaagatgtggatgaattctacggatctgcgatccagataaggagaat

SEQ ID NO: 29693 - DNA, 261 bp, Glycine max
  unsure (1)..(261): unsure at all n locations; Clone ID: 701061695H1
ccaaanccctnncganaccanactcantcgaaattcttcattctcttnctcatcgatggggcagangtctctgatntacgcgtnnntgtcgcggggaacagtgattctcgcggantanaccgaattcagcggaaacttcaacttccatacggcttccagtgcctncagangctcnctggcatcancaacaagttggcctnacaatttcgacgcacacacttcaattanctcgtcgnacaatggctacacatattgtgtngt

SEQ ID NO: 29694 - DNA, 230 bp, Glycine max
  unsure (1)..(230): unsure at all n locations; Clone ID: 701061701H1
gtttctctctctgctatttatgatacactctctgacgcgcttactgtcaccaaatcaagtgcntccgtctcttccccttcttctctgattggaaggattcgtgtggtcggagatggtggtttcggggccaatcacgccggggcaggtgtcttcttgctgggggttattccagtttttgtttcatggatatattcagagtacttagagtacaagaaactctcatctcctcc

SEQ ID NO: 29695 - DNA, 225 bp, Glycine max
  unsure (1)..(225): unsure at all n locations; Clone ID: 701061702H1
gnnaatttatcttccgttttctcgctgacaccaccgcacactcttcacgccttctctcactnctaatnctattatggcggatgaaggtgttgccaacggnggcgtcgntgatcantacggcgaagaatcggcgactaagatcgcngcgttgcaacgcgancgcgncnaattngtgngccgaattgcgncgatgangggngagnntaanaanntgncagnnttctt

SEQ ID NO: 29696 - DNA, 241 bp, Glycine max
  unsure (1)..(241): unsure at all n locations; Clone ID: 701061703H1
gtttgttgtnagctataagctantttatcgtgnggngaatatgaagttgtttgttttctttgttgctgcagtagtnttggtagcatggccatgccatggcgcaggctaccaaaggttccctctccgaatgaaaactggctatggtgagcgttcttcggaggtanaatgcgcaagttttaggctgctgtggaagcacacaacatccgngccttaaaaccattcctgaagagtgcnttgaacc

SEQ ID NO: 29697 - DNA, 95 bp, Glycine max
  Clone ID: 701061704H1
gttgccagatgtgcccggttttgatgcattatcatccaacgtgtagcagtaatttggggggataataaaaggaataatgtgcctgttttattgag

SEQ ID NO: 29698 - DNA, 244 bp, Glycine max
  Clone ID: 701061705H1
gagaaagaagggggagctatagccataaggagaaaaactttcaaagaagtgaaagcaaaaaagagttgttcttttcctttctgctgataagctgtgtgagtgagttcattgacaagcctgaaatgacaactatgctgacaaatgagcatggtctgagtttgaacctcaaggagactgagctttgcctcggtttgcctggcgggggctctgaagtgggaaactccaagggccactgggaagagag

SEQ ID NO: 29699 - DNA, 241 bp, Glycine max
  unsure (1)..(241): unsure at all n locations; Clone ID: 701061706H1
cttcgttgcttggtgatgtccctttctgttctcttcactcttggtcttgcgagagaaagccatgccagagacgaagatttttggcatgctgtttggccaaacactcccattccaagttcattgcgagatcttctaaagcctggccctgcaantgttgaaatcgatgatcaccctatgcaaattgaagaaacacagtacccgaaanccttcttctataaagaagaccttcatccaggcaaaa

SEQ ID NO: 29700 - DNA, 96 bp, Glycine max
  Clone ID: 701061707H1
ggttgccagatgtgcccggttttgatgcattatcatccaacgtgtagcagtaatttggggggataataaaaggaataatgtgcctgttttattgag

SEQ ID NO: 29701 - DNA, 241 bp, Glycine max
  unsure (1)..(241): unsure at all n locations; Clone ID: 701061708H1
cttttctcaatttcgctctctattgtcatcaattcacacatccaccgttcagttaaaanccacccaaatccgatggcggcgtcgcggcgtctccgggacctccaatcccaaccggcgaacaagatctgcgtggactgttcccagaagaacccgcaatgggcctccgtatcgtacggcgtcttcatgtgcctagagtgctcaggcaagcaccgcgggcctgggcgtgcacatctccttcgtg

SEQ ID NO: 29702 - DNA, 242 bp, Glycine max
  unsure (1)..(242): unsure at all n locations; Clone ID: 701061709H1
tgcaactnaacnaatcaacaactttcttgtattccanatnatctncacnattanaatcctcanantcaacaagtgannaccttaacatanaacaaaacacaatggtaatgtgggtatttgggtatggttctttgatctcgaaagctgggtttcactatgacgaacgtattgttggtttcatcaaaggctatcgacgagtcttctaccaaggctctactgaccacagaggaacccctgagttc

SEQ ID NO: 29703 - DNA, 237 bp, Glycine max
  unsure (1)..(237): unsure at all n locations; Clone ID: 701061710H1
ttctcttcaattttacttctttagccttacaatgacttcttcagtcagacgcggactccactcttctttctgtgtgtattgcaacancaaataatcagctagtgttttgtgatggccatggatgcannaggcataacttgggttggaaacatattccagaagtttnaggncatttntgtggacgtggaagacacaatgttggaggtatnnctttgtcatcatttatccttaanctaa

SEQ ID NO: 29704 - DNA, 238 bp, Glycine max
  unsure (1)..(238): unsure at all n locations; Clone ID: 701061712H1
gnagtttcatcttcttcttcactctcttgctctcagtctcagactatttttctgaaagcatttcaaatggttgatagcaatccttcctctggatcacccgaagaaacacaaaatcccaacccagatggggatgcnnctgntgaaagtgattgggattggngaatctagcncnaaaagttaangaatctctctctctggaaaaaagacatannttttgggaaacccaacctgttgggna

SEQ ID NO: 29705 - DNA, 242 bp, Glycine max
  unsure (1)..(242): unsure at all n locations; Clone ID: 701061713H1
cgacaaganggaaacgttatcacaaattggattgttcctccgaacagtgaaccctcacctaacaatcagaacccaggatttggtgaaacgatgaacagtgataggaaaattggggttgccttggacttttccaaaggaagcaaaatcgctctgaaatgggctattgacaatcttatcagcaacggtgacactctctacatcgtaccacaccaagccttccggaggaagtgaatcaggaaatc

SEQ ID NO: 29706 - DNA, 248 bp, Glycine max
  unsure (1)..(248): unsure at all n locations; Clone ID: 701061715H1
ggtngacntcnctnagctanaatnnccctcnctgatggctncaccggagcttgggttgnacacngctcctnncacccgtacnttnngannttgcttctccgcatagcatnctgttctatagggcttgcgcttcccgtatattccacgtttaaagcnattgagaacaatgacccatatgagcaacaaaggtgcctattgtattgggcagcttatggatcttttnntgctgcagaaatgtttgctganaa

SEQ ID NO: 29707 - DNA, 251 bp, Glycine max
  unsure (1)..(251): unsure at all n locations; Clone ID: 701061716H1
ccgcagggagacggtttctttcactctctgcaattcgcgatggctgacgaggactatgaagatattgacatggggtacgaagatgaaccgccagagcccgagattgaggaaggtgcagaggaagatgtggagaacaaaaacgatgaaataactggagagcctattgacaccgaggataaggaagaggaacaaccagtgaagcggacctcganagacattcgaaatatatgnactaagtatgagcgtgctag

SEQ ID NO: 29708 - DNA, 241 bp, Glycine max
  unsure (1)..(241): unsure at all n locations; Clone ID: 701061717H1
gnntcnntnntnatgacttgngtatatctcttctgggcaatcaaagagacgacattcttccccgacaaatttggagttagaccaattcatgacaatccagatgaaatgactgctgctttgtatctacaagtcagtatagttagccaggcttgatatttgtcacccgttcgcgcantggtccttcatcgaacgncctggatgctgttagtgactgctttcgttatgctcagctgattgctac

SEQ ID NO: 29709 - DNA, 247 bp, Glycine max
  Clone ID: 701061718H1
ccatatgtaagaatgtaagttatgttaccacgaaatatctcaaagaaaataattttggctaacgtgtttccaattccataatgtttttggaataaaatttagcttttatgtatagacagtggaaaggtttttttcatttttgttctgtctaagtaaattagaaataaagtttaattcattgatggtgaagaaactttttaattataattgcatgtactattctctttactctttggaacaagggcca

SEQ ID NO: 29710 - DNA, 247 bp, Glycine max
  unsure (1)..(247): unsure at all n locations; Clone ID: 701061719H1
cttaacaacagcacaaagcgggttactgtctgttcaagctaccatatctctctctctnttcttagtgcctnccttgccanaagttaaaatggnccntgaaactttccnattcacatntnnatcagtgaacgaggggcaccccgacaagctctntnatagatcngggtngncagtgctagatgnatgnttggagcangancctnanagcnaggntncctgtgaaaccnggcaccnagaccaacatggt

SEQ ID NO: 29711 - DNA, 237 bp, Glycine max
  Clone ID: 701061721H1
agaattagagatggaaaagagcagagtgcttattgttgggggaactggctacataggaaaaaggttggtgaaggcaagtttagctcaaggacatgaaacatttgttcttcacaggccagagattggtgttgatattgagaaagttcagcttctattgtcactcaaggagcaaggagctaggctgtttcaggttcatttaacgaccataagagcctagtgaatgctgtgaaattgttg

SEQ ID NO: 29712 - DNA, 202 bp, Glycine max
  unsure (1)..(202): unsure at all n locations; Clone ID: 701061722H1
ggggcaaatcactgttagctttggctgtaataagcatataatgctttgtattatgaaatcttagttcaattcatctcatgtccatgccgatggctggctcaataaaccttgccataggaacagtatggcttgtggtaccatgcattggtttttaacaactaattcatgtnattaatataagaatgaccagcatattgcattt

SEQ ID NO: 29713 - DNA, 240 bp, Glycine max
  unsure (1)..(240): unsure at all n locations; Clone ID: 701061723H1
cnaagtcacaaagtggtggttgagaattttctttttccaaagaaaaacaagcgaacaactcaacgcgttctagttttttttatagacaccttctaaaaaaaactcaaccccaacattctcgtacacttgatccntcttgggttgtcaacaattttccctcttttcattttccattgctganaaatcataccttgaaatcgaaagcccctgttttgtttttctttcgctggcgtngtgaga

SEQ ID NO: 29714 - DNA, 246 bp, Glycine max
  unsure (1)..(246): unsure at all n locations; Clone ID: 701061724H1
cgnnncncnttctnatcctcttntttctctgntctancattgncatggatcnctanaagnaccggccntncagcgccttcaattctcccttctggactnccaaattctgtgtgctcctatttggaagaanaantccncctttaancgttggagctagaggtccaattctgctggaggattatcatcttgtggagaagcttgcaanttttgatagggaacgtatcncagaacgtgttgtnccatgcc

SEQ ID NO: 29715 - DNA, 237 bp, Glycine max
  unsure (1)..(237): unsure at all n locations; Clone ID: 701061725H1
tccanagacnnctcntaaacgacgccgtttcgcaagcatcagtagtgtagtcgcagagaatcaaattcaatggagaagggaaagggagtgatgggatcgggaggacgaagatggggcgttgacttctccgacaattccacttctcgcgatattncccgatcctcccggtttctgtcgcacttctctcgatcaggacgattcaacgctcagtacgccagaagaaggacgctgaatcca

SEQ ID NO: 29716 - DNA, 239 bp, Glycine max
  Clone ID: 701061726H1
tcttgcttcttgcttctattacttgcttctttcttcaccatgtcacttgctgggaaaatcaccactgaaattggggttcatgcaaccgctgcaaagtggttcaacctctttgcaacacaacttcatcatgttcaaaaccttactgatagagtacatggaaccaagctgcatcaaggtgaagactggcatcacaacgagacagtcaaacactggacttataccatagatggtaaggctac

SEQ ID NO: 29717 - DNA, 240 bp, Glycine max
  Clone ID: 701061727H1
gttacaggttaaatactcatgcagtgatggaaccatttgccatagcaaccaataggcatctcagtgtgctccaccctatttataaacttctttatcctcactaccgcgacaccataaatatcaatggacttgctaggcagtccctgattaatgcagatggcattatagagaaatcatttttgcccggaaagtactccattgagatgtcttcatccgtctacaagaattgggttttcactg

SEQ ID NO: 29718 - DNA, 243 bp, Glycine max
  unsure (1)..(243): unsure at all n locations; Clone ID: 701061728H1
cttcacacactccccatggacttcacncaagacttgcactgtctcctatctgagcncacgccgcaagctccgccgccgcagaggccatggaattggacctcgacttcgccttccgcctccagttaaaggaagccctcgcngcctccctcgccgcccagcnnnnnnnnnnnnnnnnnnnnnnnnnnnngatcatcgaacaacccgtcgtcgtcatccacgatgacgacgtcaacgccatgacgc

SEQ ID NO: 29719 - DNA, 243 bp, Glycine max
  unsure (1)..(243): unsure at all n locations; Clone ID: 701061729H1
tagttanatctctnatagcnactattaccctctctcnaaaactccaaaaatcataatggccatatcanccgatatttntctncttagccanccagcatcncaagtgtccaancttaaaatcttgtatctctctcactaactcatactctgtttgctctgtttcagtgtttctctcccctgctatctctaaattgaacgtgttttctgctactnttgcgcgtgtgnatncctntngcctncaaa

SEQ ID NO: 29720 - DNA, 242 bp, Glycine max
  unsure (1)..(242): unsure at all n locations; Clone ID: 701061730H1
cagaaagangctttcttgagttgagttaacagcatggagagggaggnagatgttaaggttggagcacagaaattctcagagaggcaagcattggggacaggagctcagggtgacaaggactacaaggaggcaccaccagcacccttgtttgagccaggggagttaaagtcatggtctttttacagagctgggattgcagagtttgtggccacattctgttcctctacatcactgtctgactg

SEQ ID NO: 29721 - DNA, 246 bp, Glycine max
  unsure (1)..(246): unsure at all n locations; Clone ID: 701061731H1
cngtgtaactctcaagccatgtctccgggtcccgttattgacgcagccaccgaccccggcgccgaccaacaaattccctccgtcgacgacgcaatcctcaagaagaaagctcacccccaggaagatgacgctcccattgtcgaggacgtcaaggacgatgacaaagaggnaaccgaagacgaggatgaggacgatgacgacgatgacaaggaagatgacgcccaaggtggtgctgagggtgggaag

SEQ ID NO: 29722 - DNA, 251 bp, Glycine max
  unsure (1)..(251): unsure at all n locations; Clone ID: 701061732H1
accactctttaatttctctctgccttgctcatttacacacctctccaacctttcactttcagctttatttgaatccctctctctcctttccaaatggccagcgttgaggttgcacatcaaacaccaacaacagttccagaaaatgaaacaaccgaggtaatcaagacccaggaaacaaccccggaancagtaccagccactgaggctcctgcaacagaantagcngcagctgangttcctgctcaagaaga

SEQ ID NO: 29723 - DNA, 247 bp, Glycine max
  unsure (1)..(247): unsure at all n locations; Clone ID: 701061733H1
gccgcattcacaaataaggttgaagaggtcactgccggaagaagggagcaacaccatctttcattttccggcgatctcttgtttcttccatcatcaccgttttccggcgatccctaatcctcgcaaacagaaatgacgacatcaaggcgccttgcggncaggacacgtggagnagtttgagaagaacatcacaaaaagaggatttgtgccagacataccataagaagggaaaagactacccgttggc

SEQ ID NO: 29724 - DNA, 246 bp, Glycine max
  Clone ID: 701061734H1
gtttccgctgttctctttcaagttccaagaaatgtcaattataacacgcagaggcatccgttacatgccaagactagatgcagcaaaagtatctgctgctttgctagaaaaaggccaaaatcgtgtcatagatgcttcacttacacttattcgagaaagagcaaagcttaagggagaacttgtgccgtgctttgggaggtgctaaagcaacttcaactcctcttggagttccttgggacataattc

SEQ ID NO: 29725 - DNA, 242 bp, Glycine max
  unsure (1)..(242): unsure at all n locations; Clone ID: 701061735H1
gaggcctctgagtctcagtctgncggagctaacctcctatgtcctatgcttcatcatcctcctgcttctcctggaacagatctcctacatactaaaaaaagcttccatcccaggaccctcctttgtacttcccttcataggcaacgctatcccattggtccgagacccaaccaatttctgggacctccaatcctcttttgctaaatccaccccctcgggcttctccgccaactacatcannc

SEQ ID NO: 29726 - DNA, 242 bp, Glycine max
  unsure (1)..(242): unsure at all n locations; Clone ID: 701061736H1
cnagaagtttccaatatgtctctgatttggtggagggtctaatccgccttatggaaggngaacacntgggacctttcaatcttggaaatcccggagaatttaccatgcttgaacttgccaaggtggttcaagaaacaatagaccctgatgctaggatagagtacaggcccaacacagaggntgacccgcacnagagaaagcctgatatangtagggctanggatcaacttggctgggaatcc

SEQ ID NO: 29727 - DNA, 80 bp, Glycine max
  unsure (1)..(80): unsure at all n locations; Clone ID: 701061737H1
gntactacnaccattctccaccacctccagtcnaccaccaccctngnnnccatcttggnccccacncacaccctcatcct

SEQ ID NO: 29728 - DNA, 239 bp, Glycine max
  unsure (1)..(239): unsure at all n locations; Clone ID: 701061738H1
caagggngaatcaattcctcatcgctgcaattcttctttcactctctagtttctcntctttctttcttccaacctcttctcttctntacccttcagaaaagaaattaaaaaacgtagcttcagattattctagctcttcatttttccatgtnccaatattatgctgtaaatttctcaaactcactgtttcagccacattttggtctaaagatccgtgctttgacccttggcaggttcag

SEQ ID NO: 29729 - DNA, 237 bp, Glycine max
  unsure (1)..(237): unsure at all n locations; Clone ID: 701061739H1
ggggaaatagttatgaaaggngaagtgcgttattttgagttgangcagcttatttntctgtcctattgccaagcaataacgttcttccttctcctcaagtctgaagggcagcnagtccatgatcatcccanaatagntcgccttgaagagatcaagaaattattggatcagatanaacaacttgacacaaaacttccatttgaacttgaggacattcttaaagaaaataatgggtta

SEQ ID NO: 29730 - DNA, 242 bp, Glycine max
  unsure (1)..(242): unsure at all n locations; Clone ID: 701061740H1
ttantctcattcacacattcacngttatactctctctctctttgtcgcttggntcactgatctcatctcaattntcanatatgtcgacatctgatannccagaagnngnggaaangggtatcnangatgcgtacngcacgcngtagatnatcaagngggacgggacctggtggattcattntgaatgtgtnggattncattcatnaacnatggtganantantgaggcagctantggntttg

SEQ ID NO: 29731 - DNA, 235 bp, Glycine max
  unsure (1)..(235): unsure at all n locations; Clone ID: 701061741H1
aagnttctgagagtcntactcgttttgngtttgntcnctctaatctcttggttcgcgttgcagattaaatgattttgtatctttggntctcttttaggttngtacagantggaaatctcgggcttcaactgctatggtactttctgcgaataattctcagcgcatggtatttcatatcagtcgtgggtaattgtttgaaagctatttcatctctgtggagtattaaagaaataca

SEQ ID NO: 29732 - DNA, 235 bp, Glycine max
  unsure (1)..(235): unsure at all n locations; Clone ID: 701061742H1
ctgngcagcagtgcagggaagttggtgtgtgtcaccggtgctgccggttatattgcttcatggattgtcaagttcctacttgaacgtggttacactgtcagggccactgttcgaaacccnaatgatcacacgaaggtagancatttgctaaaacttgaaggtgcaaaggagagactgcacctttttaaggcagatctttgggtganaatcttttgactccattgttgagggctgt

SEQ ID NO: 29733 - DNA, 237 bp, Glycine max
  unsure (1)..(237): unsure at all n locations; Clone ID: 701061743H1
cacaaacatccctcttgatttgaaggttgttttgtgcttatagataaaagttctgccaaatcaagaggggttttcagatcatannnnnnnnnnnnnnnnnntaaacaatggctaagttctttgctgctatgatcttggcactcnttgccatttccatgcttcaaacagtggttatggctgctaatgagcaaggaggccacttgtatgacaacaagagcaaatatggnagtgggagtg

SEQ ID NO: 29734 - DNA, 237 bp, Glycine max
  unsure (1)..(237): unsure at all n locations; Clone ID: 701061744H1
gtttgttgtgagctataagctagtttatcgtgaggngaatatgaagttgtttgtnttctttgttgctgcagtagttttggtagcatggccatgccatggcgcaggctaccaaaggttccctctccgaatgaaaactggctatggtgagcgttcttcggaggtaaaatgcgcaagttttaggctgctgtggaagcacacaacatccgagcncttaaaaccattncctgaagagtgcgt

SEQ ID NO: 29735 - DNA, 237 bp, Glycine max
  Clone ID: 701061745H1
ttgatttccttgcctggttcaaagaaactgtgcaatatgctgattttgtggtcctcaagatgaatgcaggcagtgttgaactcaagttcctctctgatatatttgagaatggagctatatgctatgttgatgagttgtttctcaagtgtcccgagaggggaggtgatgccagcaagggaagttgcatggatatttacaaggatctccgaagcaatggtgtctatgtgcatcaatggt

SEQ ID NO: 29736 - DNA, 240 bp, Glycine max
  unsure (1)..(240): unsure at all n locations; Clone ID: 701061746H1
gnaaatcctcacccattttcttcgtagccaaacactctgaaattctcagttatgtcgtggcaagcgtatgtggatgatcacctactgtgtgaaatcgaaggtaaccacctcactcacgccgctatcatcggccaagacggaagcgtttgggctcagagcaccaacttccctcagttcaaacctgaggaaataactgccatcaataatgactttaatgagcctggatcacttgctccaact

SEQ ID NO: 29737 - DNA, 59 bp, Glycine max
  unsure (1)..(59): unsure at all n locations; Clone ID: 701061747H1
tganatccacggcttaaaanggngcaacatggcnttatactcatcagangtctgcnttc

SEQ ID NO: 29738 - DNA, 245 bp, Glycine max
  Clone ID: 701061748H1
ctagttcaattaaatttgcaaaacatggaatttgataatgaagaccattatgcaaaactacttcgagctcaaacccacatatttgatcaaactttcggattcataaactctatgtcccttaaatgtgcaattgatttgtgcatacctgatgtaatacacaagtatggccaacccatgccactctctcaactcattgcttcacttccaattcacccttctaaggcttgcttcatttccgcttgatg

SEQ ID NO: 29739 - DNA, 245 bp, Glycine max
  unsure (1)..(245): unsure at all n locations; Clone ID: 701061749H1
cgagcttctttatatagtaggattgtgtcttccttcatcacactaaacaanttaaaagaagagcatcactgaactaacaaagcaaccctatgtcgaaggtggtttgtgtcaccggagccagcggcgccatcggatcatgggtggtcctactcctcctccagcgtggttacaccgtccatgccaccgtccaagatatcaaggatgaaaatgagacgaaacatttggaggnactggacggngcnaag

SEQ ID NO: 29740 - DNA, 61 bp, Glycine max
  unsure (1)..(61): unsure at all n locations; Clone ID: 701061750H1
cttcttctcaaatgngaaaangtggcttacgaaccatgcccttcaacntngtgncncgant

SEQ ID NO: 29741 - DNA, 242 bp, Glycine max
  Clone ID: 701061751H1
cgcgttctgagtcttttcttcttcgttaccctcttcacatgccttctctctgctaattcccacgatgaccatattttcctaccgagtcaactccatgacgatgactcagtgagttgcactgctaccgacccaaaccttaactacaagccggtgatcggaatcctgacccaccccggcgacggtgcctctggccggctcagcaacgccaccggggtttcttacatcgccgcctcctacgttaa

SEQ ID NO: 29742 - DNA, 239 bp, Glycine max
  Clone ID: 701061753H1
gtttattcagaagaatggcatcctggttattgggaaggtcgagtaggatcttgattcatcaacatcaccaccttcacaaaaagtacttgcctttcttgttaggaccatttcttaaccataataatagctcttgttcctcttttccatcaactgaaccatctccgtgccgtgatgcatttccgggtaagaactcatcacccaccctcttccgattctcgcgtcatgaatcaaccaaagct

SEQ ID NO: 29743 - DNA, 239 bp, Glycine max
  unsure (1)..(239): unsure at all n locations; Clone ID: 701061755H1
cattggtnnantgtgtccaattctgcttgaggattatcatccttgtggagaagcttgcaaactttgacagggaacgtatcccagaacgtgttgtccatgccaggggagctagtgcaaagggtttctttgaggtcacacatgacatttctacacctgacatgtgcagatttccttcgagcccctggagttcagacgcctgtnattgttcgtttctcaactgtcatcatgagcgtggtagc

SEQ ID NO: 29744 - DNA, 217 bp, Glycine max
  unsure (1)..(217): unsure at all n locations; Clone ID: 701061756H1
ccttacccttttttctgtctttgcacntcttttcaaggctaactcgtggcctcgtcntctccttttctgtatcgtttttactttcaaccacttccaattttctttttcgtcagatcttaataccatcatggaggatgctgctgcttctgctgctactgctaatgtattggaagccaaagatggtactatttctgttgcttcagcatttcctggtcat

SEQ ID NO: 29745 - DNA, 237 bp, Glycine max
  Clone ID: 701061757H1
accaaccaaacgaaggcagaaacaggcaaagagctcatagaaattctcgtcctcttcctacataagtacttctcttatcataaacgcgtgttgctcggataaggttgtgctgcggtgattcactcgtactttgcttaatatggcggttgagaagttgagcattgcaaaagatgtgactgaattaattggcaaaactccattggtatatctcaaccgcatcgtggatggctgtgttgc

SEQ ID NO: 29746 - DNA, 234 bp, Glycine max
  unsure (1)..(234): unsure at all n locations; Clone ID: 701061758H1
aactctttctggattcagtttttgatgtgaaaatggcagtgactcttacntcaacactctttctggcttgcnatttgctgcttcagcttttgctgctcttcancctagagtacctgaagcttacctccaaaatgggaactttgaggagcagccaaaccctaaatacctgaagnaaacaaagctctttggtaaatacgcttgcctaaatgggngatcaatggtctggttgantat

SEQ ID NO: 29747 - DNA, 234 bp, Glycine max
  Clone ID: 701061759H1
tttgattgtgcagcctttatgacaacatgtgggaggatgggaattctctagggccgaaggaggtgcataattatttaacccgtgtaatgtataatagacgtaacaagttcaatccattgtggaatgcacttgtacttggtggggtgaaaaatgggcagaagtaccttggcatggttaacatgattggcattaattttgaggacaaccatgtagcaaccgggctggaaatcatct

SEQ ID NO: 29748 - DNA, 239 bp, Glycine max
  unsure (1)..(239): unsure at all n locations; Clone ID: 701061760H1
aattctnactcctccaacaccaccaccncnnattcctaacacacactctnngcacagagagtgagagaggagtaggttnngttcatnaagttngaattttgaaccacccnttttgttcngcaatgtcgngttcnccggggaagccggtttccgaggtggtcggcatagacgnnagnttngtngatnggttncgcgacgcgttgacttgngacgatggtaggaacaacaacaacaatatt

SEQ ID NO: 29749 - DNA, 241 bp, Glycine max
  unsure (1)..(241): unsure at all n locations; Clone ID: 701061761H1
gtttcanatcttacattcttgaatgctccagcttatagcatacacccagtttattggcagccatgtacatattccaaaatgtttccaatctccaactcctccagaatccccttatactgttggtatagtgccagattcttctgataatgtgtgtatagaagattgtattgttgccatgggatttgatgcaatttctcttaanagtggctgggatgngtatggcatgcttatggcaggccta

SEQ ID NO: 29750 - DNA, 242 bp, Glycine max
  unsure (1)..(242): unsure at all n locations; Clone ID: 701061763H1
tggatagatagaatagatagggtgtgggaaataagaacagcaacttctctttactgtgtgtgaaaaaaatggccacactcacacttttatcatctctgtctctgcgcnnnnnnnnnnnnnnnnnnnnnnnnnnnnnnnnactctcttcttctttttcttctccctcctcctttgcctttttttgtagcttccccttgcgctctgccacttcatcattgaaggtacaaacaattcagaagaag

SEQ ID NO: 29751 - DNA, 178 bp, Glycine max
  unsure (1)..(178): unsure at all n locations; Clone ID: 701061764H1
tgattgaagangatgccgatcagaaacatcgccatcggaaggcctgaagaggctactcaccccgacacgttgaaggcggggttggctgagttcatctccaccttgatcttcgtgttcgccggttcaggttccggcatcgcctaacaacaagctcaccgacaacggcgccgccactccc

SEQ ID NO: 29752 - DNA, 251 bp, Glycine max
  unsure (1)..(251): unsure at all n locations; Clone ID: 701061765H1
gnngntgnttctntnanaagnacttcnncttntccgtttctcactagactcacatcgngccttccatttcgctgcattccctctgcgttctccaacgaggaaactcatgtcgcacactctcgcacgtnccactctcggtctcacacatccttctaacatcgaaacacccaaganctctttangntctaaggatgtngangtncacggantggaaaggggacttctggcagtgggtgttacggagaaagttt

SEQ ID NO: 29753 - DNA, 239 bp, Glycine max
  unsure (1)..(239): unsure at all n locations; Clone ID: 701061766H1
agtaacagctgctccagtgccttatgtccaagnaattgcaaaggaggcattgaccatagtgcctgagcgttatgttcgaccagttcatgaacgtcctatattatctaactctacacctttacctgaaattcctgtcattgacttgagcaaattgttgtctcaagaccacaaggagcatgaactcgacaggcttcactatgcatgcaaagnatggggtttcttcagctaattaatcacgg

SEQ ID NO: 29754 - DNA, 239 bp, Glycine max
  unsure (1)..(239): unsure at all n locations; Clone ID: 701061767H1
gcaatgaaagcaataagtccctccttcctctgccttataattcttgtgacccttttngctggtagcattgaaagtgcaccagcaaacgtgaagccaagccattatgctgcacccttcaataggagtgtttttcctctggttttctatttggaataggctctgcagcttaccagatagaaggagcagcagctatagatggcagagggaccaagtatatgggacacctatactaaacagca

SEQ ID NO: 29755 - DNA, 237 bp, Glycine max
  Clone ID: 701061768H1
ctttttctctaagtctaaggggtgccctgagatcactttgagcaatggtgaaggctgtggcagttcttggcagcagcgagggtgtcactggaactattttcttcactcaggagggaaatggtccaaccaccgtaactggatctcttgctggtcttaagcctggtctccatggcttccatgtccatgccttgggggacactaccaatggttgcctgtcaactggagcgcattcaatcc

SEQ ID NO: 29756 - DNA, 237 bp, Glycine max
  unsure (1)..(237): unsure at all n locations; Clone ID: 701061769H1
ggcattatggggttgacgaatttcgtgctgacagtggcgggtgtaagcnccgtcgttcttctccttaggagtnncgcgaagcaatctgcctccatcttccggcgcaacgtcaagcacattcgcaactggctcgaagaagaaagcgccgcttcatccacgacaatggagaagtccactcccaaagaacttgaatcaaaggttcctccgaaagacattcctaaggaggacaaacattaa

SEQ ID NO: 29757 - DNA, 235 bp, Glycine max
  unsure (1)..(235): unsure at all n locations; Clone ID: 701061770H1
ctgcactcgatcaaacacaaaatggaaaannatgtggggattctcgccattgacatctacttccctcccgcttgcgttcagcaggaagcattggagactcatgatggtgccagtaaagggaagtataccattggacttggccaagactgcatgtcattctgtaccgaagtagaagatgtcatctcaatgagtttgacagtggttacttctctcttgagaagtatgggattgatcc

SEQ ID NO: 29758 - DNA, 173 bp, Glycine max
  unsure (1)..(173): unsure at all n locations; Clone ID: 701061771H1
tgaagccatcgatgctcagatctctccactccgccgccacacgaggcgcctctcatctcttcccgccgtgggtacgcctccgagccggtgccggagcgcaaggtagccgttnctcggcgccgcggcgggntcgggcancctctctccctttctcatgaagctcaatcccctcg

SEQ ID NO: 29759 - DNA, 239 bp, Glycine max
  unsure (1)..(239): unsure at all n locations; Clone ID: 701061772H1
tcgcacgcattgcttcgcctcacaacagcagctgcagcagcantggctnccaaacgaggtggacnggctccggntcttgncgctaagaagaagcctgagaaggtcacgaatccgtngttccgagaagccgtccgcagcagttcggaatcggaggggcgttgcctccgaanagngacttgactaggttgcgtgaagtggcnaaagaatgttcaaattnagaggnagnngaggantctgnc

SEQ ID NO: 29760 - DNA, 236 bp, Glycine max
  unsure (1)..(236): unsure at all n locations; Clone ID: 701061773H1
gnaaagcatccttcgtttcaatttctctctctcagcgctttctgcaatcgaacctttcatctccaaagggatccacaggccgaaggagaaatggggctgacattcacaaagcttttcagtcggcttttcgcgangaaggaaatgcgaattctgatggttggtcttgatgctgctggtaagaccactatcctgtacaagctcaagctcggagagatcgttaccacaattcctaccat

SEQ ID NO: 29761 - DNA, 232 bp, Glycine max
  unsure (1)..(232): unsure at all n locations; Clone ID: 701061774H1
ttgtnctagccatcatttccttcggatgtctatttgcnatttccattgctaaggnggaanccaccaagttagggacggtcatcggcattgatcttggaacaacctattcatgtgtcggtgtttacaagantggccatgttgaaatcatagccaacgaccaaggtaaccgtatcaccccatcgtgggttgctttcaccgacagtgagagactcattggggaggctgccaagaa

SEQ ID NO: 29762 - DNA, 235 bp, Glycine max
  unsure (1)..(235): unsure at all n locations; Clone ID: 701061775H1
gnaaccaatctcttcaaactttgcaaccttttcacaatccaagcataagaattaagaaccttggaagtttgctgtttttttatttttatttttttaccaatgtctcacaccttgcaattttcatttgtttcaagtgcattcaattattcaatgaagatggagaagatgaagagagttaggcctcgtgggtttcaatttctatgctcttctgagcattccagtttcaaagatgaag

SEQ ID NO: 29763 - DNA, 236 bp, Glycine max
  Clone ID: 701061776H1
cttctcttcccttttctatctccctctgcaaaaacgaagtaaatgggtcggcttaatctcctacttgtgtggtcactctctttaacacttttccttaattatctacacccaacctctgcccagctcagtccaaaccactatgctaacatatgccccaaccttgaaagcatcgttagacaagccgttactaataagttccaacaaacctttgtcaccgtcccagccacccttcgcct

SEQ ID NO: 29764 - DNA, 236 bp, Glycine max
  unsure (1)..(236): unsure at all n locations; Clone ID: 701061779H1
cttgtgccgtttgtgttgttttcgggacgaagaagaagatggtgtcaggttctggaatctgcgcaaagcgggtggtggtggacgcgcgccaccacatgctgggtcgtctagcctccatcgtggcgaaggagcttctgaacggccagaaagtggtggtcgttcgctgtgnagagattgcatctcgggcgggctggtgaggcagaagatgaaatacttgaggttccctcgcaaacgca

SEQ ID NO: 29765 - DNA, 244 bp, Glycine max
  unsure (1)..(244): unsure at all n locations; Clone ID: 701061780H1
caagagagagagagttgggtatganatcacaactgaactgaaggcccatccgcggtgcttttattgaggacggttgcgtaggataacataacaggacagagattataccntgcttttcattaaaacctcatcaatacgccacactcccttttccaccgctggatgccatccaacgcactggatggaagcaaaacgatgtcggagagagtaattgaaagcacgataaccgaggngggacaggcga

SEQ ID NO: 29766 - DNA, 243 bp, Glycine max
  Clone ID: 701061781H1
gaatttaggaaaaagaagttgaaatgtaggaataaaagaaaaaggaagaattagggctgaggaaaagccggagctaaagagagtgtgaagatgctaaagacataacaacataagcacaaaaaaggcagtgagtggagtgagagaaagagagaaatcatggcagtttctgtaaccattttagtcctcatcatcgctctgcatctcatagcctcgtctacgccgttggcgccgaacgacgtcgta

SEQ ID NO: 29767 - DNA, 239 bp, Glycine max
  unsure (1)..(239): unsure at all n locations; Clone ID: 701061782H1
cacttggaatccaaaaatgagagaaatcatcagcattcacataggtcaggccgggatncaggttggcaactcctgctgggaactctactgcctggaacatggcatccagcccgatggcatgatgccaagtgactcctccttcggtgtagcccacgacgcttcaacaccttcttcagcgaaaccggatccggcaagcacgtccctcgcgcgtcttctcgatctcgagcccaccgtcatcg

SEQ ID NO: 29768 - DNA, 240 bp, Glycine max
  unsure (1)..(240): unsure at all n locations; Clone ID: 701061783H1
cnaaaccaaagcaagaatagtgttctaagagtgagcaacaacttcaaacaccattgtgagaaatggcttccaagggtgcacttctcttgtgtctcaacattctcttcttcactgtggtaagctccacatatgtcccatgcaacccaccccctaaaactcctaaacacacacctgtcccaaagccaccttccccaaagcaaccaagttgccccaaagacaccattaagtttggtgtgtgtg

SEQ ID NO: 29769 - DNA, 238 bp, Glycine max
  unsure (1)..(238): unsure at all n locations; Clone ID: 701061784H1
ctctttctctctcttcactttccaacgttngctttctctcgcgttttccaattccccccaaatctcacgcctagggtttctatcgcaaaccctccctacctccaaccaggtcgcgtgcaaagggatttcgaagcttcggaagaaaaaaatgaaacctgttttctgtggaaacctggatttcgacgcgcgtcaatctgacgtggagaggctcttcagaagatacggcaaagttgataga

SEQ ID NO: 29770 - DNA, 201 bp, Glycine max
  unsure (1)..(201): unsure at all n locations; Clone ID: 701061785H1
ttgtgtcggnngcatttttnttgnttcgngtgagcgagggaagatgtactctagagattcatggggtggtccgttggagataaacgcgacggactcggcaacggaggacgagcggagccggaacctgcaggacgtggacagggcggcgctgtcgcnctcccttggacgagacgcagcagagctggctcctaggccccgncg

SEQ ID NO: 29771 - DNA, 236 bp, Glycine max
  unsure (1)..(236): unsure at all n locations; Clone ID: 701061786H1
gttgattcggatctagagtcttcagtttctcctcgttgttcttcgctttcctgttttcaatttcgattctttcgttaatttaataagatgtttgggagggcaccgaagaagagcgataatacgaggtactacgaaatcctcggcgtctccaagaacgcttcgcaggatgatctgaaganggcttacaagaaagccgccattaagaatcaccccgacaagggcggtgatcccgagaa

SEQ ID NO: 29772 - DNA, 235 bp, Glycine max
  unsure (1)..(235): unsure at all n locations; Clone ID: 701061787H1
cggatctgctaaaatacgcttgatccatatgggcctcctcgaccacttgtgggacgacaccgtcgccggcccaaggccggaaaacggtctcggcaagctccgaaaacaccacaccttcactttccgacctagctccggcaaggaaacggagggcgggagcgtgagatcgtacggagacganacctcggaggaagcgacgagagtgacgcgtagtattcatgatcgtgaaaccgcc

SEQ ID NO: 29773 - DNA, 237 bp, Glycine max
  Clone ID: 701061788H1
cggttttcgaaggcgagaggagtctcacaaaggattgccgccttcttgggaaatttgatctgtctggaattcctccagccccaaggggtacgcctcaaattgaagtgaccttcgaagttgatgccaacggcattctaaatgtgatgcagaagacaagggcactggtaaatcagaaaagatcaccattacaaacgaaaagggacgtcttagccaggaagaaattgagagaatggttcg

SEQ ID NO: 29774 - DNA, 237 bp, Glycine max
  unsure (1)..(237): unsure at all n locations; Clone ID: 701061789H1
cgccaccttatgnccctccaagagctccttctcctaggcctccctctccaagggttccttctccaaggcctccatccccaagggctgcttctccgagggcggcttctccgcgagttacctctcccaaacccacgtcttcccggattgctcatcaccacaaggaggttggccacagaccagaaccaactttgaggcaacagcaagcctcagctactaagatccagtctgtttacagag

SEQ ID NO: 29775 - DNA, 216 bp, Glycine max
  unsure (1)..(216): unsure at all n locations; Clone ID: 701061790H1
ctcccntccttcccnctcaacttcattgccctttcaaatagtaagactagagaacaaaagctctggctagaacttgtaatgtatatgcaagccatcatcattcagaacaattagtggcntcatncnccnntcaactgaagaacttaattaattgngcnacnnaaatatttgtccgagggatgtggtgcagtaannccttgccantcnttctntatt

SEQ ID NO: 29776 - DNA, 227 bp, Glycine max
  Clone ID: 701061791H1
tttcactacttgtctcttccctttttctttccagaacaacagaacaacagagcaacaaagctccaccaatggcgggttacagagccgacgacgactacgactacctcttcaaggtggtcctcatcggcgactccggcgtgggcaagtccaacctcctctcgcgcttcaccaagaacgagttcaacctggagtccaagtccaccattggcgtcgagttcgccacccgc

SEQ ID NO: 29777 - DNA, 238 bp, Glycine max
  unsure (1)..(238): unsure at all n locations; Clone ID: 701061792H1
gccaaccttccaaattcaaagctttatgggaaagagaagatgaaaggagngcaagaattagaagatgaagaaagcttctacgcgtgctatgctgctttgcngctnccgttgtggtttccatggcgctgcaatcggcaacggagctgggcgtatttgacgtgttgcaagaagcgggggctaagctctctgcgaaagagatagcatccaagctttcctgcgacaacaaccctgaagcaga

SEQ ID NO: 29778 - DNA, 233 bp, Glycine max
  Clone ID: 701061793H1
gttctagatcgcgagcgcctccgcggcttcaaccttgtagttattctctttcttcttttttagctatccctctcttgaaaaatctagatctcgttcttcctgatctacgttacgcttttagtgaccggatctgtatggatctgaaccagatctacacgccgatggtggttttggcctggtctttcatagatctgatgcatggaggctcagatctactgtacagagatactgta

SEQ ID NO: 29779 - DNA, 197 bp, Glycine max
  unsure (1)..(197): unsure at all n locations; Clone ID: 701061794H1
tttgttaattatgctanntagtactcgtagttnnncatttagtangttagtgttgtgagttgtgacttctanacattgcttgctaatcatacaaaatggttgttctgccgatggcaagtcaatgttcaaagccataacatttgtacacaaacaatccacaagagttttcaaagctctaaggaaatgcaaaattcagc

SEQ ID NO: 29780 - DNA, 239 bp, Glycine max
  unsure (1)..(239): unsure at all n locations; Clone ID: 701061795H1
ganagangaaaaagaagcgaaactaaagtcagcattcgaaaaagatgagtagcatcggtacaggttacgatctatcggtcaccactttctcccctgatggccgcgttttccagatcgagtatgccgctaaagccgtcgacaacagcgggactgttattgggatcaagtgcaaagatggggttgtgttgggcgttgagaagctattccgttcgaaaatgatgcttccgggttccaataga

SEQ ID NO: 29781 - DNA, 245 bp, Glycine max
  unsure (1)..(245): unsure at all n locations; Clone ID: 701061796H1
ctnnnggnnnagccttcatccccatcaantcatanntactnctngtatnataacggnnattgnttgtntaactgccactgtggctgacatagnnccanttngntcaaatttttnctatgtcantaaccgtggaaaacacnaagttatntggnnttggagggtggtttgatgtacatttcggggnagaagtgaggatccagctgaacacgagatgagttcactacagctcccantgtagattatgg

SEQ ID NO: 29782 - DNA, 213 bp, Glycine max
  Clone ID: 701061801H1
gttcaactgacatgacacccttcactcacactcacaacctcaacctccttcctaacgttgcttttcaattaacaaagcaaaacattgttgctcgctacaaccactagaatgtcgtgtttgttgccgcacttcaactgccacctcgacactttcaggactcatccctatgctcttcctacccatctatctaaaacaagaccaaatttgtgtttc

SEQ ID NO: 29783 - DNA, 252 bp, Glycine max
  Clone ID: 701061802H1
agaaagaaagaaaaccctagcttaccttttcaactttcaagatgcaaatctttgttaagacactccactggtaagacaatcacccttgaggtggagagttcagataccatagataatgtaaagtccaagattcaagacaaggaagggatcccaccagaccagcaacgtctcatttttgctggcaagcagcttgaggatggacgtacacttgctgattacaacattcaaaaggagtccactctacacttggtg

SEQ ID NO: 29784 - DNA, 250 bp, Glycine max
  unsure (1)..(250): unsure at all n locations; Clone ID: 701061803H1
agagagacacagcgcgcaattcgctgctgataaacccgctcactgcaaattgttgtgatccctacccatccatccttcatttccatctcgtttttntgtttcaaacaaagaaatctttatttttntcctattatattttcaatcacgcgaaagtgaaagttcttcggttgttgctattgctcattcattttctcaggggaagaaaaatcatttttgttcccccggattacgttcctagataatagctttt

SEQ ID NO: 29785 - DNA, 252 bp, Glycine max
  unsure (1)..(252): unsure at all n locations; Clone ID: 701061804H1
tagataactagaaacagtgtgatgaaaatgaaggtccttgttttcttcgttgctacaattttngtagcatggcaatgccatgcgtacgatatgttccctctccgaatgaacactggctatggtgcccgtactccggaggtgaaatgcgcaagttggaggcttgctgtggaagcacaacacatctttggctttgagaccattcctgaagagtnccgttgaagcaacaaaggaatacatccatggcgaacaata

SEQ ID NO: 29786 - DNA, 124 bp, Glycine max
  Clone ID: 701061805H1
ttagaattgtaaaaaggaaaggggaaggaagcaaggcaaggaaggagagtggatcgattcctcagcagcaccagacatttataaaagctctttcccttccctcaaatcgctcatactcttccaa

SEQ ID NO: 29787 - DNA, 239 bp, Glycine max
  unsure (1)..(239): unsure at all n locations; Clone ID: 701061806H1
angactcccgtaaaggccgtgaagaagcccaagagcgtcgtgaagaaacctaaaagcgtgaaatctccagcgaaaaaggccaaggctaagaagtgagggattggagtgggttttagtttggcgttatagtgtttatgtatttcgggttgaatcgtagtataggtggatatatttttagaagagtattgatgtaaattcccttgctnganattttaacangtgtcctncctttgccatng

SEQ ID NO: 29788 - DNA, 253 bp, Glycine max
  unsure (1)..(253): unsure at all n locations; Clone ID: 701061807H1
ttcgtgaacgctatagaacagcatctccaagtggtccagaatcaaggaaaaatgagctgtttgatgatcaatgatattgatgctggccttggtagatttgggaatactcaaatgacagtcaacaatcaaattgttgttgggactcttatgaatctgtcagacaatcctacaagagtaagtgttggtcaagattggcgagaatcagatgtcacaaacagaattcccaatcattgtaccagggancgatttttcc

SEQ ID NO: 29789 - DNA, 253 bp, Glycine max
  unsure (1)..(253): unsure at all n locations; Clone ID: 701061808H1
aaccaaacaactactcgttgattganaganacagtgtgtgttgtgtngtnttgtgtcggtggcatttttnttggttccgagtgagcgagggaagatgtactctagagattcatggggtggtccgttggagataaacgcgacggactcggcaacggaggacgagcggagccgnaacctgcaggacgnggacagggcggcgctgtcgcgtcccttggacganacgcagcagagctggctctaggccccggcgagc

SEQ ID NO: 29790 - DNA, 260 bp, Glycine max
  unsure (1)..(260): unsure at all n locations; Clone ID: 701061809H1
gaacctctcctttgaccacccacaaatcttcaacttgctctgatgctgcaagcttgaaatcagacatttctgatcagctgcaaatgaagaacttgaacactcctccaatccttaaatcttcaagtttctctgatgcttcgagcatgnaaatcaagcatttcngatcatcctggtnttaaggngcaagatgngngtancccttctccctatngtntccngaacctgatnncggctgagnccgcaaatgcaacacccccccc

SEQ ID NO: 29791 - DNA, 102 bp, Glycine max
  unsure (1)..(102): unsure at all n locations; Clone ID: 701061810H1
gctctttctctctgttttctggtaattcatcaattgattcaanatgcagagncntcaaactgcaactagnggctnttcctctcaatctcaacttntcancgg

SEQ ID NO: 29792 - DNA, 262 bp, Glycine max
  unsure (1)..(262): unsure at all n locations; Clone ID: 701061811H1
gttttctcttctcagccaggtcgttgagatgcacctaaaccccttattgctgagttcgaattcgctgcttgttcatagtttctttcnttgattagttatcttcaaatacaaaagacggattgagggnagttcctcgtngtatttattctcctctagatcacagattanntccaatggngttggacttaacnccgaagncngnnagcnncaatngttnnagggaannnggcggcagtttcccnnctgggncncaattccccnc

SEQ ID NO: 29793 - DNA, 241 bp, Glycine max
  unsure (1)..(241): unsure at all n locations; Clone ID: 701061812H1
ctggtttaaatccaaatgtcattaagattatagaggagttcccactaagtagcaagctagatactcaagcctatggtgatcatacctgtataatngcaaaagcacatttggagcctaacttaggtgggctcactgttgancaggctatccnaancaagaagttgtncatcttngancaccntgcctncccncantcnncattngagnanacnacntnncnnccgccngaagncntnngcnc

SEQ ID NO: 29794 - DNA, 249 bp, Glycine max
  unsure (1)..(249): unsure at all n locations; Clone ID: 701061813H1
agagatggtgatggcgtggaaatggattgtgcgaagaacccgcgaatcgaaacccttccttccttgcattcgccaccgtatgcggcgtcgttcctggcgtcataggctatgntgtcatgcaacncactaacacccgncaacgagaagcttgagtcccatcttcgcacaaatgcccgtnccgaatcattgatnatggggcaagtcantaaanananatggcanntacnggganccnaccncgcaaanngg

SEQ ID NO: 29795 - DNA, 253 bp, Glycine max
  unsure (1)..(253): unsure at all n locations; Clone ID: 701061814H1
anaccccaatcgtagccgtcgcactttgcgttttctgcgtcatctccgattccccgacaatggccacccaaatgagcaagaagagaaagttcgtagctgatggagtgttcttcgctgaactgaacgaggttctgacaagggagttanccgaggacggatactccggcntggaantnagggttacgcngatgcgcaccgaagtcatcatcagacccacnagaacccanccngttncggtnnnaagnnaannacc

SEQ ID NO: 29796 - DNA, 226 bp, Glycine max
  unsure (1)..(226): unsure at all n locations; Clone ID: 701061816H1
ccactctcccccaccagttcancacnaccancaaagaagccgtacnatannactcaccacgcctnnttcacctctccacaagccnttctctctctacaacaaggtgtatgtttcnacttctcttaagtggngnatttactatntctcttccatctctantgttcaccacaacantngganntangagtngccaacatgattgggacaaactgannangggggggcc

SEQ ID NO: 29797 - DNA, 252 bp, Glycine max
  unsure (1)..(252): unsure at all n locations; Clone ID: 701061817H1
gtttcgtcttcttcgtctttactcttttcttcaccgaagcgaaaaanaaaaggcttgacttgagagaaatagagcttcgaatcgaaactcagaattagaaaaaaacacaaatcacaatcacaatggcaaggtacgaccgagcaatcaccgttttctcccccgacggccacctcttccaggtcgagtatgccctcgaagccgtccgcaagggcaacgccgcccgtcggnttccgcggcaccgacaacgtcgtc

SEQ ID NO: 29798 - DNA, 246 bp, Glycine max
  unsure (1)..(246): unsure at all n locations; Clone ID: 701061818H1
ctcattctgtgactctgtgcttagttaacgttaacagtgacttaanntggcggattctgcagatgtcacccacgatgttgtgtccctcctctcttctctcaaagggactttcttcttcganacaacggcgatcannntaaaattgacagcttgaagggtaagaaacttggtttgtatttntcggcatcctggtgtggtcntgtcanacatttacgccactttggtggatgtgtacaatgaggntgc

SEQ ID NO: 29799 - DNA, 252 bp, Glycine max
  unsure (1)..(252): unsure at all n locations; Clone ID: 701061819H1
cgcagttganaacagagcagagcgaccttgaagagctatggctgtcggaaagaataagaggatttccaagggaaagaagggtggcaagaaganagccgctgatccctttgccaagaaagactggtacgatatcaaggccccttccctcttccaggtcangaatattggcaaaaccctcgtctctcgtacccagggaaccaagattgcatccgaaggactcanacattcgggtttttgaggtctcattggctg

SEQ ID NO: 29800 - DNA, 231 bp, Glycine max
  unsure (1)..(231): unsure at all n locations; Clone ID: 701061820H1
acgcacactgtcacaggtgtagcggcgaaactgaggtcgtagaaagaatggcgaaaacgacgtcgtgttgctctttacactgctcctcttcggaacntagctctcatccaggcgagaaatcgaggaggatttgaaggnncancccacaaggttatttgatgtgagattatggaaagaaagnagtcgtatgtgatggncttttggaagctgttcaaaantgcagaaacttcg

SEQ ID NO: 29801 - DNA, 250 bp, Glycine max
  unsure (1)..(250): unsure at all n locations; Clone ID: 701061821H1
gtttgttgtgagctataagctagtttatcgtgaggagaatatgaagttgtttgttttctttgttgctgcagtagttttggtagcatggccatgccatggcgcaggctaccaaaggttccctctccgaatganaactggctatggtgagcgttcttcggaggtaaaatgcgcaagttttaggcttgctgtggaagcacacaacatccgagccttaaaaccatccctgaagagtgcgttgaaccacnaaagg

SEQ ID NO: 29802 - DNA, 246 bp, Glycine max
  unsure (1)..(246): unsure at all n locations; Clone ID: 701061822H1
acaggttcggataaactgaaccgtgtcagtgtgtcatcatcgactgctccaaatggcccgaggtaattttgaatctaatccgtggaatccatgatgcctgatgggtaggnatcattgcagccaaaagacatcataccagttcctggtttccttgattgtcttagaagaacaaacagccttgcatatcttttggtggtganttaggnctttcttgaatgtncccatgaaatcaggctatcaacacgg

SEQ ID NO: 29803 - DNA, 251 bp, Glycine max
  unsure (1)..(251): unsure at all n locations; Clone ID: 701061823H1
gttactttgatactaccctgtgcttgtttcctaagaatcttgcggngcaaagtgacacgaacacaggcagcactttgcattacaattatcacagtaggtgttgtatgttctgcttttggatcatactccgcccttgccgagattgtgaagagtttgaggggatgaagttttgagactcaaancctggaagattagatatgtgatatgtctgccgctatttagtctgtncagatattctatctagtttgatc

SEQ ID NO: 29804 - DNA, 94 bp, Glycine max
  unsure (1)..(94): unsure at all n locations; Clone ID: 701061824H1
aaaccctgtntcctttgccttctccttcantaggctcccnaagcaanaacaacaactactcttttttctctttcatcgacgatcttcactaagc

SEQ ID NO: 29805 - DNA, 95 bp, Glycine max
  Clone ID: 701061825H1
atttttttaaactttctttttgctttgtttgtgagttgtgacgaactttgttacttggtagaaacaaccaaaccatcacggccattatctttgtt

SEQ ID NO: 29806 - DNA, 253 bp, Glycine max
  unsure (1)..(253): unsure at all n locations; Clone ID: 701061826H1
anaatcctcacccattttcttcgtagccaaacactctgaaattctcagttatgtcgtggcaagcgtatgtggatgatcaccncactgtgtgaaatcgaaggtaaccacctcactcacgccgctatcatcggccaagacggaagcgtttgggctcagagcaccaacttccctcagttcaaacctgaggaaataactgnccatcaataatgntttatgagcctggatccacttgctcccaatggattgtatatcg

SEQ ID NO: 29807 - DNA, 257 bp, Glycine max
  unsure (1)..(257): unsure at all n locations; Clone ID: 701061827H1
cttgtgccgtttgtnttgttttcgggacgaagaagaagatggtgtcaggttctggaatctgcgcaaagcgggtggtggtggacgcncgccaccacatgctgggtcgtctagcctccatcgtggcgaaggcancttctgaacggcccagnangtggtggtcnttngcgntgacaaaattngcctccccggncgggnctgctnaccaacaantnaannnannnnccnccnctccacanaacgncccnacncnaaacccc

SEQ ID NO: 29808 - DNA, 257 bp, Glycine max
  unsure (1)..(257): unsure at all n locations; Clone ID: 701061828H1
tctctcaatcgttttctacataatanaaacctntctaatttttgaagcttattatacccaatctcgatatgcagatcttacgtgaaaaccctaactggcaagacgntcaccttggaggtggagtcctctgacaccatcgacaacgtgaaggccaanatcnaagacccggngggattccctccggntcaacagngtnnaatcttcncgggnanaanancccaanngggggnacacncctnngnngncacnancgnacc

SEQ ID NO: 29809 - DNA, 256 bp, Glycine max
  unsure (1)..(256): unsure at all n locations; Clone ID: 701061829H1
gttccgttggcgcgagctaagancgaaggaagtagaagcagcaaaacccaatcaaagaccctncactctcaccccacacttncacgtaagtgaaaacggcaccatggatcagcntagttgattctctgaataatgcctatcaagattntgttgttgcagcancaantgtgttngaagcccaaagaaagtnctggttccattaaaacaacagcaccgatangctntanaanntttaggccagnagtgggnttttctc

SEQ ID NO: 29810 - DNA, 255 bp, Glycine max
  unsure (1)..(255): unsure at all n locations; Clone ID: 701061830H1
gcaatggctaatacaccttcgaattcttcaattctcctctccctttttctattggccatcgccctctccctacgctgagtcccaatctttcatcggagtaaactacggncaggtcgccgacaaccttccggcgcnggaggacacggccanactcntnaaatccacnacccatnggaaaancncgngccanaaggcgccgnncccnganatgatnngggnannncnagagatngggcncanagnnnngcnacggga

SEQ ID NO: 29811 - DNA, 256 bp, Glycine max
  unsure (1)..(256): unsure at all n locations; Clone ID: 701061831H1
ctcaaactagtaatatatactattattcatccattccattctatanatttcataatgggtgttttcacattcgaggatgaaaccacctctcctgtggctcctgctaccctttacaaagctctagttacggatgctgacaacgtcatcccaaaggctgttgacgccttcaggagtgttgaaaacgttgagggaaatggtggccccggacccatcaagaanntccatttcccttgaggatggagaaaccaagtttgtc

SEQ ID NO: 29812 - DNA, 237 bp, Glycine max
  unsure (1)..(237): unsure at all n locations; Clone ID: 701061832H1
tcaccctctattcacttctctctacnaaaacaagttatggacagtatttgtcattcatttcacnaaaaccggttcacctttggacccatggcttctaaaacccctaccttattccactctcgtttcttcctcttcggcttctattgnctgggactgggaatttctcaccgctctcctcctctttagttcttcttctaatgaattaaatnacataccctttncttnttntttntnanc

SEQ ID NO: 29813 - DNA, 247 bp, Glycine max
  unsure (1)..(247): unsure at all n locations; Clone ID: 701061833H1
gttttatgaagccttctctaagaatctgaaacttggtattcatgaggattctcagaacaagacaaaacttgctgaattgctcaggtatcactccaccaagagtggtgatgagatgancagcctcaaggactatgtnaccaggatgaaggaagggcagaatgacatctactacnttactggtgaaagcnagaaagctgttgagaattccccttccttgaaaagcttaagaagaaggggttcgaggttc

SEQ ID NO: 29814 - DNA, 244 bp, Glycine max
  unsure (1)..(244): unsure at all n locations; Clone ID: 701061834H1
tggattacaaggatggaaagtactctcaggttgtgtctaatgctcttcctgttcannannntccgggatcttgaattgcctagggttcgccaccacagtcatcacactatccaactctgcagcactcaagatcccggattggtttttgaacaggaagaaggattacaaggatggaaagtatctcaggttgtgtctaatgctcttgatatgaagctcagggatgacttagagagactanagaaga

SEQ ID NO: 29815 - DNA, 249 bp, Glycine max
  unsure (1)..(249): unsure at all n locations; Clone ID: 701061835H1
gncaagtganagtgaganaaaataaaaatcaaagagcataatgtcagggatcattcacaagattggggagacccttcatgtgggagggcacaagaaggaggaggagcataagggtgagcaccatgctggagaatacaaaggggagcaccatggtgaacacagtagtgagtacanaggagagcntcatggtgaacacanngctggagagttnccatggtngtcnacangccctggcacaaagaggggttc

SEQ ID NO: 29816 - DNA, 230 bp, Glycine max
  unsure (1)..(230): unsure at all n locations; Clone ID: 701061836H1
ganaatgttggggatcttcagcagttcagtggtgtcgccgnccggaggagctggtgnccgctggcagcagaacgccgtccnccgaagacgacggcngggaagctgctgaaccggttcgtggagaccaaggcgtcggcggtgtcgctgcangngggggaacactgcagtnngcttacacacancatacnncnaanctcnccatcccagntcattngctgtcaagnatnata

SEQ ID NO: 29817 - DNA, 249 bp, Glycine max
  unsure (1)..(249): unsure at all n locations; Clone ID: 701061837H1
taacatcacaatttcaattgtntttntttancataatcatggccangaaacgtgctgttcaatccctgcttgcctcatnttccaccctcaccaggnanncctcatgcctcaggagaaaaaaagnagattgtaggggtgttctacaaagggaatgagtatgcttcgaatcccaattttntgggatgtgttgaaagagcnttgggtatacgtgagtggttggatcacanggtcaccagtacatagtcctgc

SEQ ID NO: 29818 - DNA, 258 bp, Glycine max
  unsure (1)..(258): unsure at all n locations; Clone ID: 701061838H1
gtctcgtttacacatctctccaacctttcactttcgtttctcagttttattcgaatccctctcctcaatctcctttccaaatggccagcgttgaggttgcacagcaaacaccaacaacagttccagaaaatgaaacaaccgnggtaagcnagacccaggnaaacaacccnagtcactgaggntcccngnnacngnancaacncagccnccngaggttcctgcaaaaaagncaaccagcngcgggngctccgggccaaa

SEQ ID NO: 29819 - DNA, 253 bp, Glycine max
  unsure (1)..(253): unsure at all n locations; Clone ID: 701061839H1
cnaccctctccctccggttccgattcaacggttctagaagatgcctcggcgggtccagatcgaagatcccaaatacgacgacgttcctgacgccgacgaaccggaggaaacgatccgtttcaaatcctccaacagcaacgtctccgacgaccaagaacccttcatgggcatcaaggttcgccgctaaagcctctntccacagagaccacaanggagactacctccaacgtccttcnccaccctttcctaatca

SEQ ID NO: 29820 - DNA, 249 bp, Glycine max
  unsure (1)..(249): unsure at all n locations; Clone ID: 701061841H1
cattaatggcgaacaatttagatcagactctaaaacagttaaccaacaagctttcttttatgctagtgaacgcgaagtccatcacaacgacatatttatattcggcatagataacaccgtactctctaatatcccatactatgaaaaacatggatatggggtggaggaatttaatgaaaccttatatgatgaatgggttaacaagggcgacgcaccggcattgccagcgactcttaaaattncaacggg

SEQ ID NO: 29821 - DNA, 251 bp, Glycine max
  unsure (1)..(251): unsure at all n locations; Clone ID: 701061843H1
cgcctttctctctcttctttttactctctctctgtctctctctacgctttctcgttcganatccctcaagggatccactaactgaaggagaaatggggttgacattcaccaagcttttcagccggcttttcgccaagaaggaaatgcgaattctgatggtgggnctcgatgnagcgggaaagnccncatctggaaaaancccaaancngnaaanctcgtnnaaaancccccangngggggcacangggggc

SEQ ID NO: 29822 - DNA, 256 bp, Glycine max
  unsure (1)..(256): unsure at all n locations; Clone ID: 701061844H1
cgttgccattctcatncctcttctttctctctctaccattgccatggatccctacaagcancggccatccagcgccttnaattctgcccttctggactacaaattctggtgtcctatttggaccaanaactcctctttaaccgnnggagctagaggtncanttatgcnggaggnttatcatcttgtggagaangcttgcanattttgaagggnaaacgtatcccagaanggtgtnggccancgncagggganccna

SEQ ID NO: 29823 - DNA, 259 bp, Glycine max
  unsure (1)..(259): unsure at all n locations; Clone ID: 701061845H1
gtaaacgggagctcgctagtagtaatgtctaagggcacacagtatttgcagcaatcatataaagttagtgactcatttcctttcaagtggattaacaaaaagtggaggganggcttttacgtgacttcaatggccaccttcagggnccagatggggancnacatgtctcntggtgcaggnttctnnacccccaggggncncaancnagannccccnnnngccannncagcggngcntanacaacccncgggctcnnccc

SEQ ID NO: 29824 - DNA, 251 bp, Glycine max
  unsure (1)..(251): unsure at all n locations; Clone ID: 701061846H1
tggcaatgtgggattgattttcaccaaaggtgacctgaaggaggtcagtgaggaggttgccaagtacaaggttggagctcctgctcgtgttggtttggttgccccaattgatgttgttgttcctcctggcaacacagggctcgatccctcncagacctctttcttccaggtgctcaacattcctaccangattcccaagggtactgnngaaatcattcncccctggggncctcannnaggagggnnaannc

SEQ ID NO: 29825 - DNA, 254 bp, Glycine max
  unsure (1)..(254): unsure at all n locations; Clone ID: 701061847H1
ctttgaaacaaagctagcatagcatttttcttttacaaagcaaganacccttttccttttcattccatcatctctttagctttgtccaaagaccatgtctgtggtggctgataattctgcaaacaatggaagccaccaagtggttttaaatgtaaacggtgatgcccccaagaagtgtgatgacncagccaaccaagactgtgtacctcttctgcagaagttgggtagcannggtgggggggnnntccttttnc

SEQ ID NO: 29826 - DNA, 251 bp, Glycine max
  unsure (1)..(251): unsure at all n locations; Clone ID: 701061848H1
tttttggttctatcgagaagcagaggtggtcttatgcatgtgcaaaacagttgattganaggctgatttttgctgagggtgctgaaaatggcttggagttcacaattgtaaggccatttaactggattggacctcgaatggatttcattcctgggattgatggtccaagtgagggtgttcctcgggttcttgcttgctttagcaataatcttctccgaggagagcccctcaagctgtggacggtggccagc

SEQ ID NO: 29827 - DNA, 222 bp, Glycine max
  unsure (1)..(222): unsure at all n locations; Clone ID: 701061849H1
ctcagctgtgtgatgattcatntctaaaccctaattctccttgtttccattgctgcttcattgttttttaagcaattccgagcattgatcaaatgggttttggttcacttccaattttctgaaacagcgtactctcaaaaaaaatatctgatcacattttctacttctgcaaattctgcatttttttccctctctttctttctggggtgtctgcagaacaag

SEQ ID NO: 29828 - DNA, 248 bp, Glycine max
  Clone ID: 701061850H1
gaaaggtaaaggtccttgttgttccggtgtgctgctagagaatctggtgaaggatgtcaattgttccaatcaaccaaggtcactcccaggactcttgggatcaattcatcgattttcctctccctccttccatctccagcttcttccccggcttcgaattcggattcggctcatcggtggttaacacacgtgtggactggagggagactcccagagcccacgtgtggaaggtcgtgcttcctggcttc

SEQ ID NO: 29829 - DNA, 246 bp, Glycine max
  unsure (1)..(246): unsure at all n locations; Clone ID: 701061851H1
cgagccattcaagatgcatcggtcatcattggcgcccatggtgccggtcttactcatatantatctgctttgcctaaaactgtgattctggagatcattagcagctatttcagacgacctcattttgcatatatttcgcggtggaaagggttagagtatcatgcaatcaaccttgctggatcacatgcggatactggaaccgtgatcaaagaactggttgacatantgaaaagccttggatgttga

SEQ ID NO: 29830 - DNA, 252 bp, Glycine max
  unsure (1)..(252): unsure at all n locations; Clone ID: 701061853H1
anagtacttaaccctctcttcgccttcnccgcatccacccacttcctgttgtatccctggcttcctgacattcttccttttctcaacaaggtttggggngtttgtttggtttccttctgattgtataatcagtagaaagaacganaaaaatttgtgcgacttttctgtgtagtgttgtggtgagagaaagttcagttttttatgataatggncgggntgttcttcaaattttgctgtggctggttgtgccaa

SEQ ID NO: 29831 - DNA, 255 bp, Glycine max
  unsure (1)..(255): unsure at all n locations; Clone ID: 701061854H1
ggcaagaatttccattgcatgcaaagcaaatacgcattatattactagttttaatttgtnttgtcgtttgcttctttctttgattaatgatgactagctttaaggttgcatgtgtggttgcnatgatgtgcatggttgtggccangagtgttacacccatgggcacagggccgcaatcacgtgcgggcaggtccgccggcgacgtgtctccgtgncctcagttatcttcgaagcggcggaaaaccgtcggnaccc

SEQ ID NO: 29832 - DNA, 249 bp, Glycine max
  unsure (1)..(249): unsure at all n locations; Clone ID: 701061855H1
gngcggttgatcacagtggtgtggtgcgcggtggcggtgctactgtgcgccgcggcgggcgcgtcgtgggtggaggaggcggcgaacccgatacgaatggtggcgggggtggaggcggacntggttcgngtgatagggcagtnccggcgcgcgctgaagtttgctcaggttcatgagcaggttcgggaagagttaccgaaacgaggaagagatgaggganaggtacgagatattctcgcaaaacctcag

SEQ ID NO: 29833 - DNA, 214 bp, Glycine max
  unsure (1)..(214): unsure at all n locations; Clone ID: 701061856H1
gtcctatggtctcaatgttgttatcctttctcccatggttactttgcccaagntaatgtctgggataccctgacactggtggacaggtgttacatctggatcaagtcgtgcctggagatgantgtcaacgcatcagaacaaggcttgatatcacctcgattctattatcatgtctctccctgtgataggactctgtggcacgtctaggggntnt

SEQ ID NO: 29834 - DNA, 252 bp, Glycine max
  unsure (1)..(252): unsure at all n locations; Clone ID: 701061857H1
ctcggtggaagaatcaccagcacttaatacttgctcatggagcagcagtcaattgctacaagaacaaataccaggctcatcagaaaggacaaattggngtcaccatagtgactttcttctttgaaccaaaatctaatagtgatgctgatcgcaaggcagcaaggcgagcnctggnctnnatnttnggctggttnnctaancccattacttgnggangcctacccggagnnntatgncntcttnggtgggccc

SEQ ID NO: 29835 - DNA, 252 bp, Glycine max
  unsure (1)..(252): unsure at all n locations; Clone ID: 701061858H1
cgacaacgaaaactttattctctattctcgaagagagagtggttgggttcgatggagaaagagttggtggaattgtacgaagcggcgaagaaggcggcggacgcggccatctccggcgacggcgaacatgaggnaagcagctgcatcgatgcgcttgagcagctcaagaagtttcccgttaattacaagattctcgtcaacacccaggtgggcaaacatcttaaagttctgaacaaancacccaaggcagaa

SEQ ID NO: 29836 - DNA, 254 bp, Glycine max
  unsure (1)..(254): unsure at all n locations; Clone ID: 701061859H1
gngacacaatacagagtgagttgttgctccttcgccacaactctctgccaacatgggtatctccagagattctatgcacaagaggcgtgccactggtggcaagnaganggcctggaggaacacgagaangtatgagcttggtcgccagcctgctaacactaagctgtcaagcaagangacagtnaggnggancccgngttagcggtngaaatgtgcnaagnnaggncattgngttnggatncngnccatcaccc

SEQ ID NO: 29837 - DNA, 249 bp, Glycine max
  unsure (1)..(249): unsure at all n locations; Clone ID: 701061860H1
ttccctctgcgcaggaattgggaacattcgacaggtagagtttcttcaatggctcctaaagntgataagangaacgacccaaaggcacaggccttgaagactgctaaggcagttaagtctggtgctacctttaagaagaaggcaaagaagatccgaacttctgtcatttccacagaccgaggacttgnagagggatnggncccccanntnccctacgctanagnncgccncncannaataacctccncc

SEQ ID NO: 29838 - DNA, 252 bp, Glycine max
  unsure (1)..(252): unsure at all n locations; Clone ID: 701061863H1
gtttgttccatttcttgcttcttaatttcttgatcatgtcacttgctggtaaaatcagcattganattggggtgcatgcaagcntgcaaagtggttcaacctctttgcaacgcaactccatcatgttcaaaaccttaccgaaagagtgcatgaaaccaagctcacatcatggtgatgactggcatcacaacgaatcgatcaaacactggantgtaccatagatggtaaggttncaacatatcacggagnncc

SEQ ID NO: 29839 - DNA, 253 bp, Glycine max
  unsure (1)..(253): unsure at all n locations; Clone ID: 701061864H1
ctggggagtatcctagtcctccctctgaatatgaaacctgcctggntgacctgtacagtgttgcttggatggaagacagtgacatacacaatttgcaaacagaaactttacatcaacaatacgaattggtcaaacaaaggactatgaatggaaattcaatttatggttcccacgtgatgcagtatggtgacatagggcttagcgagaacaatctcgtcttatatttgggtacaaatccgctaatgatattttc

SEQ ID NO: 29840 - DNA, 246 bp, Glycine max
  unsure (1)..(246): unsure at all n locations; Clone ID: 701061865H1
gatcgcaancacaccagctacnangtacccaacggtattgaatccggggttgacaactaaatctagatgtcatccaatatggaacccgaatctgtttagtccccgtttttctggggtttgatcntcctgtatggtttgtgcactaggaaaatttgatggacattcatttcgtatttattanggaatattaacataattgacttaattatatatccccatgaactataatgatttgttcgagagcna

SEQ ID NO: 29841 - DNA, 249 bp, Glycine max
  unsure (1)..(249): unsure at all n locations; Clone ID: 701061867H1
ctaacagcagcaagcttatctctgcagcattgaacaccaattgaacnccaatctgcagcattgaacaccaattcaacgccaatgggtcaggaagagganaaatcccaagaaaacaaagtggaggaganaannnnnnnnnnnnnnnnnnnnnnnagaagaagagaaaaaatcagatgagaagaaattcaaggagaaatctgcgccgccaganatcgtgcttaaagtgttcatgcattgtgaaggttgtgc

SEQ ID NO: 29842 - DNA, 245 bp, Glycine max
  unsure (1)..(245): unsure at all n locations; Clone ID: 701061868H1
ataaaccctagctagctaagtagcgttcgagatggagatggagaataatggattcctgaatttacaggcagtggcaccggaaatntccggcgagggatttccatatgcaccggaaaattggccggaagatggngacatntcgggatngagaactgggcggagaattgtcgcaaattcgttcccactttcaggatcggtatctttanctgccgaatcgactaatccgtgccttgaaagaggaaaag

SEQ ID NO: 29843 - DNA, 255 bp, Glycine max
  unsure (1)..(255): unsure at all n locations; Clone ID: 701061869H1
acacaaagcacaaagcaaagctcatccttgagttaaaaaatggcagcagcttcttccatggctctctcatccccatccttggctggcaaggccgtgaagctgggcccatcagccccagaagtgggaagggtgagcatgaggaagaccgtcaccaagcaggtctcctcaggaagcccatggtacggcccagaccgagtcaagtacttgggcccattctctggcgagcccncgtcctacctaaccggtgagttccca

SEQ ID NO: 29844 - DNA, 246 bp, Glycine max
  unsure (1)..(246): unsure at all n locations; Clone ID: 701061871H1
gataataacaatacccttcttcgtttcttccctctccactcggcactcacaattctcaacccaaccaccccntattaaccctcaccgcaatctctgattcgatcttcttcaatttcggggtttcccatataccacaaggcataggcctgtgtgaatttgcgatatgctgggtaattgtcgccaagacccaatctctgggtactcctttaccaacccccaccgccgcattaattgtttttctattgg

SEQ ID NO: 29845 - DNA, 248 bp, Glycine max
  unsure (1)..(248): unsure at all n locations; Clone ID: 701061872H1
agagtttgttgtgagctataagctagtttatcgtgaggagaatatgaagttgtttgtnttctntgttgctgcagtagttttggtagcatggccatgccatggcgcaggctaccaaaggttccctctccgaatgaaaactggctatggtgagcgttcttnggaggtaaaatgcgcaagttttangcttgcngtggaagccacacaacatccgagnccttaaanccattccngaagngtgcgttgnncnc

SEQ ID NO: 29846 - DNA, 253 bp, Glycine max
  unsure (1)..(253): unsure at all n locations; Clone ID: 701061873H1
tttggacgtgtagatttttttgctggattacatcttttattggttgtttcaaactagaatacagaaatttgctagaaaagacaaacttattggtcttctctttcttttgaaatgtgagtcatatattgttcaacattgaaagagggtattccgaaaaaacaaaaanncaaaccaccccccnccccncgacnccccacnncaannggaccccncacncncncccncancacccncnnccgncccnnccccnccc

SEQ ID NO: 29847 - DNA, 250 bp, Glycine max
  unsure (1)..(250): unsure at all n locations; Clone ID: 701061874H1
atttgccagaaatattatcattgacaggcagtcagggaattgaaaanatagcatgggataattccggggagcgattggctgtgtcttttaaaggtggagatgnncatgtataggggtctgatcgccatatatgatacaagaagaactcctcttatatctacatcattaattggatttataagagggcnggtgacaagccaaaaccatctcattttcatttcnacgggaagttnaaagcagggnccattgc

SEQ ID NO: 29848 - DNA, 250 bp, Glycine max
  unsure (1)..(250): unsure at all n locations; Clone ID: 701061875H1
gnatatcatatcatcttcnccacaagtcacacacncngaacagctccaaaccctcggancaaacttaacatnttacatagatacaccattcattattcatanatggcttgttcccgnttcacttcaaccttaatctccgtttcncctntgatgcggcaccaatgggntccnaatgncanctccctctcngctccnngttcnnagggggnagnaccctttttcaaaaaaaacccgacanngggcgttttcc

SEQ ID NO: 29849 - DNA, 208 bp, Glycine max
  unsure (1)..(208): unsure at all n locations; Clone ID: 701061876H1
gattaggttgccctgtctgtnctctcacacactcactcnccttctctcctcctattgcggctagggcttgggtttttcactttcagcctctccattccttcaancttcttcttntctttgatctcctgatggagacgttacgtgtttagtagcangggntagnnnagnccnncnnnnngnaaaagaangngctcgnnntggagcnggg

SEQ ID NO: 29850 - DNA, 207 bp, Glycine max
  unsure (1)..(207): unsure at all n locations; Clone ID: 701061877H1
acaacccagttgagtaactaagatggcgcaagtgaggaacaagcnagtgcttctanaggactatgttaccggttttcccacagnatccgacatgaatattgtcnaaagtaccatanncattgaagnttccncaaggttccaangctggcttcgctccanaatttgnactngtcnngnnacccgnntnngagananccccacacanca

SEQ ID NO: 29851 - DNA, 247 bp, Glycine max
  unsure (1)..(247): unsure at all n locations; Clone ID: 701061878H1
ganagcaatangtccctccttcctctgccttataattcttgtgacccttttngctggtagcattgaaagtgcaccagcaaacgtgaagccaagccattatgctgcacccttcaataggagtgtttttcttctggttttctatttggaataggctctgcagcttcaccagatagaaggagnngcagctatagntggcagaggaccangtatntgggncncctatnntanncagcnaccngggnagttg

SEQ ID NO: 29852 - DNA, 230 bp, Glycine max
  unsure (1)..(230): unsure at all n locations; Clone ID: 701061879H1
agatcacttgatcatcattcntctgcttcaagaaggaatagaagtaggagtntnagcccttctacaaggaaatcatctgtttctcnaanacgnnatagangnacttnanctcatagaggaaggaaacantcacgtgntgnttctngctcnccaagtngtcgcagnggaagtaggcnntctccaangattgangaaaanaacntaggaacangcagggccncanggtcaag

SEQ ID NO: 29853 - DNA, 253 bp, Glycine max
  unsure (1)..(253): unsure at all n locations; Clone ID: 701061880H1
cngagcaacgagananagaaaccctagcaaaaatgccggctggtcacggtttgagatcccgcaccagagattccttctctcgtcccttcaggaagaagggtaccatcgccctcaccacatacctcagaacctaccacgtcggcgattatgtcgacgtcaaggttaacggcgccgtccacaagggaatgcctcacaagttctaccatggccgcaccggtcgcgtctggaatgtcaccaaacgtgtgttggggtc

SEQ ID NO: 29854 - DNA, 247 bp, Glycine max
  unsure (1)..(247): unsure at all n locations; Clone ID: 701061881H1
attactactttctctctctttgtaacttgtaagcatggagtcctcaaagatctatgcttacctgcttcctttgcatgctcttcctctcctccgccactcccattctcggttgtggctactgtggcaaaccccccaaaaagnacaagcctggtanaacaccaaagacacccacagtanccgttgttaagccaccagtcncaatcccnccnattgttaagncaccagtganaatccctcccattgtnag

SEQ ID NO: 29855 - DNA, 253 bp, Glycine max
  unsure (1)..(253): unsure at all n locations; Clone ID: 701061883H1
gggctctctcacgcagtcgcagtgagtgaaaagganaaccctaattgnggtattctcagtgccttcgagagaaagaaanaatggcagataatctngntctgacgtggcaacatggcgcggcncacaaccgacntngtgagggcgattgccaatcccatggacaactccgacatgatcgncaacgccttcncgnganaaatccatcntcctctggcatctnancaaggagggcaaganttccggngtcccccgc

SEQ ID NO: 29856 - DNA, 241 bp, Glycine max
  unsure (1)..(241): unsure at all n locations; Clone ID: 701061884H1
actcattaattgcaagaatggcattcgntgttggtgatgtcctttctgttctcttcactctggtcttgcgagagaaagccatgccagagacgaagatttttggcatgctgtttggccaaacactcccattccaagntcatgcgagatcttctaaagcctgggccctgcaagtgttgaaatcgatgatcaccctatgcaaattgaagaaacacagtacccgaaaacttcttctataaagaag

SEQ ID NO: 29857 - DNA, 199 bp, Glycine max
  unsure (1)..(199): unsure at all n locations; Clone ID: 701061886H1
cactcttatatcctttccgagttccgactctgttaatcattctccgttaagattctttcttctttcctctttccactcttggtcttatcntcttcacaatcccacaaccactccttgtnataaatcagatccaaacatggccgaagaacaccgatgccaagctcccgaagtcanagactctgctcgaacaactgcggct

SEQ ID NO: 29858 - DNA, 254 bp, Glycine max
  unsure (1)..(254): unsure at all n locations; Clone ID: 701061887H1
catatatccaaccaaaaagggacattttgcgggtatttgtgagtgtgtgagaganagagcgagcagtttcagacacagagagaggggtttgggattggagggattnacgctgcgtctcttcctcttctctttcgatccatccctcattccnaatcctccaatccaancacctnagccttcanactncacatatacacatatctgancncgtatncgtncctcctatggctttcaaagcggnatcctcaaggagc

SEQ ID NO: 29859 - DNA, 246 bp, Glycine max
  unsure (1)..(246): unsure at all n locations; Clone ID: 701061888H1
tttgaacaagcttctcgcttccctagcttagcacctacatcacagatctttaacgataaaataaaaatggatccaaacgcggtgaagtccactctctccaatctggcgtttggaaacgtaatggcagcagctgcccgtgattatcagaaggaattgcttgctcaagagaagactcaaggatcaagttcagtacatgaggaggttgacttgacgagttaatggatnatcctgagttagaaaatngcc

SEQ ID NO: 29860 - DNA, 250 bp, Glycine max
  unsure (1)..(250): unsure at all n locations; Clone ID: 701061889H1
ctaaaccaaagtaagaggtatagtgttctaagagtgagcaacttgtgagaaatggcttccaaggctgcacttctcttgtgtctcaatgttctctttttcactgtggttagttccacatatgtgccatgtaatccaccccccaaaactcccaaacacccacctgtcccaaagccaccatcccccaaagctagcaagcngccccaaagcacactttaagttcggtgtgngnncccctgtncnaggnannacc

SEQ ID NO: 29861 - DNA, 167 bp, Glycine max
  unsure (1)..(167): unsure at all n locations; Clone ID: 701061891H1
gntctttctccctggaaganntaaccaagtcctctgttcgtgttcctcntttcacatggcttccccaaacccaaaagagatcttgcagagatcacaacaanctaggaggacggaagagaaaactggcaccattaccaaggccacagangcataaactgtgtgatcca

SEQ ID NO: 29862 - DNA, 251 bp, Glycine max
  unsure (1)..(251): unsure at all n locations; Clone ID: 701061893H1
ttttccctcactttctcgctcgccaaacgcccctctctctcctccaatggccgaccagctcaccgacgaccagatcgccgagttcaaggaggccttcagcctcttncgacaaggacggcgatggttgtattactactaaggaacttgggactgtgatgcggtcactagggcaaaacccaactgaggcagaactgcaggatatgattaatgaggttgatgctgatggcaatggaaccatcgacttcccagag

SEQ ID NO: 29863 - DNA, 250 bp, Glycine max
  unsure (1)..(250): unsure at all n locations; Clone ID: 701061894H1
cacaactctctgccaacatgggtatctccagagattctatgcacaagaggcgtgccactggtggcaagaagaaggcctggaggaaaaagagaaagtatgancttggtcgccagcctgctaacactaagctgtcaagcaacaagacagtcaggaggatccgtgtnagaggtgncatntgaaatggagggcttganattggntcacggaattcccncnnggggaactgangctnnncctccnccaccccnnc

SEQ ID NO: 29864 - DNA, 253 bp, Glycine max
  unsure (1)..(253): unsure at all n locations; Clone ID: 701061896H1
cccgaatactgcgaattcggatccgatttcgagaaatgcaaaccctggttgatccaaaacgtccctgacctataccctgatctnctcaaagaagagaaggaagccgataaagttgctgacaaactacaaagtacgggtatatctggagctggtgatggagctgcttcctcagcaccgaagcaagaagaggtgaagcgtcttcctggtgggaagataaagaaaaaggataagcaagaggttgttattgagaagg

SEQ ID NO: 29865 - DNA, 282 bp, Glycine max
  unsure (1)..(282): unsure at all n locations; Clone ID: 701061901H1
cgctaacactcattaattgcaagaatggcacttcgttgcttggtgatgtccctttctgttctcttcactcttggtcttgcgagagaaagccatgccaganacgaagatttttggcatgctgtttgggccaaacactcccattcccaagttcattgccgagatcttctaaagccggccctgcaagtgtggaaatcgatgancnccctatgcaatggngganccacnttnccggaaaacnttntctatgnggancnccccctcggggnaaacnntgaggtccct

SEQ ID NO: 29866 - DNA, 277 bp, Glycine max
  unsure (1)..(277): unsure at all n locations; Clone ID: 701061902H1
gngacttggttttctgacccgggtttctgtagggaatcacagatgtggtatacactttcaaagactttggccgaagatgctgcctggaaattcgtaaaanngaacaacattgacatggttactattaacccagcaatggtgataggacctctcttgcaaccagtccttaacacaagtgctgcttcaattttaaacgtaattaatggtgcacaancatttccaaatgcatcttnggttgggtcatgtgaaagatgtggaaatgcccatnttcnaggtt

SEQ ID NO: 29867 - DNA, 271 bp, Glycine max
  unsure (1)..(271): unsure at all n locations; Clone ID: 701061903H1
atacatggtcatccagggtgagcctggtgctgtcattcgagggaagaagggtcctggtggtgttactgtgaagaagaccggtgcggccttgatcattggcatttatgatgaaccaatgactccaggtcaatgcancatggtagttgaaaggcttggcgattatctcattgatcagggtctcnantctttgctttatgtcttgtatcgtgcatatntcattggcntcngnacaagtttttgcatcggaccggnatggaatcctttgatggag

SEQ ID NO: 29868 - DNA, 271 bp, Glycine max
  unsure (1)..(271): unsure at all n locations; Clone ID: 701061904H1
cttagatatttcctagagtttcagattccttgtgtatgggctccttacaggacaagattcctggtcaacaaaggaaggaacctgtatgcccatctttgcaattcagcataatgggccagaaactttatgtcagtcaagaacagattacagtcggacgtangccagtaactggcttacatctttgtctagaaggaagcaagcagatcggcngagtgttcangttcaacacttggtgnccctncngaaaatcctccccccatattggggcacc

SEQ ID NO: 29869 - DNA, 281 bp, Glycine max
  unsure (1)..(281): unsure at all n locations; Clone ID: 701061905H1
gagagatggatcagtttttgtggagggtgttgcctttgcttacaatccttgtttcctttggagtgttcttctacttgcaggattcttacacagcacagttatttcctctcataaagttaccgcgggataagtgcagccttcttccccatccgccacttctggatatccagcaaacgtattgtgaccccacaagggatcattctgggtttcactggagataaatgangggaaaataatatctgtcgtgagggacatggcnaattcaggggaagcctaagnca

SEQ ID NO: 29870 - DNA, 282 bp, Glycine max
  unsure (1)..(282): unsure at all n locations; Clone ID: 701061906H1
agaatctctggaagtatattaaccattttggaggacttgctgtgtacatatttttgctgctgagactgtgtgaagaggccaagacaagtatcagacatggtgtacttttntttcccttgtcaagtttcttgtgacatagtaggcataagtcagtntctccccaatctgtngtggnctttctttggatcangganctttggctctacatggaatgttcnactgaaactatccagaggtcaagggtnncccatggtcncatannganngtgtgnatggntnang

SEQ ID NO: 29871 - DNA, 277 bp, Glycine max
  unsure (1)..(277): unsure at all n locations; Clone ID: 701061907H1
cgctgaatcctagctttatcttcccttcccttcaaaataatatctctgttccaaacaagtccaacaacacactgcttctatctcaaacgcacatcgagaaatgagtttgagtaatgggaaaaccgaggcaccattgccaattagtaatggggatgagaagaagccgttcaagatcttcgtagggtatgaccctgcgtgangntcttgccnacgaggtatgtnggcactccatctttganaaggtctcccatcccngtgngatcctaccaattaacag

SEQ ID NO: 29872 - DNA, 286 bp, Glycine max
  unsure (1)..(286): unsure at all n locations; Clone ID: 701061908H1
ggaagaaattaggtgatagcgtgcttcacattgagcttcgcaaatgggctgatatcatggtcatcgctccattatcagcaaacacccttgggcaagattgcnggagggttgtgtgacaatctactgacatgcatcgttcgagccgggactacagcaagccattctttgttgcaccagccatgaacacttttatgtgggaacaatnctttccacagagcgggcatcttcatcttcccattgatgagncttggcatttctctcatcccggctgttaacnaaggaggtt

SEQ ID NO: 29873 - DNA, 278 bp, Glycine max
  unsure (1)..(278): unsure at all n locations; Clone ID: 701061909H1
acagcagacactacctgcggaagacgatccggagccgccacctattcttttgttcatcacatattcaatggcttcctctcttctnctctccatcatttacatccttcctccgcaccaaggatctctctctctctgctttcacttctcagcgatgcttcaaagcggtgccaaggaaaataatccgttgtgctattgcngcgctcatcgccaaaccttccaccactggatcagtgaggactgcaatgacccatgactgagagattttggccagacctnct

SEQ ID NO: 29874 - DNA, 279 bp, Glycine max
  unsure (1)..(279): unsure at all n locations; Clone ID: 701061910H1
aaaccaattacaaattacactctttgcctcgcaccttcaacttaaccttttctantcataatcttaacnacttgctagaancaagataaagaaagagaaaaagtgtgtgtgtgtgagagagagcaatgggctggctcgtgggcacgccgttctctgattgntctggctatcatttccttcgggatgtttatttgcaatttccattggctaaggaggaacccacaaaattgggggacggtcatcgggattgatcttggaacgactattccatgtgttggt

SEQ ID NO: 29875 - DNA, 273 bp, Glycine max
  unsure (1)..(273): unsure at all n locations; Clone ID: 701061912H1
atcaagttcctggtaagtcaagggtgtattaagcccttgtgtgatcttctcatatgtcctgatcctaggattgtgacagtttgtttggaagggcttgaaaacatcttgaaggtaggtgaagctgagaaaaatgttagcaataactgatggtgtgaatctatatgctcaaatgattgatgatgctgaggggttggagaaaatcgagaacctccagagtcatgataacactgagatttatgaaaaggcagtgaaaattcttgagacatactggnt

SEQ ID NO: 29876 - DNA, 275 bp, Glycine max
  Clone ID: 701061913H1
aaagttacctgtttgcgatctcattacaatctccccagtttctaatctcagctaagaaaaaccaaaagatgtctctgattccaggtttcttcggtgcccgaaggagcaacgtcttcgatccattctcactcgacatttgggatcccttcaaggattttcatgttcccacttcttctgtttctgctgaaaattctgcattcgtgagcactcgtgtggattggaaggaaaccccagaggcacacgtgtctcaaggctgatattccagggctgaagaa

SEQ ID NO: 29877 - DNA, 276 bp, Glycine max
  unsure (1)..(276): unsure at all n locations; Clone ID: 701061915H1
ggcggtgtcagaatcagaagaacacaaagctcactgaatcgaagcccttcattttgattttctcctcgtcactgcgcatcntgtacagagttgcagcttcatcattcagaaggcatctcaagggccatggaggtaacttgggatccattaggttttcaacttcggccgcggtagctgcaaggacttcatctngtggtttgtttagctggcttactggagagcgttctagtgcttcttcctcctcttgacataccccttggtggcgttgctctccca

SEQ ID NO: 29878 - DNA, 207 bp, Glycine max
  unsure (1)..(207): unsure at all n locations; Clone ID: 701061916H1
tgattgaagaagatgccgatcagaaaatcgccatcggaaggcctgaagaggctacttcaccccgacacgttgaaggcggggttggctgagttcatctccaccttgatcttcgtgttcgccggttcaggttccggcatcgctacaacaagctcaccgacaacggcgccgccactcccgccggcctcatctccgcttccatcgncacat

SEQ ID NO: 29879 - DNA, 196 bp, Glycine max
  unsure (1)..(196): unsure at all n locations; Clone ID: 701061917H1
gtttanttacgtacatagcttgaaaacacagtgcttgtttagactagtatctccatggctccgaaagtagaatcctggttttgggaccacagagccattggaagacctagttggaatgaaggaggatccattttggtagnacctgctttacacagtgctgtcactgacgannntnggtcaatcggtanatcaggta

SEQ ID NO: 29880 - DNA, 273 bp, Glycine max
  unsure (1)..(273): unsure at all n locations; Clone ID: 701061918H1
gcaaactaaaggtgaagtttgccagaaacaagatgggaaggaaccattttcagcagcaacactgtgctgatgggagcatgtgcatggagagtcagggtcagcaacagagctatgccttccaagaagagtcttggagccctgataacaactatggccacaaccacaagcaattcccaggcatgcnnnnnnnnnnnnnnnnnnnnnnnnnnnnnnnnnggttggtgcttttgtgtgtggactctggcttctcaatgcaaaaactcntnggggggg

SEQ ID NO: 29881 - DNA, 275 bp, Glycine max
  unsure (1)..(275): unsure at all n locations; Clone ID: 701061919H1
agaaagttcatccaatctccgaagcccttcaccgcattgcaaccatgtcgagaagaaaggttagagagccaaaggaagaaaacgtgactctgggcccagctgttagagatgggcgaacatgtctttggcgtcgctcgcatctttgcctccttcaatgataccttcattcatgtcactgatctgtccgggagggaaacacttgtccgcatcacaggtggaatgaaggttaangctgacagagatgaatcgtctcccatggccncaatgcttgngga

SEQ ID NO: 29882 - DNA, 281 bp, Glycine max
  unsure (1)..(281): unsure at all n locations; Clone ID: 701061920H1
aaagtntctgagtttgaaacacagcataaacatagcaaaatatgaatgccactctccctttttaaatggaaacaaagctgaagacaccacacgagcaatcaatagataacaaactaaagatagagtgagagtgagagacatgtataggttcagcaacacagtaatcgggttcttgaattgttcacacttttagcatccataccantaattggagcagggtctatggatggccaggnngcagcaacanccnggtgagaatttttctcaaaacccctntttng

SEQ ID NO: 29883 - DNA, 283 bp, Glycine max
  unsure (1)..(283): unsure at all n locations; Clone ID: 701061921H1
caacgctctctcttcagcctccattctacgctctcccaaccgnccagtctctgacccgaagagcgaaccataatggaagagtaaattaccggaaaccncataaccgtttctccgtgaaagcctccgccaaagagattgcctttgaccagcattcccgcttctnctatgcaggccggcattgacaagctcgccgacgccgttggggctcactcttggggccccagaggggaggatgttgttgtngggatgagttnggangtcctaaagtggtcaacgatggttt

SEQ ID NO: 29884 - DNA, 261 bp, Glycine max
  unsure (1)..(261): unsure at all n locations; Clone ID: 701061922H1
gtttattgcatttttaattttaacgaaattatttanctttttaccatttgttngtcctgtttcttaggtgccctattatagctcgtgctggtagccatgtttatttgtgaacaatgtaatgttattttcccgagtgaatttgaatgtttaaagttgatatttttgcattcagganaaatgaaataatagtttcttagcttgtccagaanaananngngccnaganaaanaannnggggnncccncgcnnnnggcccccncc

SEQ ID NO: 29885 - DNA, 276 bp, Glycine max
  unsure (1)..(276): unsure at all n locations; Clone ID: 701061923H1
actagaaacagtgtgatgaaaatgaaggtccttgttttcttcgttgctacaattttngtagcatggcaatgccatgcgtacgatatgttccctctccgaatgaacactggctatggtgcccgtactccggaggtgaaatgcgcaagttggaggcttgctgtggaagcacacaacatctttggctttgagaccattcctgaagagtgcgtngaagcaacaaaggatacatccatggcgaacaatatagatcagactcccaaaaccgttaanccaaca

SEQ ID NO: 29886 - DNA, 274 bp, Glycine max
  unsure (1)..(274): unsure at all n locations; Clone ID: 701061924H1
ctcctcactccatcttctcgttccgttcagcatcgctcatttctctccgacgaggttgttcatatgtgatcaactgttgaaagatgtttgactgtggtcccaagtcagaatacatgggtggccagcgggaaaattttttgaggttggaggccttggattctacactatctcatcttctgatgccggagttataaaatctggatttaaatattgntaaattaagccatggttcatgggaagcagcacaacttctaggtctttcaaaagggggatg

SEQ ID NO: 29887 - DNA, 271 bp, Glycine max
  unsure (1)..(271): unsure at all n locations; Clone ID: 701061925H1
gttgatcgagataactagaaacagtgtgatgaaaatgaaggtccttgttttcttcgttgctacaantttngtagcatggcaatgccatgcgtacgatatgttccctctccgaatgaacactggctatggtgcccgtatccggaggtgaaatgcgcaagttggaggcttgctgtggaagcacacaacatnntggcttgagaccattcctgaagagtncgttgaagcaacanaggaatacatccatggcgaccattatnnatcanacntccaa

SEQ ID NO: 29888 - DNA, 270 bp, Glycine max
  Clone ID: 701061927H1
ctacatcttctttccaaatcccaactactactcacactcactgcagatctcaatccatggctaccattgttagcatcaaggcccgccagatctttgacagtcgtggcaatccaaccgtcgaggtggatttgacatgctccgatggtacttttgctagagctgctgttccaagtggtgcatccactgggatttatgaggcccttgaattgagagatggaggatctgactaccttggaaagggtgtatcaaaggctgttgacaatgtgaaca

SEQ ID NO: 29889 - DNA, 273 bp, Glycine max
  Clone ID: 701061928H1
ccatctcttgcttcttgcttctattacttgcttctttcttcaccatgtcacttgctgggaaaatcaccactgaaattggggttcatgcaaccgctgcaaagtggttcaacctctttgcaacacaacttcatcatgttcaaaaccttactgatagagtacatggaaccaagctgcatcaaggtgaagactggcatcacaacgagacagtcaaacatggacttataccatagatggtaaggctacaacatgtctggagagtattgaaccccattg

SEQ ID NO: 29890 - DNA, 275 bp, Glycine max
  unsure (1)..(275): unsure at all n locations; Clone ID: 701061929H1
gctaggtntnaggtttntctttcaccgtctccgttccttcaatcttcttattctctntcancctctgatggagacgttgcgggtttagttctaangggtggttctggccttgggnttttggaacgtacggtgtcgttttggggttgggaaaacaaattctgagagatggcaaccacgaacccttttgatttgttgggtgacgacgctgaggacccttctccagctcatcggccgccgaggcaactcaaggcggcggntgcggcctgggcggcnac

SEQ ID NO: 29891 - DNA, 277 bp, Glycine max
  unsure (1)..(277): unsure at all n locations; Clone ID: 701061930H1
gcaaaggagtgatttggagtttggagcgactgaactaatcattaatttgcactcgctgtttcagcttcatcacccttgcttttgcatcatttatatctcttgagaaatggcacaagaaacctttctattcacatctgaatctgtaaacnagggtnaccccgacangcnntncganccagatctctgatgcagtacttgatgcgtgccttgaacaggnccctgacngcaaggttccctgnnagacatgcaccagggccnaacagggtaagggncttgg

SEQ ID NO: 29892 - DNA, 276 bp, Glycine max
  unsure (1)..(276): unsure at all n locations; Clone ID: 701061931H1
ctccgcagcagccacacttcttcgccgtttcagctgaagagccatcccgcagtaagcaatggttaagcataataatgttatccccaatgggcacttccggaaacactggcaaaactatgtgaagacttggtttaatcaaccagcccgaaagaccagaagacggttggctcggcagaagaaggctgtcaagattttccccaggcctactgctggatctctcaggcctattgttcatggccagactctgaaatacaacatgaangtcagagccgggag

SEQ ID NO: 29893 - DNA, 277 bp, Glycine max
  unsure (1)..(277): unsure at all n locations; Clone ID: 701061932H1
ctcactttctcgctccccaaacgcccctctctctcctccaatggccgaccagctcaccgacgaccagatccgccgagttcaaggaggccttcagcctcttcgacaaggacggcgatggttgcattactaccaaggaacttgggactgttatgaggtcacttggtcaaaacccaactgaggcagaactgcaggatatgataaacgaggttgatgctgatggcaacggaaccatcgntttcccagagttcctcaactgatgncccgcaagatgaaagcc

SEQ ID NO: 29894 - DNA, 239 bp, Glycine max
  unsure (1)..(239): unsure at all n locations; Clone ID: 701061934H1
ttcgcaaaccctaatttcggaaagatcggcgatggctgcctccaaggatcgcgagaacttcgtctacatcgccaagctcgccgaacaggccgagcgatacgaagagatggtggaatcaatgaagaacgttgcgaatctcgacgttgaactgactgtggangagcggaattnactttctgttgggtacaaantgtggatggngctcggagaacatcgtggaggatcctgtcttccattga

SEQ ID NO: 29895 - DNA, 273 bp, Glycine max
  unsure (1)..(273): unsure at all n locations; Clone ID: 701061936H1
gcattccctgacgcagagaaagcaaaagacagtcgcagcattcgtcctggaaaggggaaaatgcgtaaccntcgctacatctncacgccgtggaccactcatcgtgtacggaacggaaggagccaaagccgttaaggccttccgtaacgtccccggcgtggaagtcgctaacgtcgagaggcttaaccttctgaaacttgctccaggaggtcacctcgggaggtttgtggtttggacaaaaagcgttttgagaagctggattcgatttatggg

SEQ ID NO: 29896 - DNA, 273 bp, Glycine max
  unsure (1)..(273): unsure at all n locations; Clone ID: 701061937H1
ggttctagtaattcagtgctgctagaagatggaaactagtgaatgggcatatcgagcgaagatctagcttcggctctgaatcccccttagnnagagacgcaggaaatgtgcctgaaactgggtcactctctattgtggtgcttggtgcttctggtgatnttgctaagaagaagactttctggcacttttccanctatacctgcaggncttcttnccanccagatgaagtcatatttttgggtatgcaaggncaaaaatctntggtgatgaatt

SEQ ID NO: 29897 - DNA, 96 bp, Glycine max
  Clone ID: 701061938H1
gcaattcactctgtacaattcttcgttcgttctctgcagttatatcctttttgagcttcaatggcggacgctgaaaccttcgctttccaggctgag

SEQ ID NO: 29898 - DNA, 281 bp, Glycine max
  unsure (1)..(281): unsure at all n locations; Clone ID: 701061939H1
ccaattcctaattgtttaaacctaattctcatttcttcatcgttcgattcttctcctcctaaagatgcagatcttcgtgaaaactttgaccggtaagaccatcacccttgaggtggagtcctccgacaccatcgataacgtgaaagctaagattcaagacaaggaagggatcccacctgaccagcagagacttatctttgcggggtaaacagcnttgaggatggtcgaacccctggccggnntacaannntccaaaagggatccacttctncaccngcgtg

SEQ ID NO: 29899 - DNA, 273 bp, Glycine max
  Clone ID: 701061940H1
tgaagctgttgaacttttgggtgagtccatttggtaaaagggttgagtgggctttgaaactaaagggtgtggagtacgagtacattgaagaagatatctttaacaagagcaatctccttctggagttgaatccggttcacaagaaggttccggttcttgttcatgcccagaaacccatcgctgagtcattcatcatccttgaatacattgatgaaacatggaagaagtatccattgttacctcacaatccttatcaaagagcacttgctcgtt

SEQ ID NO: 29900 - DNA, 271 bp, Glycine max
  unsure (1)..(271): unsure at all n locations; Clone ID: 701061941H1
gctataagctagtttatcgtgaggagaatatgaagttgtttgttttctttgttgctgcagtagttttggtagcatggccatgccatggcgcaggctaccaaaggttccctctccgaatgaaaactggctatggtgagcgttcttcggaggtaaaatgcgcaagttttaggcttgctgtggaagcacacaacatccgagccttaaaaccattcctgaagagtncnttgaaccaacangggacnacttaatggcgaacatttagntcagcctc

SEQ ID NO: 29901 - DNA, 273 bp, Glycine max
  Clone ID: 701061942H1
caaatccaaaccaattccctggagtcctcttagcatgttttggaatttgtaccttgttgtatgctggagctgctgtattgggatacacaatgtttggagaagctattctgtctcagttcactcttaacatgcctaaagaattggtagcaaccaagattgctgtctggactacggtggttaatcccatttaccaagtatgcgttgactatatccccagtggcaatgagtctgggaggagttgataccatcaaaccatggccaagtcttatctat

SEQ ID NO: 29902 - DNA, 270 bp, Glycine max
  unsure (1)..(270): unsure at all n locations; Clone ID: 701061943H1
aggaatcagaatcgcgttaggccccaagaagagaaaatcgcaggtgaaaatgagcggaacggtgaagaaagtaaccgatgtagcattcaaggtgggaaggaacatcgattgggatggaatggcgaantttctcgtctccgatgaggctcgcagggagttctccaatctccgtcgcgctttcgacgaggttaactcccaactcgaaaccagttcagccaggaactgaaacccatagactgggattactatagaaaaggaattgggcactcg

SEQ ID NO: 29903 - DNA, 255 bp, Glycine max
  unsure (1)..(255): unsure at all n locations; Clone ID: 701061944H1
cgggntcgagaagagtcttcttcaacttgatctggtggcaaacgcaanccaaacgatgacgtactcgtgtgtnnnnnnnnnnnnnnnnnnnnnnnnntgtnattggngcgggcgccgactntgccaaacgcgacgacgacaggnctcccaagtcggaatcctgcaataaccccttcnaattggtgacnggtggagagtgggtggacggtgattaagggacatgtcccacaatggcntcagtgcccagattggggt

SEQ ID NO: 29904 - DNA, 251 bp, Glycine max
  unsure (1)..(251): unsure at all n locations; Clone ID: 701061945H1
cccttagccaacacaaccatcatgnccacctctgctattcagcaatcagcattcactggtcaaactgctctgaagcagctcaatgagttcgtccgcaagaccggtggcgccggcaaaggtcgcactaacatggcgccgcaccgtcangantgcntcctcagngcatttggtatggccctgaccgtcccaagtacttgggtcattntcggagcagnttccatcatacctgaccggaganttcctggtganta

SEQ ID NO: 29905 - DNA, 272 bp, Glycine max
  unsure (1)..(272): unsure at all n locations; Clone ID: 701061946H1
caanaagaaagaatcccaggcgaggaganagatggagggnaaggagcaggatgtgtcgttnggagcgaacaagttccccgagagacatccgattgggacggcggngcagagccaagacganggnaaggactaccaggagncggcgccggcgccgctggttgacccgacggactttacgtcatggtcgttttacagancagggatagcagagtttgtggccacttttcgtttcnctacatccccgtnttaacccgtttatgggactccccggg

SEQ ID NO: 29906 - DNA, 275 bp, Glycine max
  unsure (1)..(275): unsure at all n locations; Clone ID: 701061947H1
ctctctcactcctcagctgtgtgatgattcattncctaaaccctaattctccttgtntccattgcttgcttcattgttttttaagcaattccgagcattgatcaaatgggttttggttcacttccaattttctgaaacagcgtactntcaaaaaaaatatctgatcacattttctacttctgcaaattnngcatttntttccctctctttctttctggggtgtctggcagaacaagggatctcacagattcctngggttncnctggggttcncgg

SEQ ID NO: 29907 - DNA, 275 bp, Glycine max
  unsure (1)..(275): unsure at all n locations; Clone ID: 701061948H1
gtttgttgtgagctataagctagtttatcgtgaggagaatatgaagttgtttgtnttctttgttgctgcagtagttttggtagcatggccatgccatgggcgcaggctaccaaaggttccctctccgaatgaaaactggctatggtgagcgttcttcggaggtaaaatgcgcaanttttnggcttgctgtggaagcacacaacatccgagcctttaaaaccatncctgangantgcgttgaacccacaaaggcctacnttaatggggaacatttt

SEQ ID NO: 29908 - DNA, 272 bp, Glycine max
  Clone ID: 701061949H1
gttttcagcggctttttgtcacaatggtgcttcaaaacgatattgatttgctgaatcctcctgctgaattggagaagagaaagcacaagcttaagcgtcttgttcaatcaccaaattcgttcttcatggatgtcaagtgccagggctgcttcaacataacaactgtgtttagccactcccagacagttgtagtatgtggtaatgccagactgtgttgtgccaaccaacgggtggacgggcgaggttaaccgaaggtggctcttttaggaaga

SEQ ID NO: 29909 - DNA, 277 bp, Glycine max
  unsure (1)..(277): unsure at all n locations; Clone ID: 701061950H1
gtgatttcagtgagtgatcggtgttcacttgatntcatcataatcgtcagcgtcaattgaagnagatgccgatcagaaacatcgccgtnggaaggcntgaagaggcgantcacnncgacacgttgaagncggntttgggctgagttcatctnaaccttcatcttcgtgtttcgccggcncnggctccggcatcgcctanaacaagntcacggacnagggtgcnnctantcctgggcggncctggtctgggcctcggtggncnatganttggncctgc

SEQ ID NO: 29910 - DNA, 269 bp, Glycine max
  unsure (1)..(269): unsure at all n locations; Clone ID: 701061951H1
catctttatgcatcctcagggtctttatataagtntganaganaagggaaagatccgtgaagtactaaggaattggcctgagaagaacattcaagtcatagttgtaactgatggagaacggatcctgggtcttggggatcttggttgtcaggggatgggaataccagtgggaaaactttcttatatacagcattggaggagtccgcccttcagcttgtttaacccattacaattgatgtgggcacanacaatgngaaacctgctgnatg

SEQ ID NO: 29911 - DNA, 275 bp, Glycine max
  unsure (1)..(275): unsure at all n locations; Clone ID: 701061952H1
gcgaagacccctttttctggttattaacagagtcataaaaaaccaaagtnttctattctctgtagctcacatgggctaagaatatctgactttggggtggaaagtatggttggcaaggagagtttgagaactgaggtcttgaacttgagctttgagaagcttatgatggttgaatgtggtggaaatagtggggaaaggagtgancattaaagctggtgtgatcacggatggaaggatnttcccagttgagcttttggatggcaaatttgtccact

SEQ ID NO: 29912 - DNA, 270 bp, Glycine max
  unsure (1)..(270): unsure at all n locations; Clone ID: 701061954H1
agcaattcacactggtctttgcttctcgttactcatttctcacctaactttctattcttctcagtctcagatcagaaccttagccatggcagcgttccagaagatcaaggtcgccaaccccatcgtcgagatggacggagatganatgactagggttatctggaagtcaatcaagggacaagctcattttgcccttcttggagttggacatcangtatatgacttagggcttncttnccggtgatgngacngtgataaagtancattgnc

SEQ ID NO: 29913 - DNA, 275 bp, Glycine max
  unsure (1)..(275): unsure at all n locations; Clone ID: 701061955H1
aaaaacctctctcagagtttgctcacccctactcttcttccagtctctatctcaatctccatcaaatttaactatggctactgaagaggttttggttgatgaaatcacttaccctaccaagatcactactaccaagcccctatctttgcttggccatggaatcaccgacatggagattcactttcatccatgtganattctattcaatcgggggttaattggagccagaagtagtanggcacttgggancaggtcaaagggaaatcttgcaaagg

SEQ ID NO: 29914 - DNA, 270 bp, Glycine max
  unsure (1)..(270): unsure at all n locations; Clone ID: 701061956H1
atgaaagcaataagtccctccttcctctgccttataattcttgtgacccttttngctggtagcattgaaagtgcaccagcaaacgtgaagccaagccattatgctgcacccttcaataggagtgtttttccttctggtttnctatttggaataggntctgcagcttaccagatagnaggaggcagcagctataganggncagaggaccagtatatgggacaccnatngtaaacagcnaccagggaagtttgggtcatgagtgatggaagt

SEQ ID NO: 29915 - DNA, 271 bp, Glycine max
  unsure (1)..(271): unsure at all n locations; Clone ID: 701061957H1
agttacagaatttcctgtttacgatcttattgcaattttgcaactttcaaagcttattagctaaagtaacatcaaaagatgtcattgattccaagtattttcggtggcccaaggagcaacgtgttcgatccattctcactcgatatgtgggatcccttcaaggattttcatgttcccacttcttctgtttctgctgaaaattctgcatttgtgaacacacgtgtgggattngaaggagacccaagaggcacacgtgctcaaggntgatatc

SEQ ID NO: 29916 - DNA, 268 bp, Glycine max
  Clone ID: 701061959H1
caagatgtcgaagagaggacgcggtgcgttcggcggggaacaagttccggatgtcgctgggtctgcccggtggcggcgacggtgaactgcgccgacaatacgggggcgaagaacctctacatcatatcggtgaaagggatcaaagggcgtttgaaccgtctcccctcggcttgcgttggcgacatggtgatggccaccgtgaagaaggggaaacccgatctgaggaagaaggttttgccagctgtcattgttcgccagcgcaagccat

SEQ ID NO: 29917 - DNA, 275 bp, Glycine max
  unsure (1)..(275): unsure at all n locations; Clone ID: 701061960H1
acaccaacttctccatcgtcttcgttggctcattcgattccttagcttcacatctccatggcgctgcaccggttactgaagaggaaaggaggcgtcgatgaacttaacgacgatttccctctcgcttctccggcaaccaagattcgccgtctcgacgctgagttgccgccaattttggaagaggacgaaccgttacctaacgaggagaagagctctcgttctnttcnaggcctctcgtccattccccttcctcttnccctcgcactcngngnttg

SEQ ID NO: 29918 - DNA, 172 bp, Glycine max
  unsure (1)..(172): unsure at all n locations; Clone ID: 701061962H1
gtnttcttnttnttnntgtgcatgggcaactgaagcgantganagtacacagagggtacacgcttgtcgttagaaagncnatgttttgggcctgcntancgggttgcccgcaatgcttatctgcttacatttntctcanantntctcatnttggcttcancttgggcnncnc

SEQ ID NO: 29919 - DNA, 271 bp, Glycine max
  Clone ID: 701061963H1
caagtctctcgaagcatctttctttctcttcctgcagaagctatccgtgttacttgttcccaagtctccaacaagcaaagtacatggttgatttggaaatccaggtccccagcgcattcgacccgtttgccgaggcgagagaatcagatgcccccggggcaaaggagtatgtgcacatacgaattcagcagaggaatggaaagaagagtctgacaacagtgcaagggctgaagaaggagttcagctacgagaagatcctcaaggacctcaa

SEQ ID NO: 29920 - DNA, 276 bp, Glycine max
  unsure (1)..(276): unsure at all n locations; Clone ID: 701061964H1
tcacaatcatcaatatcagttgtgtaatcttttctctgttctgctcatgggcttctgttcatgatgatgctgctgaagttggttttgaagaaggaatgctctggctaccctctcatgttttggacgaggcatgcgactccaagatacatatgaggaaccgccaccaaaaacagcgggcaacacggttaccacagntatcaacgggaaacacagtccacgggtactgnncanttncncaattctttttacaggancatcntgccaagnccccaanct

SEQ ID NO: 29921 - DNA, 276 bp, Glycine max
  unsure (1)..(276): unsure at all n locations; Clone ID: 701061965H1
ctctctcatcaggagcgaatttgatcatgggctaatggacagaaaacttggtgtgtggcaaagccttcatcagatcaagcaacccttttggccaacctcaattatgcctgctctcaagttgattgcaggattctgcagaaaggatgcccctgctcttaccctgacaatctcatgaaccatgcttccatagccatgaatctctattaccatctagggggaaaacccactgganttgtgatttcagggcctctggcttgttgtnggtcattgatccaa

SEQ ID NO: 29922 - DNA, 271 bp, Glycine max
  unsure (1)..(271): unsure at all n locations; Clone ID: 701061966H1
ttacattctttcgtcccttcctgtgtctgancagaaggagttcgcaaccgcttcccttcttcctttttagcggcgtctctgttgtgcaacatggaggacaagatagagactgcagacaaaaaggtgctggttgatattgtaaaattagcacaaaanagaggctaaagggtaatctgggaggctggaaagaattcttgaacagtcatgataaacaagttggggcaggtntgagtgatccatcaaagagatcccatgnggtattggctgcatt

SEQ ID NO: 29923 - DNA, 271 bp, Glycine max
  Clone ID: 701061968H1
caattatggaagtgattcctggcaaagtacaggcacatgattggggggccttctttgaaagtggatttgcacactggggctgtcgctgaaggggtgttgacttttgtgattacctttgtcgttctcctcatcttcctcaagggccctcgtagtgacttgttgaagacttggttgctggccacggcaactgtagttttgggtcatggttggatctgcctacactgggccagccatgaaatcctgcaaacgcttttgggctgggcatacaaaa

SEQ ID NO: 29924 - DNA, 272 bp, Glycine max
  unsure (1)..(272): unsure at all n locations; Clone ID: 701061970H1
ctaggtgatgacgatcaatccattgaggatgattttnttgcttggnaggaatctctatggtctgagttggatcagttgctccgggatgaggatgatgtaaatactgtatctactccttataaggctgctattcctgaatatcgatccggttattcatgattccaccgtcacatcttgcnatgataatcacttaaatgtggcaaatggtaatgcctgtgtttganattcaccatccttgcagggntaaaattgccgctcaaagnggactttcc

SEQ ID NO: 29925 - DNA, 276 bp, Glycine max
  unsure (1)..(276): unsure at all n locations; Clone ID: 701061971H1
cccaacccacattcacccgcgtcataaaaatcctattctccctcattgcctccctttttatactgcaaaaccctaagacacagaggagaacacaaacagcagcgtcttggtttgtgaganagacagaggcacagagatagaatggttttcggggtcangaatctgcgcgaagagggtagttgtggacgcgcggcaccacatgtggggangctggcatcgatcgtggcgaagggaacttctggaattgggnaaaggnggttggttggtncncccncc

SEQ ID NO: 29926 - DNA, 272 bp, Glycine max
  unsure (1)..(272): unsure at all n locations; Clone ID: 701061972H1
ccgcttccaagtcctacaagaacaacccattccctccctcattgcccccactcttctgccacttctcaatcctctgtaacttcaaaacatacacctcttctctctgtttctcttcantctctctctccctccctcttcaactaacatggcaattganaaccaagacacgctgtcagaganatcaagcccaagaacaggagatcatgggtgtggagggctggatggtgagganataagtgggccacgtgggttgaagccaatgctggaaagga

SEQ ID NO: 29927 - DNA, 273 bp, Glycine max
  unsure (1)..(273): unsure at all n locations; Clone ID: 701061973H1
tgaattgngcctatatnaacagtaccgaaacctcnnaganagcacacatcattagangtgaatttacaaagaaattcanaagcaaagcaagaatcatgnattccantatttgcaattggnaacaaantcaggttcttcccacngaggaagcaaagngggatgacacttacctctcagctttggacactatgcttcagccgaattttcccggcaatcttgaacgctgcggttgatctggattcgtttganattcatagccaagggcagaggttc

SEQ ID NO: 29928 - DNA, 276 bp, Glycine max
  unsure (1)..(276): unsure at all n locations; Clone ID: 701061974H1
caaaaaatngccgcacctttcgtttttttttcttgatgttattcggtagaagctgnngacggagaattagagagattatccaatccagtatncattgatcccgagatctagcttcactctgcgaaacgatcaccgtttncatctccatctatctatcgctttcanatctgtaaggncttncnctgttncnccgtttccgaggcntnccggtttcantttcccaanaaaaaagcccttttttngggantcgccanaaaaantgtccnanagaggggg

SEQ ID NO: 29929 - DNA, 268 bp, Glycine max
  unsure (1)..(268): unsure at all n locations; Clone ID: 701061975H1
aaaccctcttcatcttgttcnatctgtgacgagcatcatggcctcaagagcagtgttattgttggctatgtgtgtgcttccggcgatggttgtggccattcgcccagcaaagaaccctttttgcgtgaagggtcgtgtctactgtgacccttgccgtgctggttttgagactcagctaccacctacattgctggtgctgagattatgttgcaatgcaagagcaagggttagcaaacgaggttgtgntacacgaagaaaggggtacacc

SEQ ID NO: 29930 - DNA, 264 bp, Glycine max
  unsure (1)..(264): unsure at all n locations; Clone ID: 701061976H1
gttactccctttcatcctttgggaatggcttccaataactaattgtgaatgccattagatgtggaacttgtgtgagcagtacatagagcatttctctgagattgaacagctatgccagattcaacagaaaccttttgctcacaaaaggatatctcaattacaggtaaatggccaatatttttncattttttttaaatttatggttaaattttaatgtgggccaaaaagggtcccggatattcttggcccggngtttgtccctcc

SEQ ID NO: 29931 - DNA, 271 bp, Glycine max
  unsure (1)..(271): unsure at all n locations; Clone ID: 701061977H1
ctctccttctttctttgtntctgtgtgttcgagattgaagaagatgatgcaggctggacccggcggcatggcccaacaagcgaaccaacaatacgancagcaacagcaacanncctacatgatgatgccgccgnggctcagncccntcagtgtgggcnnatcggcccagccttccgtcccagtcggttggctcntcggcaanccacaagcgcngatgaggttcngtaccctcngnatccggtgnttgcagtnantggntnggggnaaattt

SEQ ID NO: 29932 - DNA, 268 bp, Glycine max
  unsure (1)..(268): unsure at all n locations; Clone ID: 701061978H1
gtttganacaactctcgtacaagancactctgtgtaatatgattcttggatattagaaggtatcaatgtaatgtataaggngtgtcaatataatatatttcanacaaacaaggagagttaatatagggataagaaaatggagggatgacaaggagaaaattggtaaaaccttaaggggtgttaggtataatttactcttgattgtaaaaattgcttnccttttacttatctgattncccgtgtatggccagagcaggaacancccctt

SEQ ID NO: 29933 - DNA, 264 bp, Glycine max
  unsure (1)..(264): unsure at all n locations; Clone ID: 701061980H1
ctgttatttcctgcaaataacaggaagactaaaagagttctagacnctctgtttagtggaagtatctagcccatgaatgaaaaggnnaaaaaagagaagattaggccgtactcattctctattctctaatttgaaccagcctcanggccgtacgagaaagatattcaaggtgggaagatcacattcctttttncctctncctctaataaatcttngttcgagtttttcaagcctagcaaaatcttttggtggatgggggaattc

SEQ ID NO: 29934 - DNA, 272 bp, Glycine max
  unsure (1)..(272): unsure at all n locations; Clone ID: 701061981H1
ggagcgtgttgtacaaggggcaattttttcaaaacctttttctctctcgcaaccttcacctcttcctccttcaatctctttcggaatttcccaaaatccttagtgggaggaagagatggttctgactcagaagcttcacgaagcttcaaaggcaccgtcgagaggattactggccccgaaccgtttccgcttcaagaaaaaggagttctcagtgtccctgagttcgtcaaccgntgccgataatctcgttgccaaatgccccacctgggtcc

SEQ ID NO: 29935 - DNA, 270 bp, Glycine max
  unsure (1)..(270): unsure at all n locations; Clone ID: 701061982H1
agtttgttgtgagctataagctagtttatcgtgaggagaatatgaagttgtttgtnttctttgttgctgcagtagttttggtagcatggccatgccatggncgcangctaccaaaggttccctctcccgaatganaactggctatngtgagcgttcttcggaggtaaaatgcncagctnttagggctgnngtggaagcacacancatccganccttnaancccatncccgaanngtgcnttgaaccnncnnaccccttccntanncgngc

SEQ ID NO: 29936 - DNA, 270 bp, Glycine max
  unsure (1)..(270): unsure at all n locations; Clone ID: 701061983H1
agataactagaaacagtgtgatgaaaatgaaggtccttgttttcttcgttgctaacaattttngtagcatggcaatggccatgcgtacgatatgttccctctnccgaatgaacactgggctatggtgncccgtacttccggagtgaaatgcgcagttggaggcttgtgtgggaagcacacancatctttggctttgagaccattcctgaagantgcgttgaagcancaaaggattacatccagggcgaacaatntngttccggcccncna

SEQ ID NO: 29937 - DNA, 267 bp, Glycine max
  unsure (1)..(267): unsure at all n locations; Clone ID: 701061984H1
ggctactggagaggattattccgtggaacctgctgagagcaggaggccattccgtgctctccttgatgttggtcttattaggactacaaccggtaaccgtgtgnttggtgcccttaagggagctctggatggggggttggatattcctcacagtgacaagangttgctgggtttgataaggagaagaaggagcttgatgcagaggttcatcggaaatatgtttttggtggncatttgctgcctatatgaagatcttggccggaagac

SEQ ID NO: 29938 - DNA, 268 bp, Glycine max
  unsure (1)..(268): unsure at all n locations; Clone ID: 701061985H1
gggtgcttagtgtaaccgtgcagaaattgcctccacntgagcctaagaaacctaggactattcaggttaaggttgcttgaacaacttgtngaacgaagtttaataaatgattgtnttccctttctggcagaagcagggcaagaagtaatgtnccctgaaggataagatggatcctatcnttangtgttncaaggtttccngttcctattgccaatggtccnntggggtttccagtttgtgatgtngtaatccagatgatgccattnnc

SEQ ID NO: 29939 - DNA, 275 bp, Glycine max
  unsure (1)..(275): unsure at all n locations; Clone ID: 701061986H1
ggacaacctggaattcctacaatgggctgaaacgctactgtgattctgtaaatggtggcattatgaatgagaactacaatcctgtagagcgtaggattaagggtggaaaggaccggaatgttaagagtctaaagagctcannatcactgcaaacaaatactatgantcattcctggttcaggcgactcactcaggtccaagcaattgaggtccaagtgggaggacctgacnggggtaattctttcngcggngatacaagctttntcccaagncgg

SEQ ID NO: 29940 - DNA, 268 bp, Glycine max
  Clone ID: 701061987H1
caaaggcaccaatttcattgctcagagttcccaaattctccccaagagataaaatgtctctaatcccaaacttcttcggtggccggagaaacaatgtgttcgatcctttctcactggacgtgtgggatcccttcaaggattttcctttcccaaatacgctttcttcagcttccttccctgaattttctcgggaaattcagcaattgtgagcacccgtgtggatggaaggagaccccagaggcgcagtgtttcaagggagatattccag

SEQ ID NO: 29941 - DNA, 271 bp, Glycine max
  unsure (1)..(271): unsure at all n locations; Clone ID: 701061988H1
tagggttatcatttctccatttccattttctctctcacttttcaagaatcgtaagctatgggaaagtcttacccaactgtgagtgctgattaccagaaggccgttgagaaggcgaagaagaagctcagaggctttcatcgctgagaagagatgcgctcctctaatgctccgtttggcatgggactnctgctggaacctttgacaaggggcangaagaccggtggaccccttcggaaacatcaggcacccggccgactggctcacngcgcta

SEQ ID NO: 29942 - DNA, 268 bp, Glycine max
  unsure (1)..(268): unsure at all n locations; Clone ID: 701061989H1
gaaattgtgaggactacaaagcggacagttcctttcctgtttgtcaggggagatggggtgatattggtttccccgccattgaggaccgcatgactggactgatgaactatgtgatcatttcaataacaagtgtcactgtttatgaaattgtataactttangtagtgatctcatttcatatgattaggtagttactcaattgggcctccgtgtgctagagatttcctgttagacagtcaattttcattatcctttgtaacatgngaga

SEQ ID NO: 29943 - DNA, 263 bp, Glycine max
  unsure (1)..(263): unsure at all n locations; Clone ID: 701061990H1
atcttctncccttttcacnnacattatcctaaaaacttgcagattttcanatcccaaacaacatgaaggagngttnatgtttctgtcggtgctcctttgtgccacttttcatgtcntccttctctattatcgacggtttagttgccaacggcaactttgagttgggtccaaagccctccgccctaaaaggaacagtggtggtnggcgggagcactcgatcccagaatggagatctccggctttgtggagtacataaaatccgg

SEQ ID NO: 29944 - DNA, 269 bp, Glycine max
  unsure (1)..(269): unsure at all n locations; Clone ID: 701061991H1
aaaactcggtatcacgatgccaagaataaactgcaaggnaaagagcttgatttactcattgttatcttggccggataatnatggatcactatatggtgacctcaaacgtatttgtgagacagatctaggacttgtttcacantgttgcttaactaagcntgtcttccaaaatgagcaaggcagtaccttgcaaatgtngctttgganactnaatgtccaaagttggagggagaaacactgtactggttgatgcgctctcacgacggcat

SEQ ID NO: 29945 - DNA, 169 bp, Glycine max
  unsure (1)..(169): unsure at all n locations; Clone ID: 701061992H1
tcgttggtctgtaaaaggcactggttgaaagtggaagatttatttgaacctganaagaagatttaaagaacattntanaatttgaagagcttaggtttatttgactttataatgatttatgaattccaatttattcnantgagttcaatgcnannnanccaaaanaang

SEQ ID NO: 29946 - DNA, 269 bp, Glycine max
  unsure (1)..(269): unsure at all n locations; Clone ID: 701061993H1
gagaaatagagagagaacttcaagtgagggtgagagnnacanaaatctagagacagcactagncantctaaaagtctnttatattcttcagaatatggccatgcatcgcgagtcttgggcttttgtcttcggcgttatgggcaacatcatctcctttggagtgttccttgctccattgncaaccttttaccaaatctacaagaaganatccactgaaggtttccagtcattccttatgttgttgnactgttcagtgcaatgcttnggat

SEQ ID NO: 29947 - DNA, 269 bp, Glycine max
  unsure (1)..(269): unsure at all n locations; Clone ID: 701061994H1
agaaagtgaaatcgattcaaaagcggcaaaaaaagattganntgaaagggtttggnanangctttatcntctgggatggccatggtttggtgnttctctcttttggcctgtnaggnaggagaaactcaaggggaatganagntctncaaaagaggactttnncactnctacttgccaaactacaatctanaannnaaatatcntcagagccagccacttttgatgccctgtncaatgcgaggnttacaacccttgagagtctgtgangg

SEQ ID NO: 29948 - DNA, 271 bp, Glycine max
  unsure (1)..(271): unsure at all n locations; Clone ID: 701061995H1
tttgttgtgagctataagctagtttatcgtgaggagaatatgaagttgtttgtnttctntgttgctgcagtagtnttggtagcatggccatgccatggcgcaggctaccaaaggttccctctccggatgaaaactggntatggtgagcgttcttcggaggtaaaatgcgcaagttttaggcttgctgnggangcacacancatncgagcntttaaaaccattncctgangagtgcgtnganccaccaaaggacccanattgaatggggncc

SEQ ID NO: 29949 - DNA, 268 bp, Glycine max
  unsure (1)..(268): unsure at all n locations; Clone ID: 701062001H1
gccttcaatcatatagcattctaaganatgaagagccctaccattttcattctctttctactttcctgccttctacaccttcactcctaccttcagccaccgctcaagtcgtggttganatggaaggtaatgatcttcaaaatgggggaaatatnatgtgttgccagtaatagagtcatcatatggtggaataanagtaggccgcaactggaaaagcanagatgcctctcactgttgtacatctgccgatccgtatgataggggttgc

SEQ ID NO: 29950 - DNA, 252 bp, Glycine max
  unsure (1)..(252): unsure at all n locations; Clone ID: 701062002H1
ctnttctgcaccggnncccttctngcnggcngcctctactggttcgtctgtnttctgggccccgccgagcagaagggcaaacgcgccaccgatctatcnggcggctccatctccgccgagaaagtccagacaactacaagcagtactggtccttcttccgcngcnccaagnanatcgagaccncngacaaagtncncganttcgtnacacnttctanaatctagtcaccgacatctacgaggggggctggnt

SEQ ID NO: 29951 - DNA, 258 bp, Glycine max
  unsure (1)..(258): unsure at all n locations; Clone ID: 701062003H1
gaaaaaagcacaacagcaaacaacgtgagccccaccctctcttcccttccctcttcctataaatgctcacactctaacaaaccgaatacctctcccacttgcnatcggaagaaagagatcatcaaaccctaacagctctctctttctctctccgaatccgaattttttatcaccttctcctcgatcattgtgattgagattganatnaaccctaangcacacgctcantgttgcgattccgagttctatggctatgag

SEQ ID NO: 29952 - DNA, 260 bp, Glycine max
  unsure (1)..(260): unsure at all n locations; Clone ID: 701062006H1
gtgttctaagagtgagcaacttcaaaacaccatagtgaganatgacttccaagggtgcaattntcttgtgtctcaatgttctcttcttcactgtggttagttccacatatgttccatgcaacccaccccccaaaactccaaacacccacctgtcccanagccaccttccccaaagcaagtttcttgcnccaaggacactgttaagtttggtgtgtgtgctgatgtgttaggttngatnaacgtgcnactagggaagccac

SEQ ID NO: 29953 - DNA, 256 bp, Glycine max
  unsure (1)..(256): unsure at all n locations; Clone ID: 701062007H1
gtttgtngtgaaaattccagagggtttggcgccagagcaagtngcaccattactgtgtgcnggtntnacagtntacagtccactggtacactttgggctganaganagtgggctgagaggtggaatattggggcttgaggantgggacacatgggggtgaanatagcaaaggcactgngtcaccatgtgactgtnataaggtcttctgacaagaagaaacaggaggcacttnannaccttggagctgatcattatc

SEQ ID NO: 29954 - DNA, 134 bp, Glycine max
  unsure (1)..(134): unsure at all n locations; Clone ID: 701062008H1
cnacccttngcnggantcanatcttgaaccggcgaagcctntcanangtggaaaccgagaactccggggacacggntnangagacacggtggcaaacngnccaganccganacccctcttttgaagtngaagat

SEQ ID NO: 29955 - DNA, 259 bp, Glycine max
  unsure (1)..(259): unsure at all n locations; Clone ID: 701062009H1
ggactcccaaagttacaagaatggaggaaagatctgtgtgtatcagctggcattcctaaacattatacccatgaaattnaaggctttgattatngtgataaatacgcagaaaatgtaggactcccaaagttacaagaaggaggaaagatctgtgtgtatcagctgtagtgaacttatttatcaacttggagacatatcgtgattcgtggaatgatgatattgatgaggangcttcaggaagcccttcgaagtccttact

SEQ ID NO: 29956 - DNA, 257 bp, Glycine max
  unsure (1)..(257): unsure at all n locations; Clone ID: 701062011H1
cgccttcttctcccaatgccttccctcngcctgggcccactcggcgatcctcctcccgggtcaactcgcccgtgactcaccgcagagctgccccgcccctgaccccaacctctactacaagccagtcatcggaatcgcagccatcccggcgacggcgcctccggccgcctcagcaacgccaccggcgcctcctacatcgccgcctcctatgtcaaattcgttgaggccgccggcgcccgtntcgttcccctcatcta

SEQ ID NO: 29957 - DNA, 254 bp, Glycine max
  Clone ID: 701062012H1
actttcttttttcccgcagtcatgggcaaggtcaagatcggaatcaacggatttggaagaattggccgtttggtggccagggtggctctgcagagagacgatgttgaactcgttgccgttaacgatcctttcattacaccgattacatgacatacatgtttaaatacgacagtgttcacgggcactggaagcatcacgatgtcaccgttaaggatgagaagacccttctcttcggtgacaagccagtcactgtt

SEQ ID NO: 29958 - DNA, 255 bp, Glycine max
  unsure (1)..(255): unsure at all n locations; Clone ID: 701062013H1
ctatttttcttcctcagtagtgtcatttacgcttctcttctctgcagcaactatgcctaaccctaaggtcttcttcgacatgaccatcggcggtcaatctgctggccgcatcgtgatggagctctacgccgacgtcatccccgcaccgccgagaacttccgcgcgctttgcaccggcgagaagggcgtagggcggagggcaagcccctccactacaagggctcgtctttcnaccgngtgatcccgagtttnatgt

SEQ ID NO: 29959 - DNA, 258 bp, Glycine max
  unsure (1)..(258): unsure at all n locations; Clone ID: 701062014H1
aattaaagtaagaatacagaagaaacttcaagttcctgatgatgagtttgtcaagtggaaatttgcctttttttcattagggcgtcctgaatatcttcaggattctgacattgtatccagtcgttttcagaggagagagtttatggtgcttggnagcagtatcttggcttggagcatactgacaatgctcctaaaagatcatatgctgttaaccagaatcgccacactttcgagaagccagtaaagatttataattag

SEQ ID NO: 29960 - DNA, 259 bp, Glycine max
  unsure (1)..(259): unsure at all n locations; Clone ID: 701062015H1
cgaagacaaacctctgttctcaactgtgtttctttacctctcacctactttcagaccataccaggctgagaagatgcagcagacaccgcctatgattcctatgatgccttcgttcccacctacgaacataaccaccgagagattcaaaaataccttgatgagaacaagaagctgattctggcaatattggacaatcaaaatcttggaaaacttgcagaatgtgcccagtaccaagctcagcttcaaaagantttgatgt

SEQ ID NO: 29961 - DNA, 261 bp, Glycine max
  unsure (1)..(261): unsure at all n locations; Clone ID: 701062016H1
atactccttaattcttacaatttattatctttctctaagaactcttccaattttttctctctcttcctctttagcttcatcgccatggcatcaccagcaagaaccttctttgccttcattctcgccgtcgtcgctctcttttcgccgccgccaatgctcaagacctctccccggctccgagtcccgatgccggagcggcgggatncgtttcgagctccgtcgccatgatcggagcttcggttgtnctgtcattgatggcta

SEQ ID NO: 29962 - DNA, 241 bp, Glycine max
  unsure (1)..(241): unsure at all n locations; Clone ID: 701062017H1
gctaggccaacctcaaataacccttgtnatctctgcttncattancacttgtactcatgctcttnttcacaactttttttgtaccttctgatctaatggcagttccagtgattgattttcaaagctgaatggtgaagaaagaaccaaaactatggcacagattgctaatgggtgtgaagagtggggattttttcagttgatcaaccatggtattccagaggaactccttgagagggtggag

SEQ ID NO: 29963 - DNA, 263 bp, Glycine max
  unsure (1)..(263): unsure at all n locations; Clone ID: 701062018H1
cctctntncgtatcactccaagttataggtcacattgtcacaatgtggtcaccaattgttctactgttgtgccttattcctcctgtgttcttgctatncttcttccaataccgtagaaccttcaagaactcaaaccttcaccaggtcctagaggtcttcccataatagggantctccatcagctagatagctcgaatcttcatcttcagctatggaaactctcaaagaagtatggccctatattttcccttcaactaggttna

SEQ ID NO: 29964 - DNA, 262 bp, Glycine max
  unsure (1)..(262): unsure at all n locations; Clone ID: 701062019H1
gtttttagtttagctgtggatctatgtaatttctttgttgattggctttcatggctgagactatatgtattttnattattntcttagagttacgaactaattgtgcattagaatttgacctggatgatagatcgaagcatatttaattatagtaatatactatgcattaattttctgtcgtgtcggtgatttgtaatgctataagttncaaatanaaaatantcagttgtngaaaaaangangagngnnnnatcagagtccc

SEQ ID NO: 29965 - DNA, 251 bp, Glycine max
  unsure (1)..(251): unsure at all n locations; Clone ID: 701062020H1
cttacggctaaattctcaaagatttaaactttgtctcagagtttccaaatncacccaaccccagagagaaaatgtctctaatcccaaatttcttcggtggcagaaggagcaacgttttcgatcctnttccctcgacgtctgggaccccttcaaggattttcctttcccaaacactctttcttcagcttcctttcctgaattttctcgggaaaattctgcattcgtgagcactcgtgtggattggaaggaga

SEQ ID NO: 29966 - DNA, 257 bp, Glycine max
  Clone ID: 701062021H1
gcgttctatatattattgaattgacaatgaggcctgctcttgctttgcttcctcttctatttgctttcttgttagctgccactacggaatcaagaaaagatccaggggaatattggaaaatgatcatgaaagatcggaaatgccagaaggacttcaaggtcttgtttcatttcaatctgaaaataaccctaagactcaagagcagcttggtaaaggttccaaaaaccattgtgaagagtctctagttacaaatacac

SEQ ID NO: 29967 - DNA, 258 bp, Glycine max
  unsure (1)..(258): unsure at all n locations; Clone ID: 701062022H1
caaaaaccaaaaccaaaaacanaacaaggggtacaaaaaaatagaggagcatgaccctccatgctgnttaaacncnaanagactcgancttggntggnagtgctantgctatngctanaaacncaaaccaaagaagttccacncntcagttatnngaggcgcacgtgtctctgncgctgaaaangtcnngctctgcnnngctccctctanaacgttcgacnggagtnncgatcaanagcatcanactcctcgcattgg

SEQ ID NO: 29968 - DNA, 132 bp, Glycine max
  unsure (1)..(132): unsure at all n locations; Clone ID: 701062023H1
gcngtgtnntaactcgtaaganaanaaagctcatccnnatcgaaggtcctcgcattttcagtctcttccttgnnantgatcggcatgtacagagttgcagcatnatnattcaggaaggcatctnaagggcca

SEQ ID NO: 29969 - DNA, 255 bp, Glycine max
  unsure (1)..(255): unsure at all n locations; Clone ID: 701062024H1
ggtgcatccaaacttgacgtccgcaacaaagatggctttacgcctaagctctaagactaaaggagtaagcacactggatatctggccttggaagtatctggttccatggatgagggaagacctatttgctaggagaaagctaggtacagtaggggactgaatatcattgaaagcaatgattcttatgacatggaagattttgcaatgccattacnagaatacancattgatcctgtggctgtggatgttgtacat

SEQ ID NO: 29970 - DNA, 256 bp, Glycine max
  Clone ID: 701062025H1
cacgccgttacgaagcttcgagttcagagggtcgacgcatcatagcatacaagcaacggcggcggaaaccaccgttcgacgccgatctttttccaccgtttcttcaaagtgtaaagtcttcgcttctcccgttcattcttcagaagaacgtcatggcaatgaaccgtgccaggtatattagacacattcttaccaccaaagaggtagttggggttgcatgccaacgaacttttgccaccggtaaagcaaagaaagg

SEQ ID NO: 29971 - DNA, 255 bp, Glycine max
  unsure (1)..(255): unsure at all n locations; Clone ID: 701062026H1
cttttgcattctctctgaattcgtatgccatggagtcacccggtnacgagcatgtggtgggtggcgcagaacccaacgacgtcgttacgcccttttcccacagagaagaacctcacaattcccaacccctcaccgganacggtgccagtcccggaaagatatttataggtggtttagcgagaganacgaccattgcccaatttatcaagcactttggtaagtatggtgagatcacggattcagttatcatgaagg

SEQ ID NO: 29972 - DNA, 255 bp, Glycine max
  unsure (1)..(255): unsure at all n locations; Clone ID: 701062027H1
anaaattaaaaaagtcatgataacaaaaaaattggaagagagagattaagcaggtggcgcccaaagagttaggtgtaccaacctcatagcactaataacacatatttgaagacgaatagaagaaaganagctaattgaaaattcgtttaggaacacaaaaaatggcagatattcctcgggtgaagcttggaagccaaggcctggaggtttccaagttaggatttggttgtatgggcctaagtggagtgtacaacg

SEQ ID NO: 29973 - DNA, 253 bp, Glycine max
  Clone ID: 701062028H1
gacaagtatgggttggtggacttatccagaaaggaagccctgtagtagctataactgatgatggtgaaacatggcaagctgaagttccagagattcagggaaacaagttgagagggggccctcagatgattcaatgagtttagatgggaagcggctctatgctaccaactcactatttagtacttgggacaaacaattttatccagagcttgtccagaaaggctcccacataatacagattgatgttgatact

SEQ ID NO: 29974 - DNA, 256 bp, Glycine max
  unsure (1)..(256): unsure at all n locations; Clone ID: 701062029H1
gataactagaaacagtgtgatgaaaatgaaggtccttgttttcttcgttgctacaattttngtagcatggcaatgccatgcgtacgatatgttccctctccgaatgaacactggctatggtgcccgtactccggagtgaaatgcgcaagttggaggcttgctgtggaancacacaacatcttgggcttngagaccattcctgaagagtgcgttgaagcaacannggaatacatccanggcgaacaatatanatcac

SEQ ID NO: 29975 - DNA, 259 bp, Glycine max
  Clone ID: 701062030H1
tagtgactgacttttcgagaaaggaaaaaaaaagagtttccggcattattccatcatgaacgctcttcccattcttctcttcttcctcttcgtttcggcattagtttatgcgaagaaaactggcgatgtgacggagttgcaaattggcgtgaagcataaaccagcatcatgtgaagttctggcacacaaaggtgacagagtcaaagtacactatcggggaaaactcactgatggaactgttttcgattctagctttgaa

SEQ ID NO: 29976 - DNA, 258 bp, Glycine max
  unsure (1)..(258): unsure at all n locations; Clone ID: 701062031H1
gattattttattccctccattggccgtagtagcagcgttgtgtggcggtgacaaccatggccgactcatctcaagaccttgaccaactcctcgatagtgctttggatgattttcagtccttcaacctcaatcctcccctccaagtggggaagcaagtgcgaacaagaagaaggagagtccttctttggcgtcgggggtgcaaggattgggcatgggtttacccgatttgagaacgaagaaaaaggggaaanagaangc

SEQ ID NO: 29977 - DNA, 267 bp, Glycine max
  unsure (1)..(267): unsure at all n locations; Clone ID: 701062032H1
aacgtatcctctcgttagtcgttaccttctccnacaaaacaaaacaacctaaaagcttgtccatctaagactcaaactctttcncatggatactctatcatcctctgttncaaccctcaatgttcccccantcccannanaaccttcacaaatcgcggattttctatcgattccaaagcatcccccacccggtcccaacaacaaacaacaanatcatgttttctccactnccacacccaattttctcnccaaaacccagaactttct

SEQ ID NO: 29978 - DNA, 264 bp, Glycine max
  Clone ID: 701062033H1
attcaccattttctccatcttcattcacttgcaagactcctccatagatatgctggtggtgaccctcttgcagttcgagttagctgttgcatctttctgattttacctgccactgcttttcccgagggcttgtgattgtcaactacatattcaattgcatttaagtaaggagttttgtcttgaaaggaccttatcttcgccgcagcagccatgaaaggaaagaacaggagaagtggtggtgctatccatatggagtacctcatt

SEQ ID NO: 29979 - DNA, 265 bp, Glycine max
  unsure (1)..(265): unsure at all n locations; Clone ID: 701062034H1
gaaaagatgccggctggtcatggtttgagatcccgcaccagagattccttctctcgtcctttcaggaagaagggaaccatcgccctcaccacatacctgagaacctaccacgtcggcgactatgttgacgtcaaggtaacggtgccgttcacaagggagtgccccacaaattttnaccangggccgnacggnacgctttggaaatttcnacnaaacgtgcttttggcgtcgaantcaanangcngggttggcaacagntttntng

SEQ ID NO: 29980 - DNA, 261 bp, Glycine max
  unsure (1)..(261): unsure at all n locations; Clone ID: 701062035H1
cgacaacgaaaactttattctctattctcgaagagagagtggttgggttcgatggagaaagagttggtggaattgtacgaagcggcgaagaaggcggcggacgcggccatctccggcgacggcgaacatgaggaaacagatgcatcgatgcgcttgagcagctcaagaagtttcccgttaattacaagattctcgtcaacacccaggtgggcaaacatcttaaagttctgacaaagcacccaaggcaganaattaagtcct

SEQ ID NO: 29981 - DNA, 259 bp, Glycine max
  unsure (1)..(259): unsure at all n locations; Clone ID: 701062036H1
anaagctgnaatttnanagctngataanatacattngatncaagctntctccngattgcttagaanngcnggcgaggatgttgatngcncttaaggattatggcagtgccatannaganatcagggcattnttaacttggaaccaaattatataacttcaaangaaaagancncagggaaatacttggttcatctccntagccatgtggtacagcaaaagngtcaggctgantgctggatgcaattatgcgaacaatgg

SEQ ID NO: 29982 - DNA, 256 bp, Glycine max
  unsure (1)..(256): unsure at all n locations; Clone ID: 701062037H1
aagaagatggtgtcaggttctggaatctgcgcaaagcgagtggtggtngacgctcgccaccacatgttgggtcggctagcgtccatcgtggcgaaagaccttctgaatgggcagaaggttgcggtggtgcgctngaagagatttgcatctccggcggtctggtgaggcagaagatgaaatacttnanattcctccgcaaacgcatgaacaccaaaccctcccatggccctatccacttccgcgccccagcnaagat

SEQ ID NO: 29983 - DNA, 252 bp, Glycine max
  unsure (1)..(252): unsure at all n locations; Clone ID: 701062039H1
gtttggnacttagagcgtgtgtggttttngttggtaactgaagagtgtgtggaagcagaanaagaaggaagaaggaatcggcggtgttcgactgacgatcgcatctcaaaattgggttcggatcattcctttgcttgttcgacaatnttttttcgcttgcngtttttcggaggcattttcttagttgaattgtatggtcgtntgtntngttttctcgctgctgaaattatatatgggctgagggcacacttt

SEQ ID NO: 29984 - DNA, 252 bp, Glycine max
  Clone ID: 701062040H1
gtagaaccttcactctgctctcacccttattcctctctttcctttctttcttctgcaacaaaaatcatgtctgggtccttgggattcttctttgtgggtcttacgttgttgttgttggtcggggtggctaatgtgtggccaacacttccaacaaatttgatcaactcttccaaccaagctgggcttttgaccacttcattcatgaaggggatctcctcaaactcaaactagacaatttttccggcgctggtt

SEQ ID NO: 29985 - DNA, 253 bp, Glycine max
  unsure (1)..(253): unsure at all n locations; Clone ID: 701062042H1
ctcatcacttactggaagccttgttgtgagtaagagaaaaggcttcctgcaccgagcacaccaacttgatacctctgattctttctttgcttagaattccacagaatatggaganagngncttntcaatcactcccacctttggaatncaagggtttgagcaaggaggaggaagactcattgctagggcaagnggaaatatggaggtacatgacatgcttcacggactccgtggccttgaaagctgtcataga

SEQ ID NO: 29986 - DNA, 253 bp, Glycine max
  unsure (1)..(253): unsure at all n locations; Clone ID: 701062043H1
tggagaagntatcagatctggagcaggagaatagcgttggcagcgtttgcntttgctctgctgttccaatcggcctcagcagacgacgtcgttgtgctctctgaagataacttcgagaaggaagttggtcaggaagaggagctctcgttgagttctatgctccttggtgtggacactgcaaaaagcttgctccagaatatgaaaagcttggtagcagcttcaagaaagccaaatctgttttaattggcaaggt

SEQ ID NO: 29987 - DNA, 250 bp, Glycine max
  Clone ID: 701062044H1
cgggtttttggttgggagtacaggaaaccggagagggctcctcctgtatgtccatacaagcctccaaccaacagggttagtaaagttgaggcagatgttgaacctgttccagcagatcctgttaagcctggaatgtagatgtcaagcaggattaatctggggtagctattctataaggtttgacgggagtaaaatgtatgataacatctgatggttgatgtatgtttttaacttttattaaatatcttgt

SEQ ID NO: 29988 - DNA, 234 bp, Glycine max
  unsure (1)..(234): unsure at all n locations; Clone ID: 701062045H1
tangtggaatgtgttaatcatgagctcctgcaaccttatnctgttctgcatgaaaagcctggtgatgatgttgcacatatcaaattcactgtattgctaatgcctaatggatcaatcgtgtcacatctcacccactccaggaattgcagcccaccaaaacaatagacgatcctgaaatcaaggcatggctagcattgggtacgaagacaaagaagaagggtggtggaaagaaga

SEQ ID NO: 29989 - DNA, 254 bp, Glycine max
  Clone ID: 701062046H1
ttaagtgtaccaagttaataggtctttatatttagttgttgacatcaacaaagtcatggaggaagttaatgtggttcaaaccaagaatggaactgttgcagtagcttctgcgtttgctggacataaggaagctaacagcaaagggaccacaaatttttaagaattgctgttgaagaagcctataaaggggtagactgtgaagatgggggtccctttggtgctattatagtatgtaatgatgaaatagttgctcg

SEQ ID NO: 29990 - DNA, 227 bp, Glycine max
  unsure (1)..(227): unsure at all n locations; Clone ID: 701062047H1
ggacacaaganaaggtggccctttagaaggngaccatgancacatcgtccacttgtctgattcaagtgcttccttagatctgattaaggaagcaaaaagtcatggtacagcataagtgttganacttgtcctcattacttagctttcacgtctgaagagataccaaatggggatactcgttttaagtgttcccnacccanncgtgatgcatacaacaaagacanntt

SEQ ID NO: 29991 - DNA, 52 bp, Glycine max
  unsure (1)..(52): unsure at all n locations; Clone ID: 701062048H1
ggcaaaaaanagaaaaaagnaannaanaaaaaaaaagaagaaaaaaaaggna

SEQ ID NO: 29992 - DNA, 214 bp, Glycine max
  unsure (1)..(214): unsure at all n locations; Clone ID: 701062049H1
ancctnnctganctgtgctgttttttcagggtacaacaaaattgggtgntttcggttaaactgtgatggtctccgccagtgctgagcaaggggaggaggagggtaaaagcaatgtcactttgtnggnttcctcatcaaccacnangncaaagtgtgngncntcaagagnttggaatttnaagngcgcaactacatgggatnatctgattgttct

SEQ ID NO: 29993 - DNA, 258 bp, Glycine max
  unsure (1)..(258): unsure at all n locations; Clone ID: 701062050H1
aagatagacaagagtcaggttcatgaggttgtgcttgttggaggttccactaggatccccaaggttcagcaactcttgcaggatttcttcaacgggaaagagctttgcaagagtattaaccccgatgaagctgtgcgtacggtgctgctgttcangccgcgatcttgagcggcgaaggagacgagaaggttcaggatttattgctgctggatgttacaccactcagtctcggtcttgaaactgctggtggtgtcatga

SEQ ID NO: 29994 - DNA, 255 bp, Glycine max
  Clone ID: 701062052H1
acgttgagaagaaggatcctaccggagccaaggtcaccaaggctgcccagaagaagaagtgaatcgtgcgggctggttcatcaggggatgttggttacaataaatgttggtttcttttctgtactcttgtgtctcttttctaggtagcttgtttttcggacaaagtttgaagtctccaccatcatctcgcaactgttgttcccagaactgggttcttgatcgacggtggcaaaattgcttttatttatctgtgtt

SEQ ID NO: 29995 - DNA, 255 bp, Glycine max
  unsure (1)..(255): unsure at all n locations; Clone ID: 701062053H1
angccatcgagcatcaacgcaaatcgatggcggcgatgggttccctcgcaaaactcatcatcgttcactgatgaaaccaaaacctaaaccctaatccttcctccctctcaaccgatttcttcgcgcgctacaactcgtcccctcatggcccaaaccccaacatctctcgatgcagagcacccctccgacaacgaccagcacatgggctttcgggcgcggagcctgagcggagagtctcgggcggagcaagcntgg

SEQ ID NO: 29996 - DNA, 253 bp, Glycine max
  unsure (1)..(253): unsure at all n locations; Clone ID: 701062054H1
gctataagctagtttatcgtgaggagaatatgaagttgtntgtnttcnntgttgctgcagtagtnttggtagcatggccatgccatggcgcaggctaccaaaggttccctctccgaatgaaaactggctatgtgagcgttctncggagganaaatgcgcaagtnttaggcttgctgtggaagcacacaacatccgagccanttanaaccattcctgaagagtgcgttgaaccaacaaaggactacattaatgg

SEQ ID NO: 29997 - DNA, 252 bp, Glycine max
  unsure (1)..(252): unsure at all n locations; Clone ID: 701062056H1
tgcacataaaaaaccactctacaaaactctccagtaattctgaaaattttattttcttttggtgaaattaacagctctgtgattgatcaatggcganaaangaaggcaaagccataggcatcgatctcggcagacctacagctgcgtgggcgtgtggcaaaacgaccgcgtcgagatcatccccaacgaccaaggcaaccgaaccactccctcttatgtagccttcaccgacaccgagaggctcatcggaga

SEQ ID NO: 29998 - DNA, 250 bp, Glycine max
  Clone ID: 701062057H1
gttaacaccagatgaaaagcgacggaatgctataatgttcgacttgatctttgtgaattcttgtcatcctctctctgcatgcataagtacacttgacaacaagtgtaaaaacatgccaaatagtgaacgggtgtggtcaaggaaaaaatcaaccccaaagaaagtggtggaatgaatggttacatatccttatgtggtggagaaccttgccctcctatttttaggtctcctattgcaagcatggaagata

SEQ ID NO: 29999 - DNA, 252 bp, Glycine max
  Clone ID: 701062058H1
caactatcttattccttcactcactcctctctgcgcttggctatggaaaaaacgcacagctccagcgcagaggagcaggatccgacccggcgccacctggatcccccacccgggttaactgctgaagagttcaggacctcaaaccctccgtgctggagcaccacacctactccgtcacacccacccgccaaagctcctccctcctcgcgcaggcatccacgcgccaccacacgcggtgtggtccgtcgtgcg

SEQ ID NO: 30000 - DNA, 248 bp, Glycine max
  Clone ID: 701062059H1
ggtgtattgcacagtttcttaacaaaaagagatacagaacttgctgcaccgttgattgcggttcttgaacaatgcggtcaggaagtgcctcagacccttcaggatctgaatcatacatcgaacatgttggagattgaatgttgaaggtgcttagtcatcaatttttttatgttcattccgtctctgcggctcatgatatcaaaagatcaattccttttactttggaatttgggctgggagctgagtgg

SEQ ID NO: 30001 - DNA, 251 bp, Glycine max
  unsure (1)..(251): unsure at all n locations; Clone ID: 701062060H1
cttttttcaggtttgatttcgaaagcnnattttnagggaagaagaagatgaggccgatttttgctgggaacttggagtacgatactcgtcaatcagagcttgagcgcttgttctcaaagtatggaaggattgccgcgtggacatgaaatctggttttgcttttgtctattatgaggatgagcgtgatgcagaagaagcaattcgtgcacttgacaatgttccatttggtcatgaaaagcgaaggctgtcag

SEQ ID NO: 30002 - DNA, 253 bp, Glycine max
  unsure (1)..(253): unsure at all n locations; Clone ID: 701062061H1
ttctaactcaacaattgagatctcacactgcaattccttcttctcccagaatcggtcactaaatccgcaatcatgaagctcgataccaccggtctcgaatcgtttcccacactgcttgcgccnnanaacgacgcgttggagaactctccgccgctccatcctncgaccttccgaattccaangattncgatgggtttgtgaaagaagctattcagatggtgaagcccgcgaagggtactacgactcttgcttt

SEQ ID NO: 30003 - DNA, 253 bp, Glycine max
  Clone ID: 701062062H1
cattggctctagatttgggaagcatgggaaagggtgaagtgtgggtaaacggtcgaagcattggtcgccattggcctggatatatagcacatggtagttgcaatgcttgtaattatgctggatattatactgaacaaaatgccggacgaattgtggacaaccttctcagagatggtatcatgttcctcgctcatggctgagctcaggtggtaactccttggttgtgtttgaagaatggggaggtgaccctaat

SEQ ID NO: 30004 - DNA, 251 bp, Glycine max
  unsure (1)..(251): unsure at all n locations; Clone ID: 701062063H1
cgcatgcatgcatgtttttattttattntattnttaatttctcacttcccagctatattctgtgattnattgttgattaagttgctcgcaaatggcgtgatcactatggttgaggcatttttccttttaatgggttttgcgttggttttgttattagcatagcgtttttgtgttgctggcaatatgtgaagtggacggttgttttgatttttactgtttgtgtgtctggcagtttggtttgtctgtgagtt

SEQ ID NO: 30005 - DNA, 258 bp, Glycine max
  unsure (1)..(258): unsure at all n locations; Clone ID: 701062065H1
gctggttgccacactacaccgatatntccaccaaacccgtttgcnctgttgtttgcgaataaatggcaactaagaggagcgtgggaacgttgaaggagggtgatttgaaggggaagagggtattcgtgagggtcatctgaacgtgcctttggatgacaaccttaacatcaccgatgacactagagtccgtgctgctgttcccaccatcaagtacttgactggttatggtgctaaagtgatcctttctagccatttggg

SEQ ID NO: 30006 - DNA, 257 bp, Glycine max
  unsure (1)..(257): unsure at all n locations; Clone ID: 701062066H1
gtcgctactaagagttgctgcttcttcagccactccgcacctcgcagcctctgtgccctcaacaaccatggctgaaatcgaaactaccgttccagatcccacccaaatcgacgtcaaactcttcaatcgctgggcttcgaggatgttgaggttaatgatatgtctctggctgattacattggagtgtccccatcaaagcatgctacatatgttcctcacactgctggtaggtacncagtgaagaggttcaggaaanc

SEQ ID NO: 30007 - DNA, 256 bp, Glycine max
  Clone ID: 701062067H1
agatttcgtgcactcaacaaactctcatccacccatggcgtcatcactatcaacaatagctctattcctgccccaatcgctctatattaagccccgcctggcgccacggcctcttcctccccctcaattccgtcccttttcctaacctcaccggcgggtgctcgtactgctactgtcatgcctagaagggcggcggtcatcgtgtcggcggcgacggcggagacgccgaagaagaagggcgaatcgaaagggttcg

SEQ ID NO: 30008 - DNA, 254 bp, Glycine max
  Clone ID: 701062068H1
gcacaccaagctctaaaaaaacccttttttctttagttttgttccctctaaaattctctttctgcttagtctccacgctcttgcttgcttttgtgtgagagaacaatggcaatggtgaagtctcccaagaacaagtgaacctcttctattcccttgactgtgaagaccttgcccagaacgttgctcttcaatcaccccacatcgttctccagaacatcaaatggaggtcatttgctgatggatttccaaatata

SEQ ID NO: 30009 - DNA, 194 bp, Glycine max
  unsure (1)..(194): unsure at all n locations; Clone ID: 701062069H1
ggttcccattccagcattaacagcccccatcctgattatgcggagattgttgtggtgcgtcatggcgaaacanttggaatgctactgcaaaaatccaggggcacctggatgttgaattaaatgaaaatggaagacagcaagcagctgtagtggctgatagactatccagggaacctaaggcctctgttatatat

SEQ ID NO: 30010 - DNA, 247 bp, Glycine max
  Clone ID: 701062071H1
gtggagggagggagccgtagcagcggaagtctagcttgggtagcgaatcacaatggcgagaggattaaagaagcatctgaagaggcttaatgccccaaagcattggatgcttgacaaactgggtggtcatttgctcctaagccctcatctggaccacacaaatcgagggaatgcctgccactcatactcattttgcgaaaccggctgaagtatgctctaacataccgtgaagtcattgctattctga

SEQ ID NO: 30011 - DNA, 250 bp, Glycine max
  unsure (1)..(250): unsure at all n locations; Clone ID: 701062073H1
ccgctgtnnccaccgccgcgatggcggtggccgcgtnccgacgccgacgacatcctgatccgtcaggtggtgccagatgttggcgaannaagnaggaactncaacctgctgaacgccgagcaccacttcggagcttcaaggccaagttcgccaagacctacgccaccaaggaggagcacgatcatcgcttcggcgtcttcaagtccaacctccgcagagccaggctgcacgccaagctcgacccctccgc

SEQ ID NO: 30012 - DNA, 249 bp, Glycine max
  unsure (1)..(249): unsure at all n locations; Clone ID: 701062074H1
gaaatataaaagtttatttcctctgatcgtgtggtttctgagttctaagcactcacctctttcatacacgtttgttcgnttgttgagaagccatgggcgaggatttcgagttcccaagtgctggcaacaggaaatgcctgaggaggaagagtttgagagtccgatnctgaaggttggggaggagaaggagattgggaaaatggggctgaagaagaaattgctcaaggaaggtgaaggttgggacacccc

SEQ ID NO: 30013 - DNA, 246 bp, Glycine max
  Clone ID: 701062075H1
cagaaaaaatgggttcttcttcttctatgtggacggtgtgtgtgattttggcatcactggcctctgcagcactctgtgccaacccacgcaggccagtggatgtacaatttggccgaaactacgtgccccatgggcctttgatcacatcaaatatttcaatggtggttctgacattcagcttcatcttgacaagtacactggtactggcttccagtccaaagggtcttacttgtttggtcacttcag

SEQ ID NO: 30014 - DNA, 246 bp, Glycine max
  Clone ID: 701062076H1
tcttcacccttctgatctgctaattctcaaggtattcaaaattgggtggttttcgattgaactgtgatgtccaagccactgctaggcatagcggaagaggaaggtcaaagcaatgtcactttgttggttcttcctcagccaccatggaaagtgtgtgcctgaatagctcaaaactgaaagagcgcaactacatggggttatctgattgttcatctgtggacagctccgcgccgtccttctcagatg

SEQ ID NO: 30015 - DNA, 249 bp, Glycine max
  unsure (1)..(249): unsure at all n locations; Clone ID: 701062077H1
aggttttcgaaggcgagaggagtctcacaaaggattgccgccttcttgggaaatttgatctgtctggaattcctccagccccaaggggtacgcctcaaattgaagtgaccttcgaagttgatgccaacggattctaaatgtgatgcagaagacaagggcactggtaaatcagaaaagatcaccattacaaacgaaaagggacgtcttagccaggaagaaattgagagaatggttcgcgaanagaggant

SEQ ID NO: 30016 - DNA, 252 bp, Glycine max
  unsure (1)..(252): unsure at all n locations; Clone ID: 701062078H1
aganaactgaaaagttaaagcgggctacagtgtgggaatggcgggcaaaggtggagcaactccggcgacatactcgccatctccgacgaccaataggaagaagaaaccaccgattttcaaggaggattgggtcgacccgatggccgcggttttcaccagtgcagacccgcgtttttcaggactggtgctgtgaatgctgcatctggatctgcttacgctgagtttggaaataccaaggtcattgtatcagta

SEQ ID NO: 30017 - DNA, 249 bp, Glycine max
  unsure (1)..(249): unsure at all n locations; Clone ID: 701062079H1
ggatggtctccttcaggccactgcctcacagaattaagctttcttggagttgtaaataacaaatagtatgtgtgtcaggtttttntcaggaaatgcttcttttgtttgaacttataaagtctgcatcttactcttcttatatttgatagattcatagcagtgtctattttatgtgtaagtactgatgtgcagttttgaatacttgtttaaggattagtcttaatgtcaagttgcttgtgaatcattaag

SEQ ID NO: 30018 - DNA, 252 bp, Glycine max
  unsure (1)..(252): unsure at all n locations; Clone ID: 701062080H1
angttttcgaaggcgagaggagtctcacaaaggattgccgccttcttgggaaatttgatctgtctggaattcctccagccccaaggggtacgcctcaaattgaagtgaccttcgaagttgatgccaacggcatctaaatgtgatgcagaagacaagggcactggtaaatcagaaaagatcaccattacaaacganaagggacgtcttagccaggaagaaattgagagaatggttcgcgaanagaggagtttc

SEQ ID NO: 30019 - DNA, 256 bp, Glycine max
  Clone ID: 701062081H1
agaacgtcgcacgcaccacccttctctctcttcaacaactcagctctcagaacagatacagtttccactgagtaaatcgcaatgcagacgaggactgttcaagttaagcagctttcagatctagctggtgtagagagattcacgagttcttctccttttctggagaaatcgagcatgttgagatcctgagtgaagatgggaaatcaaagactgcatatgtgacatttaaagatcccaaagcccttgaaattgcatt

SEQ ID NO: 30020 - DNA, 254 bp, Glycine max
  unsure (1)..(254): unsure at all n locations; Clone ID: 701062082H1
gtgagagtcaagattcattcatttatttatagccaccggttcaggtggcgcagcaaaaccaaacccacangaggtgaagaacaataacataaaccattcttcacctctcctctctcccaccatagtaatggtcagagcctaagttgcagtggcaactatgaccacggcctcttcaccgccgtgcagcacggtgaccttgaaattgtcacaactctcttggactccgacccctctctcttgcaccaaaccactct

SEQ ID NO: 30021 - DNA, 230 bp, Glycine max
  unsure (1)..(230): unsure at all n locations; Clone ID: 701062083H1
atcttgataaaggtgaaactcaccncggtcctgctgtgcttggaattgctatggtagctatggctgaagaattaggacttgagatggcgattcgatcattagaacatttctacaatatggagagcagaatattcgccgagcagttcctttggcacttggtctactctgtatatcaaatccaaaggtcaatgttatggataccttaagcagacttagccatgatactgatt

SEQ ID NO: 30022 - DNA, 251 bp, Glycine max
  unsure (1)..(251): unsure at all n locations; Clone ID: 701062084H1
cactcattaattgcaagaatggcacttcgttgcttggtgatgtccctttctgttctcttcactcttggtcttgcgagagaaagccatgccagagacgaagatttttggcatgctgtttggccaaacacnccattccaagttcattgcgagatcttctaaagcctggccctgcaagtgttgaaatcgatgatcaccctatgcaaattgaagaaacacagtacccgaaaaccttcttctataaagaagacctt

SEQ ID NO: 30023 - DNA, 250 bp, Glycine max
  Clone ID: 701062085H1
gcaatggctaatacaccttcgaattcttcaattctcctctccctttttctattggccatcgccctctccctcgctgagtcccaatctttcatcggagtaaactacggccaggtcgccgacaaccttccgcgccggaggacacggccagcctcctcaaatccaccaccatcggaaaagtccgtctctacggcgccgatcccgccatcatcaaggccctcgccaactccggcatcggaatcgtcatcggcgc

SEQ ID NO: 30024 - DNA, 176 bp, Glycine max
  unsure (1)..(176): unsure at all n locations; Clone ID: 701062086H1
tgattgaagaagatgccgatcagaaacatcgccatcggaaggcctgaagaggctatcaccccgacacgttgaaggcggggttggctgagttcatctccaccttgatcttcgtgttcgccggtncaggttccggcatcgcctacaacaagctcaccgacaacggcgccgccactccc

SEQ ID NO: 30025 - DNA, 246 bp, Glycine max
  Clone ID: 701062087H1
gcgtctggttttggcgggaagcagggagagaggaaaggaaagtagcgaaaaatggcgaacaagctcatcaaccagatgggattgcccaaatccattgttaatatcttcactgctcgcaacattatcacgccaaggatgcattatctcacactgaatttgagttgatggaattgctggacgttgggaaggaagaagtaacatccgcaatggctcatgttagtgaagtcgtgtgtccaccgtgccaaa

SEQ ID NO: 30026 - DNA, 245 bp, Glycine max
  Clone ID: 701062089H1
aattaactatctactgggaaacttgggaaagcattattcagaaactgttgcagtagttgatcttggaggtggatctgttcaaatggcttatgcagtctcagagacagatgctgcgaaggctccacagcaccggacggagtggaatcatacataacggagatgttccttaggggaaagaaatattacctctatgtacacagttacttgcgatacggtatgctagcagctcgtgcagaggctttaaa

SEQ ID NO: 30027 - DNA, 244 bp, Glycine max
  unsure (1)..(244): unsure at all n locations; Clone ID: 701062090H1
ctgcacataaaaaaccactctacaaaactctccagtaattctgaaaattttattttcttttggtgaaattaacagctctgtgattgatcaatggcgacaaaggaaggcaaagccataggcatcgantcggcacgacctacagctgcgtgggcgtgtggcaaaacgaccgcgtcgagatcatccccaacgaccaaggcaaccgaaccactccctcttatgtagccttcaccgacaccgagaggct

SEQ ID NO: 30028 - DNA, 242 bp, Glycine max
  unsure (1)..(242): unsure at all n locations; Clone ID: 701062091H1
atgggacaaagcgcatgtgttctcgccagaaagattcttgcactctgacatagacgtcaagggtcgccacttcaagctcacgcccttcgggagtggcagacgcatttgcnctggctcgccactcgcgtcagaatgctccacaacatgctcggctccttgatcaacaactttgactggaagcttcagaacaacatggaccccaaggacatggacttggatcagtccctcatggccatccctct

SEQ ID NO: 30029 - DNA, 245 bp, Glycine max
  unsure (1)..(245): unsure at all n locations; Clone ID: 701062093H1
aacatggggatctttggagccatatacatccgataaattcaacaatgccactcttgtggctgaatcctgaagcacagaggttatttttatgacccaaggataaagtatttgatgatgttgaggatnattctccataattgattcggaggtttggtgtggtggggaattatccgaatgcccaagggaagaattatgacgaagaggcttacggtgtatagtatctggagtcctcgctgagtaataga

SEQ ID NO: 30030 - DNA, 248 bp, Glycine max
  Clone ID: 701062094H1
ctccgcactccgtcttcatcaatcagcatcaccaccgctccaacacaggggaaaatgagggagatccttcacgttcagggagggcaatgcgggaaccagatcggttcgaagttctgggaagtggtgtggacgagcacggcatagatccgacggggaagtacgtcggaaactcagatctacaactcgagcgcgtgaacgtgtactacaacgaagcttcctgcgggcggtttgtcccacgcgcagtgctg

SEQ ID NO: 30031 - DNA, 248 bp, Glycine max
  Clone ID: 701062095H1
atccatggctggcttccccacgaggaagaccaacaatgacattacctccattgctagcaacggtggaagagtacaatgcatgcaggtgtggccaccaattggcaagaagaagttcgagactctttcctcttgccagacctcgatgatgcccaattggcaaaggaagtcgaataccttctaaggaaaggatggattccttgcttggaattcgagttggagcacggtttcgtgtaccgtgagcacaacag

SEQ ID NO: 30032 - DNA, 279 bp, Glycine max
  unsure (1)..(279): unsure at all n locations; Clone ID: 701062102H1
ctccggcgccgtggccgaccccgccaccgaccacttgttcgccagctcccaggttccggcgcatttcttgcacccggccgcgaggcgaattcggatcacttcctgccgttcgtgccggcgctccacccccatcagcagcagcacagatggcggcggcggcgcagtaccaccggcaggtgaggcatttcgggtccccgccgaacgggcacttcgagaacccgtttcatgtctaggccgnatcttcagagaatgggangtggtggtngtggaggtctgtgc

SEQ ID NO: 30033 - DNA, 126 bp, Glycine max
  unsure (1)..(126): unsure at all n locations; Clone ID: 701062103H1
catggccgtggtgggtgcaccgatgatggcgcaagccatacncatgcaatgatgtgacactgaacatggcacagtgcctatcctacctgatgcagggaggaacacttcaacactttgctgcacgga

SEQ ID NO: 30034 - DNA, 147 bp, Glycine max
  unsure (1)..(147): unsure at all n locations; Clone ID: 701062104H1
aanatgaaaacccnaagtgcttctctcctctgtctttttctctctcttgctatccttttggctagtngcactgctgcaagtggcaactgccaagaagcgcantgncaagccaccatgtttcaacattcaacagaagcctttttcttc

SEQ ID NO: 30035 - DNA, 79 bp, Glycine max
  unsure (1)..(79): unsure at all n locations; Clone ID: 701062105H1
gagcttgtttaagcttttncttccattaacatattatcacaatgtgtggtattcttgctgttcttggttgttctgtgac

SEQ ID NO: 30036 - DNA, 145 bp, Glycine max
  unsure (1)..(145): unsure at all n locations; Clone ID: 701062106H1
gttgcttganaagttatacgctggaggagtaattcatattagcagccaaaactggagcaggctggatgtattcttcttcctcctttggagaatggatctctctccctctttctcgtcactagctctgtgcattcttctctcctct

SEQ ID NO: 30037 - DNA, 230 bp, Glycine max
  unsure (1)..(230): unsure at all n locations; Clone ID: 701062107H1
agcgttaatctgnatgggttacatccaccatggaagaaccggtctcaggcacatactcagattcagaaccgccancgggtggtctcaaactccggcagtcgcaatcgcgcgctgcattcccctcacattcccctatcctccggcaacgtgctttttttctcaacaggcgatanatnctcaacganattnccgcagaggtngnacgcgacacgcgcagggngcgaaacgng

SEQ ID NO: 30038 - DNA, 267 bp, Glycine max
  unsure (1)..(267): unsure at all n locations; Clone ID: 701062108H1
agtttcttcctttctctgctctttgccttctctgacacatttggtgccttgtagagcgtgttttggcaggaangtggtatggcgaaggacgttgaggttgctgagcgtggctccttctctgggaaggactaccaggncctccaccagcaccactcattgatgctgaggagctcacaaagtggtccttttacagggctctcattgctgaattcattgccactttgctcttcctctacattactgtgctcacagtcatagggtacaacc

SEQ ID NO: 30039 - DNA, 271 bp, Glycine max
  unsure (1)..(271): unsure at all n locations; Clone ID: 701062109H1
atgaagagaagcaggattgtngtgggaggctttctgaagatagggaaagtgtcccacaaggtagttctgaagagagagaagtggatgaatcaagtggagctttgagggaaaatattaacggacaagaatttgattctccagggcatcatgataacagcaaagctgaccgtagtcctagagaaatggagaaatcacatatagagccatcaaaaagtcctggatgatgatgacgacgacacattgcngagatttctgatgatgtgcctctgca

SEQ ID NO: 30040 - DNA, 267 bp, Glycine max
  unsure (1)..(267): unsure at all n locations; Clone ID: 701062110H1
atcctatcgtagacaaagaaaganagaaagaaaaccctagcttcncttttcaactttcaagatgcaaatctttgttaagacactcactggtaagacaatcacccttgaggtggagagttcagataccatagataatgtaagtccaagattcaagacaaggaagggatcccaccagaccagcaacgnctcatttttgctggcaagcagcttgaggatggacgtacacttgctgattacaacattcaaaangagtccatctacattggt

SEQ ID NO: 30041 - DNA, 266 bp, Glycine max
  unsure (1)..(266): unsure at all n locations; Clone ID: 701062111H1
agaaatcaaggtctttgttttgattccttcgtgcttgcttctggaatctcaacaacaccttttgctctctcttggctggatcagtcgccgttactcaagctttttttttttgctgaagaaacataacatncaaccaagtgatggacaaggttgtggaggaggctgaaaaagtgaagaaggaatgggatgaaacatacaagaaaacgcaagagcacattgaggcaattgcagagtatggaaaaccaggaagagcaaaagaggngaaa

SEQ ID NO: 30042 - DNA, 268 bp, Glycine max
  unsure (1)..(268): unsure at all n locations; Clone ID: 701062112H1
tgaaaacccaaagtgcttctctcctctgtctttttctctctcttgctatccttttggctagtngcactgctgcaagtgcaactccaagaagcgcagtgccaagccaccatgtttcaacattcaacagaagcctttttcttccacttttctctttggatcttggttcttctgcttaccaggcagaaggagcagcaagtgtagatgggagaggaccncgcatatgggccacctanactagacgcatactgaaaagatttgggatcatagc

SEQ ID NO: 30043 - DNA, 211 bp, Glycine max
  unsure (1)..(211): unsure at all n locations; Clone ID: 701062113H1
cagcaagagattacgttggtgaggcaagttgagtatcaagattctctcgtggaancagcatggccactaggcagtgccatagaagccatatcatcattacctaaatttgagaaattaatgtatttcatttaagctttaaacgaggagccatatgtatgtgtggaatgaactccatcactcttaaataaaaatcgttttgttccttttttct

SEQ ID NO: 30044 - DNA, 266 bp, Glycine max
  unsure (1)..(266): unsure at all n locations; Clone ID: 701062114H1
tttgtcacgagacccatagtgctgccaaattatagtaactctctttctctatctgaagaagaagaagttctgaagaagcatgtgtggaggtgctatcatctcagacttcattggtgtgaagcgtggccgcaacctcgcgcgcaggaactgtggtccgagcttgacccttctctgacctcttggcttcgataccaccaccaccaaccacccaacaaaccancctttccagacaaaaaaagtggtgtcatcatgtgaggaagaagaag

SEQ ID NO: 30045 - DNA, 103 bp, Glycine max
  unsure (1)..(103): unsure at all n locations; Clone ID: 701062115H1
ggacgaaggaggttcaccgaacacccgagtgggttcttncctgggtctaccatggacgcagtcctttcgtccaacgggcgggangacttncccgggacaaggc

SEQ ID NO: 30046 - DNA, 145 bp, Glycine max
  Clone ID: 701062116H1
tcgtcttctagggtaaccacggcgccactcgaacaagtgcggcaattcccaacgcttctacttctccagggggagttcgaatcctgtgagctttcaatatgacgtcgttcttgaagcctgagaatgctctgaaaagggcggagaa

SEQ ID NO: 30047 - DNA, 274 bp, Glycine max
  unsure (1)..(274): unsure at all n locations; Clone ID: 701062117H1
gttcntcgaggttgctgttaaggntgctgttggggctccaaatgttctcggagattgtccatttnccccaaagggtccctcttaactttggaggagaagaaaatcccttacaaactccacctcatcgatctcagtaacaacccgaatggtttttgggtgtgaatcctgaagggaaggtgccagtggttctttttgatggcaaatgggtggctnattctgatgtaattgtggggatactagaggaaaagtacccagaaccctctctaatcactcc

SEQ ID NO: 30048 - DNA, 275 bp, Glycine max
  unsure (1)..(275): unsure at all n locations; Clone ID: 701062118H1
agaggactctgtcttcttataagangggaggaaatgtgacaacagataatgttgaagagggtgagatcatcttagagnatgatgaatctttaaatgtaagcacagtgataaacatgcaaacacctgagcaacaaagacatgtctgaggatgctagaganatctttagcaaatganatagatcttgagaagaatttcatcgactcaaggcaaattgaagaaaagctanaacaaaagatggtttcttagaacaagagctaattctcatggaggaaga

SEQ ID NO: 30049 - DNA, 145 bp, Glycine max
  unsure (1)..(145): unsure at all n locations; Clone ID: 701062119H1
ggnacctctccaaccccttggtcgctcagggnttattcaaatcaaactcttcagttccgaagatgaaaacagtttccgattggatcgattcgtgttcgaaagngcaattgaagacttaccaggactggttcaacttagccgntca

SEQ ID NO: 30050 - DNA, 266 bp, Glycine max
  unsure (1)..(266): unsure at all n locations; Clone ID: 701062120H1
tttgttgtgagctataagctagtttatcgtgaggngaatatgaagttgtttgttttctttgttgctgcagtagttttggtagcatggccatgccatggcgcaggctaccaaaggttccctctccgaatgaaaactggtatggtgagcgttcttcggaggtaaaatgcgcaagttttaggctgctgtggaagcacacaacatccgagcctttaaaaccatcctgnaagagtgcgtacgaccaacaaaggactacattaatggcgaac

SEQ ID NO: 30051 - DNA, 269 bp, Glycine max
  unsure (1)..(269): unsure at all n locations; Clone ID: 701062121H1
ttggtgaacgtagactttgctgatgttcgagctataatggccaatgcagggtcttcacttatggggataggaactgcaactgggaaaacaagggcaagggatgctgcattaaatgctatccagtccacctttacnggaattggtatagaaagggctactggaattgtatggaacataactggtggaagtgatttgnacctgtttgaggtaaatgttggcagcagaattntatatgaccttgtggaccccactgctatttaatatttggg

SEQ ID NO: 30052 - DNA, 268 bp, Glycine max
  Clone ID: 701062122H1
atggctcccaagggtttaacctttctggctgtgttaatatgcgtttcagcactgtcactgagtccttctgttgcgggggaagggcaaaataatggccttgttatgaacttctacaaggaatcatgccctcaggctgagacatcatcacagaacaagtcaagcttctctacaagcgccacaagaacactgctttctcctggctcaggaacatcttccatgactgtgctgttcagagttgtgatgctcactgttgctggactccacaaga

SEQ ID NO: 30053 - DNA, 264 bp, Glycine max
  Clone ID: 701062123H1
agcggcagttggcctgaggttagagatggttagccaaaggcagcgactcgctcggaagcgatacaaattcggaacaccctgagctctttccgaagcccaagcccacaccccccaaagaccccgacaagagaaaaagaagaacaaaaacagcgctttcaagcgcaagaggcccgagcccaagcccggctccagaaaaagacaccttcttcagagtccccggcatgaagcccggcgagagctgtttcatctgcaaggccatggacc

SEQ ID NO: 30054 - DNA, 268 bp, Glycine max
  unsure (1)..(268): unsure at all n locations; Clone ID: 701062125H1
ggagtagtacactagtacagtgaactcttctgttcattttctttgcaaccatcacgaaagcttcgttatcatcggcaactacaagcatggannaagctatcagagtttaccacttngcgaccctgaggttctgaagtggaggatgtggaaatcggagcgccgtgtgaggaacanngcctgttggggntaatttcattgatgtctactttcgcactggggtttataaagtcccctccttaccttacactccgtcatcaggtacacctga

SEQ ID NO: 30055 - DNA, 263 bp, Glycine max
  Clone ID: 701062126H1
gggtggttaaggaaatattgctgaagcggtactttagcaaggaaattcgaggtggcactcaattgccggagtcagatatagttaaatcttgtcgaaggttgttggatgagaggcaacgtttgaatgtgtggcgattctggaagctattaacgagagacctgacataagtgaagggttgagaaaactacattgccgttcgctatttttgttggggatatgtcaccattcactcggaggctgttcacatgacttcaaagttagac

SEQ ID NO: 30056 - DNA, 141 bp, Glycine max
  unsure (1)..(141): unsure at all n locations; Clone ID: 701062127H1
gcaacaacgaaaaccaaagaagaaaaaagagtttcttctttccgaaatccaagcagtagggttagggttttttccgatctcaatggcggaggaaccggagagcaccgtcaccacncgcgcccccgacgaatcgctgtcgat

SEQ ID NO: 30057 - DNA, 264 bp, Glycine max
  unsure (1)..(264): unsure at all n locations; Clone ID: 701062128H1
cttcgctgttcctcttcagatcaaacgcacacagttacgctcttcaaatcaatctcttctcagaaatgggtgtggctcaaaacattcccgatgcggaggagggaaccttggagattggaatggaatacagaactgttctggagttgctgggccattggtcattcttgataaagttaagggacctaagtttcaagagattgtnaatattcgcttgggagatggaactactcggcgtggccaagtgctagaagttgatggtgnaaa

SEQ ID NO: 30058 - DNA, 146 bp, Glycine max
  unsure (1)..(146): unsure at all n locations; Clone ID: 701062130H1
canggnacgtggcgatcatgcgaccacttnctcgcagcataccgnaacatcgngaccttnaaggatacctaacgaggacgacaatnaccgtgcatcttcgtcatnnagctctgcnagggtgnggngctcttcgaccgcatcgcggg

SEQ ID NO: 30059 - DNA, 266 bp, Glycine max
  unsure (1)..(266): unsure at all n locations; Clone ID: 701062131H1
tgaagctnngtttcgttgccactgaggaatgaaatggccaatggtaacaacattagtcatttcttcaagctcttgcttttccttctaactttccactcttgtctcgctntncttttcttccaagagagattcgaagtggatggaagagccgttgggtgctatccgattggaaaaggagcgagggaaaagcgggtaccttcaagcacacagcagggaaatggtctggggatcctgatgacaaaggtcttcagacatataatgacgcc

SEQ ID NO: 30060 - DNA, 147 bp, Glycine max
  unsure (1)..(147): unsure at all n locations; Clone ID: 701062132H1
cntcttatgggtatacgtcatacggacctgagtacatctaacccacagagtctgtacaacgccatatatgggggcaacagtacctttcagatatatggagtgcctggggcagtgaattaccacaactaatntatccttatggnaagt

SEQ ID NO: 30061 - DNA, 145 bp, Glycine max
  unsure (1)..(145): unsure at all n locations; Clone ID: 701062133H1
tggaatgtgggcgttcaatggaggtaacttctgttaattacaggtgttgtcatngtcttgaaccatagacaatgttttgctctgcctgggaagcatatgggactttacctttggcttaaatttgtgcatgtgtgtntgtcatata

SEQ ID NO: 30062 - DNA, 142 bp, Glycine max
  Clone ID: 701062135H1
gtaagcactatagtaaaaaaaggacattcattcatctatggctacccttattgctcccagcaaccactctccccaagaagatgctgaagctctcagaaaggcttttgaaggatggggaactgatgagaacactgtcatgtaa

SEQ ID NO: 30063 - DNA, 142 bp, Glycine max
  unsure (1)..(142): unsure at all n locations; Clone ID: 701062136H1
anntttcaacattttaacnttcactctcttcagagacatgatgacagcatgcaaatgcatcaaacaactactaaattgatgaagctttaggtcaccttttcagtttcactctctcttcttccatggaattgtaagatntagg

SEQ ID NO: 30064 - DNA, 127 bp, Glycine max
  unsure (1)..(127): unsure at all n locations; Clone ID: 701062137H1
cgtgaagccggagacttctctgattcgtccatatgttgtatgtgctgtattaagaggtataacttttgataaagcaagatacaacagctttatcgatctccaagacaagcttcaccanaacatatgt

SEQ ID NO: 30065 - DNA, 268 bp, Glycine max
  unsure (1)..(268): unsure at all n locations; Clone ID: 701062138H1
cagagaactacacactggaatcgttcaccgtcgaaggcagcgacggantgaagctccgtacaagggtgttcaagccagatgctggaacagaagcggatgggaanttggggatcgttctggtgcacccgtatnctatttgggtggctgccagggtctcctcaaaggnatcgcttctggcttggctctcaatggttacaccgctgtcacctttgacatgagaggcgttggcaagtccaccggcaggcttctctcaccggcttctccgaat

SEQ ID NO: 30066 - DNA, 267 bp, Glycine max
  unsure (1)..(267): unsure at all n locations; Clone ID: 701062139H1
agaaaacactccttgagctccacacacacaaaaacactgttgtgaaaaccatcctagccttgctaatgaacanngatcacatggcctcccaatttgctagtgaggtaagatgcatgaaactaatgcattgtgcanctcttatggagaaagaggaaaccgttgctcactgtctcatcgccaaaactatggctaccatcgattccaacccgaagaatggaacttcagagaacatcataataataacaaaaccatgggatgtgaaaaggg

SEQ ID NO: 30067 - DNA, 267 bp, Glycine max
  unsure (1)..(267): unsure at all n locations; Clone ID: 701062141H1
cngctttccaagtcctacaagaacaacccattccctccctcattgcccccactcttctccacttctcaatcctctgtaacttcaaaacatacacctcttctctctgtttctctnnnnnnnnnnnnnnnnnnnnnnntaactaacatggcaattgaaaaccaagacaccgctgtcagagaaatcaagcccaagaacaggagaatcatgggtgctggagggcctgatgatgaggacaataggtggccaccgtggttgaagccatgctga

SEQ ID NO: 30068 - DNA, 260 bp, Glycine max
  unsure (1)..(260): unsure at all n locations; Clone ID: 701062142H1
tccgaagtgagatttgcgatggagaggcttcagcgaatgttcgcaggtgcacgtggngntctagggnaccctncccccagattccccaactctcgattcctccgagcaggtctanatctcctcactcgctctntcaagatgctnaagcacggnagggctggggttcccatggaagtnatgggcttgatgcttggagaattcgtggacgngtacancgttncgtgtggttcntgtttcgcaatgncgcanagtggtatggt

SEQ ID NO: 30069 - DNA, 263 bp, Glycine max
  Clone ID: 701062144H1
gaagcaaccgatggaatttcagtttcttcccagattctaccttcttgtttccttatccattctgttccttgcaccctttcacgctcaagctaaaattaaagtgacttactgcgataagaaggcagactatgctggaaggtgtctggagttgaaatatcaccaaaccctgtggtgagtggccaggcggctacctttaagatctcagcaacttctggtaaagccatttatggtggagaggtggtaattggagtttcatacgttgg

SEQ ID NO: 30070 - DNA, 139 bp, Glycine max
  unsure (1)..(139): unsure at all n locations; Clone ID: 701062145H1
tcganccgcccaattttccttcaaaagcttccctcatttctcttctaaagagctccnnaatannttngctccaatggcgtcaggctccttcgatcgtgcccgaaaaactcctccgcnacgccaangaacgcatatacga

SEQ ID NO: 30071 - DNA, 127 bp, Glycine max
  unsure (1)..(127): unsure at all n locations; Clone ID: 701062146H1
cnaaaataganatatttntcgaaactaattttgtggngntctgtcgnngnaganagangcganaattatcctctttccattcgcagtncatatgcgacttctggtacgcttatttcggnatnggnta

SEQ ID NO: 30072 - DNA, 137 bp, Glycine max
  unsure (1)..(137): unsure at all n locations; Clone ID: 701062147H1
gcacaacacaacgnanagtnaacactgcaatagcacagagttttcaaatgggcagagggaaaaggncaagtttgtgtncacgggaggcatgggttcctgagttcntggntcatcaggagactcctgaagatggttgc

SEQ ID NO: 30073 - DNA, 265 bp, Glycine max
  unsure (1)..(265): unsure at all n locations; Clone ID: 701062148H1
gcacaaacatggcccatgctcccaactaaatcatagtggcaaagcagaggctacaatatcacacaatgatattatgaacctagacaatgaaagggtaaagtatattcagtccaggctctctaagaatttgggtgggaaaatagagtgnaggaattggattcaactaccctacccgccaagtctggtagacttattgggtctggagactattatgttgttgttggtcttggtacacccaagagggacttgtcactcattttgacac

SEQ ID NO: 30074 - DNA, 272 bp, Glycine max
  unsure (1)..(272): unsure at all n locations; Clone ID: 701062149H1
gaaccctaagccctctcctgctcgggattttactctcacgagattagagantgaagatggtgtctgacgcgagnaagaagaangctgcgcaggagaaggcngcggcagggccaaganangnngcnaagcnncaactgntcgtcgaaaacgacgncgtnggataaggccgncganaagcttgccnacggaattgnggnnattcagatnnccgatcnaacctgcaccggngtcctctgatcgcatcctctttccaaggatcttngnatannnnc

SEQ ID NO: 30075 - DNA, 121 bp, Glycine max
  Clone ID: 701062150H1
gaattgtaaaaaggaaaggggaaggaagcaaggcaaggaaggagagtggatcgattcctcagcagcaccagacatttataaaagctctttcccttccctcaaatcgctcatactcttccaa

SEQ ID NO: 30076 - DNA, 140 bp, Glycine max
  unsure (1)..(140): unsure at all n locations; Clone ID: 701062151H1
cngaacaaaaccaaaaccaaacaactgaagctggaaggcaccaagaggttggtcacaagagccttctccagagtgatgctctttaccagtatattctggagacaagtgtctacccaagagaacctgaatccatgaagaac

SEQ ID NO: 30077 - DNA, 267 bp, Glycine max
  unsure (1)..(267): unsure at all n locations; Clone ID: 701062152H1
aaacactcattaattgcaagantggcacttcgttgcttggtgatgtccctttctgttctcttcactcttggtcttgcgagagaaagccatgccagagacgaagatttttggcatgctgtttggccaaacactccattccaagttccattgcgagatcttctaaagcctggccctgcaagtgttgaaatcgatgatcnccctatgcaaattgaagaaacacagtacccgaaaacctcttctataaagaagaccttcctccaggcaaaa

SEQ ID NO: 30078 - DNA, 265 bp, Glycine max
  Clone ID: 701062154H1
cagggtccaggcttccaaatcaacggacacagtattagttgggccaactggaagttccatattggatttgatccacgtgccggaattgtaatatcactggcatccatttatgatttggagaagcacaaatctcgagagtgttatacaaaggttacatttctgagctgtttgtgccataccaagacccaacagatgatttttactataagactttctttgatgctggagagtttgggtttggtctctccacggtctcattggtgcc

SEQ ID NO: 30079 - DNA, 262 bp, Glycine max
  Clone ID: 701062155H1
gaggttggagttggagtgagtaacccagcacagcaatggcattgagactgagactcaaagtgtcttcaattgggtcaccttttctgcagttaggttcttctgcaagtgcagcatgctctgtttccaaacttgttttcatccaccacgcttgcaactcaacaaaaattcacacccaataaggctttttgttcgggctgctagaattgagtccaaaggtgttacctgggtttcaggaccccacaatttcagcttccggagcccc

SEQ ID NO: 30080 - DNA, 263 bp, Glycine max
  Clone ID: 701062156H1
atgcaacatgctcttacaaggattgcactttcggagggatatggaatggtggtgggggagctggagaaaacaacttttttattgcctcatttttctttgaagttgccgatgaggctggttttgttgatccaacgcccccaatgccaaagttcgtcctgtggattttgagaatgcagcaaaggttgcctgtaacacagaattaaaggatctcaaatccattttccctcgtgttaaggatggagacgttccttatatatgcttag

SEQ ID NO: 30081 - DNA, 261 bp, Glycine max
  Clone ID: 701062158H1
ttgttgtgagctataagctagtttatcgtgaggagaatatgaagttgtttgttttctttgttgctgcagtagttttggtagcatggccatgccatggcgcaggctaccaaaggttccctctccgaatgaaactggctatggtgagcgttcttcggaggtaaaatgcgcaagttttaggcttgctgtggaagcacacaacatccgagccttaaaaccattcctgaagagtgcgttgaaccaacaaaggactacattaatggc

SEQ ID NO: 30082 - DNA, 135 bp, Glycine max
  unsure (1)..(135): unsure at all n locations; Clone ID: 701062159H1
tccctccttccctctccctctcancttcattttcctttcaaatagtaacactagagaacaaaagctctagctagaactgataatgtatatncaagccatcattcagancanttagtgcatccnnttncatcgaag

SEQ ID NO: 30083 - DNA, 257 bp, Glycine max
  unsure (1)..(257): unsure at all n locations; Clone ID: 701062160H1
cnagaatggaaggctggccatgttctctatgtttggattctttgttcaagctattgtcactggaaaaggcccattggagaacctcttggaccaccttgacaaccctgtggctaacaatgcttgggtctatccactaagtttgccccaggatcttaaatgtatatgacttcttcttccctaatccctatgatcatatcccttgtgtttgcctttgtgatttatgtgtagattatatgatcataataattgttggatag

SEQ ID NO: 30084 - DNA, 135 bp, Glycine max
  unsure (1)..(135): unsure at all n locations; Clone ID: 701062161H1
ttaatttctctctgtctcgtttacacatctctccaacctttcacnttcgtttctcagttntattcgaatccctctctcaatctcctttcccaaatggccagcgttgaggttgcacagcaaacaccaacaacgttc

SEQ ID NO: 30085 - DNA, 258 bp, Glycine max
  unsure (1)..(258): unsure at all n locations; Clone ID: 701062162H1
cngagattccgcctaaacccgtttgcnttgttgtttgcgnagaanatggcgnctaagangagcntgggaacgttgaaggagggtgatttganagggnagagggtgnccgtgagggtcgatctgaacgtgccgggatgacnaccttaacatcaccgatgacactagagtccgtgctgctgttcccaccatcaagtacttaactggtcatggagccaaagtgatcctttctagccattgggagtcctaaaggtgtaacac

SEQ ID NO: 30086 - DNA, 139 bp, Glycine max
  Clone ID: 701062163H1
gggcatcgttagcagttttgtagattcaacctcaatttgcagagttacgttctaatatatttacacaagactgataagagaaaatgtctctgattccaagtttcttcggtggccgaaggaggcagtgttttcgaccttt

SEQ ID NO: 30087 - DNA, 263 bp, Glycine max
  Clone ID: 701062164H1
tttgttctttttggtgctttaatttgcactagcaagggggttggttttatttctgtttgcttgcaacaatggctgtggctaataagttactttctgttttgatcattgccctcattgccatttccatgcttcaacagtggttatggcatctcatggacatggaggccaccactacaatgacaagaaaaaatatggacctggcagtctcaaaagcttccaatgcccatcacaatgctcaaggaggtgtggcaagacccatacca

SEQ ID NO: 30088 - DNA, 141 bp, Glycine max
  unsure (1)..(141): unsure at all n locations; Clone ID: 701062165H1
gataaccttgtgtagttcttgcggcggangacaaagaagtttaaataaatgggtctagctttaatcgtccggaatcctnggccttcctgattcnatttcacgccgcttattcaactantcagtataggggccttttgagnc

SEQ ID NO: 30089 - DNA, 270 bp, Glycine max
  unsure (1)..(270): unsure at all n locations; Clone ID: 701062166H1
gtttattctatctcactttcctattacagtatctttacctcaatggcaccaagttctgcagtgccagatgaacaggttgttgttggagaggagattgagcatgtangagtggtcactttgaacaggccaaggcaattaatgccatctcaccagaactggtttctcagctagcaacatatttggaaaagtgggngaaggatgcgaaagcagaactagttattataaagggagctggtcgggctttttgtgctggaggngatttgagngtct

SEQ ID NO: 30090 - DNA, 259 bp, Glycine max
  unsure (1)..(259): unsure at all n locations; Clone ID: 701062167H1
cttggttggcctcttgctgtgattgggaaattgataccggtgccaacaactncccatcaacaacgttttttcaaaatttcgaatttctagaaagaaggaacctgaggaatctcaatagtaaattggcgttgtgcttttcaaacaatctcattctgctgtttcttttgttccctgactgtcagcatatanggaatggaaccctgcatacgaacacgttatcttctatgatctaacttacttaactgtccattgtagagaa

SEQ ID NO: 30091 - DNA, 136 bp, Glycine max
  unsure (1)..(136): unsure at all n locations; Clone ID: 701062168H1
tcactctcaactttactcctcttcaatcagttgcatattctttgctattccaatggccactgttgaggttgtgtcagccaaggttgccctcccagaggacacaaaagaggcatcattgaaggttgacgagganagc

SEQ ID NO: 30092 - DNA, 138 bp, Glycine max
  Clone ID: 701062169H1
ctaacgcagcatcgctattctcttcattccatggctttgcccaaccagcaaaccgtggattaccctagtttcaaactcgttatcgtcggcgatggtggcacaggaaagacaacctttgtgaaaaggcatctcacggag

SEQ ID NO: 30093 - DNA, 262 bp, Glycine max
  Clone ID: 701062171H1
tctcacgatctcaacggagcacctctcttcaggtcgccatctagactgcaatcatggctgatggaccacagcatccatcagttgttcagaagctagctggacagtcttacctggtgtccaggctaagccccactttaactctgggaattattcctcgactggttcttacttcaatggaggactgcactcttctgggttggctgttgtgtcgcctggatctccagttactgtgcatgctccagcagagaaaggagtgagtgga

SEQ ID NO: 30094 - DNA, 262 bp, Glycine max
  unsure (1)..(262): unsure at all n locations; Clone ID: 701062172H1
cttatccggaaaaaataaacttcaattattcaccttttttcttcangttcgttcatgatctttctcttcagcctcgttttgattatgccgtagtgtttctcctttctataatcttcacactttttctccctcttcttccctccccattcatgcttcccttttaatactgttcaatttcctactctatgctgtccaatttggttatgtgctagctagtttcctcactgaattaatcacgctgcaataaagttaccaatctaca

SEQ ID NO: 30095 - DNA, 254 bp, Glycine max
  unsure (1)..(254): unsure at all n locations; Clone ID: 701062173H1
ctttccacttgtctccgnattagttatcttgagaaacattattcccattgctacnntattatggctagcatgaaggttacatgggtggttgtgatcatgtgcatggccgtggtgggtgcaccgtgatggcgcaagcatagaccatncaatgatgtgacggtgaacatggcacagtgctatcctacctgatgcagggaggaacaccttcnaacacttngctgcagcggcanacaagnacantcttggctcgctgt

SEQ ID NO: 30096 - DNA, 260 bp, Glycine max
  unsure (1)..(260): unsure at all n locations; Clone ID: 701062174H1
gttcagcagctgagactcagattactccaacccatgtatctgatgaagaggcanacctttttgccatgcnactagccagtgcctctgtactccctatggttctcaaatcagctcttgagcttgatctgttgaaatcatagcnanggctggccctggtgttcatctttcccccantgacatntcttgtcagcttccaacacagaaccctgatgcacccgtnatgttggaccgcattttgcggctcttggcttgctacaata

SEQ ID NO: 30097 - DNA, 261 bp, Glycine max
  unsure (1)..(261): unsure at all n locations; Clone ID: 701062175H1
gnttcatggattttggtatagtccctacactttgagggtggtatggaccttaaagttaaaggatataccatatcaaaacatagaagaagaccgctacaataagagtcttcaacttcttgaatacaacccagatacaagaaaactcccagtgcttgtccataatggaaaacccttatgtgagtccatgcttattgttgaatacattgatgagatttggtcacataattcatacttcctgctgatccctacgagagagctctg

SEQ ID NO: 30098 - DNA, 69 bp, Glycine max
  Clone ID: 701062176H1
agtaaattattgtacctgacgatcttctcggtttgatcttatatcaatggaatttttttagacagactc

SEQ ID NO: 30099 - DNA, 134 bp, Glycine max
  unsure (1)..(134): unsure at all n locations; Clone ID: 701062177H1
gcttggtcggttccggcatcgtgctctgctctgcacacctttctctttctctctgtctgnggctctgagcagtgagcacaccacaaactgaaacaaatccctttgagcattcagcaagatgagccacgagtgtt

SEQ ID NO: 30100 - DNA, 264 bp, Glycine max
  Clone ID: 701062179H1
ctcacactcacagtaaaatccaaaccaaaatggcggaaaataaagccattgaagaagctcagagcaagttccgttcagagttccttcaagttctgcgtagtaggcgacccgctcaagttccattaacagtcgattcgcgaagccagtggtgaatcctttgcatcagaactctcctccatcgatcgaagagatcaagataatgggagtcgtgtccgagaatgatataggagaaccttgaagacttgctcgaggaggagattctct

SEQ ID NO: 30101 - DNA, 261 bp, Glycine max
  unsure (1)..(261): unsure at all n locations; Clone ID: 701062180H1
gctataagctagtttatcgtgaggagaatatgaagttgtttgtnttctttgttgctgcagtagttttngtagcatggccatgccatggcgcaggctaccaaaggttccctctccgaatgaaaactggctatgtgagcgttcttcggaggtaaaatgcgcaagttttaggcttgctgtggaagcacacaacatccgagccnttaaaaccattcctgcnagagtgcnttgaaccaacaaggactacattaatggcgacatttt

SEQ ID NO: 30102 - DNA, 140 bp, Glycine max
  unsure (1)..(140): unsure at all n locations; Clone ID: 701062181H1
ttttctctagtgttcttgtgntaaatccanccatagggaacatgatcttcaggacactcctatnccctcctggcctttatggtgacaaattcanttgcngtgatggacnagaagacatacntactacacatggacagncc

SEQ ID NO: 30103 - DNA, 136 bp, Glycine max
  unsure (1)..(136): unsure at all n locations; Clone ID: 701062182H1
accaggtatccgtcatctttggtgcagcctacagtaccacatggtatttctngtggtgttttgggaaatgcaattgcctggaaccagcaacanaactactacttataancctgttcaacnaaactcttncattttg

SEQ ID NO: 30104 - DNA, 260 bp, Glycine max
  unsure (1)..(260): unsure at all n locations; Clone ID: 701062184H1
cacagtgagaatgaagatgttgcgaacgacaatactgcaattcgctgcgttgcaggttttgtttattctgttgggtgttggtgccgattacataccgccttcgagatttgatggcttcgtctacgggangggaacttgaatttgttggntncggttttgatagangcgttttatgacccagtgtgcccagatagcagggattcctggcctccactcanacaagctcttcatcactcacgcttctcgggnttcgctcctcc

SEQ ID NO: 30105 - DNA, 263 bp, Glycine max
  Clone ID: 701062185H1
tctgaaaccactctcgcgtcgttaccatgccgcaaggggattacatagaacgccacagaagagactatggctaccgtctcgatcacttcgagcgtaaggcaagaaagaggcacgtcaagttcacaagcgcttgcaattgcccagaaggctctgggtattaagggcaaaatgattgccaagaaaaattatgctgaaaaggcgcagatgaagaagactttggctatgcatgaagaatcatcgtctaggcgcaagactgatgatat

SEQ ID NO: 30106 - DNA, 264 bp, Glycine max
  Clone ID: 701062186H1
gcgaacaatttagatcagactctaaaacagttaaccaacaagctttcttttatgctagtgaacgcgaagtcccatcacaacgacatatttatattcggcatagataacaccgtactctctaatatcccatacatgaaaaacatggatatggggtggaggaatttaatgaaaccttatatgatgaatgggttaacaagggcgacgcaccggcattgccagagactcttaaaaattacaacaagctgttgtctcttggcttcaaga

SEQ ID NO: 30107 - DNA, 135 bp, Glycine max
  unsure (1)..(135): unsure at all n locations; Clone ID: 701062187H1
gaattaggtttttagggtttacaccgagcagcgacacctccctcccgcagtagccatggttctcaaaactgaactatgccgattcantngtgccaagatctaccccgganaggncatcanatttntnccgcgtga

SEQ ID NO: 30108 - DNA, 134 bp, Glycine max
  unsure (1)..(134): unsure at all n locations; Clone ID: 701062188H1
taaaaccatattctcctgtgatcgtgtgatttctttctgagttcttagcacttacttttttcatacacattngttgtcttgttgggaagccatggatgaggatttcgagttcccaagtncctggcaacatgaaa

SEQ ID NO: 30109 - DNA, 135 bp, Glycine max
  unsure (1)..(135): unsure at all n locations; Clone ID: 701062190H1
gtnnatggatactttagtttgttcctacggcttatccaagttcccgtgtgtnctgtgataacttctgcaataaatgtaatgtaatcaattacanagtaatttctattcctgaaatttttaaagaccttccacatg

SEQ ID NO: 30110 - DNA, 134 bp, Glycine max
  unsure (1)..(134): unsure at all n locations; Clone ID: 701062191H1
gcttcancttgctccctcagaagcgnagaagaagcccanagagaanagnctcctantctcacccgcaagnnnaanatggnatctcacatcgttggntacncccgtatgggtcccaagagagagctnaagttgnt

SEQ ID NO: 30111 - DNA, 130 bp, Glycine max
  unsure (1)..(130): unsure at all n locations; Clone ID: 701062192H1
tcttcngttcnttactanagatttaatgaatatggagttgatgggggacctgctacaaaancactcagacctaagtttgatgccttacacatcgggtgcattctcnagtgggctttcaaattccaggatt

SEQ ID NO: 30112 - DNA, 253 bp, Glycine max
  unsure (1)..(253): unsure at all n locations; Clone ID: 701062193H1
ttttgagtataggtacatcacctcagattgtgatgctgtggccacggtttatgagtatcagaaatacgcaaaatcccaggaggatnctgttgctgacgttctcaaagcaggtanggatattaattgcggacgtttatgcttcgacatactgaatctgctattgagcnaggnaaggttaaagaggaagatttagatcgagcacttctaacttttctctgttcaactgcgccttggactgtttgatggagaccct

SEQ ID NO: 30113 - DNA, 263 bp, Glycine max
  unsure (1)..(263): unsure at all n locations; Clone ID: 701062196H1
anatgaagggggtgaaaggaaaattcctgaagaagctcaaatccatcaaaccaatcctgaagcaagatttaattctcccagatcaaggcctcagatgggtacgtccattttctcccaaagattccgagttnaatctgcattccccgtttgtttcccgagaaaacaagcccgaganagttgttcagagctgcgaganaatgcaggacgaacccgaggtgatcgacgttgcagagctgatgaaagaccttgaggaagaagatgat

SEQ ID NO: 30114 - DNA, 291 bp, Glycine max
  unsure (1)..(291): unsure at all n locations; Clone ID: 701062201H1
ggagcgtgttgtacaaggggcaattttttcaaaacctttttctctctcgcaacctcacctcttcctccttcaatctctttcggaatttcccaaaatccttagtgggaggaagagatggttctgactcagaagcttcacgaagccttcaaaggcaccgtcgagaggattactggcccccgaaccgtttccgccttcaaagaaaaaggagttctcagtgtctctgagttcgtcaccgctgncgataatctcgttgccaaatgccccacctggtcctgggaatcgggtgatccc

SEQ ID NO: 30115 - DNA, 154 bp, Glycine max
  unsure (1)..(154): unsure at all n locations; Clone ID: 701062202H1
cganaacccttgtgatcaagttttgaaggttcaaggtaccatgccgtgacatttggnattatgctgattaagttaatgcaagccgaggtttggagtacctcttgaaattagccatttagatgaatgaatcattttgctttcagaatttattgat

SEQ ID NO: 30116 - DNA, 284 bp, Glycine max
  Clone ID: 701062203H1
gttaagggtttatttaggtgatggtcattagtaaatttgttcttatttcttaggcattattaaatttgttctcctgtgtttcttattaggtacaatctcagaaagtttaaatttaaatagcaagtttgtgtgattattcctagaggaaaaatcaaatgtagttaaagccaattgttttacccaaactctaaaatttgtgatacaggtagcaaaagccatccaaggtcttctccctgtaccaggagccaaggcgcacgagtcggtaagaagagattcgaagtaat

SEQ ID NO: 30117 - DNA, 284 bp, Glycine max
  unsure (1)..(284): unsure at all n locations; Clone ID: 701062204H1
cgtcgttcttccnttttccgtttttcatctggttcttctctcaganaaagctcgccaatcgatcttgctctccttctacgcttttcgaattgctttcattccattatggacgcagattagattcgcactcacattcccttctcctcgatttgttcaaactctctgctctgagatctgatcgcattttcattcagaaaggaaactcgtgtgactgatttatgcgctaattgcaattgcactgcgagcgtcactctgccgaatcggaagatgggaatagtgttcac

SEQ ID NO: 30118 - DNA, 279 bp, Glycine max
  Clone ID: 701062206H1
cagaacatgagcatcattgaactggacaccaagggtggcaggaaaatcacttccagtggccggcgggatcttgatcaagtggctggacgcattgtggttgcaccttgatttgaaaacgccataagcatattgaggtttttggtttctggttagagagatgtgatgataacagattatgctaaagttttgattttagactgtctttatgtatcggacagctcaatgtttatgttgctcccagtccttttagatagtatgctatatttaattgagtttttc

SEQ ID NO: 30119 - DNA, 283 bp, Glycine max
  Clone ID: 701062208H1
cgcagagaagaacagagagagatccatccatcaattccaatggccgatcagctcaccgacgaacagatctccgagttcaaggaagccttcagcctcttcgacaaggacggggatggttgtattaccaccaaggaacttgggaccgtgatgcggtcacttggccagaacccaactgaggcagagctgcaggacatgataaatgaggttgatgctgatgggaatggtaccattgatttcccagaattcctgaatctcatggctcgcaagatgaaagacactgatt

SEQ ID NO: 30120 - DNA, 284 bp, Glycine max
  unsure (1)..(284): unsure at all n locations; Clone ID: 701062209H1
ctagtttatcgtgaggagaatatgaagttgtttgttttctttgtngctgcagtagttttggtagcatggccatgccatggcgcaggctaccaaaggttccctctccgaatgaaaactggctatggtgagcgttcttcggaggtaaaatgcgcaagttttaggcttgcngtggaagcacacaacatccgagccttaaaaccattcctgaagagtgcgttgaaccaacaaaggactacattaatggcgaacaatttagatcagactctaaaacagttaaccaacaa

SEQ ID NO: 30121 - DNA, 155 bp, Glycine max
  Clone ID: 701062211H1
ctttcttttacgccggggttttggttgcgctcacatcgtgttctaccgcggcgcgagtagctagggtttagaacctcgcagttacagaaaacatggcgactgtggtgccaacctccgaagaagacgctgcactctccgtcgttcgattcgcctct

SEQ ID NO: 30122 - DNA, 156 bp, Glycine max
  unsure (1)..(156): unsure at all n locations; Clone ID: 701062212H1
ccgggtttgatttgacttctctgtgtagagcgtatcatattcaccagactttagggttagaggatcggtttaagcagtattattttgagaacaggaagcttcagttgacttcggattttcaggtttcgtcgatgactcctttnctggagtctcatc

SEQ ID NO: 30123 - DNA, 286 bp, Glycine max
  unsure (1)..(286): unsure at all n locations; Clone ID: 701062214H1
ctttttggttctatcgagaagcagangtggtcttangcatgtgcaaaacagttgattganangctgatttttgctganggtgctgaaaatgggntggagttcacanttgtaaggccatttaactggattggacctcgaatggatttcattcctgggattgatggtccaagtgagggtgttcctcgggttctgcttgctttagcaataatcttctccgaggagagcccctcaagctgtggacggtggccagtcccagagaacctcattacattaaagatgctattga

SEQ ID NO: 30124 - DNA, 294 bp, Glycine max
  unsure (1)..(294): unsure at all n locations; Clone ID: 701062215H1
aagaaccctcaattttccgggaaaaccctccccacaatggtttcccgggaaaacaccaattggctcttcgattacggcttgatncgacgatattcccgttccggacgccaccttcggcgtcaattcccccgccttcacatggccccctaacgccttgaacgcttcctccaatgtcggcgttgaaattgatggctcgttgggggattctgacagtctcaaagagtctggctcnaagaaaagggttaggtctgagtcatgtgctgcttctggcaccaaggcatgtcgggagaagtt

SEQ ID NO: 30125 - DNA, 158 bp, Glycine max
  unsure (1)..(158): unsure at all n locations; Clone ID: 701062216H1
gtttgttgtnagctataagctagtttatcgtgaggngaatatgaagttgtttgtcttctttgttgctgcagtagttttggtagcatggccatgccatggcgcaggctaccaaaggttccctctccgaatganaactggctatggtgagcgttcttcgg

SEQ ID NO: 30126 - DNA, 283 bp, Glycine max
  unsure (1)..(283): unsure at all n locations; Clone ID: 701062218H1
ctttgttcactcttcttctcttgcggctagggttttagcgcantancttctagatttaaggaagatgggtaaggaaaaggttcacatcagtattgtggtcattggccatgtcgactctgggaaatccactaccactggtcacctgatttacaagcttggaggcattgacaancgtgttattgagaggtttgagaaggaagctgctgcgatgaacaagaggtctttcaagtatgccgggtgctggacaaacttaaggctgagcgtgaaagaggaatcaccatga

SEQ ID NO: 30127 - DNA, 152 bp, Glycine max
  unsure (1)..(152): unsure at all n locations; Clone ID: 701062219H1
cttcacttgtccttggttttggaacgacgacagccgagctatctctcattccattttcatccatcaatggctccagtagcagcagcatcttcagattcaatcaagccaagagatgtttgcnttgttggtgttgcacgtacaccaatgggtgg

SEQ ID NO: 30128 - DNA, 278 bp, Glycine max
  Clone ID: 701062220H1
aaaagaaaagccttccactattccatatatagcagccaaaaaagaatgaagaatactgcgttgttcactatctttctactccttgctttcacctcatacctaccttcagccaccgctgctagtgtgtacgatacggatggtaatattcttcaaaagggtcgcacatattttgtgttggcagctacaagaggaaacggcggtggaatagaatttgccgcaactggaaacgacacttgccctctaactgtcgtgcaatctcccagtggcgatctattggg

SEQ ID NO: 30129 - DNA, 281 bp, Glycine max
  unsure (1)..(281): unsure at all n locations; Clone ID: 701062221H1
cagagacagagcagcactcacattcacaacgaaggtttcctattcatcagacatggtgaaggcaatcagagttcacgaactcggtggccctcaagttctgaagtgggaggatgtggaaattggagatccaaaagaaggcgaggtccgtgtgaggaacaaagccattggggttaatttcattgatgtctactttcgcaaaggagnttacaaaggcccctcttttcccttncactccaggtatggaagctgttggggttgtgacagctgtgggtgctggactc

SEQ ID NO: 30130 - DNA, 151 bp, Glycine max
  Clone ID: 701062222H1
ctagggttatcatttctccatttccattttctctctcacttttccagaatcgtaagctatgggaaagtcttacccaactgtgagtgctgattaccagaaggccgttgagaaggcgaagaagaagctcagaggcttcatcgctgagaagaga

SEQ ID NO: 30131 - DNA, 153 bp, Glycine max
  unsure (1)..(153): unsure at all n locations; Clone ID: 701062223H1
cgctgttctctttcaagttccaaganatgtcaattatnacacgcagaggcatccgttacatggccaagactagatgcagcaaaagtatctgctggctttgctaganaaagggccaaaatcgtgtcatagatgcttcncttacacttattcgag

SEQ ID NO: 30132 - DNA, 152 bp, Glycine max
  unsure (1)..(152): unsure at all n locations; Clone ID: 701062224H1
ttctctttgcgcagttccctacctctcctttcaagatgcagatcttcgtcaagaccctncaccggaaagaccatcacccttgaggtggaaagctctgacaccatcgacaacgtcaaggccaagatccaggacaagganggaattcccccgga

SEQ ID NO: 30133 - DNA, 153 bp, Glycine max
  Clone ID: 701062226H1
ctcactttcatttctacatccctggctctgttccgtcgatgacgatggcgtttagggtgcgaaaccctgacctccgctttctcattcttctctctctcttgtgccatcacttccgccaaggtcttcttcgaggagcgtttcgatgacggatgg

SEQ ID NO: 30134 - DNA, 281 bp, Glycine max
  unsure (1)..(281): unsure at all n locations; Clone ID: 701062227H1
gttcatttctacacatccctagctngcgtcgttccgtcgttgacgatggcgtttcgggtgcgaancctgacctccgctctctctttcttctctctctcttgtccatcgcttccgccaatgtcttcttcgaagagcgtttcgatgacgggtgggaaaatcgatgggttaaatcagattggaaanaagatgagaacgtggctggggagtggaaccacacctctggtcaatggaatggagacgctantgacaaaggtattcaaaccagtgaggatacagattta

SEQ ID NO: 30135 - DNA, 258 bp, Glycine max
  unsure (1)..(258): unsure at all n locations; Clone ID: 701062230H1
gtgaacacaaagctggagagtaccatggtgagcacaagccagagcacaaagaggggttcctagacaaagtcaaggacaagatccatggtgagggcggcgccgncgagggcgnnnnnnnnnnnnnnnnnnnnnnnnnnaaggagcatggtcctgagcatggncatgacagcngcngcanncgtgacagangttagactgctgcatcacctatatatttaanaggtttatngggaccatagtagcgagggngtgccttaa

SEQ ID NO: 30136 - DNA, 154 bp, Glycine max
  unsure (1)..(154): unsure at all n locations; Clone ID: 701062231H1
taaaatctgtgaagcttctgatgtggtttcagtttagatgaatnataggatcagccatataataatcttagataatggatatgaggtcattgtaatgataattatatttatctttagccgcttgcaatggtatttctggcttactatgttaaaa

SEQ ID NO: 30137 - DNA, 293 bp, Glycine max
  unsure (1)..(293): unsure at all n locations; Clone ID: 701062232H1
agagaaatggcttgcaggcaattgtgggcttcaagagctgcctcttacctgaggatctctgtgtttcacagaggcttttctaatgttattaaagatttcaagtatgttgattctcatgagtgggtgaaagttgatggaaattacgcaaccatcggcataactgatcatgcccaagatcatttnggtgatgttgtatatgttgaattgccagaagtgggagcagctgtgacacaggaggtagttttggtgcagttgaaagtgtgaaggcactagtggatattaactctcctatt

SEQ ID NO: 30138 - DNA, 153 bp, Glycine max
  Clone ID: 701062233H1
gtggaaggctgtggccttgacctctcatctgctaaagattaccatcgcaaacaccgagtttgtgaagctcattccaaatcccctaaggtggttataactggtttggaacgccgattttgccagcaatgtagcaggttccatgctctgtcagag

SEQ ID NO: 30139 - DNA, 151 bp, Glycine max
  Clone ID: 701062234H1
ctaagctaaacaatttcatcaagcctgccatggcttcctcgtgtgcttcctctgccattgcagctgttgccatctccacaccaagttcccagaagaatggatcactcttgggaagcacaaaagcttcttttcttagtgggaggaaactgaa

SEQ ID NO: 30140 - DNA, 150 bp, Glycine max
  unsure (1)..(150): unsure at all n locations; Clone ID: 701062235H1
tcggcggcaaggccggtgcacttcggcgattccattaccgtcaccagggacaagagcaagatcaccgtcaccttccgacagcaacttctctaaacggtatctgaaatatttgaccaagaagtattgaaaaagcacaatgtgagggnttgg

SEQ ID NO: 30141 - DNA, 277 bp, Glycine max
  unsure (1)..(277): unsure at all n locations; Clone ID: 701062236H1
tctaaaacatggattgaagtctctggttcatctgctaaagatgttgccaagcagcttaaggaacaacaaatggtaatgcctggacaccgtgagtcaaacttgcagaaagagctgaaccgatacattcccncggccgcagcatttggaggcatctgtatcggtgctctgacagtgttggcagacttcatgggggccatcggttcaggaaccggaatattgcttgcagtaacaatcatctatcagtactttgagacatttgagaaggagagagctagtg

SEQ ID NO: 30142 - DNA, 147 bp, Glycine max
  unsure (1)..(147): unsure at all n locations; Clone ID: 701062237H1
caagtgaaagtnagananaataanaatcaaagagcataatgtcagggatcattcacaagattggggagacccttcatgtgggagggcacaagaaggaggaggagcataagggtgagcaccatgctggancatacacaggggagcacc

SEQ ID NO: 30143 - DNA, 153 bp, Glycine max
  unsure (1)..(153): unsure at all n locations; Clone ID: 701062238H1
gttaagacttaataagacaacccgaagaagcaaacgcagccgcagcgtagaggaagagtgctcaagnaagctcgttctcgatggcagaagggaacggtgacacancctctgcganagatccgcagangcnttcaaggaccttgcnaacgttgt

SEQ ID NO: 30144 - DNA, 97 bp, Glycine max
  unsure (1)..(97): unsure at all n locations; Clone ID: 701062239H1
aaatccccgcttcgtggaaatcccgaaccagaaaccatgcttctccgaaccgctgctgcttctgcttcgtccctctccctcttnagcccgaacgccg

SEQ ID NO: 30145 - DNA, 280 bp, Glycine max
  unsure (1)..(280): unsure at all n locations; Clone ID: 701062240H1
cttctaaagcctctccctgncaggtgttgaaatcgatgaactcccncaagcaaattgatgatacacagtacccaaaaacattcttctataaagaagaccttcatccaggcaaaacaatgaaagtacaattcaccaagcgtccctatgcacaaccttatggtgtatatacatggttaacggatattaaagacacctctaaagaaggatatagttttgaagagatatgcatcanganagaagcgtttgagggagaagagaagttttgtgcaaaatcctggga

SEQ ID NO: 30146 - DNA, 275 bp, Glycine max
  unsure (1)..(275): unsure at all n locations; Clone ID: 701062241H1
tagtttatcgtgaggagaatatgaagttgtttgttttctttgttgctgcagtagttttggtagcatggccatgccatggcgcaggctaccaaaggttccctctccgaatgaaaactggctatggtgagcgttcttcggaggtaaaatgcgcaagttttaggcttgctntggaagcacacaacatccgagccttaaaaccattccctngagtgcgttgaaccaacaaaggactacattaatggcgaacaatttagatcagactctaaaacagttaa

SEQ ID NO: 30147 - DNA, 279 bp, Glycine max
  Clone ID: 701062242H1
gtcactctcgtgtcgggtgaaggcgaaaaccaaatcaagatgctgagagtgggcgcaaagaggcttttgggaacgacgtcgttgggcgttagggttccggcgaggctgtaccacgagagggttgtggatcactacgacaacccccggaacgttggatcgttagacaagaacgacccgagcgtggggaccggtttggtgggggcgccggcgtgcggcgacgtgatgaagctccagattaaggtcgacgacaaaaccggaaaaatcgtcgatgctcgattc

SEQ ID NO: 30148 - DNA, 150 bp, Glycine max
  unsure (1)..(150): unsure at all n locations; Clone ID: 701062243H1
cncaagacgaatgtngtggggaccttgaacatgctggggcttgcaaagagagtgggcgcgancttcttgttgacgagtaccagtgaggnttatggagatcctctncagcaccctcagaaggcgacttactggggcaantccaacccaatc

SEQ ID NO: 30149 - DNA, 151 bp, Glycine max
  unsure (1)..(151): unsure at all n locations; Clone ID: 701062244H1
tgacttcagcctggncaaaccccagctgcagancccgggaaagctgattgggaattggcattggtanngactgntagcnatttgtcacagcagnangcaactttaggtggtgggtttgatcntctatgttgactggcatgtangancaagg

SEQ ID NO: 30150 - DNA, 197 bp, Glycine max
  unsure (1)..(197): unsure at all n locations; Clone ID: 701062245H1
gnaaacccttccccaaatnatanaaacccctacggcttcgttgtggtgcttctnctnctttcttactggcatcaactttaccattnctacttncaaacccttaaacggcaggcattcggcttataactncttncatttccatgggctttggcccaaattcaggcaaaaccgtggattaaccctagttttcaanactc

SEQ ID NO: 30151 - DNA, 157 bp, Glycine max
  unsure (1)..(157): unsure at all n locations; Clone ID: 701062246H1
tttcgctaacactcattaattgcaagantggcacttcgttgcttggtgatgtccctttctgttctcttcactccttggtccttgncgagagaaagccatgccaganacgaagatttttggcatgctgtttggccaaacactcccattccangtncat

SEQ ID NO: 30152 - DNA, 153 bp, Glycine max
  unsure (1)..(153): unsure at all n locations; Clone ID: 701062247H1
tcttcttggtgctggggcagacagaatggagcaatcatattcatgggaganttgggctcttgacaaggaaatgggggaggatgcggaggagttccttcgcgaacatcctngtaaaccggcntnttcctccgagagtgaaagtcaagcaccagt

SEQ ID NO: 30153 - DNA, 281 bp, Glycine max
  Clone ID: 701062249H1
ctacatctatgaagacgagttgagtcacttcgttaatactggcgcccttgatgagctcattcttgccttctctcgagagggacccaccaaggagtatgtacaacataaaatgatggagaaggctcagaaatttggagcatgatatcacaaggagcttacatttatgtgtgtggtgatgccaagggcatggccagggatgtacaccgcgccctgcacacaattttgcaagagcagggttctctcgatagttccaaggctgagagcatggtaaagaatctaca

SEQ ID NO: 30154 - DNA, 246 bp, Glycine max
  unsure (1)..(246): unsure at all n locations; Clone ID: 701062250H1
caccatgtcacttgctgggaaaatcaccactgaaatcggggttcatgcaaccgctacaaagtggttcaacctcttcgcaacacaactccatcatgttcaaaacctaactgatagagtggctggaaccaagctgcatcaaggtgaagactggcatcacaacgagacngtcaagcangggacttataccatagatggtaaggnnacaacatgtctggagagtatgaatccatgatgaacgaggcaaac

SEQ ID NO: 30155 - DNA, 278 bp, Glycine max
  unsure (1)..(278): unsure at all n locations; Clone ID: 701062251H1
cnacagcagctgcagcagcaatggctcccaaacgaggtggaaaggctccggctcttgccgctaagaagaagcctgagaaggtcacgaatccgttgttcgagaagcgtccgaagcagttcggaatcggaggggcgttgcctccgaagagagacttgactaggttcgtgaagtggccaaagaatgttcaaattcagaggaagaagaggattctgaagcagaggttgaaggttcccccagctttgaaccagtttaccaaaactcttgacaaaaacctagcc

SEQ ID NO: 30156 - DNA, 268 bp, Glycine max
  unsure (1)..(268): unsure at all n locations; Clone ID: 701062252H1
caaaatcattgcagcctcctctggttctatganagangatgaagttgctcaacnagctttggatggtataaaatgtggcaattttattgttncntaccaatttcgagggaattgcactatctctagcaactgcaggtttatcccctcagagatctttcttaatggcatttcttgagnttgttgctgctggaatcctacggattgttgcactaggtacgcagtgggacttggtatggaagcatagaganatatcacagccaaaggaagg

SEQ ID NO: 30157 - DNA, 276 bp, Glycine max
  unsure (1)..(276): unsure at all n locations; Clone ID: 701062253H1
ctgtgcagtttcctcgctctcttttctgcaattttcttttttgtnccttctctgcggttatctttttgagcntcaatggcggacgctgaaaccttcgctttccaggctgagatcaaccagcttctcagcctcatcatcaacaccttctacagcaacaaggagngcttcttgcgtgaactcatcagcaacgcttctgatgctttggataagattcgatttgagagtttaaccgacaagagcaagctcgatgctcagccagagctctcattcgncttg

SEQ ID NO: 30158 - DNA, 72 bp, Glycine max
  unsure (1)..(72): unsure at all n locations; Clone ID: 701062254H1
gatgctttagaaagggagaaacnntttccngtntagnacttaanatttganttcattagctttttttttttc

SEQ ID NO: 30159 - DNA, 276 bp, Glycine max
  unsure (1)..(276): unsure at all n locations; Clone ID: 701062258H1
gccaggcaagccccactcaaccaccacacctctcctcgttcacgctacccctttctgctcttcttctacctttcaagttttaaaagtataaagatggcagagacattcctatttacctcagagtcggtgaacgagggacaccctgacaagctctgcgaccaaatctccgatgctgtcctcgacgcttgcctcgagcaggacccagaacagcaaagttgcctgcgaaactggcaccaacaccaattggtcatggtcntcggagaaatcncgaccagg

SEQ ID NO: 30160 - DNA, 148 bp, Glycine max
  Clone ID: 701062259H1
tcagaagggagagaaagtgcttctgacagtgaagccacaatatggatttggtgagaagggtaagccagcacatgatgaagaaggtgcagttccaccaaatgcaacattgcagattactcttgagttagtttctggaagactgtctcag

SEQ ID NO: 30161 - DNA, 148 bp, Glycine max
  Clone ID: 701062260H1
taaggagatgggagtggagaagcagttgttgaggtctggcaccggtccgaagccaattcccggtcagaacgtaaccgttcactgcactggtttcgggaagaacggtgacctttctcagaaattctggagcacaaaggatcctggccgc

SEQ ID NO: 30162 - DNA, 149 bp, Glycine max
  Clone ID: 701062261H1
gaatagcaatatcaacactgtgttgggctaccatgttttctctgcttatctatctctcattcataactagtccacttctagtgctcaagctctatggaattccatattggatatttgttatgtggctggactttgtcacatacttgcac

SEQ ID NO: 30163 - DNA, 78 bp, Glycine max
  unsure (1)..(78): unsure at all n locations; Clone ID: 701062262H1
cngnncgangntgaatcgaatcgaatctccgaagatngccgcgagcnattgcacaancgttgcanactctcttcatcc

SEQ ID NO: 30164 - DNA, 155 bp, Glycine max
  unsure (1)..(155): unsure at all n locations; Clone ID: 701062263H1
cnatgtcgttgattccaagtttcttcggcaccgggcgaagaaccaacgtcttcgaccccttctccctacgacgtgtgggacccattccatggcttccccggcaccaccgccctctccgctccacgctccgagacggcggccttcgccaccacgcg

SEQ ID NO: 30165 - DNA, 153 bp, Glycine max
  unsure (1)..(153): unsure at all n locations; Clone ID: 701062264H1
ttaactagaaacagtgtgatgaaaatgaaggtccttgttttcttcgttgctacaattttngtagcatggcaatgccatgcgtacgatatgttccctctccgaatgaacactggctatggtgcccgtactccggaggtgaaatgcgcaagttgg

SEQ ID NO: 30166 - DNA, 96 bp, Glycine max
  unsure (1)..(96): unsure at all n locations; Clone ID: 701062266H1
gttaaactacatagannnaataanaccanacctttcttcctnactactacccattcccancatttgcgacaacatggcacgaggancttcgacatg

SEQ ID NO: 30167 - DNA, 275 bp, Glycine max
  unsure (1)..(275): unsure at all n locations; Clone ID: 701062267H1
ctctttctctttctctgcnaacctgcacactcttcactcgatcaanccagaaaatggcaaagaatgtggggatccttgccattgacatctacttccctcccgcttgcgttcagcaggaagcattggagactcatgatggngccagtaaagggaagtatnccattggtcttggacaagattgcatgtcattctgtaccgaagtagaagatgtcatctcaatgagtttgacagtggttacttctcttcttgagaaatatgagattgatcctaagcta

SEQ ID NO: 30168 - DNA, 143 bp, Glycine max
  unsure (1)..(143): unsure at all n locations; Clone ID: 701062268H1
aaaatcttatcttagctaccccatcacaacaaccacgatactatttctcatactctattaggcaaaaacaccaccaaatgggagaggaaaaggagcagcctaagantgacaccgagaaaaagcccgaggaggtagcccccnag

SEQ ID NO: 30169 - DNA, 270 bp, Glycine max
  unsure (1)..(270): unsure at all n locations; Clone ID: 701062269H1
gnagttgatgatgcagctgttaaggttgttgacattgttgacacattcagacttcaggagcaacccgcattcgataagaagcagtttgttaccttcatgaagaggtttatcaagaatttgactcccaagctcgatgcagagcaacaggagttgtttaagaagcacatcgagggagcaactaaatacctgctctctaagattaaagatttccaattttttgttggtgagagcatgggtgatgatgctgcttggtcttgcctactacaagga

SEQ ID NO: 30170 - DNA, 143 bp, Glycine max
  unsure (1)..(143): unsure at all n locations; Clone ID: 701062271H1
ctcttcttctcttgcggcntgggttttagcgcanttcttctagacttaaggnagatgggtaaggaaaaggttcacatcagtattgtggtcattggccatgtcgactctgggaantccactaccactggtcacctgatttacaa

SEQ ID NO: 30171 - DNA, 145 bp, Glycine max
  unsure (1)..(145): unsure at all n locations; Clone ID: 701062273H1
gataaaatattgtacacataaatctagctccaattcctaatcacctggttaatttcttcacatagagctatcnngatccaacgttaacatgaagaatgttttagtaaggtcagctgcgcgagcncctgcttggcggcggtgggcg

SEQ ID NO: 30172 - DNA, 144 bp, Glycine max
  Clone ID: 701062275H1
cggtgttccaaggaagcctggcatgactcgtgacgaccttttcaacatcaatgctggcattgtcagggacttggtttctgctgttgcggattactgccctgatgcttttgttcaaattatcagtaaccctgtgaactctaccgt

SEQ ID NO: 30173 - DNA, 112 bp, Glycine max
  unsure (1)..(112): unsure at all n locations; Clone ID: 701062276H1
gggtttcgcagaagagagagaaacccatttctagagagagaaacttcgcagtcgcagacatgtcttccttcgatgccttcgccgacgacnngaacgtcaactcttcttccat

SEQ ID NO: 30174 - DNA, 277 bp, Glycine max
  unsure (1)..(277): unsure at all n locations; Clone ID: 701062277H1
caatggcaactctctcagctctttccttcacaaacatcatcaggactttcccactacacacccaccgtctctctttttctttcagctccaaactcacgtgcagcaggtcctctctcaaagacgaccaacaaactgactcttgttcctctaatactaccacggtttctgttgcacccgaaaacgattctgagacccagcaggcaggaaatggnttggaagagcgacgaggagtttaagaagntcagggaaacccttccancgagcgcnataaagtngg

SEQ ID NO: 30175 - DNA, 280 bp, Glycine max
  unsure (1)..(280): unsure at all n locations; Clone ID: 701062278H1
tcaactcaccaacacagttgcattattttctttccagatccaactcaaaattgcaatgggagtagaagatacagatatttgtatcatcaaggagccagatcatgttgtagtctattcagatggcatttcccatgattcaggtcatgaagctggaagtgatcatcacaatattacagagtcttatgaacaaatcaatgagactactgaacatcatagttcngnggagagtgcaaaggaatatgaggtgaaggangtacaacagaatttctgttaaggtccc

SEQ ID NO: 30176 - DNA, 152 bp, Glycine max
  Clone ID: 701062279H1
ctcaattacaaagactatggcgagcgcgggcaagtttccaagtccgactcccccatcgataatcgaagtgaagaagccgccgccggcgaaccataatctctggaccctctggaccctctggaacctctggagccttatacaactatgctggg

SEQ ID NO: 30177 - DNA, 151 bp, Glycine max
  unsure (1)..(151): unsure at all n locations; Clone ID: 701062280H1
tgagctataagctagtttatcgtgaggngnatatgaagttgtttgttttctntgttgctgcagtagttttggtagcatggccatgccatggcgcaggctaccaaaggttccctctccgaatgaaaactggctatggtgagcnttcttcgga

SEQ ID NO: 30178 - DNA, 91 bp, Glycine max
  unsure (1)..(91): unsure at all n locations; Clone ID: 701062281H1
cncnaacganatggtgggnattgtcactgccactttgcatttgattccgtgtgcacatataaggtggggcatcggcctacaaccctttacc

SEQ ID NO: 30179 - DNA, 273 bp, Glycine max
  unsure (1)..(273): unsure at all n locations; Clone ID: 701062282H1
cnacctacaggtttagaaaatccagaagttcttgcaaganaaacagtgtttagtgtaagtnagattgaagcgctanatgaattgttcaagaagatcagcagtgcagtgattgatgacggactaattaatnnggaagaatttcagttggcattgttcaagacgaacaagaaagagagcttatttgcngatagggtgtttgactgtttgatacaaagcacaacgggatncttgattttgaagagtttgncacgagctctctctgtcttcaaccca

SEQ ID NO: 30180 - DNA, 274 bp, Glycine max
  unsure (1)..(274): unsure at all n locations; Clone ID: 701062283H1
caaaacaaccgttgatgctaaaaatagcatatcatatcatcttccccacaagtcacacacnaagaacagctccaaaccctcggaccaaaattacatcttacatagatacaccattcattattcatacatggcttgttcccgcattcacttcaaccttaatctccgtttcccctctgatgcggcaccaattgcttccacatgtcactctccctctcgcctctctctttccctctcgcactcccctctcttcacaacaacaccaaagatcgttatt

SEQ ID NO: 30181 - DNA, 88 bp, Glycine max
  Clone ID: 701062284H1
cctcctgtttacaaacctgccagttgaaaaccccccaatttataagcctaccagtagagaagccaccagtgtacaagacccccagttg

SEQ ID NO: 30182 - DNA, 271 bp, Glycine max
  unsure (1)..(271): unsure at all n locations; Clone ID: 701062285H1
tttgttgtgagctataagctagtttatcgtgaggngaatatgaagttgtntgttttctttgttgctgcagtagttttggtagcatggccatgccatggcgcaggctaccaaaggttccctctaccgaatgaaaactggctaaggtgagcgttcttncgacntaaaatgccgcnagttttaggcttgcngtggaagcacacaacanccgagccttannacctncctgaagagtgcnntgnacaacccaggactacattactggcgaacnanc

SEQ ID NO: 30183 - DNA, 273 bp, Glycine max
  unsure (1)..(273): unsure at all n locations; Clone ID: 701062286H1
cnagataactagaaacagtgtgatgaaaatgaaggtccttgttttcttcgttgctacaattttggtagcatggcaatgccatgcgtacgatatgttccctctccgaatgaacactggctctggtgcccgtacnccggaggtgaaatgcgcaagttggangcttgctgtggaagcacacaacntctttggctttgagnaccattcctgaagcntgcgttgaagcaacaaggnatacatccatggcgnacaatatngatcagactccaaaacatt

SEQ ID NO: 30184 - DNA, 270 bp, Glycine max
  unsure (1)..(270): unsure at all n locations; Clone ID: 701062287H1
ggctaacaaaagacgacgccgttttgncccggcgaccgggaaatggtggagccggtggagcttcgctgcgaggagcagcttctcgcttctgtcagattcgagcaatggtgatccgtcgtggcggttnnacttcgacgggtttcanctatcttcggagcacgcggaganagcaagtnaaaccccctcgcggactccacgactgttacggggttctaggtcaagaagataatattgccagagtactatcagcagcaggttgaangttgaggg

SEQ ID NO: 30185 - DNA, 272 bp, Glycine max
  unsure (1)..(272): unsure at all n locations; Clone ID: 701062288H1
aagattccatccatttgcnacttgggaganagtaccattgctccactccctctccctacttcgccggcggccaccatgtctttgtcggagttccgaccactcgacgacaagttcctcatcgaatacataangtccgtccccgccctctcctccaaactcgccgacaacttcgacgacttatctgtcaaagaagtcggagatggcaaccttaacttcgtcttcattgtttccaaccccgcagttcttttgtcatcaaacaggctctgccatac

SEQ ID NO: 30186 - DNA, 274 bp, Glycine max
  unsure (1)..(274): unsure at all n locations; Clone ID: 701062289H1
tctgtatggaaacatcgtgcntagtggagggtctactatgtttccgggaattgctgatcgcatgagcaaggaaattagtgctcttgcacccagtagcatgaaaatcaaggtggtnccacctcctgagagaaagtacagtgtccggattggtggttctatcttggcatcacttagcaccttccaacagatgtggatctccaagggtnaatatgatgaatctggncccagccatcgttcatcggaagtgcttctaaagttgggtcaagtcgagctg

SEQ ID NO: 30187 - DNA, 145 bp, Glycine max
  unsure (1)..(145): unsure at all n locations; Clone ID: 701062290H1
tacaaganaactatcataagtgaccaaaanagacaacctttggggaatcataaaattcttcagaatggctcgcacaattacaattgcagcaatgtgtcttcttctcctcattagtgtccctctgtgtcaccaccaacgcattaat

SEQ ID NO: 30188 - DNA, 274 bp, Glycine max
  unsure (1)..(274): unsure at all n locations; Clone ID: 701062291H1
ggatatgctacctcatgaatatgccgcttacaagggacacgcttctatattctaatgncaagcttgattaggcatggatcatggtgcgtacgaagacgaatcttttcaaccaacgaatggaccggtgtagccaattactatattcataatatgaggtattggaaactagtccaatcaggatttgggtcttagaggataggggattattgtaccgatgttgtttaaatgtgaagcatgtgcccccgtgtttaatcaggacgtagatagtcatagt

SEQ ID NO: 30189 - DNA, 278 bp, Glycine max
  unsure (1)..(278): unsure at all n locations; Clone ID: 701062293H1
ggatatgctacctcatgantatgccgcttacaagggacacgcttctatattctaatgtccnagcttgattaggcatggatcatggtgcgtacgaagacgaatcttttcaaccaacgaatggaccggtgtagccaattactatattcataatangaggtattggaaactagtccaatcaggntttgggtcttagaggatnggggatattgtaccgatgttgtttanatgtgaagcattgtgcccccgtgtttaatcaggacgtagatagtcatagtaga

SEQ ID NO: 30190 - DNA, 147 bp, Glycine max
  unsure (1)..(147): unsure at all n locations; Clone ID: 701062294H1
gcactagggaacacattcctacccccacctaaaggtgagaacattgagaagagtgctagtgagtttttggttgagaagtctcgggaaancccggtggaagtatctgtgctagcacttggacnactancaaatgttgctttggcatca

SEQ ID NO: 30191 - DNA, 153 bp, Glycine max
  Clone ID: 701062295H1
gtctcaagttgctcttcttctttttttctcttctttcaccctcaaaatttctcactctctttatcttcaccttttcagtttaaagcttcagatcacaacagatccaccattcacctcaccactttctcttcacaaggccaaatctaaacaagg

SEQ ID NO: 30192 - DNA, 215 bp, Glycine max
  unsure (1)..(215): unsure at all n locations; Clone ID: 701062302H1
tcgtgaactccattcattcattttcttttcttttgtcttctgcacatccatcatctnncacaaattccattcaaacancatagncattnattgatttgggtgatgagcgcgtgaaaaagaagaagaacatgatggcagggaagaataaaggggtggcgccggaagaggccataagggccattggcttgggtacgatcnncacaanngatctgaag

SEQ ID NO: 30193 - DNA, 266 bp, Glycine max
  unsure (1)..(266): unsure at all n locations; Clone ID: 701062303H1
gcatattgcagcttcagtcttagctactcttgctggttaatncnggttttaacntgaanctaactgaaatcgaatttccctggcaataacaacacaanaattaaggccagatggaatcttggatgcctttatattaactttcatgcatcactgtnnctgcttccatggaatgaattatagtnccccatgcggcagtnctcggactagaaattnggagtcaatganccagcattcacgtatcnantnatatgggttgncttaaaaaa

SEQ ID NO: 30194 - DNA, 280 bp, Glycine max
  unsure (1)..(280): unsure at all n locations; Clone ID: 701062304H1
tctgcgttctcaaacgttgttgcttgctgctgctgcatagttgatcgaaagcatgacaacatcattgtccagcatccttttcaagggaattgcagctcgttctttcaccgcccctctaactaggtcctgttatcatggaatgagatactttgctactgtatcaaatgatcctgacacacatgatgacttcaagccagcnaataaacttgagattccaacatttcttggctgatgttattgagcaggatgtcaaggnataatcngttatggattacatgaa

SEQ ID NO: 30195 - DNA, 283 bp, Glycine max
  unsure (1)..(283): unsure at all n locations; Clone ID: 701062305H1
tccgtttcgtcctctttccgtttcgggtgcaaattcaacgacacaaggganatagagagaganaaccaccgncggaaagatattttaaacggggcggaaccctagcgaggcgagcggcggtgngngcggcggaggcagatcggagcgcgaacaatcnagnatgagcggcaaaggcggtggaagccagaaggcacggnttncnccggccagtcggaanttnnttcacagcntnaggnanatantgagcaaacttcccgnannacgagtntacgccattttaaag

SEQ ID NO: 30196 - DNA, 283 bp, Glycine max
  unsure (1)..(283): unsure at all n locations; Clone ID: 701062306H1
tttttacttcccctatggctcgtcactccttgctcttagccctacntcctcttcgccgcngtggccaccgccgcgatggaggtggccgcgtccgacgccgacgacatcctgatccgtcangtggtgccagatgttggcgaagcgaangaggaggaccaagctgctgaacgcagagcaccacttcncgancttcaaggnaaanttcgcnnaagnctnacgcaacnaaggaggagtcacgntcatcgttgggngtcntnaantncaactccgagagcaagggnnc

SEQ ID NO: 30197 - DNA, 277 bp, Glycine max
  unsure (1)..(277): unsure at all n locations; Clone ID: 701062307H1
ctttgtgcttgtgtgtgcaagaaaggtaaaagctttcacacacacttttcacttctcaaaaaacaaaaggncatggctggttctctgcttcncttttgttccttttccttctctttggattctcagcagctaaggagctattggttggaggcaaaatagatgcttggaagattccatcttctgaatcagataccctcaatccaatgggctgaaaggnctcgtttcagagtgggcgatcatctagtgtggaaatatgagatgggaangatcagtgttg

SEQ ID NO: 30198 - DNA, 277 bp, Glycine max
  unsure (1)..(277): unsure at all n locations; Clone ID: 701062308H1
ctttggtgtttgggtggcaaaatcagagagagaatagcaataaccggtttgctaatggtgagcagagcacttgttttcttttccacttaggataacagtatttgggatttgtacctgctgaggaaaacggaagtgatgatattgagaaacctggaggcatttgtgcctattattaaagcaggatggaggttttctaagatctactgntttatacacgttacccaaacccatttgatcgccccntgntgngacccatggncnagnatgcctccnaaac

SEQ ID NO: 30199 - DNA, 277 bp, Glycine max
  unsure (1)..(277): unsure at all n locations; Clone ID: 701062309H1
ctagtttatcgtgaggagaatatgaagttgtttgttttctttgcacgctgcagtagttttggtagcatggccatgccatggcgcaggctaccaaaggttccctctccgaatgaaaactggctatggtgagcgttcttcggaggtaaaatgcgcaagttttaggttgctgtggaagcacncaacatccgagccntaaaaccattncctgaanagtgcgttgaaccaacaaagggactacattatggcgaacaatttaggcannctcnnnaacgtnanc

SEQ ID NO: 30200 - DNA, 101 bp, Glycine max
  unsure (1)..(101): unsure at all n locations; Clone ID: 701062310H1
tttaatgttatgtgggtaagtgcacctaagatcactccacgtacctacnttgttgtctcttcaacgcggctttaataaatcttctgcccttgttccnaaaa

SEQ ID NO: 30201 - DNA, 275 bp, Glycine max
  unsure (1)..(275): unsure at all n locations; Clone ID: 701062312H1
tgttgatcgagataactagaaacagtgtgatgaaaatgaaggtccttgttttcttcgttgctacaattttngtagcatggcaatgccatgcgtacgatatgttccctctccgaatgaacactggctatggtgcccgtactccggaggtgaaatgcgcaagttggaggcttgctgtggaagcacacaacanctttgggctttgagaccattcctgaagngtgcgttgaagcaacaaaggaatacatccatggcgaacaatatagatcagactccaa

SEQ ID NO: 30202 - DNA, 274 bp, Glycine max
  unsure (1)..(274): unsure at all n locations; Clone ID: 701062313H1
ggttttctcattaacgcttcttctctcttcactctgcgaaggtgcaacctgacagcctccaaatccaatggcttcagagaagaaactttcgaacccaatgagggagataaaagtgcagaagctcgtcctcaatatctctgttggcgagagtggagatcgtcncaccagagccgccaaggtgttggaacaattagtggccaaaccccagtgttttccaaagcacggtacactgttcgttcctttgggattagaagaatgagaagattgcatgcta

SEQ ID NO: 30203 - DNA, 279 bp, Glycine max
  unsure (1)..(279): unsure at all n locations; Clone ID: 701062315H1
agaatggaacaaaatgcgtgcgaggnattgtcgaaaattgcttcggattnccaagtgcgagaagaaggttctcgaaacanttgatgaatcaatcgtatgccccactccacagaagaacgagganccccttaatcgttaaattcagagagggacaaaccaaccttncctgaaaaatactctgncacttgtagatttgtttggtcacacaagctgttcactcaggttgctgcgtctgtgtaaaaagtctccaacttttcaaatgtttgcccgacaggttga

SEQ ID NO: 30204 - DNA, 290 bp, Glycine max
  unsure (1)..(290): unsure at all n locations; Clone ID: 701062316H1
cagaagcnnagaagaagcnacagagaantnggtgttacttactnctcacccgcaagaaaaaaatgggnatctncacntcnntgncatacccccgtatgggtcncaagagagancttcaagttcgctntcgagtntttctnggatggtnaagagcaggngcngaggatttgcannaangtgtcttctggatctnaggggcatccnatctggaagcnagatggtggatgtgggatcaaagtacatcccaagnaaacantttctctcantatgacagttttcgangcnacggc

SEQ ID NO: 30205 - DNA, 278 bp, Glycine max
  unsure (1)..(278): unsure at all n locations; Clone ID: 701062317H1
aaaccctaaacgactctatctctcttcgttttgttcttccttgcgctcctcctcgttcgttcgttctccctccgcgtagatccggcaatggcggagaccgagacgtttgcnttccaggntgagatcaaccagctcctcagtctcatcatcaacacctctactccaacaaggaaatcttcttcgtgaactcatcagcaacgctctgatgctttggacaagattagatttgagagttgaggaaaagagcaagtcgangctcagccaagtgtnannaatca

SEQ ID NO: 30206 - DNA, 261 bp, Glycine max
  unsure (1)..(261): unsure at all n locations; Clone ID: 701062318H1
cagcacccatttggatcctctcttctcttctttgatctccgttaccctttttgttttctcannnnnnnnnnnnnnnnnnnatcttaccgaagttcgtttgcgtgtgtngtgtggtcagtcaccgatggcagcaccacngcganggcactgccgattacgattacctcaatcnagcgtcatcttattggcgatagcgggtgtgggaaagagtgtatgctttngcgatttncngaggntcctncaaaccagtttaancaccnc

SEQ ID NO: 30207 - DNA, 281 bp, Glycine max
  unsure (1)..(281): unsure at all n locations; Clone ID: 701062319H1
accctcccccttctccatgggacantcancgtccaccaccgccgcgcctccgccagacctcaaccgccaccaaattcctcagatacatccaaanaccgattccgatttcaccgattacaccctccgtctctccctcaacgcacagccggaattactagacttcgtcccttccctattcaaccgnttcgactcggtgacgaaactcgctctaacgatgcgaccgaaagtgcgcgagaataaacgacgacgtttggttctgatcttctggggtgcangaatct

SEQ ID NO: 30208 - DNA, 282 bp, Glycine max
  unsure (1)..(282): unsure at all n locations; Clone ID: 701062321H1
cagacttaacaacagcacaaagcgggttactgtctgttcaagctaccatctctctctctcctttcttagtgcctccttgccagaagttaaaatggcccaagaaactttccnattcacatctgaatcagtgaacgaggggcaccctgaacaagctctgtgaccagatnctccgatggctgtgctcgatgncatgcttggagcaggaccctgacagcaaggttgcctgtgaaacctgcaccaggaccaacatggtgatggttttcgagagatcacaaccaaggc

SEQ ID NO: 30209 - DNA, 278 bp, Glycine max
  unsure (1)..(278): unsure at all n locations; Clone ID: 701062323H1
ttacatagcctcagtaatctgagagagaaacaaaaacaatgaaggtttccattgccaagttccactcccttgcccctatnntttttccttctcttggccttcaacacaaaacccctcctagcagcagaaccagagccagtggttgataagcaagggaaccctttggagccaggagtagggtactacgtgtggccactttgggctgatgaaggaggcttcacactaggcccaaacaaggaacaagacatgccctctttatgnatccgtgacncttcatt

SEQ ID NO: 30210 - DNA, 269 bp, Glycine max
  unsure (1)..(269): unsure at all n locations; Clone ID: 701062325H1
gtttgttgttgtaactcgttcttcttcttttgttgttctgtgtttgtgtttgttttttctctcacctgaaaatgtcttgctgcggtggtaactgtggttgcggaagctcctgcaagtgcggcaacggctgcggaggctgcaagatgtacccagacttgagctacactgagtcaaccaccaccgagacttggtcatgggagtggcacctgttaangntcatttgagggtgccanaaatgggtgtgcccgtnaaacgaggcngcaaatgnc

SEQ ID NO: 30211 - DNA, 275 bp, Glycine max
  unsure (1)..(275): unsure at all n locations; Clone ID: 701062326H1
gtggtctgcaactatgagcaaggattatctaatcatactttctctccttctttccacggtgcttgcaactgcaagtnnnnnnnnnnnnnnnnnnnnnccnctatcttgggaagggcttctcccatcgcaaattgtctcccagttatcacattcacaaaaccattgacgaatcctatgcagttatcttcgatgctggnagcacgggaagccgtgtacatgtcctatcgttttaaccaacaattagatctccttcgcatggccaagaccttgagttg

SEQ ID NO: 30212 - DNA, 272 bp, Glycine max
  unsure (1)..(272): unsure at all n locations; Clone ID: 701062327H1
caactcgttagccattggctaaacactcatgcggttgttgagccattcgtccatagcaacaaataggcatctgantgtggttcaccctntttacaaacttttgtttcctcactatcgtgacaccatgaatattaattcacttgcccgcaaatccttggtcaatgcagacggtattatagagaaaacatttttgtggggtaggtacgctttggaaatgtctgctgttgtttacaaggactgggttttcactgatcagcatgcccaatgatctt

SEQ ID NO: 30213 - DNA, 273 bp, Glycine max
  Clone ID: 701062328H1
tgagaaagaagcttaagggagaaatgaccgaatgctattcacttctaaatcttcgatttccatcgtttcccgtccattgatttcggcgcaaaaatcttccccaaacgtttccccaaatccatttcattctcacacccttcatcgaagtttcaactttgtggaatttcccgagctatggaagtggtcgaaggaagtgaagagagtaaagggtcgtcatcccctctaatgaagcttcttgttcgtggaaatgggtgcggctacgatcaacatgga

SEQ ID NO: 30214 - DNA, 90 bp, Glycine max
  unsure (1)..(90): unsure at all n locations; Clone ID: 701062329H1
gcaattcactctgtaacaattccttangttcgttgctctgcagannatatcctttttgagcttacaatggcggacgctgaaaccttcgct

SEQ ID NO: 30215 - DNA, 139 bp, Glycine max
  unsure (1)..(139): unsure at all n locations; Clone ID: 701062332H1
tcacnacttgccnganaatnttcgacggtaantttttccgatcattactctctttgtttggcttttcgcttcccttctttcaaacgctttaacttctctcttccgttccgntccgttctcgcatcatcttaaactaggg

SEQ ID NO: 30216 - DNA, 292 bp, Glycine max
  unsure (1)..(292): unsure at all n locations; Clone ID: 701062333H1
cggatccattaagctttcgcgatggcgtggtttagtgggaaaaatacatgggggaacttccctgatttgggcaggagccgtcaataagcnncaggagagtgtgaagaatattgagaagaattttgattctgctcttggattcgaagagaagggtgaatccagcaatggaagatgccggatcatgggcctataccggctgaacaggaaaaccctattaatccccgtncatctcttttatgggggaacaaattgaggaaactactgagggaaattctnaaaaagnacgatcccc

SEQ ID NO: 30217 - DNA, 87 bp, Glycine max
  unsure (1)..(87): unsure at all n locations; Clone ID: 701062334H1
gncgatagcacaaaacaggcaatnatcttccttcccttcccctcaagcctcaaaaataaaatatcttgtncattccaattcccacnc

SEQ ID NO: 30218 - DNA, 276 bp, Glycine max
  unsure (1)..(276): unsure at all n locations; Clone ID: 701062335H1
tctgcttcaaaatgctgagtttgatatcaagaaagaagctgcttgggctatctcaaatgctacatccggtggttctcatgaacaaatcaagttcctagtaagccaagggtgtattaagcccttgtgtgatcttctcatctgtcctgatcctagaattgttacagtttgtctggaaggccttgaaaacatcttgaaggtgggagaagctggtaaaaacatnnggaattccggtgatgtgaatcnatatgcccnaatgatgngagctgagggaacnga

SEQ ID NO: 30219 - DNA, 281 bp, Glycine max
  unsure (1)..(281): unsure at all n locations; Clone ID: 701062336H1
gaaccctaatccctaatctcatcatctattgaggtttctcatctncattcttcactgccttgatgatcgcactctacatttcccttcctccccttctcaattccccaatcaatagcaacgctcgatccttattcctcttccaatcgcacctaaagataaagaataaatactcgttcaaacccccaaatccctgaatcccaattcactttatcacacacttctctgtttcgatcatggacgtggaggtggcaanangcgcgtgtacaaccgcctcggtgggg

SEQ ID NO: 30220 - DNA, 275 bp, Glycine max
  unsure (1)..(275): unsure at all n locations; Clone ID: 701062337H1
ataacttgcgaatgcaactttcattttcccatttgctagaaatcaaggtcctatattttcattttnccttcttgtaaactagaaactgagggtccttacaacggtctttggcactatttgtcataattnggatcaccaaagagggatcatctgcattcaaaatttggcaagtttgtttgctccctggcccaatatttttctttgtaatactggtctccctacctggatactgaaggagatcatgacaaggcaaatccaagtaaaacatttgatcg

SEQ ID NO: 30221 - DNA, 270 bp, Glycine max
  unsure (1)..(270): unsure at all n locations; Clone ID: 701062338H1
cggcagcnatgacaaggctagctgtgcggaatcctgggcttctgcattgatttccagaattggagcactttagaagcggaaaggagaaggaaccattgtcatgcaaaantgttggagcttcagacatagctcttatggatgacttgttgaaatggaaaatttagcagtggtctctgttgaaaaagccatganatctcgtctgcttctctganagccattagtgagntcanggcttctcagggattgacncaagganaccactcccgaagt

SEQ ID NO: 30222 - DNA, 276 bp, Glycine max
  unsure (1)..(276): unsure at all n locations; Clone ID: 701062340H1
tanaatggacgccgagaagctgacgagataagattgncgagananccaaagaagaaggttgatatcatatcagctcccgccgaaaaaagaagccgccgttgcgacaaaccgccgganaagaaggcanaagacnacatgcctgccggagancnnnccggnngagnccctatagagagnncggtggttttgaagatcaaactacactgtgacggttgcnttgcccaaaantcgaggatccttcttnggttcaacagtgttcattggtgcnccccgacg

SEQ ID NO: 30223 - DNA, 269 bp, Glycine max
  unsure (1)..(269): unsure at all n locations; Clone ID: 701062341H1
gacgatgangggcggtgaggagcgatcgacagggattcgaaagangggaagcggagtgagacaatggctggtcctggacggcagaggagacacggaggtggtggaggccgggaagcacgccatcatgaggacgangggactccccgcgcgtnactgcgtatattggancctctcttgtcataccctctacccttctgggtcgtnaganggccatcgtcatcaacttggngcacntcaagggccatcatcacgccacgaggtcctccttc

SEQ ID NO: 30224 - DNA, 270 bp, Glycine max
  unsure (1)..(270): unsure at all n locations; Clone ID: 701062343H1
angcaacatagcatagaaagagaaagcgcagggtccgacccgagacctcatctttgcgccgtagtgctcgttttcagagttacaaaggaatcgacccaaaagtgagttaaaaaaggcnagacacacacacacagagaganagagatcgagaagatagctttggtgtcaaacgctcccagattcttctgctgtggactccattctctactgttccaccaattctgctcacgcttncaacacaacatacgacannagncgngacncgccgcc

SEQ ID NO: 30225 - DNA, 269 bp, Glycine max
  unsure (1)..(269): unsure at all n locations; Clone ID: 701062344H1
cngcactccgtcttcatcaatcagcatcaccaccgctccaacacaggggaaaatgagggagatccttcacgttcagggagggcaatgcgggaaccagatcggttcgaagttctgggaagtggtgtgcgacgagcacggcatagatccgacggggaagtacgtncggaaactcagatctacaactcgagcgcgtgaacgtgtactacaacgaagcttcctgcgggcggtttgtcccacgcgcatgctgatggcctggagcccggaaccat

SEQ ID NO: 30226 - DNA, 273 bp, Glycine max
  unsure (1)..(273): unsure at all n locations; Clone ID: 701062345H1
tgtaaacaaacaatacnagtgnttnnncctatantantcttnntttncaatacctcaaatgaaggagtttgctgtcctgcagccttcaccacccatcnnnancttcnantttgatttttcctctgtccaattaaatgcaactaaaccgttttnggnatctatctattaccattagggtacgtaataattaacaantcgntnaaccggctctttnactatnattttctaatcattattntgagagcaatgantagcanacctaaaaanggcacc

SEQ ID NO: 30227 - DNA, 262 bp, Glycine max
  unsure (1)..(262): unsure at all n locations; Clone ID: 701062346H1
gngcttgccaganatatgggagcatcttcaagcgtcntcagggtcttttcatacngtttgaaagagaaggggaagattcttgaagtattgaaaaactggcctgagaaaagtattcaagttattgttgtaacagatggtgaacgaattttgggacttggggatcttggatgtcaggggatgggaattcctgttggtaaattggccttgtacacagcactaggaggagtttanaccatcagcagttgcctattacgattgatgc

SEQ ID NO: 30228 - DNA, 273 bp, Glycine max
  unsure (1)..(273): unsure at all n locations; Clone ID: 701062347H1
gtctgcctctgctgttagcagctaactacctcgctncacaaaaaacaccccctttctcaaatcttaggttgttccaacgatggaagagttcagatccaaatcgtacggtgacggaaggatgcagattgacgctaccgtggagcgaacattcaagatctccgctgctacagcgcctcctacgcctcttcggtgcaccnnnnnnnnnnnnnnnnnnnnnnnnngcagacccagatgngaggactacaacnttaacgagccaagttcaagaaggga

SEQ ID NO: 30229 - DNA, 270 bp, Glycine max
  unsure (1)..(270): unsure at all n locations; Clone ID: 701062348H1
cgtttctcttattgcttggtctctcactctttcgacaaagaacgagttcgcaaaccgagtccacttcattctcggccactacgatgattattccagcgagcgtgttgagtttgtttacacctccatgcttcggaatccgaagcattcttatttctactgcgtcggactcaccggaatctctgtagggaagaggactattctggccccggaaatgctacggagggtggaccgcanaggggacggaggcgtggtgttgacancggaaccatt

SEQ ID NO: 30230 - DNA, 273 bp, Glycine max
  unsure (1)..(273): unsure at all n locations; Clone ID: 701062349H1
ttctgatgctttggataagattcgattcgagagcttaaccgacaagagcaagctcgatgctcagccagagctcttcattcgtcttgtgtcctgacaaggataacaagactcttccattattgacagcggcattggaatgaccaaagcagatttggtgaacaacttgggtaccattgcgangtccgggaccaaggngttcatggaggcgttgcaggcggtnctgatgtcagccatgatagngcattcggtgtggggtcantctgnttaccngtt

SEQ ID NO: 30231 - DNA, 276 bp, Glycine max
  unsure (1)..(276): unsure at all n locations; Clone ID: 701062350H1
cattcgagaaggagattattattganaganagagagagataaagcgggggtgtgaaanannacnganaaggtctctctgaagccgtagttgagagttgagactgagatcgattcatctgtcttacttagatttcgcagcaganagaganaatgggagaagtagcgcgtggtggttgttgccctccgatggatctgttccgttcggagccgatgcaactggttcagctcatcatcccccattgatccgcncaccgactgctcctacctcggggacct

SEQ ID NO: 30232 - DNA, 233 bp, Glycine max
  unsure (1)..(233): unsure at all n locations; Clone ID: 701062351H1
ctagntcngaagcgttcccttggtctccactcgcattttcaccanctcctgcttcggcgatgctcatgcatccgcggcgccnaactcctccgcggatgcagaaacccgcaagtacgccggctacgctgncctnctcctcttctgnggnggcgcaanctactncacattnccctcccggacgacnccaagnncaagaaggcgaagatcttccggnaacncccgttgnnggangc

SEQ ID NO: 30233 - DNA, 215 bp, Glycine max
  unsure (1)..(215): unsure at all n locations; Clone ID: 701062352H1
aaaggcctccccataatgtctatgagcagtcaagagacttggagctgatagtcaattctggggatgcatatctcttgtatgtgtagcatagaggngatatccgactgagaatgtgtacatgcatccacaactcaagtatatacatcgcgtgggaggatgtctgagggcgtctgggtcgcatttcctgtaatagatgactggatgtacttcaatga

SEQ ID NO: 30234 - DNA, 271 bp, Glycine max
  Clone ID: 701062354H1
gtcagaaaagcgctggagattctaccacaagacaatgtcacactgaagtttttgttggaggcgacaggtgatgtaaacacaagtgatgtggacctttcagttgcaagcaaggccatcattttgggatttaatgtgaaagcaccaggctctgtgaaaagctatggagagaacaaagctgttgagattagattatacagagtcatttatgaattaattgatgatgtacgaaaagcatggaagggctactagaaccgttgaggaacaagtaaca

SEQ ID NO: 30235 - DNA, 270 bp, Glycine max
  unsure (1)..(270): unsure at all n locations; Clone ID: 701062355H1
gtggtctgcaactatgagcaaggattatctaatcatactttctctccttctttccacggtgcttgcaactgcaagnnnnnnnnnnnnnnnnnnnnncctctatcttgggaagggcttctcccatcgcaaattgtctcccagttatcacattcacaaaaccattgacgaatcctatgcagttatcttcgatgctggtngcacgggaagccgtgtacatgtctatcgttttaaccaacaattagatctccttcgcatggccaagacttgagt

SEQ ID NO: 30236 - DNA, 263 bp, Glycine max
  unsure (1)..(263): unsure at all n locations; Clone ID: 701062356H1
gntaccatcctttattatggaacggatattccaaaagtgtatagatatttcttaataggatttttctatattttggaatagttattttgacatacctatacatttcatataaaatcttattccaaaataactcttctgtatagatatttcgaaataactattgtagaatatcgaaaatctgattctggaatagcatgtttagatattttaaatatcttaatgacatcaataatcatatgtntgaaagagttggacgacaacat

SEQ ID NO: 30237 - DNA, 266 bp, Glycine max
  unsure (1)..(266): unsure at all n locations; Clone ID: 701062358H1
cttganagtttgatcactgatgatttgatgcaaactggtaattcctccacatgatgaagttnaggatgttgaggataaacttgtccctgtctctgaagaattggctgaccaactgaatggcatgggacatgagtccgaggtagataataataagaacaaagggagccttcttacttgtgatgtttctaatgaatctcaggttgatgcttcggctgcagttctagaagatatcaacaataatatttctgcaatggtcagcatgttcc

SEQ ID NO: 30238 - DNA, 269 bp, Glycine max
  unsure (1)..(269): unsure at all n locations; Clone ID: 701062359H1
gttgagtagttcttcatcatagtcttanacattaaaccttagcaaaactcaacaatgctagacatccaaaggctacctgcgtactcttcttcctatggttcatatcaaccattctgatacgttccatcttcaagaaaccacagcgtctaagactcccaccgggtcctccaatttcaatacccttgctgggacacgcgccatatctccgttcactgctccaccaagcattgtacaaggctatcatgcgctatgacccttgatccacgtca

SEQ ID NO: 30239 - DNA, 265 bp, Glycine max
  unsure (1)..(265): unsure at all n locations; Clone ID: 701062360H1
gnaaaggagttgcaagattagaagcatctggtgttgcggtggatgtttcatcattactcctttctcccaaagatggagntgccaatcaacaattttgcgaatgataaaccgtggcattatcaggatccaactgggaaggttcaaggacctttctctttattgcagctgtataagtggantgcttgtggatatttncctcagatctcagaatatggagggtagacgagacacaaaataactctanatnctactgatgngctgaatg

SEQ ID NO: 30240 - DNA, 265 bp, Glycine max
  unsure (1)..(265): unsure at all n locations; Clone ID: 701062361H1
cttgagccgtaaattctcaaaggcaccaatttcattgctcagagntcccaaattctcccacngagataaaatgtctctaatcccaaacttcttcggtggccggagaaacaatgtgttcgatcctttctcactggacgtgtgggatcccttcaaggattttctttcgccaaatacgctttcttcagcttccttccctgaattttctcgggaaaattcagcatttgtgagcaacccgtgtggatggacggaacccagaggcgcagtt

SEQ ID NO: 30241 - DNA, 264 bp, Glycine max
  Clone ID: 701062362H1
tcattgaccccaagaagggtaatttgggaattattgctcccatcgccattggtttcattgtcggcgctaacattttgttgggtggggccttctctggagcggccatgaaccccgctgtgacatttgggcctgctgtcgtgagctggacctggaccaaccactggatctactgggccgggcctctcatcggtggtggaatcgctggccttgtttacgaggttgtcttatcagccacacccacgagcagcttcccaccactgacta

SEQ ID NO: 30242 - DNA, 271 bp, Glycine max
  unsure (1)..(271): unsure at all n locations; Clone ID: 701062363H1
tggattcaattaccattacaagccattggattcagtccaaattgaacggaagcgtcatgacaagncaagaacatctgaaagagccaccagaagttggtggataaggttctgaaacatgaccaaaaacgacgtaaaaggatagaggctgctggcattgattatgaatgccctgagattgtgggcaacatccaacctggcaccaaaganaataaagtttgaagactgaggggtttgaccacattgagctcttgatataccttgaaattatatt

SEQ ID NO: 30243 - DNA, 275 bp, Glycine max
  unsure (1)..(275): unsure at all n locations; Clone ID: 701062364H1
tagcttgaagccacattaacggaggaagaacagctccgaaatagtaagatgcttgatttgctctatgtcagcagtgngcataatttgggctgccacatatcttatcatattatcaatattcttgtcaattgnctctgcatgaaaagactgctcgaccaaattgcatnccnngagntngnganggtntgaatggacatcctctggttgtatgaaagganggtgcncagaanccatgcancnncnccnancnaggggttgaagacttgantttcacc

SEQ ID NO: 30244 - DNA, 278 bp, Glycine max
  unsure (1)..(278): unsure at all n locations; Clone ID: 701062365H1
tagtgtggtctgcaactatgagcaaggattatctaatcatactncnctctccttctttccacggtgcttgcaactnccaagnnnnnnnnnnnnnnnnnnnnncctctatcttgggaagggcttctcccatcgcaaattgtctcccagttatcacattcacaaaaccattgacgaatcctatgcagttatcttcgatgctggtagcacgggaagccgtgtacatgtctatcgttttaaccaacaattagatccccttcgcattggncaaaaccttgatt

SEQ ID NO: 30245 - DNA, 271 bp, Glycine max
  unsure (1)..(271): unsure at all n locations; Clone ID: 701062366H1
taaaagaaagaatcccaggcgaggagaaagatggaggggaaggagcaggatgtgttcgttnggagcgaacaagttccccgagagacagccgattgggacggcggcgcagagccaagacgacggcaaggataccaggagccggcgccggcgcccgctggttgacccgacggatttacgtcatggtccttttacagagcagggatagccagagtttgtggccattttcngtttctctaaaatcaccgtcttaacctntgggantcgccggggc

SEQ ID NO: 30246 - DNA, 270 bp, Glycine max
  unsure (1)..(270): unsure at all n locations; Clone ID: 701062367H1
tcaatagtaactgaagatcaagagccacctggtggttaaggttgtcggtttgtttttttatcccctcctaaaatttgtgtntatatccttagccatttggtcagaaactagagagagagagaccacagtggactcttttatggatgatgttacattataagtactatgtacttaggtttcatattagtcaccacatgttaatgggctcatttctcgtaaaanaaaaaaatcatttggcagacttcaaaaaanaaaaannnnnnnnnnncc

SEQ ID NO: 30247 - DNA, 269 bp, Glycine max
  unsure (1)..(269): unsure at all n locations; Clone ID: 701062368H1
gattctaagagngattttgctgctctttgaagaagggtgtttgcttgattttggagatgtcgctgctctcagatctcattcaaccttaacctctcagaccacttactgagaaggtgatcgcagagnacnatggatccgtggatccagaatgcgccccaagaccanagcaaggactcttccncngaacaantagcgccccctcnaangcttcccaatggancatnnngcttccngcacaggcnaaccnccggnancccgctcaancccct

SEQ ID NO: 30248 - DNA, 264 bp, Glycine max
  unsure (1)..(264): unsure at all n locations; Clone ID: 701062370H1
cncacccttagtcgcctgaaaacgattgttgttgcagggcaaacacaaagatccgggtcgacccgtcgcagatccgatccaaataagaaagatgaatattttcaggttagccggagacatgacccatttggccagnnnnnnnnnnnnnnnnnnnaagatccacaccatcaaatctgcgccggtgtctcattgaaaactcaagaatctatgcactcgtttttgcttgtcgctacttagatatcttactattactatcccnctata

SEQ ID NO: 30249 - DNA, 264 bp, Glycine max
  unsure (1)..(264): unsure at all n locations; Clone ID: 701062371H1
cngcaaggaggtttacctaacccccgccgttctccgcgagtgccgtcgcatcatcgccncgagcgagattatgaaggaagatgataacaactggcccgaaccggattcgggtggggcggcaggagctcgagattgttatggggaacgagcacatttcgttcaccacgtcgaagattgggtctcttgttgatgttcagagcagtgctgaccccgagggtcttcgcatcttttatatcntgttcaggattgagtgttngtcttcnc

SEQ ID NO: 30250 - DNA, 265 bp, Glycine max
  unsure (1)..(265): unsure at all n locations; Clone ID: 701062372H1
aanacaaaaaccattcaattcaangatagtaggctgccaggnaccgcacaccgccnncgcactttctcngatcctcacaattttgcctccggcatgtctccggncgcaggagtcagngtcccccttcatgggggattccaaaggaacgccgncgcngggttccgtccccggcgngtgttnaaacgtggcnaccagantatcggcgccggaatnatgtcgatnccggcgatcataaaggtctnggcgtatactgtttnggggatga

SEQ ID NO: 30251 - DNA, 262 bp, Glycine max
  unsure (1)..(262): unsure at all n locations; Clone ID: 701062373H1
tgccttcaaatcacacactctcttcaatttctagggttttgctattgctttgcctccgttccccctttctcacaaaaacaacgccttttctcttctccttcgtatctattctttgcgcttggcttaggntgactganggcattcacagcgtaattcgttgctgcattttaatcgatttatctaaccaggnctgantganctantgggctctaaaggtgggaaaaagaagtctaagtagtagtagagtaaatcaantnnccnc

SEQ ID NO: 30252 - DNA, 259 bp, Glycine max
  unsure (1)..(259): unsure at all n locations; Clone ID: 701062374H1
tagtttgttgtgagctataagctagtttatcgtgaggagaatatgaagttgtttgttttctttgttgctgcagtagttttggtagcatggccatgccatggcgcaggctaccaaaggttccctctccgaatgaaaactggctatggtgagcgttcttcggaggtaaaatgcgcaagttttagggctgctgtggaagcacacaacatccgagccttaaaaccattcctgaagagtgcgttgaccaacnaaggactacatt

SEQ ID NO: 30253 - DNA, 262 bp, Glycine max
  unsure (1)..(262): unsure at all n locations; Clone ID: 701062375H1
tctctcactcgccatttccagtaagagagagtganttcactttcnntcccatttcaaaaccgctccttctcctaattataaatcttctctnnttctctttntctctctcttcttcgtcttctgtttttctttttctttctaaaatgtaaagaaaacagttttcaatcagcaaaatctacagtttcaatcctttcggatcttgttggtgttgtgtggatccttggatcgtgatcctctaactcaacctcattctggtcggttc

SEQ ID NO: 30254 - DNA, 260 bp, Glycine max
  unsure (1)..(260): unsure at all n locations; Clone ID: 701062376H1
ttcacacccaccattggatccaccaatctccaaccttcttctccactgttccgtttctctctccaacggagagtcttttgttttttgtggcgagtttgttgcacgtttaagaagcaatggcacgcaagaagatcagagagtatgactccaagaggttgttgaaggagcactttaagagaatctctggccaggagttgcccatcaagtctgcacaggttacagaatccaccaatttcagtgantagcagagaaggaacccg

SEQ ID NO: 30255 - DNA, 261 bp, Glycine max
  Clone ID: 701062377H1
aagtttccctcttttggggcagagtcaattcatcaattaggagttggatgagagaatggaagccacaacagagcagaacaattcaaaggtggtgctgattgattctttgcaatcttgggagttccatgtcaaccaggcctccaatcagaatagtcctgttcttgttcacttcactgcttcatggtgcatgccatcggtggctatgactcctgtttttgaagaactggcttcaagctatccggagttctgtttctcactgtt

SEQ ID NO: 30256 - DNA, 261 bp, Glycine max
  Clone ID: 701062378H1
acgactctatctctcttcgttttgttcttccttgcgctcctcctcgttcgttcgttctccctcgcgtagatcggcaatggcggagaccgagacgtttgctttccaggctgagatcaaccagctcctcagtctcatcatcaacaccttctactccaacaaggaaatcttccttcgtgaactcatcagcaacgcctctgatgctttggacaagattagatttgagagtttgacggaacaagagcagctcgatgctcagccaga

SEQ ID NO: 30257 - DNA, 267 bp, Glycine max
  unsure (1)..(267): unsure at all n locations; Clone ID: 701062380H1
ctccgtgggccttgaaagctgtcatagagcttcgtatagcgggacatacntagaccgttatggtaaaccactatccttgtcgcaaattgtggagaacatagaagacgcaccctccccagatgcctctcttctccagagagtcctgagagtgatggtgcgcagaaagatcttcagtggcacaagaatcagagacaggagaaacctcttcggcttgacacgagcctcgaagtggatccttcgcgacangaaatgaccctagcacccatg

SEQ ID NO: 30258 - DNA, 269 bp, Glycine max
  unsure (1)..(269): unsure at all n locations; Clone ID: 701062381H1
tgaaattccgaaagcagatgcactatagcatttttagtacctganccactctgtttacatgcttccaatcctaaaaatcgntactttctctattaagtgtgagatgcatggctcctgacaaattcccagtcccttttgagcgagtgagacccatctaatnatcaaacttcattanccaaaatggactgctcccatcaattccaaaagctccaaacaaagaaaaccaggaaactcggaaaacatctcccaagnccgnaagncgcannttt

SEQ ID NO: 30259 - DNA, 276 bp, Glycine max
  unsure (1)..(276): unsure at all n locations; Clone ID: 701062382H1
gggcactgcttaacttgaaatctttcactctcagccgccattntcccacttccaactncttcngggnnncctttntttgtccangcccagccccggccaccgccgaatccaccantctcgaaatncaatcatgtntgccacatccgtcaactccgaacgagcaangcgcccctnccggcattcccttgnccccctnnnccctctctncaacntcaaaattgggcnntngnaaatctncggnnagcncggacaaagangcanatggcnnangccngc

SEQ ID NO: 30260 - DNA, 267 bp, Glycine max
  unsure (1)..(267): unsure at all n locations; Clone ID: 701062383H1
gtgcaagaacactgttccaatacggaatctaaggcaaagcaaaccaaacatcttgaatcatgggttcaacaggtgagactcagattaccccaacccacgtatctgatgaagaagcaaaccttttcgccatgcaactagccagtgttctgtcttccaatgatcctcanatcagcacttgagcttgatctgttggaaatcatagccaaggctggncctggtgttcatctttcccccactgacatttcttctcagctcccaacacagaac

SEQ ID NO: 30261 - DNA, 165 bp, Glycine max
  unsure (1)..(165): unsure at all n locations; Clone ID: 701062384H1
ggagaagtaatcgagcttcagcaatggtgtacgncanggntcattgatnaagntcnaatttcggggatgccanattccnccttggaccggngnagccngtaaanggtngatattccnactgtaggtanggtgntaactatggnttcccacaaacnccccgagatt

SEQ ID NO: 30262 - DNA, 187 bp, Glycine max
  unsure (1)..(187): unsure at all n locations; Clone ID: 701062385H1
gttgaacatgtcaaagctgagagaaatctacttgctgaagttgacagcaattgcattgttaaactttattgttctttcaagatgaggacnnattatatcncataatggagtatctacctggtggngatatgatgacattgcctgatgcggaaggatatactcaccgaagnatgaggccaggttcnat

SEQ ID NO: 30263 - DNA, 261 bp, Glycine max
  unsure (1)..(261): unsure at all n locations; Clone ID: 701062386H1
cnaacggcgaacgttcgcaagagacgcaacacaaagttgaacgaggnataggcgtgtagggaaaccgtttcattttcaanngcgtgactttcaaatccaatcttccataccaatggccttcagcaacgctctcagatctgccgcgaanttgtcgcttcttccgaatctccctctctaactcagtgagcagaggttttcattcaactggcatgaagaggatgggaggtggantggccatgatgaccctattatcttcatgca

SEQ ID NO: 30264 - DNA, 261 bp, Glycine max
  unsure (1)..(261): unsure at all n locations; Clone ID: 701062387H1
ccacaacattgtggtcttagtcataatcttcgtgacgaagatgtggttcagattgttaagaaaaaggaaaaggaanagggaggaaggggacgatttaaatcacattccaatgctccngctaggatatctgacagagagaagaaggcaccactgaagacataattatatgacactgcctgtgatatcattgatttttgccggtggatgggaaaaaatgactggaggtgatgatacatccaaggcaaggttcttatcttgatt

SEQ ID NO: 30265 - DNA, 261 bp, Glycine max
  unsure (1)..(261): unsure at all n locations; Clone ID: 701062388H1
tacgtcgngttgatacagcttnncaagaatatagnggatcnncgaacgtgtcccttatnnatgctcntnnncattcaattttcttcttggatgggtggagatcgtgatggcaatccaagagtaactcctgaagtgaccagagatgtttgcttattggctagaatgatggctgctaattgtactactcccagatagaggatctatgtttgngtngtcaangtggngcgccaatgacgagctacgtgcgtgcagatgnattaa

SEQ ID NO: 30266 - DNA, 258 bp, Glycine max
  unsure (1)..(258): unsure at all n locations; Clone ID: 701062389H1
ctgttatgcagctgtacctcaggcccggaaagcatccttggctcganttttagaaaaacgcaaagaaaggttactttgggtgcattatttttctgggtgggtgtactgaatctgacacaatttatatttctccaaaaaaggaaggcgtagttatcatccattggttgggcaacataaaaatatatgaatgggattggaaagtaaagccatcatcctccactgtccaccaacttctttctttacaccccttaaatggag

SEQ ID NO: 30267 - DNA, 260 bp, Glycine max
  unsure (1)..(260): unsure at all n locations; Clone ID: 701062390H1
cttacccttcttctctctgtgtgtgtgcgcatcaaacgcaaccagacngcagccatgnccactgcaagaactgtgaaggacgtttctcctcatgagttcgtcaaagcttactcttctcacctcaagcgatctggcaagatggagctgccagagtggactgatattgtgaaaactgcaagatttaaggagttggctcctatgatcctgactggtactatgtcagagctgcttccatgggcaagaagatctacttgagaggg

SEQ ID NO: 30268 - DNA, 258 bp, Glycine max
  Clone ID: 701062391H1
gcttcgtgttgtagctagctcctcgaaaatgctggcacgcctcgccgcgagtcgcttcaacgagatccgtcagattttccgtcagccttctagggctttctcgaccgctctgaactaccaccttgacacaccggacaacaaccctaaacttccatgggaattcaccgagggccaatcaagcaaaggttaaggagattttgtctcactatccatccaactataagcaatctgctacaattctttttggatcttgcccag

SEQ ID NO: 30269 - DNA, 248 bp, Glycine max
  unsure (1)..(248): unsure at all n locations; Clone ID: 701062392H1
ataaagcctcctccttccttctgttttgtcatcgtgaatgttcacgttttttaccgtacacaaaacagcatcaaaagctgtatctataataagaaccgagagtaagaaccatcactaactgcatatgcacagagagtgtgtatganaacataaagcaaagtcattttgtgaaggtgaattgctgaagagatagcagatttttgaaggaagatgataactctgtttccggaaacgtttcatcattgagg

SEQ ID NO: 30270 - DNA, 258 bp, Glycine max
  unsure (1)..(258): unsure at all n locations; Clone ID: 701062393H1
tttgacaatgagacatcagtgcctccttctggtctccctggtgttggtctcctacgctgcccggtcggaatcagcgctgggcggctggagccccatcaaggacgtaaacgacagccacgtggcggagatcgccaactacgcgctgagcgagtacgacaagcgttctggggccaagctcacccttgtcaaggtcgtcaacggcnagactcaggtccgtttccgggcaccaataccgttctcgcctcaaagccaggatgg

SEQ ID NO: 30271 - DNA, 256 bp, Glycine max
  unsure (1)..(256): unsure at all n locations; Clone ID: 701062394H1
gtgatgcatcactatgaggtggatactgatgctgaggtgttggacttgcttgacaccgcttctagggagaaacangtgactgtggtggcaaagctatacnggggggatgcaagagagaaaattgtggaagctgttggggatttaaagcttgactctttggtcatgggtagcagaggattgggcgccatacaganggtattgctggggagtgtgactaattatgtcaccacaaaatggcgattgccctataacgatt

SEQ ID NO: 30272 - DNA, 266 bp, Glycine max
  unsure (1)..(266): unsure at all n locations; Clone ID: 701062396H1
tttcctgtttacgatcttattgcaattttgcaactttcaaagcttattagctaangtaacatcaaaagatgtcattgattccaaggtattttcggtgggcccaaggagcaacgtgttccgattccattctcatcgatatgtgggatcccttcaaggattttcatgttcccacttcttctgtttctggctgaaaattctgcatttgtgaacacacgtgtgggattggaaggagacccaagaggcacacggctccaggnnngatattc

SEQ ID NO: 30273 - DNA, 298 bp, Glycine max
  unsure (1)..(298): unsure at all n locations; Clone ID: 701062401H1
gagtcacacgctctgatcttcatgaatctaggaacctgcgccgcgngtgcaccgtaccgttgggtgcaccttctccctcacgaaggaaagagaagatgtgcgagtgtgagagtgagagcgaatgcnagtgttggaggaggaaaaggagatggcgaaacggcgtcgtatttggacatgtggaagaaggcggtggagagagacaggaagaccgcgagcttcaactcaatagcgaccgcgtggcggcaatactgatgacaacaacgacgacgatctggagangaagaccagtgnagttccc

SEQ ID NO: 30274 - DNA, 291 bp, Glycine max
  unsure (1)..(291): unsure at all n locations; Clone ID: 701062403H1
attgttttcttcatatcttccttgtcactgcccgtgtgtcgccgccatggccaccgtcaccacccaagcctccgccgcaattttccggccatgtacntcgaaatcgaggtttttgaccggctcttccggtaaacttaaccgggaagtgactatgcggccaatggggtgccctccttctgcctctttcaaggttgaagccaagaagggagagtggttacctgccnnntctccccaacttacctcaatgggcantcttcctggtgacaatggatttgacctctggggctagct

SEQ ID NO: 30275 - DNA, 290 bp, Glycine max
  unsure (1)..(290): unsure at all n locations; Clone ID: 701062404H1
ggggtggtgatcaggtggttgaagacaggagtggcgaattagaatcagagagaaagaagcggtttttatatttctcgcgcgattcgtttcaggcaagtgcagtgcagagtcgaaacgacgtcgttcattgtgcgatgaaagtagctcaacaagtgttgaatctctgaactctttgggattcgaatcttgagtcgttgatcgtttccggcaatggattcgtggctcaagccgctgaaggtttatttgaagttgtagatcgacgagcgaaggctgttgccagtnacttatcc

SEQ ID NO: 30276 - DNA, 289 bp, Glycine max
  unsure (1)..(289): unsure at all n locations; Clone ID: 701062405H1
aggtttatgaggcaaggcaccagtaattaataacaagctagctattagttcgattttgtagtaagtgaggtgccaatatggtgaagatagctcttggtactttggatgactcttttagcgctgcctctcttaaggcttatttcgcagagttccacgcaactctgattttccgtgttcgctggtgttggatcagccatcgcttacaacgagcttacaaaagatgcaccttggatccaaggggctggtggcagtagctgtggcacatgcatttgcactgtttgtaggtgnc

SEQ ID NO: 30277 - DNA, 292 bp, Glycine max
  unsure (1)..(292): unsure at all n locations; Clone ID: 701062406H1
gtacagagttgcagcatcatcattcagaaggcatctcaagggccatggaggtaacttgggatccactaggttttcaacttcagccgcggtagctgcaaggacttcatcaggtggtttgtttagctggcttactggagagcgttctagtgctcttcctcctctggacatgccccttggtggtgttgctctccccgattcacttccagattacgtcgancanagcaagccangatcacaacactccccaatggactcaaaattgcgtcaganacctctnctaaccctgcagctc

SEQ ID NO: 30278 - DNA, 290 bp, Glycine max
  unsure (1)..(290): unsure at all n locations; Clone ID: 701062407H1
tccatggctggcttccccacgaggnagaccaacaatgacattacctccattgctagcaacggtggaagagtacaatgcatgcaggtgtggccaccaattggcaagaagaagttcgagactctttcctacttgccagacctcgatgatgcccaattggcaaaggaagtcgaataccttctaaggaaaggatggattccttgcttggnattcgagttggagcacggttcgtgtaccgtgagcacaacaggtcacctggatactatgatggacgctactggacccatgtggac

SEQ ID NO: 30279 - DNA, 288 bp, Glycine max
  unsure (1)..(288): unsure at all n locations; Clone ID: 701062408H1
ttctcataagaacaaaggaaagacaaagagagagatggagaactttcccgtgatcaacttggagaatctcaacggtgaggcgaggaaagctaccctgcaccagattgaagatgcttgccagaactggggattntttgagttggtgaatcatggaataccccttgaacttttggatacggtggaaaggttaacaacagagcattataggaaatgcatggagaagagttcaaggaggcagtgtcaagcaaagggttagaagatgaagtaaaggacatggattgggaganc

SEQ ID NO: 30280 - DNA, 198 bp, Glycine max
  unsure (1)..(198): unsure at all n locations; Clone ID: 701062409H1
gtgaaagagatcgaggcgaagagaagagaaaaattaagatggaggggaaggagcaggtgttcgtgggagcgacaagttccgagagacagcgttggacgcgcnaagcaaacacgcaagatacagagcgcgcgcgcatgtgaccncgattattgtttnaacggtgaatttcatnttnttntatntacntgangcggnatt

SEQ ID NO: 30281 - DNA, 284 bp, Glycine max
  Clone ID: 701062410H1
cagccgttgctctgcttcaaccttgcggaagaagaagacgccgcagccatggtgaagtactccagagaacccgacaatcccaccaagtcctgcaaggccagaggcgctgaccttagagtgcatttcaagaacactagggagactgcctttgccatcaggaagttgcccctggttaaagctaaaagatacctggaggatgttttggcccacaaacaggccatctttccgacgcttctgtggtggtgttgggaggacagcccaggctaagagcagacactccatgg

SEQ ID NO: 30282 - DNA, 283 bp, Glycine max
  unsure (1)..(283): unsure at all n locations; Clone ID: 701062411H1
gagggggtcagagtgaganagagaangagagaattcgtaaaccctaatttcggaaagatcggcgatgactgcctccaaggatcgcgagancttcgtctacatcgccaaactcgccgagcaggccgagcgttacgaagagatggtggaatcaatgaagaacgttgcgaatctcgacgttgaactgacggtggaggagcggaatttgctttctgttgggtacaaaatgtgattggtgctcgcagaggtcctggaggatcctgtcttccattgagcagaaggaaga

SEQ ID NO: 30283 - DNA, 281 bp, Glycine max
  unsure (1)..(281): unsure at all n locations; Clone ID: 701062412H1
gnanagtattagatgaatgaganntgagagatgggaaggagatgagtggggaaggaatcaaagtcatacacgnttccatcatcancgtctcantcattctcctcaagatcttcttcatcctcagacttcgagttcaccatctcagtntcgcnacgcaaatcctccanggctctgtgccccgctgatgagctcttctacaaggggcagntagtgcctcttcactctcccaacgcatctccatggtccgcactctcctcctctcctccnaagannaaanngna

SEQ ID NO: 30284 - DNA, 285 bp, Glycine max
  unsure (1)..(285): unsure at all n locations; Clone ID: 701062413H1
cttctttgtgaaccaaattgatattatgggcagaccctcagaaaattcaccctgtgcaccatgatgttgagggcacaaaaccacccttcagcaccattggtgccaaggagcatgtccaaatctnatgcaggtgatccacaacgagtagtagtnnnnnnnnnnnnnnnnnncattcctctgangcaaaccaagccaccaccgaagaanagaggaagctgctgctgaggttcttctgttggctaataagcatattgctgattctgatagtggcattggcatcactgt

SEQ ID NO: 30285 - DNA, 284 bp, Glycine max
  unsure (1)..(284): unsure at all n locations; Clone ID: 701062414H1
gtcgatagtagagaaaaatatatccaactaatggctacccttattgctcctagccaccattcccgggttgaggatgctgaagctctccgaaatgctttcaaaggatggggggctgatgacaaggccattatagcaatactgggtcacagaaatgttcatcagaggcaagaaatcagaaaagcttatgaggagatttaccaagaggatctcatcaaacgcctgagtccganatcctctggtgactttgagagagctatgtnccggtggatgttgcagcctgcggc

SEQ ID NO: 30286 - DNA, 284 bp, Glycine max
  unsure (1)..(284): unsure at all n locations; Clone ID: 701062415H1
cttccttgcgctcctcctcgttcgttcgttctccctcgcgtagatcggcaatggcggagaccgagacgttngctttccaggctgagatcaaccagctcctcagtctcatcatcaacaccttctactccaacaaggaaatcttccttcgtgaactcatcagcaacgcctctgatgctttggacaagattagatttgagagtttgacggacaagagcaagctctgctcagccagagttgttcattcatattattcccgacaagactaacaattcgctgaccattgt

SEQ ID NO: 30287 - DNA, 288 bp, Glycine max
  unsure (1)..(288): unsure at all n locations; Clone ID: 701062416H1
cncacctgaccagcagagacttatctttgcgggtaaacagcttgaggatggtcgaacccttgccgactacaacatccaaaaggaatccactctccacctcgtgcttcgcctcaggggtggcatgcaaatctttgtcaagactttgactggcaagaccatcaccctcgaggtcgaatcctcggacaccattgataatgtcaaggccaagatccaggacaaggaggtatccctccagatcagcagaggttgatatttgctggtaaacaacttgaggatggaagaaccctc

SEQ ID NO: 30288 - DNA, 294 bp, Glycine max
  unsure (1)..(294): unsure at all n locations; Clone ID: 701062417H1
cctgaatatgccaagcaactgggctgaagaaacatggggcaagcacaaggatgttgagaagacagcatttgaagaggctgagaagaagagggaagaggaggaatcaaaggatgacccagttgactctgatgctgatgaggagaggaagatgctgatgaagcngggcaatgactccgatgctgaatcaaagacggaagctggggaagacaccaaggaaganggtgtacatgtgaactctangaagtttgcaaacggataaagagtgaccggaagttatattccggatagttatat

SEQ ID NO: 30289 - DNA, 288 bp, Glycine max
  unsure (1)..(288): unsure at all n locations; Clone ID: 701062418H1
tttacttcccctatggctcgtcactccttgctcttagccctcctcctcttcgccgccgtnnccaccgccgcgatggcggtggccgcgtccgacgccgacgacatcctgatccgtcaggtggtgccagatgttggcgaagcgangaggaggacaacctgctgaacgccgagcaccacttcgcgagcttcaaggcncgttcgccaagacctacgccaccaangagggcacgatcatcgcttcgggtcttcaagtcnaactccgcagagccaggctgcacgccaagctcga

SEQ ID NO: 30290 - DNA, 155 bp, Glycine max
  unsure (1)..(155): unsure at all n locations; Clone ID: 701062419H1
ttcacacagtaacttggacaccaactcactctctcaccaacaaaacaaaatccaatggcgccgtctttngcaatcaacggtggtttccccggngnnagantcactcctccttccgtnaccngnngnntnnnngncgtctacagcnaggtcnaaaa

SEQ ID NO: 30291 - DNA, 289 bp, Glycine max
  Clone ID: 701062420H1
gtaaaaagaaagaaggtttttttagtatagttaacagcatggagagggaggaagatgttaaggttggagcacagaaattctcggagaggcaagcactgggtacaggagctaagagtgacaaggactacaaggaggcaccaccagcacccttgtttgagccaggggagttaaagtcatggtctttttacagagctgggatcgcagagtttgtggccacattcttgtcctctacatcactgtcttgactgtcatgggtgtcaacagggcacccaacaagtgctcttctgtt

SEQ ID NO: 30292 - DNA, 287 bp, Glycine max
  unsure (1)..(287): unsure at all n locations; Clone ID: 701062421H1
gagtttgttgtgagctataagctagtttatcgtgaggagaatatgaagttgtttgtnttctttgttgctgcagtagttttggtagcatggccatgccatggcgcaggctaccaaaggttccctctccgaatgaaaactggctatggtgagcgttcttcggaggtaaaatgcgcaagttttaggcttgctgtggaagcacacaacatccgagcntttaaaaccatcctgaagagtgcgttgaaccaacaaaggactacattaatggcgaacaatttagatcagactct

SEQ ID NO: 30293 - DNA, 288 bp, Glycine max
  unsure (1)..(288): unsure at all n locations; Clone ID: 701062422H1
tgccttgtagatttatcctattttgcttatcaaggcttcaagcctatttacttggtattttatttttatgttctgttttatatccctatctactcacttgtgatattttctttgacttccatacaccagatcaaantttcttggtacaaagttcattatatacgatacacagcctccatactcttctgcccatatatgccctcctgggactgggaagacgagcgcagattttattccaaaaaggtctcgcctaaggtcccatctgggagttacaacatagctcaggta

SEQ ID NO: 30294 - DNA, 286 bp, Glycine max
  Clone ID: 701062423H1
ctacaaaacagtctccatttgacacagtcctagtggtgtactacttattatggccacaccagcatccatcactaatgtcactgtggagttccttcaattccccgcactggtgacacctcctggctctaccaaatcctatttccttggcggcgcaggggtgagagggttgaatattcaagaagaatttgtgaagttcacgggaataggtgtttatttggaagaaaggccgtgtcatcactcgctgccaaatggaagggcaagagtgcagctgaattgctcgactccc

SEQ ID NO: 30295 - DNA, 229 bp, Glycine max
  unsure (1)..(229): unsure at all n locations; Clone ID: 701062424H1
agataagatgggtgtgaacgaagatttcaacaaggatattgatgatcatcatcnnnnnnnnnnnnnnnnnnnnnnnnnncctcttccggggtttcgtttccaccctacagatgaagtcacttgttagtttctatcttcgaaggaagcttcacaagaaacccatcggcatcgagctccatcaaacagattgatatttacaaatacgatccttgggatcttccaaaaacca

SEQ ID NO: 30296 - DNA, 213 bp, Glycine max
  unsure (1)..(213): unsure at all n locations; Clone ID: 701062425H1
tgattgaagangatgccgatcagaaacatcgccatcggaaggcctgaagaggctactcaccccgacacgttgaaggcggggttggctgagttcatctccaccttgatcttcgtgttcgccggttcaggttccggcatcgcctacaacaagtcaccgacaacggcgccgccactcccgccggcctcatctccgcttccatcgcccatgctttcg

SEQ ID NO: 30297 - DNA, 283 bp, Glycine max
  unsure (1)..(283): unsure at all n locations; Clone ID: 701062426H1
ttcaatcatatagcattctaagaaatgaagagccctaccatttncattctctttctactttctgccttctacacctcactcctaccttcagccaccgctcaagtcgtggttgacatggaaggtaatgatcttcaaaatggtgggaaatattatgtgttgccagtaatagagtcatcatatggtggaataagagtagccgcaactggaaaagaaagatgcctctcactgttgtacaatctgccgatccgtatgataaggggattgcaacaattatttcaacccc

SEQ ID NO: 30298 - DNA, 283 bp, Glycine max
  Clone ID: 701062427H1
attattcttccatttccattaaaaagaaaatatcataaatgggtattttcacattcgaggacgaaatcacctcccctgtggctcctgctactctttacaaagctctagttacagatgccgacaacatcatcccaaaggctcttgattccttcaagagtgttgaaaacgttgagggaaatggtggccctggaacaatcaagaagataactttcgttgaggaggagaaaccaagtttgtactgcacaagatagaagcagttgatgaggcaaacttgggatatagc

SEQ ID NO: 30299 - DNA, 187 bp, Glycine max
  Clone ID: 701062428H1
caaagccgttcttctgccacgtgtgcagtcagaggatcacgtgctccgatgagtcggaacccttctgcccgatctgtatggaaagtttcgtagaagaatgcaaccctaacaaccctaaccctatcttttcaccgagaatgaggaatcttctgattccgaaatctccttctccctgctccctctcttt

SEQ ID NO: 30300 - DNA, 250 bp, Glycine max
  unsure (1)..(250): unsure at all n locations; Clone ID: 701062429H1
gagatgttggggagcagcgagagtcaccctactcccccaaatccatcaagcacaccagatctctccccagatccatcaatacctcctccgcgagcagcgctcttgttcatcctcgtcggcatctcatcggtcaccttcttcatcatccagccactctctccgctgggccaccgagccggccaacattctcctcgaacgggttcgcttagggcaaaggctgangggcggttcggtngganggcgcagagca

SEQ ID NO: 30301 - DNA, 283 bp, Glycine max
  unsure (1)..(283): unsure at all n locations; Clone ID: 701062431H1
cggagccctctcttcaggtcaccatctagactgcaatcatggctgatggaccacagcatccatcagttgttcagaagctngctggacagtcttacctggtgtccaggcttagccccaactttaactctaggaattattctgcaactggttcttacgtcaatggcggaatgcactcgcctgggttggctgttgtgtcacctgtatctccagttactgtgcagctccagcagagaaaggagtgagtggatttctagtggatttctgatgggtggaatatccgcnc

SEQ ID NO: 30302 - DNA, 289 bp, Glycine max
  unsure (1)..(289): unsure at all n locations; Clone ID: 701062432H1
gnccgcagagtagagcagcacagaagagggaaaacngcaccgccgccgtagaagaaaacaaccatggtgcacgtctccttttacaggaactatgggaagacattcaagaagccgcgtcgtccgtacgagaaggagcgtctcgacgcggagttgaagctggttggtgagtacgggcttcggtgcaagagagagctgtggagggtgcagtacgcgctcagccgcatcgcaacaacgcgcggaacctcctcaccctcgacgagaagaacccgcgccggatcttcgagggaga

SEQ ID NO: 30303 - DNA, 297 bp, Glycine max
  unsure (1)..(297): unsure at all n locations; Clone ID: 701062433H1
cagcatctcattcccgtccccggcgactgagtagcggtctcttcccaactcggaactcagtccattccgcatttcaattttctcttcacttggcaaagcccaaaccaaaccctggctgaagaagagaattgactgagaagaagaacacngaaatgggctccgaactgattttcagagggcacgagacccagcccgtggacgacgcgtactcaccaaagccccacaaacctggctcaccgtgactcgcccgattcactaacatgctccgtgagcagcgantcctcttcgttctcctcg

SEQ ID NO: 30304 - DNA, 143 bp, Glycine max
  unsure (1)..(143): unsure at all n locations; Clone ID: 701062434H1
gtgatttgctctatttaattacattatcttgttttaaaatgaatgtttggcctgtgttcatggtacttgtagaagattagatgtncagttattgtnaccaaagttatactttgatataatgatgcgattttcgtctgtggtta

SEQ ID NO: 30305 - DNA, 169 bp, Glycine max
  unsure (1)..(169): unsure at all n locations; Clone ID: 701062435H1
tantnaanccnaactntnatctctgtancaacanaaataagagcnaggccgcaaacaatttgacgacagntttatttattnanttaccaaanagacctcaccacactctctggnaatagtcnactggaatnacgacatnnacagctancacatccacggttctnagatt

SEQ ID NO: 30306 - DNA, 289 bp, Glycine max
  unsure (1)..(289): unsure at all n locations; Clone ID: 701062436H1
ctcattaattgcaagaatggcacttcgttgcttggtgatgtccctttctgttctcttcactcttggtcttgcgagagaaagccatgccagagacgaagatttttggcatgctgtttggccaaacactcccattccaagttcattgcgagatcttctaaagcctggccctgcaagtgttgaaatcgatgatcaccctatgcaaattgaagaaacacagtacccgaaaccttcttctataaagangaccttcatccaggcaaaacaatgaaagtacaattcagcangnccc

SEQ ID NO: 30307 - DNA, 140 bp, Glycine max
  unsure (1)..(140): unsure at all n locations; Clone ID: 701062437H1
gtatcgaagaagaagatggctttaggtgttcctgctcttccgttgacatacgnggagcangttctggtagttgttgccagcgtcttggtcgtggtctgggtngtcaatttcaggggtggctggcttgggattctgataac

SEQ ID NO: 30308 - DNA, 238 bp, Glycine max
  unsure (1)..(238): unsure at all n locations; Clone ID: 701062438H1
tagtgcctccttgccagaagttaaaatggcccaaganactttcctattcacatctgaatcagtgaacgaggggcaccctgacaagctctgtgaccagatctccgatgctgtgctcgatgcatgcttggagcaggaccctgacagcaaggttgcctgtgaaacctgcaccaagacaacatggtgatggttttcggagagatcacaaccaaggccaacgtggactatgagaagattgtgc

SEQ ID NO: 30309 - DNA, 287 bp, Glycine max
  Clone ID: 701062439H1
catttgcatgcactgagaagagcaagaggatgtggaggtcggtttttgaattcaaagaaagatgagaatcaacaggatgaggttgcatcaactgacgaatcacagtccactatcaatctcaattctgataaaaatgagcttgcaccatcagatagaacatcctaaaactacagaaatggtgatgctgtagattgcagggatctgttgtgtatatctatattggagatgaatctccaaccaacagtatcctcagatatctccctattattcattctgtcgtacaacgc

SEQ ID NO: 30310 - DNA, 285 bp, Glycine max
  unsure (1)..(285): unsure at all n locations; Clone ID: 701062440H1
ggcatgtcgtgaganattacgaagggataaactaaatcgagaggcatgctattattttgcatattgtgtgattgantttagtcttctaaatctcatgtcttcaatttggcatgattttaaggtttctggaattgagttccatcctggagcctagtaggcagcccaaatcagacaaagttgcaatattaagcgatgcggctcgagtggtaatccaattgagaatgaagccaagaggctgaaggaaatgaatgatgaactacaggcaaaagttaaagattgaagggc

SEQ ID NO: 30311 - DNA, 284 bp, Glycine max
  unsure (1)..(284): unsure at all n locations; Clone ID: 701062441H1
tgctcatagtgtttttatggaggatggtggtttgnntgtggagcaatcgccttcgccggagatgncggcgatgacttcnccgganacgggtttngcggtgtcncgccgctgangcctcgccggggtttganaagggtagtgtgcagantgannaggagggtgtgaagaagattaatgngnnagggttgaagantaattctntgagggattggtggtggaacatganaatnaggttngggttngggagatnaaanagttaaggattatgtgatggcactggatnc

SEQ ID NO: 30312 - DNA, 280 bp, Glycine max
  unsure (1)..(280): unsure at all n locations; Clone ID: 701062442H1
caggatggtcaagtcatgttgcgttatgtgcttgtgtttgatcttacttcacattttcctgcgctttgtgccaatacagtcagcacctganagtgccattgtgacacagattcctggcttcagtggcactctaccttccaagcactatgctgggtatgtgacggtggataagagtcatgggaggaacttgtactactattttgttgaatcagagggtaaccttccgaggaccctgtggttctgtggcttaatgggggacctggctgctctagcttcgatg

SEQ ID NO: 30313 - DNA, 280 bp, Glycine max
  unsure (1)..(280): unsure at all n locations; Clone ID: 701062443H1
tacattgcaacaccgcgatatgaacgatgcaaaatagtttcagatacgtcgcgttgattgattgatatgaagtggttgactttctggaactgcatatctatcctcgtgttgtcttttgctttcttcttcttctattgtcacacatacacatctactccttccctcatggctgagcaatcttccaagtccatttacgatttcacagtcaaggacatcagggaaatgangtgagtctgaataattacagcgggaaggttctactgattgtgaatgtcgcctc

SEQ ID NO: 30314 - DNA, 279 bp, Glycine max
  Clone ID: 701062444H1
acaaacattcatggcaaaatgaagtttgcaaaaaaaatcctcacccttcgttttgcgttcagtttgcattggatcatttggatttggtctcagaattcataaacaacaagttggaaaggaagccgatcatgttcttactgataaactaatatgagatcattacacgccgatataattctgcgaggatactctggttggaattcaaggcgtgctgtgcagttctggatgaaattttcccaaagaatgccactgagcaaccagaattgatattgtgtactt

SEQ ID NO: 30315 - DNA, 114 bp, Glycine max
  unsure (1)..(114): unsure at all n locations; Clone ID: 701062445H1
gaactcatcacttactggaagccttgttgtgagtaagagaaaaggcttcctgcaccgagcacaccaacttgatacctctgattctttctttgcttagaattccacanaanatag

SEQ ID NO: 30316 - DNA, 276 bp, Glycine max
  unsure (1)..(276): unsure at all n locations; Clone ID: 701062446H1
tcttcatcttgttctatctgtgacgagcatcatgggcctcaagagcagtgttattgttggctatgtgtgtgcttccggcgatggttgtggcattcgcccagcaaagaaccctttttgcgtgangggtcgtgtctactgtgacccttgccgtgctggttttgagacctcagctaccacctacattgctggtgctgagattatgttgcaatgcaaganagggttagcaacgaggttgtgtacagaagaaggggtacacggatcaaccggagcatacac

SEQ ID NO: 30317 - DNA, 293 bp, Glycine max
  unsure (1)..(293): unsure at all n locations; Clone ID: 701062449H1
ctgtcatttgcagattcttctctctggatcgctgatattcattcatctactttggatttggtagtgaagacatcattagagtgatttgttattcgctttttaaccctaccatttataacctgcgggaagcaaggagaaaagcagcagaatgagtagtacacaggtgccanaganaagagtgngcatttgtgctgattgatgggttggctgatgtgtcactgnccaagcttggatacaagactcctctntcaggctgcaaaactgcccaacttggatgncatagatctgctggc

SEQ ID NO: 30318 - DNA, 289 bp, Glycine max
  Clone ID: 701062450H1
gttcatttctacacatccctagctctgtcgttccgtcgttgacgatggcgtttcgggtgcgaagccctggacctccgctctctctttcttctctctctcttgtccatcgcttccgccaatgtcttcttcgaagagcgtttcgatgacgggtgggaaaatcgatgggttaaatcagattggaaaaaagatgagaacgtggctggggagtggaaccacacctctggcaatggaatggagacgctaatgacaaaggtattcaaaccagtgaggattacagattctatgctac

SEQ ID NO: 30319 - DNA, 282 bp, Glycine max
  unsure (1)..(282): unsure at all n locations; Clone ID: 701062451H1
tgtatcatcttcttcgtctttcctttgtctctcttctttcccctctctttcgagggtttttctnnnnnnnnnnnnnnnnnnnnnnnnnnnnnnnnnnnnnnnnnnnnnctttctcttgtttttcagttttgcttccatttcctttgaatccccatttattcttcttcttctgcaaccctaaccctagaattgaagatgcagcctcagaggttaaggcacaagccatgatgcaaccatctctctaccaccaccctgctctattactcctcctcagatagagcc

SEQ ID NO: 30320 - DNA, 284 bp, Glycine max
  unsure (1)..(284): unsure at all n locations; Clone ID: 701062452H1
aganaagtttganttggatagaaacgaggatcctatgagttattctagtggaatgcactcggattggagatttgggggtgcaaatattgcaagttcttctgtagctatggttggcctggggaattctatgaatgtcagcagaggggatttgattggttcttcttcatgttcctctgcttcaatggtggactcatttggtccaaactactgggaaaacccccctgttcccaaaacttgggattttgtgacattaatgtccacaacaatgggggttcctcaagcac

SEQ ID NO: 30321 - DNA, 282 bp, Glycine max
  unsure (1)..(282): unsure at all n locations; Clone ID: 701062453H1
gnccggtntcgaagaatctgtaccggcggatgaacagggtggtggcggactgctctggctggagctcgtgtggattattgattggtgggccggtgttaaggttcaagtattcacagatcctgaaacctttcgttcaatgggtaaagagcatgctcttgttatctccaatcacagaagtgacattgattggcttgttggatgggttttagctcagcgtncagntgcctggcagcactcttgctgtgatgaagaatcatcgaagtttctaccggtcattggttg

SEQ ID NO: 30322 - DNA, 282 bp, Glycine max
  Clone ID: 701062454H1
cactcttcttctcttgcggctagggttttagcgcagttcttctagatttaaggaagatgggtaaggaaaaggttcacatcagtattgtggtcattggccatgtcgactctgggaaatccactaccactggtcacctgatttacaagcttggaggcattgacaagcgtgttattgagaggtttgagaaggaagctgctgagatgaacaagaggtcttcagtatgcctgggtgctggacaaacttaaggctgagcgtgaaagaggaatcaccattgatattgcc

SEQ ID NO: 30323 - DNA, 283 bp, Glycine max
  Clone ID: 701062455H1
cctgaatatgccaagcaactggctgaagaaacatggggcaagcacaaggatgttgagaagacagcatttgaagaggctgagaagaagagggaagaggaggaatcaaaggatgacccagttgactctgatgctgatgaggaagaggaagatgctgatgaagctggcaatgactccgatgctgaatcaaagacggaagctggggaagacaccaaggaagaggtgtacatgatgaactctaggaagtttgcaaaacggataaagagtgagcggaagttatattccg

SEQ ID NO: 30324 - DNA, 285 bp, Glycine max
  unsure (1)..(285): unsure at all n locations; Clone ID: 701062456H1
catcatcattaaacatgggtggcagtgttagcaagagtaggaggatganttctgagaaatatgtgatgaatttgaaggagaaagtgaggctcttgcaagacgagataanaggagangatgtatgagagggagaaggagacaaggagatatgagagggacataatggtgttcactttcaaggaggcagattcgaagcaagaggggaanangctgagcagaggagtgaagcaattgaggatttggtggaaganaaagntgagaanataagagcannntgcggttgnc

SEQ ID NO: 30325 - DNA, 280 bp, Glycine max
  Clone ID: 701062457H1
gtaagccacatcctcagggtgaagaatatggtcctgttagcgaagtctacgtgcctgccagcgaaggagtggaagcttatatttggttactggcaaaggcttatgttgttgtgaatgatgcatgctaccatcaaatcattagccattggctaagcactcatgcaattgttgagccatttgtcatagcaacaaacaggcaactgagtgtggttcaccctattacaaacttctgtttcctcactaccgtgacaccatgaatattaattcacttgcccggaaa

SEQ ID NO: 30326 - DNA, 233 bp, Glycine max
  unsure (1)..(233): unsure at all n locations; Clone ID: 701062458H1
gagaaagaaaagaatggcaaagttaataaaattctttgagttgaacacaggggccaagattccttctgttgggttaggcacttggcaagctgagcctggtgttgtagccaaagctgtcaccacagccattctggttggatacaggcatattgattgtgctcaagcgtataaaatcaagcagagattggntctgctcttaagaagctttttgatgatggtgtggtgaagcgtga

SEQ ID NO: 30327 - DNA, 279 bp, Glycine max
  unsure (1)..(279): unsure at all n locations; Clone ID: 701062459H1
ctcacagatagattagcacttagcatttactaagaaaggataaagganggaacactttcgttacatttctccgcccattcctaccttgttcctccttttctccttttctttttcgtattcggggttgctgctttctttcgactctattgtcttcttaataaatacaganagaaacaaaaaagaaaaaagtttataggtgcctagnngaaaagacaataagtgtggagcaattacgtttgatcacaagggaaattaaaggtgcaaggttttgcaagatac

SEQ ID NO: 30328 - DNA, 280 bp, Glycine max
  Clone ID: 701062460H1
cgaaaacggcagtcccctccctcatcggaagggaggaacacagccagccacgacaggattactccctggaatcgggttctgtcttcttcattgcagcagatctcactacactgcatgcatatgggagcagtggttgtcttggaccctttaaaaagcccccactaattgctactgcagatgttccgccaaaaggattgaggaaacaaggtaaggcagcaagaaacctagcacatcagaagatttctggatcaccagcacgcatgatatggacaacagtgct

SEQ ID NO: 30329 - DNA, 277 bp, Glycine max
  unsure (1)..(277): unsure at all n locations; Clone ID: 701062461H1
gtttcaagaaaaagaataagagtgaagagtcgatccagttatcacttaccacagcaaacactctagagttctaagcaatggcgattatctccgatttcaacgaagaggagccgaaacccgctcactcttcaccaccgcaaccccaannnnnnnnnnnnnnnnnnnnnntcagtgctacttttgaccggtcaaatcccatcgctttcctggagagagcttcgaattcgtctccgaacagagcgatttctggcgacgcagagcgccgagaaggagatag

SEQ ID NO: 30330 - DNA, 282 bp, Glycine max
  unsure (1)..(282): unsure at all n locations; Clone ID: 701062462H1
atttcctgtttangatcttattgcaattntcngaactttcaaagcttattagctaaagtaacatnaaaagatgtacattgattcnaagtattttcggtggcccaaggagcaacgtgttcgatccattctcactcgatatgtgggatcccttcaaggattttcatgttcccaattcttctgtttctgctgaaaattctgcatttnngaanacacgtgtggttggaaggagacccaagaggcacacgtgntcaaggttgatattccagggntgaagaaagagga

SEQ ID NO: 30331 - DNA, 281 bp, Glycine max
  Clone ID: 701062463H1
acatatttcctctacctttctttctccttcaaaaattcacctcaccttttcttttccctattagctccgaacccgaacctgtaaaatggatctactcgacccgaaccgtttccgcaaccgcaagcaacccaccctctcctcgcgggaacgcttcctcggcgtcccatcccacgcgccgcgactcgaaaacccttcctccgacgacgtcgttttcttccacaacgacgacctaatcgaagacgagtcgttttctccaacaagttgactccaccgaacctctt

SEQ ID NO: 30332 - DNA, 252 bp, Glycine max
  unsure (1)..(252): unsure at all n locations; Clone ID: 701062465H1
aacagaagaacaaccaccaccacacacaatgggtcgcgtgagaacaaaaacggtgaagaaatcctcccgccaggtgattgagcgttactactcgcgcatgaccctcgacttccacanaaacaaaaagcttctcgaagaagtggccatcatcccttccaagaggctgcggaacaagattcgcgggttctccacgcatctcatgaagcgcatccagaagggtcccgttcgcggcatctccctcaagctccagga

SEQ ID NO: 30333 - DNA, 288 bp, Glycine max
  unsure (1)..(288): unsure at all n locations; Clone ID: 701062466H1
gaacctgaagcgtgtatgtgtattgttgatagcagagaaaganagatatgggtgcatactgcaacggcaacgtttcgttgtcaccatcctacgacgtcgcttcagcccaagatcccaggttctgcaagcacgttcacgacaacgtccatggcaatatttatctcgattcccttagtttgaagttcattgacactgagcagtttcagangcttcgcgagttgaacaactaggttttacaaacatggtttatccaggtgctgtgcattccagatttgagcattctcttgg

SEQ ID NO: 30334 - DNA, 282 bp, Glycine max
  unsure (1)..(282): unsure at all n locations; Clone ID: 701062467H1
gcttctcactgatctccattcccattccatggcttccactgaatcatcccctttcaagaaaattcagattcaaagggatgacactacatttgacgcatatgtggttggaaaagaggatgctcctggaattgttgtgattcaggagtggtggggtgtggattacgaaattaagaaccatgccgtgaagatttctcagcttggtagtgggtttaaagcncttttccagatttatacagagganaggttggtctggatgttgctgaagctcagcattngatggag

SEQ ID NO: 30335 - DNA, 284 bp, Glycine max
  unsure (1)..(284): unsure at all n locations; Clone ID: 701062468H1
gttcacctttgctcagtttcgtagtaaaatcaaagttccgcttccctccgcagagactggacgatctcgcgagccatgaatgctagacgagacaatcgtaacaatagagtttccctttttgatggtattgaggagggtggcatcagagcatcatctgtttactcctcttctcatgaaattgatgaacatgataatgagcaggcattggatggattgcaagtagagtcaatctgctgaaaagattntcaggtgatataaatgaggaggtggatagccataaccgc

SEQ ID NO: 30336 - DNA, 281 bp, Glycine max
  unsure (1)..(281): unsure at all n locations; Clone ID: 701062470H1
cnaattctctgtgttgtgttgtgtacttgtgttaattgtgttgttgttgtaggaaatttaagtgaagagagaatgatgatgaagtctgctatgtgtgcattggtgcttgtggcactggttgtggttgaagtggggcccatggctgaggctgcggtgacttgcaacccaacacagttgactccttgtcttccggcaattaattcaggttctgcaccttcagtgctgttgccagaagctgaaggagcnaaagccatgctctgtggctacctcaaaaaccctag

SEQ ID NO: 30337 - DNA, 282 bp, Glycine max
  unsure (1)..(282): unsure at all n locations; Clone ID: 701062471H1
cacaatttcaattgtnttnnttttacataatcatggccatgaaacgtgctgttcaatccctgcttgcctcatcttccaccctcaccaggaaccttcatgcctcaggagaaaaaaagaagattgtaggggtgttctacnaagggaatgagtatgcttcgaatcccaattttntgggatgtgttgaaanagcattgggtatacgtgagtngttggaatcacgggtcaccagtacatagtcatgatgacaaagaaggncccgattcagannnagananncacatc

SEQ ID NO: 30338 - DNA, 282 bp, Glycine max
  unsure (1)..(282): unsure at all n locations; Clone ID: 701062472H1
ttcttctcttgcggctagggttttagcgcagttcttctagatttaaggangatgggtaaggaaaaggttcacatcagtattgtggtcattggccatgtcgactctgggaaatccactaccactggtcacctgatttacaagcttggaggccttgaccaagcntnttattgagaggtttganaaggaagctgctgagatgaacaagaggtctttcaagtagcctgggtgcnggacaaacttaaggctgagcgtgaaagaggaatcaccattgatattgctttc

SEQ ID NO: 30339 - DNA, 281 bp, Glycine max
  unsure (1)..(281): unsure at all n locations; Clone ID: 701062473H1
gngcatttccatccacattggccaggccggcattcaggtcggaaatgcttgctgggagctttattgcctccgagcatgccattcaggctgatgggcagatgccgagtgataagaccataggtggtggtgacgangctttcaacaccttcttcagcgagaccggtgccggaaagcacgtgcctcgtgcagttttcgtggatctcgagcccactgtcattatgaaatcagaactggcacataccgccaattgttccatcctgagcagctcatcagtggaaagg

SEQ ID NO: 30340 - DNA, 187 bp, Glycine max
  unsure (1)..(187): unsure at all n locations; Clone ID: 701062474H1
ancnacaaaacanagagacnntcactgaatcactctcactcactctgcatgctgtgtgcgtgactctgtcattgtgttttntgttttaagcactttgcagtttagtttctgaggagcgtttntctnttttnctttcttatgagtgtgtgncntcctaagttgcngtnatngtngtncaagnttcggt

SEQ ID NO: 30341 - DNA, 276 bp, Glycine max
  unsure (1)..(276): unsure at all n locations; Clone ID: 701062475H1
gtttagggtttcggttccttaccctacctttgacgtatcgaaaccttaaatttgggattaggtctgagcaatctggttggtagaacctttggtcttagagagtcaagttttatgtcnggattagacgatcaaattcctactgccttcgatccttttgctgatgcaaatgctgatgactcgggtgctgggtcaaaggagtatgtgcatattcgcgtcagcagcgaaatggtaggaaaagcctgacaaccgttcagggattgaaaaaagattcagcta

SEQ ID NO: 30342 - DNA, 278 bp, Glycine max
  unsure (1)..(278): unsure at all n locations; Clone ID: 701062476H1
ggcacctctctctttcttcccgtgtgcgtcaaagcgaagaaacgcgacacgatggtgttctacttcaaagcgcgccccgaagccggcgatttcaccatcttcatgggccttgacaagtacgagaacgaggaactcatcaaatacggttttcccgaagacatctggttccatgtcgataaaatgtcntcagcccatgtctatgtcaggttgcacnaaagccagaccatcgatgacatgagtgagggttactggaagactgtgctcagcttgtcaagcaa

SEQ ID NO: 30343 - DNA, 273 bp, Glycine max
  unsure (1)..(273): unsure at all n locations; Clone ID: 701062477H1
aaaacgtgttacagattgttgaacgagtagaatggcagctacaaacatctcagccagtggaatagttctggaacnctcacaagagacaactacgacaactggagtgctcttntgaggnactatctaataggtcaaggtctttgggaagctgtcaattctgtttctgaaattagtgtgcaacccaaagaggtttctgattcttggaagaagacaatgccaggctttgcatataattccagcctagcatgtgggatggagntcctagtcagatta

SEQ ID NO: 30344 - DNA, 277 bp, Glycine max
  unsure (1)..(277): unsure at all n locations; Clone ID: 701062478H1
cagaaagggccattttctgaatgcgctctatctatctcttccgatctggctactaaccctaacccgcttcgaaccgtggcttcctcggcctcgcagaacctctctcgaagaaaannnnnnnnnnnnnnnnnnnnnnctcaacaaacttccgggtcgacccggatcgtttaccgcgaacctcggatcccatcggaatccaattttccgatctggcgcagaactggttcatcgcattgctcttcctcatggctctcggattcttcgccctcgctctctc

SEQ ID NO: 30345 - DNA, 279 bp, Glycine max
  unsure (1)..(279): unsure at all n locations; Clone ID: 701062479H1
ttagagtgagcacaagcttggttctagtagttttagtagctctcacagttcaaattttctacntttcacccatagatccagttttgctggatataaaacctgctccttcaaccaaagacaatcaattacagaatatcattaagcttggagaaggacttttgaaggaaccagaagatgttgttgtagataaagaagggactctctatacagctactgagatggttggcttaanagattgcgcaggaataatggaaaatgggagacttggaagcntatagc

SEQ ID NO: 30346 - DNA, 282 bp, Glycine max
  unsure (1)..(282): unsure at all n locations; Clone ID: 701062480H1
cactcactcacactccgctccgcttaactgtaatggaaccattccatgctccgaatccccaacntcatcgctgtcaacgtccgtcaccgtctccgtaacttccctaatcctattcctttccttctctccgtttccgtcgctgcatctctccctccgttacggaaccgaagcccgtcacagatggcggctcgcgaatcgatgatggcggattacgcgaatcggggaagtcgtcgtgcagggcgtgttcccaaaagatcgaagcgaaggcattgaggctggctt

SEQ ID NO: 30347 - DNA, 282 bp, Glycine max
  unsure (1)..(282): unsure at all n locations; Clone ID: 701062483H1
atcgcagactgggtgttaccaaacacagacacaacacaacacagtgctctgttgctacttctacttgccggcggcacctacttcaccgagaagagtgttccaacacaacacaacattgccaaaatgacaatttcaccctctctgaccttaacacccaccaccccgagaatcaccgcaacaacccacacttcccacacttcccacacttcccaccccacctctcaaactcaatcctatttccagaccttcccctctacgcggcttcctccccttcacatcang

SEQ ID NO: 30348 - DNA, 284 bp, Glycine max
  Clone ID: 701062484H1
gtaaaacgtagttactggtttgacatatataagaatatcgacaaaattccactcgttaattgccctattctcataattcatggaacttcagatgaagttgtagattgctcccacggaaaacaactgtgggaactgtgtaaagagaagtatgagccactatggctcaaaggaggaaaccactgtgatttagagcaatttcctgagtatatcaggcatctgagaagttcatagccactgttgagaagtctacatcccaaagatacagcttcagaagaagcatggcc

SEQ ID NO: 30349 - DNA, 285 bp, Glycine max
  unsure (1)..(285): unsure at all n locations; Clone ID: 701062485H1
tcccagctttatttagtgggctatccaaaattgatagaagggagattgcgatcagtatacataaggactgaaaaaggtgttcttatagaggttaagccctttgttcgtattccaagaacattcaaacgctttgctggtgtcatgttggaactgcttcaaaaattgagcatatctgctgttggcaagcgcgagaaacttctccgaaccatcaaaaaccctntcacacagtatttgcctatcaactcacgaaaaataggtctatcatatctacaagcttttctgacc

SEQ ID NO: 30350 - DNA, 281 bp, Glycine max
  Clone ID: 701062486H1
caataatctaaaactagtactatatcgaataattctctaattaacatggcttccacatgtacaccctccacactcattctcctcaccctcaccacattcctcattgcccaagcccaagcccaagccccggcaccgtccccgtcgggcgcggtgaacctcaccgcgatcctggaaaagggtgggcaatacaccaccctaatgaaactcctgaaggacaccaggcagctcactcaaatcgagtcccagcttcaaatcaaatcacaaggttcacgctttcgcgg

SEQ ID NO: 30351 - DNA, 280 bp, Glycine max
  Clone ID: 701062487H1
cacttgttttctgggaagcgttccaatggaaaaactgagagacgctaggacaggggatgctgtttaatgcattttagaggacacctgttggcatttttcagggctgccaaaaaaattgttatttaatgtaagtgttttgttggagtttaaggttctgtgctggcaacatagtttacttatacatctctgcattttattattgttatcaaacttgtcatctataagttgcaactttacagctttctttgaatcaaggaagctgctgtttgaattttatgac

SEQ ID NO: 30352 - DNA, 279 bp, Glycine max
  unsure (1)..(279): unsure at all n locations; Clone ID: 701062488H1
ccaagttcaaagatgaagatgatccacgttcttttcctctttgctcttgtctcgttcacttcccatgcttctgtcaatgatttctgtgtagcagacctaaaaggtccagatagcccttcaggctatcagtgcaagccacctaacacagtcacagtggatgactttgtgttctctggctttgtagctggaaacaccacaaacactttcaatgctggcattacctccgcntttgttactgattttccaggtgtgaaggtcntggtgtatcgtggcaggtta

SEQ ID NO: 30353 - DNA, 274 bp, Glycine max
  unsure (1)..(274): unsure at all n locations; Clone ID: 701062489H1
cgttgcttaaccccgnttaacacatcaggggcactagtcaaattccgatttaagtgcaccccgagatgtcctcangtaaaancngaaagacggttaacaatttagcatagatgggtcaaaacaagttaacctttccattttcgtagtgggattctgntctcgcttctccagtgtcatgaagnagagttcttcattatcatttgaggacttgggactncccaagtccnngggcaccnattacagagnnagaagcattgggagccanaagggtggt

SEQ ID NO: 30354 - DNA, 278 bp, Glycine max
  Clone ID: 701062490H1
gttgtcccaaagaaagagcatctttctcctttctttcatcaccgttggaagagactgagatgggttcaaaaaccaagacttttacctttgaggaggtggctaagcacaatcacaggaaggattgctggattatagtcaaagggaaggtgtatgatgtcaccccatttttggatgatcatccaggaggtgatgaagttttagtgactgcaacagagaggatgccaccactgattttgaagatattgggcacagtgattcagcaacagagatgatggaaa

SEQ ID NO: 30355 - DNA, 278 bp, Glycine max
  unsure (1)..(278): unsure at all n locations; Clone ID: 701062491H1
attacaaattacactctttgcctcgcaccttcaacttaaccttttctantcataatcttaacnacttgctagaancaagataanganagagaaaaagtgtgtgtgtgtgagagagagcaatggctggctcgtgggcacgccgttctctgattgttctggctatcatttccttcggatgtttatttgcaatttcccattgctaaggaggaagccacaaattggggacggtcatcgggattgatcttggaacgacctattcatgtgttggtgtttacaac

SEQ ID NO: 30356 - DNA, 275 bp, Glycine max
  Clone ID: 701062492H1
gccttttcaacatatccaaggacatatgaccttattcacgcccatggtgtctttagtctgtacaaggataaatgcaaggccgaagatatacttctggagatggaccggattttgcgaccagaaggtgctgtcatattccgcgacgaagtagatgtgctaattaaggtaaagaaaatagttggaggaatgagatgggacactaaaatggttgacatgaggatggtcctcttgttcctgagaaggtgcttgttgctgtcaagcagtattgggttact

SEQ ID NO: 30357 - DNA, 275 bp, Glycine max
  unsure (1)..(275): unsure at all n locations; Clone ID: 701062493H1
gtgttatttcttgggtcacacttataaggcgtgctttctaggtgttcatactttcccaattgtcactatatatgttggaaaaaactatctcatgatgatatgttacttttccacttggattgtggaantggaacgaacgccttcatagtggaagtataactaatttcatttgttaatcccactagataaatatttggggtgatattttcgaatatgatctctttctctcataaacatggctctattcatttaattagccatctcagtttcttata

SEQ ID NO: 30358 - DNA, 277 bp, Glycine max
  unsure (1)..(277): unsure at all n locations; Clone ID: 701062494H1
tcagcagtcgtcaganagactccataacccaaaaatgcctttcaagaggtacgttgagattggaagggttgctcagatcaactatggcaaagagtacgggcggctcgtgatcattgtcgatgtcattgaccagaatagggctcttgttgatgctcccgacatggtgaggtcccaagtgaacttcaagaggctctcgctcactgacatcaagattatattaagaggattcccaagaagaaggatctcattcaagccatggaggctgctgatgttaagc

SEQ ID NO: 30359 - DNA, 282 bp, Glycine max
  unsure (1)..(282): unsure at all n locations; Clone ID: 701062495H1
aaacagaaccaaacnancatctacnatnataanagaatnnctgtaaaccctagnnnacccaataatttgggggaactnaacccaatccccagaaaccanaancggcntcgcaatttaacgaaanccgaggaanngaaatcgtggggcacccttcaaaattcgagatttccccgacaaaatgtcccaatgaagccaatgtcgcatatancacagtgcccctcgaccccagggaagttcaagatggagnaagcttcgtantcaancgcgtgcggtggannnctt

SEQ ID NO: 30360 - DNA, 278 bp, Glycine max
  unsure (1)..(278): unsure at all n locations; Clone ID: 701062496H1
gttttgaggacagatcaattaactttgatcaggttgatatgtagggaaaactgcacttctttatataacagctcctgcctactgatgactgatgacttcgatcaagtcgatagacctaaggttttgctaactttattttggcgcgtantctacaacggagctatgaaaatcaaccaagaactttttattgtttactttggtgagtagaattctttcatgtagtattgtaattttgattaccaaaagattttcatcgatgctcacttcattgaaaaaaa

SEQ ID NO: 30361 - DNA, 274 bp, Glycine max
  unsure (1)..(274): unsure at all n locations; Clone ID: 701062501H1
ctcttttctgcatgtttgttctctcaacgactcctccgcgaaagagtattattcaatattttggntgggttgaatcccggggttgaagcgttgcagacatcacgggctattctaagagtgtctcgctccctcattcatgtccgatctgtacgacggaggacgggtagttgcgtaactgccgttaacccttcgccgcacggtgggcgtggtgctttgccttctgaaggtggtagcccttcagacttgctcttcctcgctggtggtggtttcttta

SEQ ID NO: 30362 - DNA, 271 bp, Glycine max
  unsure (1)..(271): unsure at all n locations; Clone ID: 701062502H1
tgagctataagctagtttatcgtgaggagaatatgaagttgtttgtnttctttgttgctgcagtagttttggtagcatggccatgccatggcgcaggctaccaaaggttccctctccgaatgaaaactggctatggtgagcgttcttcggaggtaaaatgcgcaagttttaggcttgctgtggaagcacacaacatccgagcncttaaaaccattcctgaagagtgcgtngaaccaaccaaaggactacattaatggcgaccatttagatc

SEQ ID NO: 30363 - DNA, 273 bp, Glycine max
  unsure (1)..(273): unsure at all n locations; Clone ID: 701062503H1
attaattgcaagaatggcacttcgttgcttggtgatgtccctttctgtnctcttcactcttggtcttggcgagagaaagccatgccagagacgaagatttttggcatgctgtttggccaaacactcccattccaagttcattgcgagatcttctaaagcctggccctgcaagtgttgaaatcnatgatcaccctatgcaaattgaagaaacacagtacccgaaaacttcttctataaagaagncccttcatccaggcaaaaccatgaaagtac

SEQ ID NO: 30364 - DNA, 253 bp, Glycine max
  unsure (1)..(253): unsure at all n locations; Clone ID: 701062504H1
cgacccattggcttaatttctcgcacctctcagagcacaaaactgcccaactgaacgagaaantagagctggtgttttgggaggagtagcaattcgacggttgaagatgcgaaggaaggcaccacactaagtaaggttgcgagaatggaaagcgttttacctcnnatgnnnagagaggntgggctggaaacagcaactttgcatggcttccgcgtncttggtgcatttagagacnatttccttttggccccat

SEQ ID NO: 30365 - DNA, 272 bp, Glycine max
  unsure (1)..(272): unsure at all n locations; Clone ID: 701062505H1
tcagccatggtatctgtttctctgctcttattcctatctttctttgccttctttgcaccctctgaatctcacgacaaagtctcgttggaattgtactacgaaagcttatgcccctacagcgccaacttcatcgtgaatcacctcccaaaaatcttcaccccagatcttgccccaatcgttcacctcaaactcgttccttggggcaatgccaaactccgtgccanngccacctttgactgcccagcatggggcatatgagtgctttgctgant

SEQ ID NO: 30366 - DNA, 271 bp, Glycine max
  unsure (1)..(271): unsure at all n locations; Clone ID: 701062506H1
ctttacaccccttttcctccattcccatgtgcaacctcagtagacccctcaaaatccaatcttggacagcaaggtggtgatgttggtgtttcagagngctctgattagcagtgtgcagttacatggtacagaggttccaagtggggtgggtganaagagtgagttttgggagcagccagatgggtcagggtacaagccatggtttgaattttcagtaaggagtatangaagggagactgaaggggttgtgaagaacaggaggaaggtantc

SEQ ID NO: 30367 - DNA, 266 bp, Glycine max
  Clone ID: 701062507H1
cctaaacccccatattgagctttctccctctctctccgtcttcgatgggcaacatctcttctgaaaactccgctcaatgtgttcaacagacaccacaatcacgtcgcattcttctccaatggcacaagtgcaagaagcagtgctccaatttcgcagaagaggagatcgcgtccattccccgtagtgtcaatggcatccacaccggttcaaattcctctcgaaaaaactgaatttcgtccaaaagcacggtcttccataatggttag

SEQ ID NO: 30368 - DNA, 237 bp, Glycine max
  Clone ID: 701062508H1
cggtgatgctgtggaggatcataaatcagagaagaagaaaaaaaagaagaaacaaaaagctgctgctgctgaaggtgatgacatggctgtagatacaaatggtgatgctgtggaggatcataaatcagagaagaagaaaaagaaagaaaagaggaaattggaacaggagatggaggtcgacgatcaggctgaagatgatggtgctaatggggtcacaagtgaacaagaaggaacagt

SEQ ID NO: 30369 - DNA, 269 bp, Glycine max
  unsure (1)..(269): unsure at all n locations; Clone ID: 701062509H1
ttcctgtcccttcatattcctcttctttatctatctantctctntgctcgttacagtttggcttcattattatanaaagggtctcaaggtcttttaattnttnttnaaaaaattaaaacttttgccaatttgtgaactgggtctgcttgattctattttgctgcttngttatgtatttnaatttgtttggtgtanngtgtatnaagctgaacatgaaaatatggtgntgttgcggattgctctttgttaattanaaccagttgaggtcc

SEQ ID NO: 30370 - DNA, 263 bp, Glycine max
  unsure (1)..(263): unsure at all n locations; Clone ID: 701062510H1
gcgaaagcaggacctttaagcttcctaatcccatgtactacattgagtagtaccttcacctctctcaacaatctagctagagtttgctcctatctatatgtaataaggtatgctgatatgcactattcaaataggagcattagctancgtttgttaatgtcactttatgttatgtgggtaagtcacctaagacactccacgtacctacttgttgtctcttacgcggctttaataaatcttctgcccttgttccatatttaaaa

SEQ ID NO: 30371 - DNA, 262 bp, Glycine max
  Clone ID: 701062512H1
gttcatttcttataacaactctcatattaagccactgttgaatgaaaaccttgggaatatgagaaggccttgcaaacattctaagaagaaacatgatctctttgaatgtctccctgacgatctccttgtccttattctttctaagctcagctccaccgcttcttctccttctgatttcatcaacatcatcttaacatgcaagaggttaaaccggttaggcctgcaccgtcttgtgttatccaaagctgcctctaaactattc

SEQ ID NO: 30372 - DNA, 261 bp, Glycine max
  unsure (1)..(261): unsure at all n locations; Clone ID: 701062513H1
gtgaggcttcttctacccagatttgtttcattttaaccaaagaagaatctctcacaaatggcgtcaagagcaattgttcaacaacaacaagccagaggtgaagcagtagtagggggaggaaaacagcagaagaagaacggtgttgcggatggnaggaaccgcaaggcattgggngacattgggaatttggccaatataagangtgccgttgaagtcaagccaaatcgccctatcacaaggagttttggtgcgcaattactt

SEQ ID NO: 30373 - DNA, 266 bp, Glycine max
  unsure (1)..(266): unsure at all n locations; Clone ID: 701062514H1
acagaactgagagtgagtgagagcagaagaaggaacgtagcaancaatgggtccagcggcaaagacgacgacgatgcgttcgatctctcaagaagcgttggcaagaactggtgaatgagaacatcgacgacctcggcatggaccccaccgaggccctccaagacgcaatccaaaccctcactctccaaggcgtcgatctctcaggcatcgtcacgtgcgtccccggagaaaccaaccccgtcatcgagtgcttggaccgcttaaga

SEQ ID NO: 30374 - DNA, 264 bp, Glycine max
  unsure (1)..(264): unsure at all n locations; Clone ID: 701062515H1
ttgtatactataatagcagaatcgtgagtaacagcagagcagaacaccgataaatcgctatgactgctcagacccaagaggagcttcttgcggccgaccttgagcaacaaaagatccatgatgatgagcctgtannnnnnnnnnnnnnnnnnnnnnnnnnnnnngacgacgatgaggatgacgacaatgttgaaggtgatgcatctggtaggtccaagcagaccagaagcgaaaagaagagtcgcaaggcaatgctcaaacttg

SEQ ID NO: 30375 - DNA, 267 bp, Glycine max
  unsure (1)..(267): unsure at all n locations; Clone ID: 701062516H1
aaaanaaaacagagtggggtgggaggcacacgcacaaacgcagagtcagaatctccattctccaatcggagacaaagcgagctcgaacgaacgaagtagagtagtgtgctacggaaaatgtggcggtgcattgctcgtggactccgtggacctgcttccaccagatccatctccaatcactcacttggatctcacttttatagatncttctctagtggggcgaactcttcgtacaccgtgggtggatcatacttatgatgctgttgc

SEQ ID NO: 30376 - DNA, 274 bp, Glycine max
  unsure (1)..(274): unsure at all n locations; Clone ID: 701062517H1
cctcattccatttccatcttctgccacctgtttctaactccccaacccaagaaatttccttttacccctttcccctctcctcttttcttattcatnaaaattcctctttggtgtcctctccctcggtcaactccgnttactataaatatgaccacnctttnctgcctactncttcaacnncaatactcacctntgaatggnttctaattctnctngnccaagtcccaacaaccaggntccacaancaaaatcaatncantctgggatcccangg

SEQ ID NO: 30377 - DNA, 272 bp, Glycine max
  unsure (1)..(272): unsure at all n locations; Clone ID: 701062518H1
ctagctagggaggacaggtagttggtgtgaggcaatgacgcggccnttcggtgtgaagggggggaggaagcgaaagcacgcggaacccaaatacgacgcccnnnnnnnnnnnnnnnnnnnnnnnnnnnnnnnnnnnnnnnnnnnnnnnnnnnnnnnnnnnnnnnnnnnnnnnnnnnnnnnnactccagcaccagcaccagaggatgatggattgagcggtatcccaattgcgcccatgcgaacaacactaacaaacccaacgtcacttcatt

SEQ ID NO: 30378 - DNA, 274 bp, Glycine max
  unsure (1)..(274): unsure at all n locations; Clone ID: 701062519H1
aaaagattaacaataaaagtgtgnngtactgttgatagcaaagatgttcgggatcttccgacaaggggcaaaagataaaggggacagtggtgtngatgccaaagaatgtgttggacntnaangccataancttcnancggtaaaggtggtgttattgnnacagccancggcatcttaggcnaatggggtcagttagntggtnggagtaattnatactgccattcntncttaggccgtaatgtcntccatgcaattgancccnncnagtnanagt

SEQ ID NO: 30379 - DNA, 264 bp, Glycine max
  Clone ID: 701062523H1
gaagaaccaacaagaggggtattgagattgagattcaagtaatggggaagagcaaggttcttgtggtggggggaactgggtacatagggaggaggatagtgagggcaagcctggcactgggccatgagacctatgtggttcagaggccagagttgagcctccagatagagaagctgcagaggctcctctccttcaagaagcaaggtgctcatctcattgaggcctctttcaatgatcacaagagccttgttgatgctgtgaagc

SEQ ID NO: 30380 - DNA, 129 bp, Glycine max
  Clone ID: 701062524H1
gccatatcatcattacctaaatttgagaaattaatgtatttcatttaagctttaaaacgaggagccatatgtatgtgtggaatgaactccatcactcttaaataaaaatcgttttgttcctttttttct

SEQ ID NO: 30381 - DNA, 264 bp, Glycine max
  unsure (1)..(264): unsure at all n locations; Clone ID: 701062525H1
cttcaattctctaacaggtgacctccctcagactatgagntcnctntcacgcataaccaccattcatctgcaaaataaccagtttacaggcactattgatgtccttgctaatctgcctctggataatctgtgtgtctctgttgtatcatataacatagctggaatatcctattttcataaagaaaaactaaagccaattntatttactatcttaaattattctcaggaatgtggaaaacaataattttactggatggataccgg

SEQ ID NO: 30382 - DNA, 199 bp, Glycine max
  unsure (1)..(199): unsure at all n locations; Clone ID: 701062527H1
tgaagccatcgatgctcagatctctccactncgccgccacccgcggcgcctctcatctcttccgccgtgggtacgcctccgagccggtgccggagcgcaaggtagccgttctcggcgccgccggcgggatcgggcagcctctctcccttctcatgaagctcaatcccctncgtttcgagcctctccctttacgatatcg

SEQ ID NO: 30383 - DNA, 261 bp, Glycine max
  Clone ID: 701062528H1
ctttgaaagggttcacgaagaaacaccaatccgctccgagagctagaagaaatcaacgatgcctcgctatgatgataaatatggtaatacccgcctctatgttggacgcttgtcttcgaggactcgttcccgtgacctggagcgtgtcttcagcagatatggaagagttcgaggcgtagatatgaagaatgatttcgcctttgttgaatttagtgatcctcgagatgctgatgatgctagatacaacctggatggtcgtga

SEQ ID NO: 30384 - DNA, 193 bp, Glycine max
  unsure (1)..(193): unsure at all n locations; Clone ID: 701062530H1
cacttttgcattttcttgtnaaaaaaaaaatcctcagaaccaaaatcggttttcttctgtctctgatctctcaaagcttcaaattctccttgtttggtttgtttgtgtgtttggagtatgatgtcgccgccggggtggtaacggaggaggaagggcggagaacgtgtcgtcgaacgtgggcgtccggttcttc

SEQ ID NO: 30385 - DNA, 270 bp, Glycine max
  unsure (1)..(270): unsure at all n locations; Clone ID: 701062532H1
gaattctccagagagaagaagaaacttaatcgatcatcacttcacttcactaatacatcatggcagacgagacccagaacaagtatgagagctctgaggttgaggtccaggatcgtggtgtttttgactttctcggtaagaaaaaggatgaagaagacaagcctcatcctcaggaggaggtcatcgccaccgagtttcaaaaagtcactgtctcagaccaaggagagaaccaagcacagcntcttagaaaagcttcaccgatctgacagc

SEQ ID NO: 30386 - DNA, 269 bp, Glycine max
  unsure (1)..(269): unsure at all n locations; Clone ID: 701062533H1
tttatatctcataatggagtatctacctggtggtgatatgatgacgttgctcatgcgaaaggatatactgacagaagatgaggccaggttctatgttggggagactgtcttagctatagagtcgattcataaacataattatattcatagagatatcaagcctgacaatttgctgctagntagaaatggtcacatgaaattatcagactttggattatgtaaaccactggactgcagtatcttcaggaaaaggacttctctattggtag

SEQ ID NO: 30387 - DNA, 268 bp, Glycine max
  unsure (1)..(268): unsure at all n locations; Clone ID: 701062534H1
ggttctagtaattcagtgctgctagaagatggaaactagtgaatggcatatcgagcgaagatctagcttcggctctgaatcccccttagcaagagaggcaggaaatgtgcctgaaantgggtcactctctattgtggtgcttggtgttctggtgatcttgctaagaagaagacatttcctgcacttttccacctatacctggaaggcatctaccaccagatgaagttcatattnntgggcaatgcaaggacaaaaatctctgatgatg

SEQ ID NO: 30388 - DNA, 268 bp, Glycine max
  unsure (1)..(268): unsure at all n locations; Clone ID: 701062535H1
gnaggtctccttcagctaccttctgacaaggctcttttgtctggccnctgtattccgccctctcgttgataaatatgcagcggacgaagatgccttctttgctgattacgctgaggctcaccaaaagctttccgagcttgggtttgctcgatgcctaagcaacgtttaggggattgttgaagaggcatggtgcccataatatttctctaaaaaattgtatggtcatggtttttaatgccatgtgggttccccagattttagatagttt

SEQ ID NO: 30389 - DNA, 272 bp, Glycine max
  unsure (1)..(272): unsure at all n locations; Clone ID: 701062536H1
caaaccttaccnagtattntcgtttctnaacccaattaattaagcacanaaggancataacatanctanancctcaatatcannantcntatggaggcagagcgngacaagtacaagatgatcanctttgaagaaaccgagttacgntcggcctcccactcagtgggaaacgagacgcncaaaaccacntggcagcantgggangagggtttnttcggnatactgccggggnttgnagcttaacctttcgtcaacctcanncngngcttctt

SEQ ID NO: 30390 - DNA, 265 bp, Glycine max
  Clone ID: 701062537H1
cgacactaagatcggagaaagaatggcgaaaacgacgtcgttgctgctctttacactgctcctcttcggaaccctagctctcatccaggcgaagaaatcgaaggaggatttgaaggacgtgacccacaaggtttactttgatgttgagattaatggaaaagaagcaggtcgtattgtaatgggtctttatgggaaggctgttccaaaaactgcagaaaacttccgagcatttgcacaggggaaaagggaactggtaaaagtggaa

SEQ ID NO: 30391 - DNA, 264 bp, Glycine max
  unsure (1)..(264): unsure at all n locations; Clone ID: 701062539H1
ctcaaatcactgaaccagccatggctaccttctccaaggaacgcgagaactttgtatacgttgccaagttagctgaacaagctgaacgctatgatgaaatggtggaggccatgaagaaggtggcgaactgggacgttgngttgagtgtggaagagaggaacctgttctctgttgggtacaagaatgtggtggggtcacggagagcttcatggagaatcttgtcatcgatagagcagaaagaggattcccaaagggatgagttgc

SEQ ID NO: 30392 - DNA, 271 bp, Glycine max
  unsure (1)..(271): unsure at all n locations; Clone ID: 701062540H1
cgtgtattgcnctanctctcccttcaagangcagatctgcgtcaagaccctgcancgncaagaccatcacccttgangtggaaagctctgacaccntcgacancgtcaaggccaagatccaggacnatgaaggaatccccncggnccagtcaangtctcattttcgncggtaaagcaacttgaggacggccggacccttgctggctacaacatncanaangagngtacncttctcctcggtnctncggctncgtggntggcttgncanant

SEQ ID NO: 30393 - DNA, 221 bp, Glycine max
  Clone ID: 701062541H1
caacctctgtctttcctttcctctaaagtattcttttacaatatataactgtaactacttatttcctaagaattataacttacgtaaaacatgttgggctatgcgaacccgtcggggaatctggctgtggatggagacatgacagtgttggaaagacagagggcgaggatgaagtggcaagaagagcaagagtacttttctggaaacagcttcaacggtgt

SEQ ID NO: 30394 - DNA, 260 bp, Glycine max
  Clone ID: 701062544H1
aaaaaatggcggtgcctcttctctcgaagaagatcgtgaagaagaggctgaagaagttcaagaggcctcaaagtgacaggaagatttctgtgaagacaaactggcgcagaccaaagggtatcgattcccgtgttaggagaaagttcaagggatgcactttgatgccgaacattggttatgcttcagacaagaagacccgccactatctcccgaatggtttcaagaaatttgttgttcacaatgtgaaggatttgggaact

SEQ ID NO: 30395 - DNA, 259 bp, Glycine max
  unsure (1)..(259): unsure at all n locations; Clone ID: 701062546H1
gggagaatcaattcctcatcgctgcaattcttctttcactctctagtttctcttctttctttcttccaacctcttctcttctatacccttcaganaagaaattaaaaaacgtagcttcagattattctagctcttcatttttccatgtncaatattatgctgtaaatttctcaaactcactgtttcagccacattttggtctaaagatccgtgctttgaccttggcaggttcagcttttgaaggggtggagttttcctt

SEQ ID NO: 30396 - DNA, 262 bp, Glycine max
  Clone ID: 701062547H1
ttccattgatttcttgcttctatatattacttgcttcttttcttgatcatgtcccttgctggtaaaatcagctctgaaattggtgttcaggcaaccgctgcaaagtggttcaacctcttcacaacacaacttcatcacgttcaaaatcttactgatagaattcatggaaccgagctgcatcatggtgaagactggcatcacaatgagtcggtcaagcactggacttataccatagatggcaaggttacaacttgcaaggaga

SEQ ID NO: 30397 - DNA, 267 bp, Glycine max
  unsure (1)..(267): unsure at all n locations; Clone ID: 701062548H1
tttcattccatggccgattcaacctcaagcgattcactctctttagacatcgattccttatctccttcacctcaggaacatatcatcagaacacgtcatggttccgtatctgttgctgtatatggngaccaggataagccagctcntatcacatacccagatttggctttaaattatgtctcctgctttcaggggttattantttgtcccgaggcatattaancttctgctccataatgtctgcatttatcatattaggnccaccng

SEQ ID NO: 30398 - DNA, 267 bp, Glycine max
  unsure (1)..(267): unsure at all n locations; Clone ID: 701062549H1
attcttttgttgcatgagactcattgtagtgttgatgtagtatagnatttgtctgcctgtttagtctgtatctgtnatgtttacgcttggttcagactcagatgtatactaacgtgcaacttatgctaatacanactttcatgtgtttaacgtggatganagtcaatggagcatctgacaacatcagacagctatcattgcttagggcttgtaatgacatcatttcctcgttcgcataanaaaaannnnnccnnnnngnnnnnnnnt

SEQ ID NO: 30399 - DNA, 272 bp, Glycine max
  unsure (1)..(272): unsure at all n locations; Clone ID: 701062550H1
ctaatcttgtaattttctgcgttgcttcgtggttaattcttcgtgntcttgtgatctttctgttggagtatttacaacactcctttgtaagtnntaactaaagaggctaattaattttcaattggnccacagcagatggctgaggagggtcanagggttactctaaatgtttatgactttagncaaggtcttgcacggcagttttcaatgtcctttttggggaaagctattgaaggcatatgggcacacaggagtngtggttatggtaatnt

SEQ ID NO: 30400 - DNA, 268 bp, Glycine max
  unsure (1)..(268): unsure at all n locations; Clone ID: 701062552H1
aggcaatgaatctgatgcaggcggttcgctacgacgcctacgggggangtcctgccggcctcaagcacgttgaagttgccgttcccagtccaaaggnaaatgaggttttaatcaaactggaagcagttagcattaaccctattgattggnagattcagaagggtcttctccgtccttnatttctccccagaacctttcccccacatancttgcaccgatgtggctggagaaatagttgagatcggaactccaagtcaaanttncaaag

SEQ ID NO: 30401 - DNA, 263 bp, Glycine max
  unsure (1)..(263): unsure at all n locations; Clone ID: 701062553H1
acaccttnaggnaagcatacaganaaattttcaagaaagagaagattggcaacattgaaacccttttgataggatcagcagcnggtgctatttcaagtagtgctacctttccgctcgangtggctcgcaaacacatgcaagtgggagccctagtggaagacaagtntncaaaaatgngattcatgcnttgcaagcattcttgancaagaagnntcccaagtattttataaagggttgggacctagctgcatgnagttggtgcc

SEQ ID NO: 30402 - DNA, 265 bp, Glycine max
  unsure (1)..(265): unsure at all n locations; Clone ID: 701062556H1
ctcgagcccagagacatccatcctcagtcattcgcaatggcccgacgactccttccactcacntccctccgncaccttctccatcgcngnctcgngtngcctcctctcctctgcactccccgttgctccccgcccctatcngcccctcaccgcccgcttcgccgtcgtccggtgcctctgcaaccgccccggagactcggcgtactcgcccctgaacacgggaaagccaacttcatcttgtcgtcgatcacggagcgccctccga

SEQ ID NO: 30403 - DNA, 263 bp, Glycine max
  unsure (1)..(263): unsure at all n locations; Clone ID: 701062557H1
gtttaaggnggcattggttagtttcaaganggcttgtnagttgcagcctgtggatcgtgannccctcattttagaacagggaactgtntgtatgttcttggcaggtacaaggangccaaggaggagttcctcttggctcttgagtctgctgaggctggagggaancaatgggcttacttgctaccccagatttatgtcaacctcggcatcgcactcgagggtgaaggnctggntntgagtncctgtnagtatnatagggnggg

SEQ ID NO: 30404 - DNA, 263 bp, Glycine max
  unsure (1)..(263): unsure at all n locations; Clone ID: 701062558H1
cgtgcctctagggttatcatatctccatttccatttcctctctctcagtttccaagaatcttaagctatgggaaagtcttnncccaaccgtgagcgctgattaccagaaggccgttgagaaggcgaagaagaagctcagaggcttcatcgctgagaagagatgagctcctctaatgctccgtttggcatggcactctgctggaacttacgacgtgagcttcgaagaccggtggtcccttcggaaccataaagcacccctccga

SEQ ID NO: 30405 - DNA, 256 bp, Glycine max
  unsure (1)..(256): unsure at all n locations; Clone ID: 701062559H1
acatggctgaacgcggaatatctgaagcattcaaagtcaagcaagctgtattgctatcttcaacagaggcagctganatgatccttagagttgatgaaatcatcacttgtgctccaaggaggagagangacagaatgtaaaatatgagggnccttctttggatgcttggggtgccatggcatnttcttgcgtagttttacgagtnctgtgatatttatatggtggttntgattggnagaactggttgtnatnntaa

SEQ ID NO: 30406 - DNA, 136 bp, Glycine max
  unsure (1)..(136): unsure at all n locations; Clone ID: 701062563H1
gagaatatgaagttgtttgtcttctntgtngctggagtagtnttggtagcatggccatgccatggcgcaggcnaccaaaggttccctctccgaatgaaaactggctatggtgagcgttcttcggaggtaaaatgcg

SEQ ID NO: 30407 - DNA, 272 bp, Glycine max
  unsure (1)..(272): unsure at all n locations; Clone ID: 701062565H1
cgttgagagaagccaagtgtgaagacagacagtgagaaatgatgatgaagcgtcggttccttttggttctcttggntctctatgtcacagtggagcagagtaagctactccaccacgtagaagccgatggtgggtttgtaaaaacaagaggagtgcagcttatgctgaatgggagtcctactatgctaatggctttaatgcctattggcctaatggtaccttgcctctgatcctttccccagagaaacaanncctcatcgggtatttcaacg

SEQ ID NO: 30408 - DNA, 266 bp, Glycine max
  unsure (1)..(266): unsure at all n locations; Clone ID: 701062566H1
agaaacagtgtgatgaaaatgaaggtccttgttttcttcgttgctacaattttngtagcatggcaatgccatgcgtacgatatgttccctctccgaatgaacactggctatggtgcccgtactccggaggtgaaatgcgcaagttggaggcttgctgtggaagcacacaacatctttggctttgagaccattcctgaagagtgcgttgaagcaacaaaggaatacatccatggcgaacaatatagatcagattccaaaacagttat

SEQ ID NO: 30409 - DNA, 258 bp, Glycine max
  unsure (1)..(258): unsure at all n locations; Clone ID: 701062568H1
ctcccagaggatctctggagatgctttganagatctgnacaagtcatttgtntangagtacccaattgtttcaattgntgatccatttgaccaggatgactgggancactatgctaanctaactgctgangttggagccaatgtacaaattgttggtgatgatctcttgggtaccaaccccaaganggttcagaaggcanttgatactnaagcatgcatgngcttctccttaaggtcnancccaaatngggtttgtnt

SEQ ID NO: 30410 - DNA, 236 bp, Glycine max
  unsure (1)..(236): unsure at all n locations; Clone ID: 701062569H1
cttaanaganccgaacncaacanaagangcntagagatanaatacaagaacaaactccgacatctctcgctttctnctactttcccctncggtttattcggaagnaagcnaggcttaaatatatagntncctntttccnntgcttcactgtntctcagttncntggntncgccttggatgaatctcaanctgaatcagtcctcnnnctcgtcgtatagggagtnantantcatcgg

SEQ ID NO: 30411 - DNA, 245 bp, Glycine max
  unsure (1)..(245): unsure at all n locations; Clone ID: 701062571H1
cacaaccaccgtttaaagcccataatcaccaattgccatggcaagctgcatagctcacgtgggggagaggcatatgcgatggatgaagcgggttttgacgagtacgatggagttgaagaggaaagcgatgacgaggatgatgcagagagtagcgtggatttgttgatcagattcttgcagagcatgtttaagaaggtgtctaagcgggcaaagaaagcatctcgctctgttttngccccacagtg

SEQ ID NO: 30412 - DNA, 263 bp, Glycine max
  unsure (1)..(263): unsure at all n locations; Clone ID: 701062572H1
ctcataattctcttctagttttctccactgggagatcgcctactatatatggagagttaagaaaacagaaacctttgttgactcctgatataacaataatgtctgtgggaactgagattacatatggtgaatccatggtacctgatnatggttggaaacagtatctagatcataagtggaatagggacatagttatggaggaaacagccaagtttcctgaactaactttgcagtcagaanacagaacaacggcctcacaaggt

SEQ ID NO: 30413 - DNA, 261 bp, Glycine max
  unsure (1)..(261): unsure at all n locations; Clone ID: 701062573H1
cggacaacctggaattcctacaatggctgaaacgctactgtgattctgtaaatggtgncattatgaatgagaactacaatcctgtagagcgtaggattaagggtggaaaggaccggaatgttaagagtctaaagagcttcaaaatcactgcaaacaaatactatgaatcattctggttcaggcgactcactcaggtccaagcaattgaggtcaagtggaggagctgacggggttaattcttcagcagagatacaagctttg

SEQ ID NO: 30414 - DNA, 259 bp, Glycine max
  unsure (1)..(259): unsure at all n locations; Clone ID: 701062574H1
caaacttcacagatacaaatgttgcctagcaattctaggttgttatcatgggagacctatgatgaagatgtatcttccctagccgaaagttccaagattacagcttctggactattagaacagatcagcactaccagagacactagtgactatctatggnctataaccagtgctgacataagttcatcagaatcctttcttagaggaaggaacaagcccagcattactgtggcattcttcaggccatgctgttcatgtg

SEQ ID NO: 30415 - DNA, 257 bp, Glycine max
  Clone ID: 701062575H1
actgaattccagaccaacttggtcccataccctagaatccatttcatgctttcctcctatgcaccagttatctctgctgagaaggcctaccatgaacagctctcagtggcagaaattaccaacagtgcttttgagccatcgtccatgatggccaagtgtcatcctcgtcacggaaagtacatggcgtgttgcctgatgtaccgtggtgatgttgtgcccaaagatgtaaacgctgctgttgccaccatcaagaccag

SEQ ID NO: 30416 - DNA, 257 bp, Glycine max
  unsure (1)..(257): unsure at all n locations; Clone ID: 701062577H1
ggagttaggttctgcacgctctncttccagcgagtgttctttcntcgtttcaacaccttaatttgcangacgctgcttntnaaganttgagaaatggcacaagaaacctttctattcacatctgaatctntaaacgagggtcaccccganaagctgtgcgancagatctctnatgcagtgctcgatgcgtgccttgaacaggacnctgacagcaaggttgcctgtgagacatgcaccaagaccaacatggcatggtc

SEQ ID NO: 30417 - DNA, 248 bp, Glycine max
  unsure (1)..(248): unsure at all n locations; Clone ID: 701062578H1
agcatagagtgagaagtgagaagagaaaaatggcaatctccatacccagtagacaanttttcatagatggagagtggaaagtccctcttctcaacaatcggtttccgatcatcaaccccgctactgaagacatcatagggcatattccagccgctantaaggaagatgttgaccttgcggtggntgctgttaaaagagcttttccccataacaaaggcaaagattggtctcagctctggctctgttcg

SEQ ID NO: 30418 - DNA, 264 bp, Glycine max
  unsure (1)..(264): unsure at all n locations; Clone ID: 701062579H1
gacaatctgcactgatccatacccacaagctacagccaaagagctagatgaccaagagaagccaagtgaaannnnnnnnnnnnnnnnnnnatccgatagtgcagaaaatggcgttgagcttctggtgtctgacaaagacgaagtaatgaccgaggctgatgtaggtgatgatatgaccattgggcatggaagcttttgaaggcgttaaatcatcagaaacaaattccgagctgaatgctaatagtggcataagctttatcgttt

SEQ ID NO: 30419 - DNA, 261 bp, Glycine max
  unsure (1)..(261): unsure at all n locations; Clone ID: 701062580H1
cgcgatcnnctnggagaccacngaggcgngagcaggacctnggagcttcctaatcccatgtacnacattgagtagtacntgacacctctcncaacantctagctngagtctgctcctatctatatgtaataaggtatggctgatangcatattcaantaggagcantagctatgtgngtnanngtcacntgatgccntgtgggtangtcacctaagacatccncgnncctaatgntgtcnntaacgcggntntaacnatct

SEQ ID NO: 30420 - DNA, 123 bp, Glycine max
  Clone ID: 701062581H1
cattaatcatacataaataaacaaatttgtctttagtgtacgtctcatagcagatttgattcttcaactttcatattattgtataatgctttgttgggtatataaataattttgtagttttga

SEQ ID NO: 30421 - DNA, 266 bp, Glycine max
  unsure (1)..(266): unsure at all n locations; Clone ID: 701062583H1
gttattcagtttttgtaagtnaaccttatctctcaagcttgtaacttttgtnctctcaagagacttggtattagaagggaaacagcatgtgctctatctcttcaaaacagacccttnatttggttcttcctcgtccatggccatctaaaagacaccnncanaaccacnggccccttcggttgggcatgctcaacagaagganggcacacttgaaagangcaagacaaaggaaaaggnntgtngtggtgaaatcagagattcagnng

SEQ ID NO: 30422 - DNA, 264 bp, Glycine max
  unsure (1)..(264): unsure at all n locations; Clone ID: 701062584H1
gnaatangtccctccttcctctgccttataattcttgtgacccttttngncggtagcattgaaagtgcaccagcaaacgtgaagccaagccattatgctgcacccttcaataggagcgttttgccttctggttttctatttggaataggntctgcagcttaccagatagaaggagnagnagctataganggcagangaccaagtatatgggacacttatactaaacagtaancagggaagttttgggatcnngtgatggnagtt

SEQ ID NO: 30423 - DNA, 262 bp, Glycine max
  unsure (1)..(262): unsure at all n locations; Clone ID: 701062585H1
ctcaccgattgcnagaatggaatttcgatgctcagtcatctcttttaccattctcttctctcttgctcttgcaggagagagccatgtccatgcatcgctacctgaggaagattattgggaagctgtttggccaaacactcccattcccactgcactgcgagagcttctaaagcctctccctgcaggtgttgaaatcnngaactccctaagcaaattgatgatacacagtacccaaaaacattcttctatanagaagacctnc

SEQ ID NO: 30424 - DNA, 260 bp, Glycine max
  unsure (1)..(260): unsure at all n locations; Clone ID: 701062587H1
tcagatgtcaganaagctgcccttcggngccttcttgagcttgcttgcaatactcaagatggcaaggatggcaatgaggaagacagtgagaagatgaagcaacttcttcaagaacgaataaacaatatcagtttaatgtcagctgaggaccttggtgtagtcagggaggagaggcaacttgtggactccctgtggagcacttgcttcaacgagccatcttctcttcgagagaaaggtcttcttgtgcttccaggtgaaga

SEQ ID NO: 30425 - DNA, 262 bp, Glycine max
  Clone ID: 701062588H1
cgatctgcttggagaccacagaggcgaaagcaggacctttaagcttcctaatcccatgtactacattgagtagtaccttcacctctctcaacaatctagctacgagtttgctcctatctatatgtaataaggtatgctgatatgcactattcaaataggagcattagctatgtttgttaatgtcactttatgttatcgtgggtaagtcacctaagacactccacgtacctactgttgtctcttacgcggctttaataaatct

SEQ ID NO: 30426 - DNA, 258 bp, Glycine max
  Clone ID: 701062589H1
cagagagacaaagaaaagaagcactttactcaattcaatttctttcgttcctctcactcacaaactcaaacacaacatgatgtgggaatgggacgattaccaagacaccatccccaaacacgacctaccccaacccgattcccacctcaaattcgatttcttctccgccctctccaggcccaaggattattacaagatactggaagtggattacgacgccacggatgacgctattcgctccattacattcgctcgcgc

SEQ ID NO: 30427 - DNA, 259 bp, Glycine max
  Clone ID: 701062590H1
aaccctacttctacttccctttgttctcaaaccttatcccttatcctcccaaaaccaaaccatgtctacctccgcagcttctctcgcactcccaaccctcactctccgaactcgacaacctctctgttctccccaatgcttctcctcgtccctctccctcacccctaactccaaacccatttccatttccgccgttttcctcaaaacaacgctgtcgtcgtcgtcggccgttgtcgctgtcgtctcgcttcgttcccca

SEQ ID NO: 30428 - DNA, 257 bp, Glycine max
  Clone ID: 701062591H1
cgctcgccttgcttcgccacacaacagcaactgcagcaatggctcccaaacgaggtggaaaggctccggctcttgccgctaagaagaagcctgagaaggtttcgaatccgttgttcgagaagcgtccaaagcagttcggaatcggaggggcgttgcctccgaagagagacttgactcggttcgtgaagtggccaaagaatgttcaaattcagaggaagaagaggattctgaagcagaggttgaaggttctccagctt

SEQ ID NO: 30429 - DNA, 257 bp, Glycine max
  Clone ID: 701062592H1
gttatggtgaaagtgaaaccacaagcaaagctgaaagagaagctattcagtgattttgattcagatcgtgtctgtgtctacaaccatgtacagcggctccagcgacggcgaaagccatgacgctcctcaaaatcagaggaaaattccgcctgcatcctccatgctatgggtccgcaatcttcgccgtttcatcggatccggcgccggtctcggatccgaagccctgatggagcttgaaactaagagaattttgctcg

SEQ ID NO: 30430 - DNA, 259 bp, Glycine max
  unsure (1)..(259): unsure at all n locations; Clone ID: 701062594H1
ggcgtaggagccatgcacatgaacatgaacaggcatggtggcaagttaggaggcatgtttcaagaaggcatgcacagtgaccaccatggtggcaganagttcccttttggtggtcatcatcatggtaataataacgcctctcaacatcattttccaaaccatggtgggcaccatgagtatttttcggaggaatccgaggagtacgaggagtcttatgcagaggagcatgttggtggagtcacggctaaggnggatgaaa

SEQ ID NO: 30431 - DNA, 258 bp, Glycine max
  Clone ID: 701062595H1
cttcatcttgttctatctgtgacgagcatcatggcctcaagagcagtgttattgttggctatgtgtgtgcttccggcgatggttgtggccattcgcccagcaaagaaccctttttgcgtgaagggtcgtgtctactgtgacccttgccgtgctggttttgagactcagctaacacctacattgctggtgctgagattatgttgcaatgcaagagcagggttagcaacgaggttgtgtacagaagaaggggtacaccga

SEQ ID NO: 30432 - DNA, 264 bp, Glycine max
  unsure (1)..(264): unsure at all n locations; Clone ID: 701062596H1
atcgtgagcnactcagcctgtgtttggtgggagggattattcagcttccctttttccttccctccacacaacnagagaaattnnaacgaaaatggctttnaaactgaaatcactacctctcctttgcnctcttcactccnnttcccgcnaaaannctaattgaacactntcaaancatgacttttctcgtcgcttcttcgaaccttccattcgtcccacctgtggcctatncggngnactcagngtcnanctttcatnggcatg

SEQ ID NO: 30433 - DNA, 284 bp, Glycine max
  unsure (1)..(284): unsure at all n locations; Clone ID: 701062601H1
gacatggctgaacgcggaatatctgaagcattcaaagtcaagcaagctgtattgctatcttcaacagaggcagctgagatgatccttagagttgatgaaatcatcacttgtnctccaaggaggagagaagacagaatgtaaaatatgagggtccttctttggatgcttggggtgccatggcattttcttgcgtagttttacgagttctgtgatatttatatggtggttgtgattggaagaatggttgtaatgtnaaaaaatgttagatccatttngattggttt

SEQ ID NO: 30434 - DNA, 283 bp, Glycine max
  Clone ID: 701062602H1
atccaagttcaaagatgaagatgatccacgttcttttcctctttgctcttgtctcgttcacttcccatgcttctgtcaatgatttctgtgtagcagacctaaaaggtccagatagcccttcaggctatcagtgcaagccacctaacacagtcacagtggatgactttgtgttctctggctttgtagctggaaacaccacaaacactttcaatgctgcattaacctccgcatttgttactgattttccaggtgtgaatggtcttggtgtatctgtgggcaggta

SEQ ID NO: 30435 - DNA, 281 bp, Glycine max
  Clone ID: 701062603H1
gctacttcctactccaaccgcacttctgctccgcaattatcatgggcaaggtcaagatcggaatcaacggatttggaagaattggccgtttggtagccagagtggctctgcagagagacgatgttgaactcgttgccgttaacgaccctttcatcaccaccgattacatgacatacatgtttaaatacgacagtgttcatggacactggaagcatcacgatgtcaccgttaaggacgagaagacccttctcttcggtgacaagccagtcactatttttgga

SEQ ID NO: 30436 - DNA, 282 bp, Glycine max
  unsure (1)..(282): unsure at all n locations; Clone ID: 701062604H1
ctctgcattattctcttcccttttctatctccctctgcaaaaacgaagtaaatgggtcggcttaatctcctacttgtgtggtcactctcttnaacacttttccttaattatctacacccaacctctgcccagctcagtccaaaccactatgctaacatatgccccaaccttgaaagcatcgttagacaagccgttactaataagttccaacaaacctttgtcaccgtcccagccacccttcgcctattctttcacgattgctttgtccagggttgtgatgct

SEQ ID NO: 30437 - DNA, 282 bp, Glycine max
  unsure (1)..(282): unsure at all n locations; Clone ID: 701062605H1
caatagttgatgataatgactcattattggatatatactgtcggagtgacataacagctttggcaaagaacagagcatatacacatattaatcttgacgaaatgactgttcatcaggctttgcagttgggccaggacgcatatagtccctatgagcttagaagtcaaagatgtcagatgtgtttgcnttctgatcctctgcataaagtgatggaacgcttggcaaatccaggtgtcaggcggcttgtcatcgtggaagctggcagcaagcgtgtagaaggca

SEQ ID NO: 30438 - DNA, 281 bp, Glycine max
  unsure (1)..(281): unsure at all n locations; Clone ID: 701062606H1
gtgagctataagctagtttatcgtgaggagaatatgaagttgtttgttttctttgttgctgcagtagttttggtagcatggccatgccatggcgcaggctaccaaaggttccctctccgaatgaaaactggctatggtgagcgttcttcggaggtaaaatgcgcaagttttaggcttgctgtggaagcacacaacatccgagtcttaaaaccattcctgaagagtncgttgaaccaacaaaggactacattaatggcgaacaatttagatcagactctaaa

SEQ ID NO: 30439 - DNA, 283 bp, Glycine max
  Clone ID: 701062607H1
gcaatgttacggggtcaactacaattagaatgagtcatccttcagtctcattccgattggcactattcctctcattttctcttacggcatcatcgtccttgcctcccttaccggttttttcgaagcgttacgctccatcatcttcacttatccccaaagccactccctctgacttattgtctctgttgggttccaaacctcagtcctcagccgtgaatcccgaggtagcgcgcgacctcaagtcatgcttcaaattcctcgtccctttctctcccgtgcatcc

SEQ ID NO: 30440 - DNA, 284 bp, Glycine max
  unsure (1)..(284): unsure at all n locations; Clone ID: 701062608H1
atcaatggcgacaaaggnaggcaaagccataggcatcgatctcggcacgacctacagctnccgtgggcgtgtggcaaaacgaccgcgtcgagatcatccccaacgaccaaggcaaccgaaccactccctcttatgtagncttcaccgacaccgagaggctcatcgganacgcggcgaagaaccaagtcgccatgaaccccgcagaacaccgtcttcgacgccaagcgtttaatcggtcgnaattctcagactcttcagtncaaaacgacaggagntgtggcggt

SEQ ID NO: 30441 - DNA, 286 bp, Glycine max
  unsure (1)..(286): unsure at all n locations; Clone ID: 701062609H1
ctactttgaagcatttctttgtactccttcacaaaaccattataaatggctttccttgcgatctaccttggcaacctcaatggttcttttagcaatgctatccattgcctccgcaactgactattatggatatgggccancaccaaagctgagaaccccaaacccaaaacngntccacnaatttgaccgacaaaccaganctancagaaccagnnttattaatgcagtgccccaatccaaanggaaacgatggaactanatctgntnccacaatcatggtgtncaa

SEQ ID NO: 30442 - DNA, 280 bp, Glycine max
  unsure (1)..(280): unsure at all n locations; Clone ID: 701062610H1
ctgtagcgggcgacactaagatcggagaaagaatggcgaaaacgacgtcgttgctgctctttacactgctcctcttgcggaaccctagctctcatccaggcgaagaaatcgaaggaggatttgaaggaggtgacccacaaggtttactttgatgttgagattaatggaaaagaagcaggtcgtattgtaatgggtctttatgggaaggctgttccanaaactgcagaaaattccgagcactttggcacaggggaaaagggaatggtaaaagtggaaagcc

SEQ ID NO: 30443 - DNA, 276 bp, Glycine max
  unsure (1)..(276): unsure at all n locations; Clone ID: 701062611H1
actctataattacctagctaggtgtgttgtattaattgcaattcaagatgctaattcggatggcaattgaggcattcagcaacgaggttagcgagggtgcagacgaggatggtgacaacatacaagtcgtgatcaaccaatgacaattgcaagtcttgnatatatgacttgtttgatcatttgggcaactgaagatcctttgggcatgacaccctttaggaacgggatgacatagatatgatccttgctccttatacccttattttcccgagaaaa

SEQ ID NO: 30444 - DNA, 141 bp, Glycine max
  unsure (1)..(141): unsure at all n locations; Clone ID: 701062612H1
aagtgcttctctcctctgtctttttctctctcttgctatccttttggctagtngcactgctgcaagtgcaacttccaagaagcgcagtgccaagccaccatgtttcaacattcaacagaagcctttttccttcnacttttg

SEQ ID NO: 30445 - DNA, 279 bp, Glycine max
  Clone ID: 701062613H1
aaacaaatcaaagccatggccacctccaacttctctattgttctctccgtctccctagccttctttttggtgctacttaccaaggcacactcgaccgataccgtttctttcaccttcaacaagttcaacccagtccaaccaaacattatgctccaaaaagatgctagtatttcatcctctggggtgttacaactcaccaaagttggcagcaaggcgtgcccacctcgggatctctcggtcgtgcctttacgctgccccaatccagatttgggacagcga

SEQ ID NO: 30446 - DNA, 280 bp, Glycine max
  unsure (1)..(280): unsure at all n locations; Clone ID: 701062614H1
gtttgggtctctttcgttcccccaatgagtcactgagtgcagtcctgtgtgattggctcatcttttgtcttttctcggctctgataaaaccgagaattcgcaaaactctttgctctggttcagttctgtcgtgttgcaagttgcaactgaaccaatcaacaactttcttgtattccaaattatcttcaccattacaatcctcaaagtcaaaaagtgaanaccttaacatanaacaaaacaccatggtaatgtgggtattggggtatgggttctttgatct

SEQ ID NO: 30447 - DNA, 282 bp, Glycine max
  Clone ID: 701062615H1
aaactagcaagacccctgtggtttattcagaacaatgctctattggtagggatattaattctactccgagttgccatcttgagagatagggaaaaggatcgcagtgatccagattatgatcgtaactatgaaaggtatgctaggagtattccaacttcttctgttaacttgatgccttttaatttgcaacaagttcgacatccatttgtgcagtatgataatgctttaatcagttgagtcagatgtcacaaaatcaagcttcacttgggctatggacctcaa

SEQ ID NO: 30448 - DNA, 284 bp, Glycine max
  unsure (1)..(284): unsure at all n locations; Clone ID: 701062616H1
cattcttacactttggatcaccagcaggaagagaagttgtttttagatatctcttctggactcactgcagcttactcanttacatganttgctatataaaaagaattggtctgatcatataactaattgtttctctaattatgcnggttgctatgatatngatactgtacaanattacaacgagctctctacaaagattcagggcatgtgcaaatctatcagagtgacactagatcaacatattctcagggaggaacttgagtcatggccantgtntganagac

SEQ ID NO: 30449 - DNA, 141 bp, Glycine max
  Clone ID: 701062617H1
cgatcatcaagcctaatagagggctaatccttcacttgtttgttttgtggtgtattattacattttgcaccatgccttctctcttcgctagaaaccagaggttctcattggctactctcctgcttcttctggaactattga

SEQ ID NO: 30450 - DNA, 112 bp, Glycine max
  unsure (1)..(112): unsure at all n locations; Clone ID: 701062618H1
ccanaatntggntactttttggagttgagagcctnatttttggncaattttntntnaagcttgaattaatgttttaccttaacacaccaaaaaanacagaannacananaaa

SEQ ID NO: 30451 - DNA, 281 bp, Glycine max
  unsure (1)..(281): unsure at all n locations; Clone ID: 701062619H1
gtgtttttttggctcctcaatttaagttagttgtcacaaaattggcccagcatgaatgcccaactgacaaggggttattcttcgtaccttccaaaaattttgtatttttnnntttttacaaaaatccctttnatgactaatttcngttgngtattnganananggatactaatttcnatttcggtgaanggtatttttcataananaagattacaaaattangagnactaantcatngtgtttttaaaanangngttgttngtattttttaaagagaatnt

SEQ ID NO: 30452 - DNA, 281 bp, Glycine max
  unsure (1)..(281): unsure at all n locations; Clone ID: 701062620H1
tttcgggaganaaagcaatccactcagagagctagaagaattcaacaatgcctcgctatgatgataaatacggcaatacccgcctctatgtgggacacttgtcttcgaggactcgttcccgtgatctggagcgtgcctttagcagatatggaagagtttcgaggtgtggatatgaagaatgatttcgcttttgttgattttagtgatcctcgagangctgatgatgcaagatataacctggatggtcgggatgttgatggaagtcggattattgtggaatt

SEQ ID NO: 30453 - DNA, 282 bp, Glycine max
  unsure (1)..(282): unsure at all n locations; Clone ID: 701062621H1
ctattggctttggagcccctccttctccacttccgtttcatcttcgcctggcttcctctccttctcctttggcctncccaataatccacaaattccaaaacgcaggcaagtcagtgataacaatctgttcaaagaaaaatgcaaaatcaagggtggtcantctctgctctgcacctgtgcaagttgatatgcaggagcaggaggttagtgatattactttgagagagagaagtgtttcggttgtcctattggctggagggcagggcaagaggatgggagcta

SEQ ID NO: 30454 - DNA, 283 bp, Glycine max
  unsure (1)..(283): unsure at all n locations; Clone ID: 701062622H1
aagaaccttacaaagggcttttgaattttcgtgttttgatcagaatcagaggaaaaaatcacataatttcgaattcaaaatttgaattnnccgtgtataaaacgaagagaagagaatggaatcggaggatttggtgaagcaggaattggaggaattgcagaaacaattggggaagaagctaaaatttgaagcctctatttcgtctctaaaatctcttctccaacgcacttacccatcagcttcccccagcgcttcgcaaatcctttatttggtaatatgccgg

SEQ ID NO: 30455 - DNA, 114 bp, Glycine max
  unsure (1)..(114): unsure at all n locations; Clone ID: 701062623H1
cttaaatggccaaaaagaagagctggtttagtctggtgaagaggctctttatatgggacacacattccacacaanatanganntnggaaaagaaggaaatggatatttggaagg

SEQ ID NO: 30456 - DNA, 282 bp, Glycine max
  unsure (1)..(282): unsure at all n locations; Clone ID: 701062624H1
gtggtggccaaggaggtggggttggatagccgtcagcttcttattaaatcaaatcccggggaagttgtgaancctgattcatacaaggctataaatgatgagggaatgcccatgtatcagaggccattcatgaaggggaaactttacattcacttcactgtgnagtttccagattctctaaaccctgatcaagttaaggccttggaggctgttctgccaccaaagccttcttcacaattgacagacatggagctggatgaatgtgaggaaactacactccat

SEQ ID NO: 30457 - DNA, 286 bp, Glycine max
  unsure (1)..(286): unsure at all n locations; Clone ID: 701062625H1
ctttctctctcttcaattcagcttcttcagnttcagcgaaatccangttctaaccgtagatcgtgccttttcttttgtgcctgagaagccacttctnnnnnnnnnnnnnnnnnnnnnnnnnnnnnnnaatttnattcgattcgcttgctggaaaattctntgagtgagggagaggatgtctggtggcacacagaagagtctgagaaaagcacttggaccccttaaggncaccancaacagttctcgttggcnaaagggtccaanagtgattananggatttgntct

SEQ ID NO: 30458 - DNA, 276 bp, Glycine max
  unsure (1)..(276): unsure at all n locations; Clone ID: 701062626H1
tgccgattctccaggacaattcccttcacccaacctaattggnacttgcaattagtgtagaagatgagtacgttggatgcaacaagggctgaacttggtcttcttgttttatatttgggcaaggctgaagcaagggacaaaatatgcagggcaatacaatatggctccaaatttttgagtaacggggaacctggtactgctcagaatgtcgacaaaacaaccagcttggcacgaaaagtcttccgtctttaagtttggcaatgactacatgcnttg

SEQ ID NO: 30459 - DNA, 285 bp, Glycine max
  unsure (1)..(285): unsure at all n locations; Clone ID: 701062627H1
cttttagcaagttaacaacacttttgtcttcgttccattatctanttctcaattctcttcaccctttgcctctgaaagaaatgggtagtcttgaagcggaaagaacaacagtaggattggcagcaagagacccttcagggattctctccccatacacctacaatctaaganacacaggccctgatgatgtttacattanagttcactactgtggaatttgccattctgatctcccaccagattaaaaaatgatcttgggcatgtccaactatccccagggtcccc

SEQ ID NO: 30460 - DNA, 279 bp, Glycine max
  unsure (1)..(279): unsure at all n locations; Clone ID: 701062630H1
taaatttaaaattgcatttattgttgtagtgtctatngttnctttgcctaaattgtgatcttgaaatgttgttatgcgcattacttggccaganactacattggtgactgttgcaaacttgtgacggcacttcaaaggcaggttgtaatatgtatatttggactaagcacattgttaattttgttatagtcaatgaccaacattgttgtcaaaaaaaaaanaannaaaaaaaaggggngcccccccgactagtggccccnnccnccngggantaaatcc

SEQ ID NO: 30461 - DNA, 281 bp, Glycine max
  unsure (1)..(281): unsure at all n locations; Clone ID: 701062631H1
gatcggtgttcacttgatctcatcataatcgtcagcgtcaattgaagaagatgccgatcagaaacatcgccgtcggaaggcctgaagaggcgactcaccccgacacgttgaaggcggntttggctgagttcatctcaaccttcatcttcgtgttcgccggctcaggctccggcatcggctacaacaagctcancgacaacggcgctgccanccctgccggcctcatctccgcctccatcgcccatgcattcgccctcttcgtcgccgtctccgtcgngcca

SEQ ID NO: 30462 - DNA, 283 bp, Glycine max
  unsure (1)..(283): unsure at all n locations; Clone ID: 701062632H1
caggcccgctccattaggacaaaccttacagcaagtggaccgaggccaaacccgcaaggatctcaccattacggtatgataaacacgacaaagacgatcatattggcgagttcggctggtcaagtaaatgggaagcanagatacgcaattaacagcgtgtcttatgttgcccnagacacccctcttaagctcgccgattacttcaaaatctccggtgttttccgccccggaagcatatctgacanatccactggtggcggcatttgactngacantctgnnnc

SEQ ID NO: 30463 - DNA, 252 bp, Glycine max
  unsure (1)..(252): unsure at all n locations; Clone ID: 701062636H1
atgttgggtgttataaggcacaagantattcgccatgccttctccgcaataagacacttgtcttctgcagctaaagagattactgtcagggaggctctgaactccgcactcgatgaggaaatgtcagctgatcctaaagtgttcttgatgggtgaagaggttggggaatatcagggtgcatacaacatatccaaggggctgctcgaaaagtttggccccgagagggttcttgatactccaatcactgaggct

SEQ ID NO: 30464 - DNA, 280 bp, Glycine max
  unsure (1)..(280): unsure at all n locations; Clone ID: 701062637H1
cacgaatttcattgcagagtgttattttgagtatcagcatcaatggctccaattgcagtgggaaacgtgattccacacggcattttggctnacttggatgaagaaaacaaaccccaaactgtctccattcactctctcgccaccggcaagaaagtcatcatctttggggttcccggtgccttcactcctacttgcagcttgaagcacgttcctggcttcattgagnnagcagaagagctgaaagggaagggtgtggacganataatcngtatcagtgtga

SEQ ID NO: 30465 - DNA, 280 bp, Glycine max
  unsure (1)..(280): unsure at all n locations; Clone ID: 701062638H1
ctcattaacagctaaaggttcattccatgtcgctgagtatattaggaagagcaganaccttttatggttgaacctttacatgnntgacattggngatgagggagccgaaaaanttgcagttgctttaaagganaatcggtcaatatcaacgttgganctnggggganatancattcacgttgatggcgttaatgccattgnccaagttttaannagataacttagnnattaccactaacttagttataatcccattggaccagatggngccaaggcttgg

SEQ ID NO: 30466 - DNA, 281 bp, Glycine max
  unsure (1)..(281): unsure at all n locations; Clone ID: 701062639H1
ctcctctgcggtttccccttcttgttcttcttcacagaaatggaggtagcagtggccaaagcgttgaaaccgagtttaaggagagagttcatcgttcagcaaatgctctgcgaggatattttcagcctgaacgccaacaccgtcgccgccggcgaagatttctccgtcgacgacctatttgacttctctaacggctctcttcacaacgaacaacancaagaatacgacgaagggaaacaaagtttatcggcttcagaggaccgcggagaagacgattncnc

SEQ ID NO: 30467 - DNA, 277 bp, Glycine max
  Clone ID: 701062641H1
aaatattccatcgtcccatcctgccggtttgccgtagctggaacccggaaaacacacccggagccaccgtgaatgacgaccgttttgaggccaccgattgggttgcgcttcctccaaccaccacagctttccccttctcccacatcgtgtgtttctttctccctctcactcaagttcccagaatcaactctaattactcctctttcgaagttagagacgttactatcaacccccggggactcagcttagacttctgaattcagttagtttttcactt

SEQ ID NO: 30468 - DNA, 277 bp, Glycine max
  unsure (1)..(277): unsure at all n locations; Clone ID: 701062643H1
catagcagcgatgggaatcgatcttaaggctgggggtaagagcaaaaagaccaaaagaacagcaccaaaatccaatgacatctacctcaaattacttgtcaagctttatcggttccttgttcgaaggactggcagcaatttcaatgctgttatactcaagcgcttgttcatgagcaaggttaacaagcctccaatttctttgncaaggttaattaagtatacaaaggggaaggangataaaattgcngnaatagtggggattgnaactgatgatatc

SEQ ID NO: 30469 - DNA, 264 bp, Glycine max
  unsure (1)..(264): unsure at all n locations; Clone ID: 701062645H1
agactttaaacaaaatggacatactgngactttanncaaaatggacatacagcgacaagttgattacactggatatacacttcctttggatacacattgcgactctcctcgtcaganctctttcanaggcttattgacaactacgaattctangcactaatgtgaattgcagggagaaagcttaagaatagncaaaaggatatatgcacgcacaaaaaatggctaatncttccattngaatacccccatgaaatgggtttcgga

SEQ ID NO: 30470 - DNA, 223 bp, Glycine max
  unsure (1)..(223): unsure at all n locations; Clone ID: 701062646H1
gagaaagaaaagaatggcaaagttaataaaattctttgagttgaacacaggggccaagattccttctgttgggttaggcacttggcaagctgagcctggtgttgtagccaaagctgtcaccacagccattctggttggatacaggcatattgattgtgctcaagcgtataacaatcaagcagagattggttctgctcttaagangctttttgatgatgggtgg

SEQ ID NO: 30471 - DNA, 282 bp, Glycine max
  Clone ID: 701062648H1
aaaacaacataacatcctcaagcctttgaacatcgttttgcagccatggaaacaggcatatcatgctacactcgcgggcctttcctgcctagtgtttcttccaagcactctccaccctccatctctccatcttttggcttgaggagtctgaaatcgagctctttatttggagaatctctaagagtggcatccaaatcaacactaaaggtttcaaagacaaagaatacttcactcgtgaccagatgtgaaattggtgacagtctggaagaattcctcacaaaa

SEQ ID NO: 30472 - DNA, 279 bp, Glycine max
  unsure (1)..(279): unsure at all n locations; Clone ID: 701062649H1
ctcgtgagtncaagcncggcgtctccacaagacctcccagtgctngtgcatctgtttntggcgtttcnnccgnatccangncgttgtcnnangncacgtnagggaacagtgngccatccntnctgctgctagtgnccagggcacttgtntgactctcggagggtngccngaagagggattttcaggnttggtgcnganganagtcangaggagtctgtnagggatcattgagtaggggttggtcccggacgatgnngatgtacttgtttggcggnccct

SEQ ID NO: 30473 - DNA, 280 bp, Glycine max
  unsure (1)..(280): unsure at all n locations; Clone ID: 701062650H1
ctggtttatagatctttgcgaaggaggttnacagcgctcaaccaaagatgcagaacgaggaaggacagatcactgagctttacattcctaggaagtgctccgccacaaacagattgattaccgctaaggaccatgcttcggttcagatcaacattgggcatgtggatgagaatggcgtctacaatggccatttctccacttttgccctctgcggattcatccgtgctcagggtgatgctgacagtgctctagaccgcttgtggcagaagaagaaagttga

SEQ ID NO: 30474 - DNA, 279 bp, Glycine max
  Clone ID: 701062652H1
gcttcttataacaagtgtgttctcatcttcaaccgtcacctgaatttcagacttggagagaccaggaacatattattatactagtcatcataaaatgaaaattttgcttgctttgtagtttatccagggaatggtatataaatagataaggctctctatctagctgtcttaagtgttgtgccatccacatcttgtctttattttctatttatgtcacctgaacactatcataatgtactggatttccaagaaaatgttatcagttaaatttgaatgcat

SEQ ID NO: 30475 - DNA, 281 bp, Glycine max
  unsure (1)..(281): unsure at all n locations; Clone ID: 701062653H1
attttagagcagcacttgttgctgccatctcaggaagattgttgcacaatanttaaatggaattttggtgaagtgttgctaatttagtgtcaattgtttaagtattccataaaatagagatcattctttagagcaaggggtctctctatgtaaatacaacatggaaggctgggacatatttgatccttaaagtggaaataaagttccactaaggatgacatgttgagcctgattaaacaacagaaaatcaagctctgcaccaccctctgcctcatcatgga

SEQ ID NO: 30476 - DNA, 108 bp, Glycine max
  unsure (1)..(108): unsure at all n locations; Clone ID: 701062654H1
ctgaaccagcaccatgccctcgtcgtcctctctgccgtccgccgtcttcaccagctatcgccgtcgatcaccccacagnaaannaganccnggctgntggagaccaca

SEQ ID NO: 30477 - DNA, 279 bp, Glycine max
  unsure (1)..(279): unsure at all n locations; Clone ID: 701062655H1
tggagaaatagttgagatcggaactcaagtcaaagatttcaaagttggcgaccaagtccttgctaaactcactcatcaatnacggaggtgggtttgccgagtttgctgtggctagtgagagcttaacagcagccagaccatctgaggtctcagccgctgaagctgcagcattgccaatcgccgggcttacagctcgtgatgccctcactcaaattgcaggagtcaagcttgatgggatggccagctcaagaacattttagtaatgctgcttcagggggt

SEQ ID NO: 30478 - DNA, 274 bp, Glycine max
  unsure (1)..(274): unsure at all n locations; Clone ID: 701062657H1
agagtttgttgtgagctataagctagtttatcgtgaggagaatatgaagttgtttgttttctttgttgctgcagtagttttggtagcatggccatgccatggcgcaggctaccaaaggttccctctccgaatgaaaactggctatggtgagcgttcttcggaggtaaaatgcgcaagttttaggcttgctgtggaagcacacaacatccgagcnnttaaaaccattccctgaagagtgcgttgaaccaccaaggatacattatggcgaacatta

SEQ ID NO: 30479 - DNA, 276 bp, Glycine max
  unsure (1)..(276): unsure at all n locations; Clone ID: 701062658H1
gggctaatatatgtaaatatgctgtttatgtattgtttagcttctcatctcaatttgtatctattatttttactttaactagtgatgatgggaactaaactctacatgattgtcattataatgtgttgtgtacatattcggatganaaattttgttcacttcccaagtccaacatgacgacaatgaaagaactttagcnacggaaaanccannananaaaaaanggggnncccccnnantngggnccntctncacccgggaattttcccggncggg

SEQ ID NO: 30480 - DNA, 277 bp, Glycine max
  unsure (1)..(277): unsure at all n locations; Clone ID: 701062659H1
acaagatggcttcttttcatatccaatattcattccttgtgcttgtgcttgctatggtgatcacattgatgaaccctaccaatgcaaccctctctccccatttctatgataaagtttgccctcaggcattgccagttataaagtcagtggttcaacgagcaattatccgtgagcgacgcatcggagcatctcttctgcgcttgcatttccatgattgtntcgtaaatgggtgtgatggatcaatattgctagatgacacccgnaacttcactgggcg

SEQ ID NO: 30481 - DNA, 280 bp, Glycine max
  unsure (1)..(280): unsure at all n locations; Clone ID: 701062660H1
atttccaaaataaaaagacttccttttttgcaattgtcatttgtcnccaaacaattgttgttagctctgcacaagcaagcttcagcaacgacaatgaaggtcaganctagatgaagaaaccaatctcttttataatttcctccctttcatccactaatcaatgtttctaattgagtgtaattttctcagggatagccttacactgttttgtttccactagaatcttgtattcaactatntccgttcatgttttaaatgtagaagtnatnaactattgggt

SEQ ID NO: 30482 - DNA, 276 bp, Glycine max
  unsure (1)..(276): unsure at all n locations; Clone ID: 701062661H1
gcagaacaagatcctgaaggtgatcaggaagaatcttgtgaagaagtgcattgagatgttcaatgaaattgcggagaacaaggaagactacaacaagttctatgatgctttttcgaagaatttgaagttgggtatccacgaggatagccagaacaggtccaagttggctgatttgctcagataccacacaacatacgantngatcagcaattggacctgttctgggctatntcgtggataccnantcaaattcttcgaaaaaanatcatagaattg

SEQ ID NO: 30483 - DNA, 280 bp, Glycine max
  Clone ID: 701062663H1
gttgatgggtcggcgaaagaacaacagcaacaacaatcagtgctcctcaagcaaggaagacgctgacatgaatagcaaccaccttcggtttgaagaagctgacgaggctgtcgacgagagttccaacctcgaccaatccatgtgcgacatcgaagaatccgatgataaaaccagcgccgactattacttcgattcctactctcattttggaattcacgaagaaatgttgaaggacagtgtgagaaccaagacatatcaaaatgttatttatcagaacaaa

SEQ ID NO: 30484 - DNA, 283 bp, Glycine max
  unsure (1)..(283): unsure at all n locations; Clone ID: 701062664H1
gatcgagataactagaaacagtgtgatgaaaatgaaggtccttgttttcttcgttgctacaattttggtagcatggcaatgccatgcgtacgatatgttccctctccgaatgaacactggctatggtgcccgtactccggaggtgaaatgcgcaagttggaggcttgctgtggaagcacacaacatctttggctttgagaccattcctgaanagtgcgttgaagcaacaaaggaatacatccatgggcgaacaatatagatcagactccaaaacagttaacca

SEQ ID NO: 30485 - DNA, 280 bp, Glycine max
  unsure (1)..(280): unsure at all n locations; Clone ID: 701062665H1
gcccgagggaaaaagagctattgaacttgttgcagggaaagagagtgcacttncacaggtagtgattactacaatcggcaagacttatgacctcactttcgccgtgggtgatgccaacaatgaatgcgaanttccatgatggtagaagcatttgctggcgcaaacactgtccaagttccatatcaatctaagggtaaaggnggttttgtcagaggcaagcttcggttcaaggccgtctcaacacgtactcgtcttaggttcctaagcacattttacacca

SEQ ID NO: 30486 - DNA, 278 bp, Glycine max
  unsure (1)..(278): unsure at all n locations; Clone ID: 701062667H1
ctacatccctgggctctgttccgtcgatgacgatggcgtttagnngngcgaaaccctgacctccgctttctcattcttctctctctcttgtccatcacttccgccaagntcttcttcnaggagcgtttcgatgacggatggggaaatcgttgggctaaatcagattggaaaaaagatgagaacctggctggggagtggaaccacacctctggccaatggaatggagacgctaacgacaaaggtattcaaaccagtgaggattacagattctacgctat

SEQ ID NO: 30487 - DNA, 277 bp, Glycine max; identical to SEQ ID NO: 27904
  Clone ID: 701062668H1

SEQ ID NO: 30488 - DNA, 276 bp, Glycine max
  unsure (1)..(276): unsure at all n locations; Clone ID: 701062670H1
gggaaaagattttnacatcagaaccacctgaagtagttcaggcacganatgacaattctcatggtacaaacttcccggattcccccgagcccatctatggaactcagttcttgccaaggaaattcaaaattgctgttactgtgccaactgataactccgtggacattctcacaaannnnnnnnnnnnnnnnnnnnnnaccgatgacgatggggagcctcaagggttcaacatatatgttggtggtggaatgggaagaactcataggttggaaacca

SEQ ID NO: 30489 - DNA, 100 bp, Glycine max
  unsure (1)..(100): unsure at all n locations; Clone ID: 701062671H1
gggcatgtagttgttcattttgtgcctaattgtgacttgacaattagctataanactattttgtagtagatcattttgaatatagctcgaagattttatt

SEQ ID NO: 30490 - DNA, 278 bp, Glycine max
  Clone ID: 701062672H1
acaagttcccggagagacagccgattgggacggcggcgcagagccaagacgacggcaaggactaccaggagccggcgccggcgccactggttgacccgacggagtttacgtcatggtccttttacagagcagggatagcagagtttgtggccacttttctgtttctatacatcactgtcttaaccgtcatgggagtcgccggggctaagtctaagtgcagtaccgttgggattcaaggaatcgcttgggccttcggtggcatgatcttcgccctcgtt

SEQ ID NO: 30491 - DNA, 274 bp, Glycine max
  unsure (1)..(274): unsure at all n locations; Clone ID: 701062673H1
aaactggtcaccacattcgggattgttctngtactaatggtcggcagcgtcgtagttctcatgcatnggtaaagccnncggtcaatnatanacttgtccctattgaatcctatcatctttttgacccctttggtaggcgtattaagcatganacacgattngaatatgaccggattccagctgttgttgagctatgcgttcaagccggtgtagatatcccagaatatccttcacgccgaagaccaaccccatacggatattagggaggagagta

SEQ ID NO: 30492 - DNA, 276 bp, Glycine max
  unsure (1)..(276): unsure at all n locations; Clone ID: 701062674H1
cttaagttgatctcatcctgtcccaaacagtttcctttcaactcaanaaagtaaaaacacagacaaaaaaaacataaaaccaaagcaacaacgttgttaagatgcagtcaagactagcagaagcaacaaggagaacatcttgtgcattatcctcaaccactcgcttcactctaaaacgacaactttgctctggcactcgtatccgaaccgcagaccccgaaattcattcgggagagctagaagtggtcccaaagttcacagaggacaaccccaagg

SEQ ID NO: 30493 - DNA, 276 bp, Glycine max
  unsure (1)..(276): unsure at all n locations; Clone ID: 701062675H1
tgttggctatgtgtgtgcttccggcgatggttgtggccattcgcccagcaaagaaccctttttgcgtgaagggtcgtgtctactgtgacccttgccgtgctggttttgagacctcagctaccacctacattgctggtgctgagattatgttgcaatgcaagagcagggttagcaacgaggttgtgtacacgaagaaggggtacaccgactcaaccggagcatacacaatgtacgtggatgangatcacgcagatcagatctgcagtgccaagcttg

SEQ ID NO: 30494 - DNA, 230 bp, Glycine max
  Clone ID: 701062676H1
atggttcgggaagtatcagagagttgcgttgatagcttgttgacggagatggtggcgtgctattgcaatcgattctatgccaacaagcctgaactcgccgcacgcaggatcgaggccattggatatcaggtcggtcaccagctctctgaaaggtataccatggagcggcctcggttcacggatcatctcgaggccatcaagttcatctgcaaggatttttggtctgagct

SEQ ID NO: 30495 - DNA, 276 bp, Glycine max
  unsure (1)..(276): unsure at all n locations; Clone ID: 701062677H1
tcncaagtccaacctaccccttttnantctcccaccaaatncanngaaaggtncctcgatcatgtctcacntcaagggcaagtaccatgatgannttatngccaatgcngcntacattggcactcctggaaagggtatnctgctgctgatgagtcaacagggacaattggcaagcgcttggccagcatcagtgtagagaatgtngaatccaaacaggngtggnncttagggagctgctttcaccggtcccggtggcactnaaatatctcagtggng

SEQ ID NO: 30496 - DNA, 276 bp, Glycine max
  unsure (1)..(276): unsure at all n locations; Clone ID: 701062678H1
cttccaagaaacacaacaaagcttaaaagaaaaaaagaaaggtagnnagaaagatgatcaggttgagatcaaagaggttttcaagaagcagctccaagcctggaaacaatgggagcaaagcagcatcatcatccccagaaaaggattgcaaaagtattggtgaaatcaagtgggaacttaggcctggtggcatgcttgttcagaaaagggagantaatcaaagttctggggaagggtgatcatattagagtgtcaactgtgtcacagtggcatgac

SEQ ID NO: 30497 - DNA, 277 bp, Glycine max
  unsure (1)..(277): unsure at all n locations; Clone ID: 701062679H1
ctctctctctagggtttgatcagactcaagggtttaagccatggnaaaaaggaaggcaaaggcaaagcctcctccaaagaagcgaatggataagctcgataccgtcttcagctgccctttctgcaatcatggcagcagcgtcgaatgccgccttgacatgaagaacttgataggggaagctatttgcgggatatgccaagagagctttagcactaccatcacagctttatcagagccaatagacatatacagtgagtggatgatgaatgtgaactgg

SEQ ID NO: 30498 - DNA, 271 bp, Glycine max
  unsure (1)..(271): unsure at all n locations; Clone ID: 701062680H1
tttcccaagtnttctctctcacacccttcatttacacacaacggaatcaatcaccctttctgctaacacttttgctttttcttcatggctttctttctctttgctattttaatcttgatggtcccttctagtaatgcctattggccaccttcacctggctactggccaagttccaaattcaggtccatgagtttttacaaagggtttagaaacctctggggccctcagcaccaaagcctagaccaaaatgcattaacaatctggttgatag

SEQ ID NO: 30499 - DNA, 279 bp, Glycine max
  unsure (1)..(279): unsure at all n locations; Clone ID: 701062681H1
gtctcaattagcaattgcaattcaaaaagagtattatttacaagggcatggatgctcgggtgatctttaattatctatataagttctagattattgtaatggaagaataacttatgacattgttgtaatgcaagatttctcgttgatagcccttgcaaaanaaanngaaaaaaaaaagggnngcccncngncnannnnccccntcccccgggnantnattccgggnnggnncctngggggggnncnantttcccccaaagggggnncgtttggnnntgg

SEQ ID NO: 30500 - DNA, 280 bp, Glycine max
  unsure (1)..(280): unsure at all n locations; Clone ID: 701062682H1
ctcttcttcccccaacaanctaaacncaaaccataccattaagaaacaacacatctatctcagtccccaaaccaagaaaccctaaattaaattcatgtgctcctccaggtctaccagtgctgcaccaacaagaccttgttacttggaacaaggccacggcttggcttccttaaaacacatggatgcgtgtcataatcgtgccaacaactttgtctctaggtccatgaccatgggttacggcacttcctaccacagnactagtttaangaacaacaacaac

SEQ ID NO: 30501 - DNA, 277 bp, Glycine max
  Clone ID: 701062684H1
ctaaagtggagctttagtggagcttttgaggcaagacaatcacttatcgtgagaggtctctttcctatgcttgcagatccacgacatcctgctgagtcaacaagtgcaacaaatgagtctattcttaaggttgcccttgatcatggaaaatcattgggagttattaagtcacatgaccgggtagttgtttgccagaaacttggtgatgcatctgtggttaagattattgagcttgaagattaaactattaaagagcactcaaccaactacagttttt

SEQ ID NO: 30502 - DNA, 278 bp, Glycine max
  unsure (1)..(278): unsure at all n locations; Clone ID: 701062687H1
gctagtttatcgtgaggagaatatgaagttgtttgttttctttgttgctgcagtagttttggtagcatggccatgccatggcgcaggctaccaaaggttccctctccgaatgaaaactggctatggtgagcgttcttcggaggtaaaatgcgcaagttttaggcttgctgtggaagcacacaacatccgagctcttaaaaccattcctnaagagtgcgttgaaccaacaaaggactacattaatggcgaacaatttagatcagactctaaaacagtta

SEQ ID NO: 30503 - DNA, 279 bp, Glycine max
  unsure (1)..(279): unsure at all n locations; Clone ID: 701062688H1
tccagtgtctctttcaaagtgctgctgctgccagcattgacctgagctagagcagtaaccgtcatcnccactgccagtacggtaccatggctgtgcttcaatctttcgtttcggnccacccagattctcacttcccccatacagaacctcccctacggantgttcnagccccaatccgttctcctcctcgtcccggcgtcgccatcggagacttcgtnctcgacctctccgaaatctcttccgctggtctcttcgacggccctctcctcaaaaactccg

SEQ ID NO: 30504 - DNA, 273 bp, Glycine max
  unsure (1)..(273): unsure at all n locations; Clone ID: 701062689H1
caaatattccatcgtcccatcctgccggtttgccgtagctggaacccggaaaacacacccggagccaccgtgaatgacgaccgttttgaggccaccgattgggttgcgcttcctccaaccaccacagctttccccttctcccacatcgtgtgtttctttctccctctcactcaagcttcccagaatcaactctaattactcctctttcgaanttagagagttactatcaaccccggggactcagttagacttctgaatncagtnagtttttcc

SEQ ID NO: 30505 - DNA, 278 bp, Glycine max
  Clone ID: 701062690H1
gggaagagagaaaaaccatgggcaataacactcaacaatgggcttcaagatgcctatcattggattgggcgtgtggcgcatggaaggaaacgaaatcagggacctaattctcaattccatcaaaattggttatcgccattttgattgtgctgctgactacaaaaacgaagcagaagttggagatgcgcttaaggaggcttttgatagtggccttgtgaagagagaggatctcttcattaccaccaagctttggaattctgatcaaggccacgttcttg

SEQ ID NO: 30506 - DNA, 273 bp, Glycine max
  unsure (1)..(273): unsure at all n locations; Clone ID: 701062691H1
tgatgatgttttggcccatgctgaagagctccacattgtgaaaagatgcattggatcagtagacgcctttgctgcttttcaatcctctgttcatccgtcgatcggctcggctggaccatccttgccgccgtttgccgcggcatctccggccactctctctcatcgccattcagtgtantttggttnagttgcaaagttttagagttggattggaagattgtgaactaagaaagatggtgaagttgactatgattgcccgtgttactgatggtc

SEQ ID NO: 30507 - DNA, 277 bp, Glycine max
  unsure (1)..(277): unsure at all n locations; Clone ID: 701062693H1
tagcccaagccctatacaaccaaaccctaacacacacccatttgattcagtttccatggctagcctcaaggttgcatttttngctgcagtgctctgcatggttgtggtgagtgcacccatggcacatgcagctatcacgtgcgggcaggtgacgaatagcctgatcaattgcatcggttacctccagaacggaggaangccgccgtcgggatgctgcaacggagtgaagagcctcaatgccgccgccaaagaccaccggcgaccggcnagacgggtt

SEQ ID NO: 30508 - DNA, 273 bp, Glycine max
  unsure (1)..(273): unsure at all n locations; Clone ID: 701062694H1
acacaacctatcctctggttcctgggcacgagattgcnggtgtggtaacagaagttggaagcaaggtgcaaaagttcaaagttggagaccgggtaggtgtggggtgcatgattggatcctgtcgttcatgtgaaagctgtgatgaaaatcttgagaattactgccccaaaatgattctcacatacggtgtcaagtattttgatggcaccataacacatggaggctactctgacttgatggttgcggtgaacacttgtggttagaattccggaa

SEQ ID NO: 30509 - DNA, 278 bp, Glycine max
  unsure (1)..(278): unsure at all n locations; Clone ID: 701062695H1
ggaattagaggatttccaactataaaagtgtttgcacctggaaagccacctgttgattaccaaggagcaagannatgtcaaaccaattgctgaatttgcacttcaacaggtaaaggctcttttgaaggatcggttaagtggaaaagcaacaggaggatctagtgacaagacagaaaccagttcttcagtagaattgaactctggcaactttgatgaattggtgancaaaagcaaagaactctggattgtggatttttcgcaccttggtgtggacattg

SEQ ID NO: 30510 - DNA, 174 bp, Glycine max
  unsure (1)..(174): unsure at all n locations; Clone ID: 701062701H1
tctttctctttctcttctttttttccacgcgattctttcaagttcaattttgattcaatcacattcttcttttacattctcgannnnnnnnnnnnnnnnnnaaaaattcttatattatgcatcatttctcaccaaccacctagggtttctctccgacgttaggtttttttttct

SEQ ID NO: 30511 - DNA, 155 bp, Glycine max
  unsure (1)..(155): unsure at all n locations; Clone ID: 701062702H1
aatttcttctccttcactctcagagaactcatatggcgccanactnnnatncganantgtcaaatgnacgtatgagcatcaccgaatggacatggctatggnncncgtactccggaggtgaaatgagcaagnnggaggnatgctgtggaagcaca

SEQ ID NO: 30512 - DNA, 171 bp, Glycine max
  unsure (1)..(171): unsure at all n locations; Clone ID: 701062705H1
ttagggattgccttgctatagttggagtggcatattaattttgaanacaaganatatatcttggtctgtaattgtcacagtcagtagtttgatgaagtacaagtctataagtgcataagtgtaagtctgtgaaactgcacagtggtctattacccgatattataaattggg

SEQ ID NO: 30513 - DNA, 169 bp, Glycine max
  unsure (1)..(169): unsure at all n locations; Clone ID: 701062706H1
aacctttcagatcgtctgcatcaagttcttcggtgggctcttgggtctgttgagatttttttcagcagacattgtccaatctggtatggttatggtngtgncgtgaaatggttggncangattttcctacattaactcagttgtatatccctggacttccctcccactg

SEQ ID NO: 30514 - DNA, 171 bp, Glycine max
  unsure (1)..(171): unsure at all n locations; Clone ID: 701062707H1
gngacagaggtattggtatgacgaaggaggatttgataaagaatttggggacaatagcaaaatcctggaacttctgcatttgttgagaagatgcaaacaagtggagatctcaatctgattgggcagtttggagtcggcttctactctgtttatctcgtggctgactatgtc

SEQ ID NO: 30515 - DNA, 166 bp, Glycine max
  unsure (1)..(166): unsure at all n locations; Clone ID: 701062709H1
tttgtgggagtaagagcgggaaaagtgagatcagtgaaggaggtgcaaatgattcagtggctgtgggagatctgatatttgtcaagctcgcggtagtcatggtggcctgtacaggttgttnatgacaatngtgttaataagagnnntaaaccgagcaaacggaccc

SEQ ID NO: 30516 - DNA, 171 bp, Glycine max
  unsure (1)..(171): unsure at all n locations; Clone ID: 701062711H1
gaaagagttactatctcgaatagtatcaacactaacgcncaccatcacactcatcttcttcttccttgtgctttctccgagcctgtgcacatcactcggaagcaccaacacagttggatcggagttgctgaaggttgctccttctgaatttgaggggacagtgagaaccgt

SEQ ID NO: 30517 - DNA, 170 bp, Glycine max
  unsure (1)..(170): unsure at all n locations; Clone ID: 701062712H1
tactctctctctctgcgtccatggagttttggggtgttgaggngaaaaatggagaatctctcaaggttgatccaggagatgacaagattatccanctttccaaangcangcannggggatgtcacnaaggctatangangtggaccantaccctgtangtgaagtntgnc

SEQ ID NO: 30518 - DNA, 174 bp, Glycine max
  unsure (1)..(174): unsure at all n locations; Clone ID: 701062714H1
ttcattcttcaccaaaacttcgcaaagaaacactacacatccatggcaactgctggcgtgcaagangttcgtgttccccctctaacttccacctctgagccacttctctnctttgacngaaccacnangntgtaacatcanttananntgtncacnntgcgcacaggnncaacc

SEQ ID NO: 30519 - DNA, 55 bp, Glycine max
  unsure (1)..(55): unsure at all n locations; Clone ID: 701062715H1
gtacacacaaaccctcccctgcacactctccnnaccctagcggcactacacacgt

SEQ ID NO: 30520 - DNA, 156 bp, Glycine max
  unsure (1)..(156): unsure at all n locations; Clone ID: 701062717H1
cnaagctgntgcaaactcccaatcttcntcctctaacatncagcttcatanaggtngtttccaacnttcaaattctcacggctcaaacgtgngggnccttgtngtcctctcangaggatnnannacagggtttgcaangtgtagcaactttncnct

SEQ ID NO: 30521 - DNA, 170 bp, Glycine max
  unsure (1)..(170): unsure at all n locations; Clone ID: 701062718H1
tntctcactagtgaatttgaggatcagcagtagtgatgaattccacagaagaagagtgtnngtggctgcgagattatggagaaagatgctcatgtcaggtttctcgagttaatgtaggcatatgctcccatctccgtacgagtcccaagagatcaaccatctcaccctcg

SEQ ID NO: 30522 - DNA, 155 bp, Glycine max
  unsure (1)..(155): unsure at all n locations; Clone ID: 701062719H1
ggaagacatgtcttcttttccaatttgtattcaatgtagcactangnctgccaangacaacgtccatcttacatttgctaccgccttaggttggattccaaacccccttttctttntcaggtncgtgaatgatgatcaagacattcgcnagtact

SEQ ID NO: 30523 - DNA, 168 bp, Glycine max
  Clone ID: 701062721H1
cgccgtttttttttctgttagaagaaaatggttacagagcacggcatcaaattccggcgtccacctgatcaccaagccttcggcaagatcgttgctaaagtatgcgaaaagctatttagccatggacccctcactttggatcagttggttcgctacactgactttact

SEQ ID NO: 30524 - DNA, 166 bp, Glycine max
  Clone ID: 701062722H1
gttaactagaaacagtgtgatgaaaatgaaggtccttgttttcttcgttgctacaattttggtagcatggcaatgccatgcgtacgatatgttccctctccgaatgaacactggctatggtgcccgtactccggaggtgaaatgcgcaagttggaggcttgctgtg

SEQ ID NO: 30525 - DNA, 168 bp, Glycine max
  unsure (1)..(168): unsure at all n locations; Clone ID: 701062724H1
gnctgaggttgttgaatctactaactcatcctcaataacattcccttgtgctggacattccttgattccatgggaaaataagctccctatcaattgctggtcatacaaaagatcctaatgaaagtatacaagtgaaagtgtttgatctgccaaacgctacatggtcaa

SEQ ID NO: 30526 - DNA, 168 bp, Glycine max
  unsure (1)..(168): unsure at all n locations; Clone ID: 701062725H1
tntgacgcaggtaaattggaganagaaggcgtcaaatcccaagatgaagggctggcagactatgaaagtaatgattttgttgatgaatctgaatctnacaaaaatggtagcaaaaccagttcagactccactctgggatcaagatgaggaaatgganccaaangacnc

SEQ ID NO: 30527 - DNA, 169 bp, Glycine max
  unsure (1)..(169): unsure at all n locations; Clone ID: 701062726H1
gnacattcctcgatcgtcgttactctgagccagaacttgtttaaaaggaacctgcacctgtgtaaaaattcacgnnnnnnnnnnnnnnnnnnnnntcggatctcgttctctttctcttccttccttctccttctctcagagaacaacacctctctctctcaccgcctcc

SEQ ID NO: 30528 - DNA, 163 bp, Glycine max
  unsure (1)..(163): unsure at all n locations; Clone ID: 701062732H1
aagtnttctcncttttcaagtgtggcnactctctctttctccgattcattgccgctccaccagcaatggccacgcacgtncgtnacgcgntantagcggcacanntatnctacttcngctcccttctctttctccgtctccatctnccattntcagcgnncgg

SEQ ID NO: 30529 - DNA, 172 bp, Glycine max
  unsure (1)..(172): unsure at all n locations; Clone ID: 701062734H1
tttggtagagtgcattcccagaatagaaactcagcaactggtgcttcctttggcaagttcaatcagaggatagttcagaaatcattgagggatgncgtatattcccaaggaagtgggnagtgtctctaagattttaaggggaattcctgggaatgataaatgtgctgngtgc

SEQ ID NO: 30530 - DNA, 168 bp, Glycine max
  unsure (1)..(168): unsure at all n locations; Clone ID: 701062735H1
ttacggctaaattctcaaagatttaaactttgtctcagagttagnaaattcacccaaccccagaganaaaatgtctctaatcccaaatttcttcggtggcagaaggagcaacgttttcgatcctttttccctcgacgtctgggaccccttcaaggattttcctttccc

SEQ ID NO: 30531 - DNA, 176 bp, Glycine max
  unsure (1)..(176): unsure at all n locations; Clone ID: 701062736H1
gtncggggctacccgctggagtttaagcatatcaataagcggaggaaaagacactnaacaaggattnccttagtaacggacgagcgaaccgggaaaagcccaccatgaaaatgcggtacgccctgcggngtnccgaattgtngtctggagangcgncntgcagtggcggaccgggc

SEQ ID NO: 30532 - DNA, 166 bp, Glycine max
  Clone ID: 701062737H1
ctgaatctcgcggtgttgttagttctgcggcggttgtagttccggcggcgatgggacagcaatcgttgatctacagcttcgtcgctcgcggcaccgtgatcctagcggagtacaccgagttcaccggaaacttcaccagcgtggcggcgcagtgcctccagaaact

SEQ ID NO: 30533 - DNA, 166 bp, Glycine max
  unsure (1)..(166): unsure at all n locations; Clone ID: 701062740H1
gattcatactattagattaccgagacatagtactgtgtcagatgtaattaatgatcttanatccaaaggtagatctatcacatcctgatgcagaacttagattgcttgaagttttctatcacaagatttataagattttccgtgtcaatgaaaagattgagaacat

SEQ ID NO: 30534 - DNA, 164 bp, Glycine max
  Clone ID: 701062741H1
atcttcttctatgggttggcttagtcggttcataactgccgtggctttcttagccatcggagtgatattctcaccggagacactggggtcaaaatcaaccacactttccacctacctcaaactcgctcacctcctctgcttctccaccgccttcggcgccgctc

SEQ ID NO: 30535 - DNA, 165 bp, Glycine max
  unsure (1)..(165): unsure at all n locations; Clone ID: 701062742H1
ctttcgtccatcntacaccttagttttcccggttcncagaatagtntttcatactctccattgtcttgtgtcttcatccaatagttatggtctggtcttaaggacactnaatcttatggaggtgacaaaccttgtagtcttgccagcagtttcgncnttctntgc

SEQ ID NO: 30536 - DNA, 163 bp, Glycine max
  unsure (1)..(163): unsure at all n locations; Clone ID: 701062746H1
caaactgtcatcttgtcattcaccgagaaagtcgtactgattcctcttcatctttcgttaaagcgagtacttttacgttcttgatctgttggttacgatgtcgtattcaaggagatctaggtattctccttctccttctccttctccacacaacatncgnctc

SEQ ID NO: 30537 - DNA, 173 bp, Glycine max
  unsure (1)..(173): unsure at all n locations; Clone ID: 701062750H1
cagaaaaggaaaggcggcgccgctgagnttggtatatatccganacgccaccacagtcnagtgtttcgcnctcanngaaactngaatattcaacttccagcacactctctctatntagnntttttccatggccaccgtgatccgcaatnccgatcctctttccctccacctct

SEQ ID NO: 30538 - DNA, 157 bp, Glycine max
  unsure (1)..(157): unsure at all n locations; Clone ID: 701062751H1
ctcaagtctcctgactcctgattttgtttgnatatnctccgaaaacagtgaaannngaaaagangcattgttgtttcttttaattgnncctatgggatggtgnctgtacaaaagatgccaagaagcagattcaanaatttgcctctcagacaattgc

SEQ ID NO: 30539 - DNA, 66 bp, Glycine max
  unsure (1)..(66): unsure at all n locations; Clone ID: 701062753H1
acaanttctttttttacntcttcacattntnnatttgttagggttctgatnatgttggggaagagg

SEQ ID NO: 30540 - DNA, 164 bp, Glycine max
  unsure (1)..(164): unsure at all n locations; Clone ID: 701062754H1
gaaaganaaaaagaggaacagagagcgataaccaaaggaagggtaataacccaccccatatctcttttctcttccttcttcggaaccctaaatttctctctttccgatgacgaccatgatgctttcgccttagtttcgtttctttgctcctctctctctccctc

SEQ ID NO: 30541 - DNA, 161 bp, Glycine max
  unsure (1)..(161): unsure at all n locations; Clone ID: 701062755H1
ttttctcttcctttcacctcctcagcagtcnccaganagactccataacccaaaaatgcctttcaagaggtacgttgngattggaagggttgctcagatcaactatggcaaagagnccgggcggctcgtgatcatngtngacgtgattgaccagaanaggc

SEQ ID NO: 30542 - DNA, 164 bp, Glycine max
  unsure (1)..(164): unsure at all n locations; Clone ID: 701062756H1
gngataataacaatacccttcttcgtttcttccctctccacttcggcactcacaantctcaacccaaccaccccntattaaccctcaccgcaatctctgattcgatcttcttcaatttcggggtttcccatataccacaaggcataggcctgtgtgaatttgcg

SEQ ID NO: 30543 - DNA, 160 bp, Glycine max
  unsure (1)..(160): unsure at all n locations; Clone ID: 701062757H1
aacanaaggaanatcaggngattggganatanataggaagttgctaaagttaggaganaaaatagcatctggatcctctggagatttgtatcgtggagtttatctccggtgaagatgttgctgttaaggttcgagatcggagcaattgaatgatgcctta

SEQ ID NO: 30544 - DNA, 163 bp, Glycine max
  unsure (1)..(163): unsure at all n locations; Clone ID: 701062759H1
tggctancatagagctagtaataacattantnttgttaagctaggtctaagccatggctaatgaacgtgntctgttctcggcggagattgcgnaccgtggaattnantcgtcacgcccnaacgatgggtcgnngacgtnttcggtgagggtganannncgcnc

SEQ ID NO: 30545 - DNA, 170 bp, Glycine max
  unsure (1)..(170): unsure at all n locations; Clone ID: 701062763H1
tgccactgcagccaagaagngcgcctnaacaggtttncaaatantnnctcgcaganccnngangtaccttcctatcntctcnttttcantctcaaggacgtgcgcttngngctgctgcggctgtttcattgagcagcaaagtgcctctttttttacggaaagaacggttc

SEQ ID NO: 30546 - DNA, 95 bp, Glycine max
  unsure (1)..(95): unsure at all n locations; Clone ID: 701062765H1
gtgnatttttcatctagaggcagagcacgtaacctgggctgaacnaaccaaagnggttcccgactnacaannntccggcngggncanccgtactc

SEQ ID NO: 30547 - DNA, 165 bp, Glycine max
  Clone ID: 701062767H1
gcaaaggactaatccatatcgtagagtcaatcacaaaactcctctactttgccacaaatgagtgaccccaagtatgcttatccctaccctgctcaagggtattatcaaggtcctcctgtgatggcaccaccgcaatattatgctgctccaccaccacgcacaaga

SEQ ID NO: 30548 - DNA, 159 bp, Glycine max
  unsure (1)..(159): unsure at all n locations; Clone ID: 701062771H1
gtaaatgaaggtccttgttttnttcgttgncnacaattttggtagcatggcaatgccatgcgtacgatatgttccntntccgaatgaacantggctatggngcncgtactccgganctgaaatgcgcaaacggaggctgctgtggaagcacanaanatc

SEQ ID NO: 30549 - DNA, 158 bp, Glycine max
  unsure (1)..(158): unsure at all n locations; Clone ID: 701062772H1
agtttgttgtgagctataagctagtttatcgtgangagaatatgaagttgtttgttttctttgttgctgccagnagttttngtagcatggccatgccatggcgcaggctaccaaaggntccctctccgaatganaactggctatggtgagcgttcncc

SEQ ID NO: 30550 - DNA, 164 bp, Glycine max
  unsure (1)..(164): unsure at all n locations; Clone ID: 701062773H1
tacacttgttcttgtnttctgcttatggggtgtgttgatctccctatcttctgctgctagggctcagtggctcaaggcagaagcnttgaggttgctnagcatttgaaatcgcnngaacaagcctcctgttaagaccattccagagtccagatggggatacaaat

SEQ ID NO: 30551 - DNA, 167 bp, Glycine max
  unsure (1)..(167): unsure at all n locations; Clone ID: 701062775H1
cngtggcagtggtagttgcnaaactagtagcaagaagtaagtccacgtttttctcccgttttcattnatcagcaatattaaaggtncctaagtttcctncagtatgggggnnacttacgttttggccacaccgnngcgccacngttccgatgacgtggaaggcggcc

SEQ ID NO: 30552 - DNA, 160 bp, Glycine max
  Clone ID: 701062776H1
ttcattctatcaattccaatcaccaattcaaaacccttcttcccttggaacaaattgagagatcgtgatggcaccaaaggcggagaagaagcccgcagaggagaagaagtccacggtgggagacaaggctccggcggagaagaagccacaggccggaaac

SEQ ID NO: 30553 - DNA, 164 bp, Glycine max
  unsure (1)..(164): unsure at all n locations; Clone ID: 701062777H1
ggagatntatatgctactgtttttgagaacagtctaatgcaacaccatattgcacntcctcctgataacatgggannggnttacctacattgcaccanctggaccaatattncttacaggatactgtattggaacttgagtttcaaggtgncaaaaagaaattc

SEQ ID NO: 30554 - DNA, 173 bp, Glycine max
  unsure (1)..(173): unsure at all n locations; Clone ID: 701062780H1
ccaggaatgaatcattcctcctggtcctgatcctaaatagggttagggttagggtttatgcaatcgcattcctgagacggtgcatttgtacgtaatcgatggcgaatcgcacggatcctgcagctaagacctanngggcacgaaccctcagaactggtggagncnattcnngt

SEQ ID NO: 30555 - DNA, 61 bp, Glycine max
  unsure (1)..(61): unsure at all n locations; Clone ID: 701062781H1
gnnaactagnaacagtgtgatgaaaatgacggtcccngagaactcagatggnagnaanact

SEQ ID NO: 30556 - DNA, 161 bp, Glycine max
  unsure (1)..(161): unsure at all n locations; Clone ID: 701062782H1
cngtgatgtccactgtgcagagccagattgtaaaataattttnttaagatacttccaacccagttggtgcacaccccagtggttatattggggaggatcctcgtggaattccaaacaatctcatgccatttgttcagcaagtagcagttggccgacggctg

SEQ ID NO: 30557 - DNA, 163 bp, Glycine max
  unsure (1)..(163): unsure at all n locations; Clone ID: 701062783H1
cattgacctatataaccttttctctccggttaccagaaccgtaagntgctgaanatgaanccgnattcgccggctaggggcgnnaaccggagccnccggttccgangttctccctacggtncgngccctatgtcaggttggnagtgcacaanggngatcgngc

SEQ ID NO: 30558 - DNA, 160 bp, Glycine max
  unsure (1)..(160): unsure at all n locations; Clone ID: 701062784H1
gaacacaacacaacaaactgaaacacacaccctctaagttcattaacctcttcaacatcnaaacttgnagtanntnaatggcaacacgcgtgannccnccaagantcctncaagaatcttcgttncaacacaacaaccnagcacctcaacgccgcncngc

SEQ ID NO: 30559 - DNA, 75 bp, Glycine max
  unsure (1)..(75): unsure at all n locations; Clone ID: 701062785H1
tcaattctcaacattctnagttcaccngcaagcaanacgcnatgtcgcttnantnatagcagtgcacgtccantc

SEQ ID NO: 30560 - DNA, 157 bp, Glycine max
  unsure (1)..(157): unsure at all n locations; Clone ID: 701062786H1
ctaattaagaggtagtagctcgcaacagcaaatatttctgacataannatcatcacaaaagggtagctgctagtggntaaattgntctcacattaattgacaatgtctagcagaagatctcgttnctagacaatccggtgcttccgctgaganncac

SEQ ID NO: 30561 - DNA, 116 bp, Glycine max
  unsure (1)..(116): unsure at all n locations; Clone ID: 701062788H1
agatgaagatgaggagactccacaaccaccttctaagaagaggaaatgagaattatactagtaggcaaganttgttatctcctgcctttgtaatgcttcnagtttttagtcaaatc

SEQ ID NO: 30562 - DNA, 156 bp, Glycine max
  unsure (1)..(156): unsure at all n locations; Clone ID: 701062789H1
gtactagcaagannccngtggtttattcagaacaatgctctattggtagggatattaattctactcgagttgccatcttgagagatagggaaaaggctacgcagtgatccagattatcctngtaatatgacaggtatgctaggcgtattccaactt

SEQ ID NO: 30563 - DNA, 84 bp, Glycine max
  unsure (1)..(84): unsure at all n locations; Clone ID: 701062791H1
ggaacattgtcagcnttnatantaaaagattgaccaatgaagcgggttttgggnaagnnggnggtgaagtngcnaggcntaagc

SEQ ID NO: 30564 - DNA, 159 bp, Glycine max
  unsure (1)..(159): unsure at all n locations; Clone ID: 701062792H1
tagttcttcatcatagtcttaaacattaaaccttagcaaaactcnacaatgctagacatnaaaggctacctcgtactcttcttcctntggttcatatcaaccattctgatacgttccatcttcaagaaaccacagcgtctaagactcccnccgggtcct

SEQ ID NO: 30565 - DNA, 300 bp, Glycine max
  unsure (1)..(300): unsure at all n locations; Clone ID: 701062802H1
taaaagtttatttcctctgatcgtgtggtttctgagttctaagcactcacctctttcatacacgtttgttcgcttgttgagaagccatgggcgaggatttcgagttcccaagtgctggcaacatggaaatgcctgaggaggaagagtttgagagtncgatcctgaaggttggggaggagaaggagattgggaaaatggggctgaagaagaattgctcaagganggtgaaggttgggacncccctgacagtggagaccagttgaagtgccatataatggaacttgcttgatggaaccaaat

SEQ ID NO: 30566 - DNA, 232 bp, Glycine max
  Clone ID: 701062803H1
gagcttgtttaagcttttcttccattaacatattatcacaatgtgtggtattcttgctgttcttggttgttctgatgactctcgagccaaaagggtccgcgtgcttgagctctctcgcagattgaagcaccgtggccctgactggagtgggctccatcaacatggtgactgctttttggcacatcaacggttagccatagttgatcctgcttctggggatcaacctctcttt

SEQ ID NO: 30567 - DNA, 299 bp, Glycine max
  unsure (1)..(299): unsure at all n locations; Clone ID: 701062804H1
gtgagtttgtctgtgacactctctctttntctctctctacgcttcacttttccgtaataaacccttcaaaagcgaaagcggtttctcgtttttggaccttatctctctttctaaggttcgattctgcgtactttgggaggaacagacacacatgaaggattcgaattcggatctgtttgacccggtcatggcgatggagtccgagtggtctcgcggcggcaccacctccgatgccgatttcgccttcgccttcaacgacagcaacttctccgacaggttctccggatcgagatcatgca

SEQ ID NO: 30568 - DNA, 298 bp, Glycine max
  unsure (1)..(298): unsure at all n locations; Clone ID: 701062805H1
ctggaagccttgttgtgagtnagagaaaaggcttcctgcaccgancacaccaacttgatacctctgattctttctttgcttagaattccacagaatatnnngccanntcttttcaatcactccccacctttggaattcaagggtttgagcnaggaggaggaagactcattgctagggcaagtggaaatatggaggtacatgacatgcttcacggactccgtggccttgaaagctgnnatagagcttcgtatagcggacatactagaccgttatggtaaaccatatccttgtcgcaaat

SEQ ID NO: 30569 - DNA, 110 bp, Glycine max
  unsure (1)..(110): unsure at all n locations; Clone ID: 701062806H1
gnttttttctaaaaataaaattctaagcnattttcatttgcactcttttttctacactaatgtanngnngangcaangtccttccatgtcctttnnattcgncatctnag

SEQ ID NO: 30570 - DNA, 297 bp, Glycine max
  unsure (1)..(297): unsure at all n locations; Clone ID: 701062807H1
gggttaagcggtgagatttgcgaatctgagaaatggcggattcttctcgggaggagaacgtttacatggcgaaattggcggagcaggccgagcgttacgaggagatggttgagttcatggaganggttgcaaagactgtggaggttgaggagttgacggtggaggagaggaatctcctctctgtggcttacaagaacgtgattggtgcgaggagggcttcgtggaggatcatatcctccattgagcagaaggaggagagcaggggcaatgaggaccacgtggccattataaaggngt

SEQ ID NO: 30571 - DNA, 283 bp, Glycine max
  unsure (1)..(283): unsure at all n locations; Clone ID: 701062808H1
cnagaccagtcaggaggggctggacaggctgcacaaaaatcggcttgttgtggttgaggacaaatgttacaaattggaggcaacattcttgtacaagaacaagaagaaagaagaaattacgtgtataatgatcatgatgctgactttgtgcttaaccttgtcattctttataaatttgtgtgataagtagtgtctctgactttttaacaagttacattaaatccaaaactaaatgtgatgtggtgatgcatgtctaactgcccctcgctttctttggttgggg

SEQ ID NO: 30572 - DNA, 297 bp, Glycine max
  Clone ID: 701062809H1
aagagagaaagaatgggcaaagtttcaattccagtcccgcaaaacggtttctccatacgcaatttctcaacgtccaaacgctcatgtttcaccccttcaccttcaacgctcagaatttcttgctctgctgagttagatggatctcatgagaataagggaggtttgtttaatttcaatggaatcaagggcgtggcttgtggtattcttgcagcttgtacggttacttctgctgcatttcccgttactgctgctacccagagactcccccattgtcaactgagccccatcgctgtgagc

SEQ ID NO: 30573 - DNA, 278 bp, Glycine max
  unsure (1)..(278): unsure at all n locations; Clone ID: 701062810H1
gtagggcacgaggttccacttcataaaccccgccaaggttttatccttttcaagacattcttggaggncaagaacatgccattgccaattgatagangccttagtggcccaactgataaatcactgaacaagaacattcggttggctaggcccatacgcaagatcactatgccatcatcgacgcagggctttacttattagatttctatctttgttgttctacaataaaacacccctctacaataaaacacccctttctgcaccgatttagaggggct

SEQ ID NO: 30574 - DNA, 295 bp, Glycine max
  unsure (1)..(295): unsure at all n locations; Clone ID: 701062811H1
cattaattgcaagantggcacttcgttgcttggtgatgtccctttctgttctcttcactcttggtcttgcgagagaaagccatgccagagacgaagatttttggcatgctgtttggccaaacactcccattccaagttcattgcgagatcttctaaagcctggccctgcaagtgttgaaatcgatgatcaccctatgcaaattgaagaaacacagtacccgaaaaccttcttctataaagaanaccttcatccaggcaaaacaatgaaagtacaattcagcaagcctccctttca

SEQ ID NO: 30575 - DNA, 292 bp, Glycine max
  unsure (1)..(292): unsure at all n locations; Clone ID: 701062812H1
ttagtggcctgcaaccaattgaaacattatctgctgttaagtctcagcaaataaaggataataaccctcactttggcattgattgtaatgatgttggcactaatgacatgcgtgagcnaaatgtctttgaaactttgatcggaaagcagcaacagctcctactcgctactcaagttgtcaagatgatactgaaaattgatgatgtcatctccccatctgagncctgatatttttaaactcagtcatggtctacgtcaagatgctgaatggtgatactattttgtttcgatcg

SEQ ID NO: 30576 - DNA, 236 bp, Glycine max
  unsure (1)..(236): unsure at all n locations; Clone ID: 701062813H1
ctttgaaagggttcacgaagaaacaccaatccgctccgagagctanaagaaatcaacgatgcctcgctatgatgataaatatggtatacccgcctctatgtggacgttgtctcgaggatcgtcccgtgactggagcggtctcagagttggagagtcgagcgaattgagatnttcgcttgtgattatgtctcagatntntgtgtaatcacctgtgcggagtgagagcgatatgtgat

SEQ ID NO: 30577 - DNA, 275 bp, Glycine max
  unsure (1)..(275): unsure at all n locations; Clone ID: 701062814H1
aatatagcccaagccctancacaacnaaaccctaacacacactccatttgattcagtttccatggctagcctcaaggttgcatttttggctgcagtgctctgcatggttgtggtgagtgcacccatggcacatgcagctatcacgtgcgggcaggtgacgaatagcctgatcaattgcatcggttacctccagaacggaggaacgccgccgtcgggatgctgcaacggagtgaagagcctcaatgccgccgccaagaccaccgccgaccgccaga

SEQ ID NO: 30578 - DNA, 294 bp, Glycine max
  unsure (1)..(294): unsure at all n locations; Clone ID: 701062815H1
taagtgtttgcacctggaaagccacctgttgattaccaaggagcaaganatgtcaaaccaattgctgaatttgcacttcaacaggtacaggctctttngaaggatcggttaagtggaanagcaacaggaggatctagtgacaagacagaaaccagttcttcagtagctattgaactctggcaactttgatgaattggtgatcaaaagcaaagaactctgggnttgtggaatttttcgcaccttggtgtggacattgtaaganttagctcctgagtggaganagcatccaatagt

SEQ ID NO: 30579 - DNA, 303 bp, Glycine max
  unsure (1)..(303): unsure at all n locations; Clone ID: 701062817H1
agagaganatgggttgaggaagatgcttcttggacattagcataggggaagagcttgaagggagaatagtggtggagctttatgatgatgttgttcccaaaactgctgagaatttcagagccctatgcactggtgagaaaggcattggttcaaatactggagtgccccttcatttcaagggatcttgctttcatcgtgttattaaaggctcatgattcaaggaggtgatatatctgctggggatggtactggaggagaatctatatatggacttaagtntgaagatgaaaatttcgagttgaa

SEQ ID NO: 30580 - DNA, 304 bp, Glycine max
  unsure (1)..(304): unsure at all n locations; Clone ID: 701062818H1
ttccaatatattccattctctctgngtatttccctacctctcccttcaagatgcagatcttcgtcaagaccctcaccggcaagaccatcacccttgaggtggaaagctctgacaccatcgacaacgtcaaggccaagatccaggacaaggaaggaatccccccggaccagcaacgtctcattttcgccggaaagcaacttgaggacggccgtacccttgctgactacaacattcagaaggagagtactcttcacctcgtcctccgtctccgtggtggcatgcagatcttcgttaagacactcac

SEQ ID NO: 30581 - DNA, 239 bp, Glycine max
  unsure (1)..(239): unsure at all n locations; Clone ID: 701062819H1
gagaaagaaaagaatggcaaagttaataaaattctttgagttgaacacaggggccaagattccttctgttgggttaggcacttggcaagctgagcctggtgttgtagccaaagctgtcaccacagccattctggttggatacaggcatattgattgtgctcaagcgtataacatcaagcagagnttggtncggccttaagaagcttttnnatggggtgaanaangcgtnaggattnccc

SEQ ID NO: 30582 - DNA, 298 bp, Glycine max
  unsure (1)..(298): unsure at all n locations; Clone ID: 701062820H1
gnactttttattngtttttccgaaaccgtgtctgtntgctttcaagtttcttcttanntgtnacaagtaacatattctnttctctcgtttttgttattggaatcccgttcaggatcctttacccttttgattgcttctcatctcacttctgantttcactttggtgtctttagcaaagcttccacacaacatangcnnnnccnggnttcagtttaatnaagcttgtnnttnngagngtgtganntggcgagtacaggttnatgggtttccaagatntgnnncngngcnnntttttggg

SEQ ID NO: 30583 - DNA, 237 bp, Glycine max
  unsure (1)..(237): unsure at all n locations; Clone ID: 701062821H1
tcgataagatgggtgtgaacgaagatttcaacaaggatattgatgatcatcatcnnnnnnnnnnnnnnnnnnnnnnnnnncctcttccggggtttcgtttccaccctacagatgaagncattgttagtttctatcttcgaaggaagcttcacaaganacccatcagcatcgagctcatcaaacagattgatatttacaaatacgatcctgggatcttccaaaaaccagtgccatgca

SEQ ID NO: 30584 - DNA, 289 bp, Glycine max
  unsure (1)..(289): unsure at all n locations; Clone ID: 701062822H1
ananggnnatggttaatngantncttntcanaatgnttgnagtgntcatcaaagctgaaattagaagcagcagccttgatgagcagtganngcattgtgagaaggaatcaattaaccattccttgttaaacctacttacttacccctggatagaagaaaaggtggcaaatggagaactctctaactgtggtggttatacgactttaccgatgttcattgagaagtggacatggataacggggaacaaatggaggaaaatggcagcatgtaacaaaaacaaatcntttgg

SEQ ID NO: 30585 - DNA, 300 bp, Glycine max
  unsure (1)..(300): unsure at all n locations; Clone ID: 701062823H1
gttttctttgaaacgcacagcttcaatcaccgaccacaccacccatcaacncacatnccntcctctttcccttctcaagactgcccaaggccaccctatgttggtggaactgaaaaatggggagacatataacgggcatttggttaattgcgacacatggatgaacatccatctgcgagaagtcatttgtacatctaaagacggagatagattttggaggatgcctgaatgctacatacgaggcaatacaatcaagtaccttcgagtacctgatgaggttattgataagttcaagaagaa

SEQ ID NO: 30586 - DNA, 233 bp, Glycine max
  unsure (1)..(233): unsure at all n locations; Clone ID: 701062824H1
gagaaagggnagaggagagagaaacgaagaagaagagtgtttctcacatcacatggcctccttgcccttggggnnnnnnnnnnnnnnnnnnnnnncggnggnggcggctatacatccgtcgcaaccgccgcagtctcagccgnaanccgaagttcctcgccggagctccgatgtggagaacggtaangatatgtcgctantgtcattgagggatgatgctgtcatnggcacat

SEQ ID NO: 30587 - DNA, 291 bp, Glycine max
  unsure (1)..(291): unsure at all n locations; Clone ID: 701062826H1
anaacacctgcttctggcgtcttaaaaatacgtcacactccttctcaaccctaaaatcagtgttctttgtttttttgcagaaaagattaggagatggcgaaggcttgattccctgcttcaatcgcattctcatcgagaaaatcgtccctccctccaaaaccagcgccggcattctactcccggagaagacctcccagcttaattccggtaaggtgatagcggttggacctggatcacgtgacaaggcggggaattgattccggtgtctgtgaaggaaggtgatcacgtgct

SEQ ID NO: 30588 - DNA, 295 bp, Glycine max
  unsure (1)..(295): unsure at all n locations; Clone ID: 701062827H1
tgaaaaccnaaagtggttctctcctctgtctttttntctctcttggtatncttttggctagtngcatnnctgncaagtgtnaantccaagaagcgcagtgccaagcnaccatgtttcaacattcaacagaagcntttttccntccacttttctctttggtnatggttcggctgcttacgaggcagaaggagcagcaagtgtagatgggagaggaccaagcatatgggacacctacactagacagcatactgaaaagattgggatcatagcaccggtgacatgggagctgattttt

SEQ ID NO: 30589 - DNA, 295 bp, Glycine max
  unsure (1)..(295): unsure at all n locations; Clone ID: 701062831H1
cnaaaccctcttttttctctctcttgcaaaacctaattttcatttcttccctcaaatttcaaaatgcgtcagatccttcacatccagggtggccaatgcggcaaccagatcggcgccaagttctgggaggtggtttgcgcggagcacgggatcgaccctaccggaaggtacggtggggactcggagttgcagctcgagaggatcaatgtctactacaacgaggccagttgcggtcggttcgtgccgcgcgcggttctcatggacctcgaaccgggcaccatggacagcgtccggt

SEQ ID NO: 30590 - DNA, 292 bp, Glycine max
  Clone ID: 701062832H1
ctattctattcttcaatatcttagggttccgacagattccccatcaattcaaccacttgccgtgttagttgatccattcttataaaaagatcaaagactcattatttatagccaaaggccttctgggtcgtcgtgaatctatcttgtgtttgagagattaagacaaaactttttgctttgcaaatggctgctgcaactgctgcaactgcttcttggatgcgattcaaaggcggcaaggaaaggaagctaaccaagatgaataaatccaggataattgctcttatctctcttc

SEQ ID NO: 30591 - DNA, 302 bp, Glycine max
  unsure (1)..(302): unsure at all n locations; Clone ID: 701062833H1
gnggcgatggcttttgcagttacgcccaagataataacggtgtcattcgataagcaaaaccaaaggaggagtttcgaaggattgtttgggaaaaggtatcgggtaagggtgaagcgaagtcaagatcattcagtgaagtgtggtattgagcgaanagcagcgatggaaagaaagggggcggaggaggaggcgtgtcaaattcgaactacgtggtgcccgctggacaacatggcgaactcatccgcataacngtccttanccgagatactcagggacctcaataaaagatnccggatactatc

SEQ ID NO: 30592 - DNA, 302 bp, Glycine max
  unsure (1)..(302): unsure at all n locations; Clone ID: 701062835H1
aagaatggtgctttcggaggaggaaatcggtcgtctataccgaataaggaagacggtgatgcagatgctgngggacagaaattttctggttggtgacttcgagatcaacatgtccaagcacgagttcaagtccaagtacggcgaacacatgaagcgcgaggncctcgtcatcaacaaatccaagaaggacaactccnncgaccagatctacgttttcttccccgacgaacccaaggtcggcgtcaanaccatgaagnccnacancaancngcntnaacctccnaaaacgtctacagagccnt

SEQ ID NO: 30593 - DNA, 299 bp, Glycine max
  unsure (1)..(299): unsure at all n locations; Clone ID: 701062836H1
ctttnnnctgccgaggaaaagaaagacataggnaaagaagataaattcacagcgtcctagatttcctcttctctgcttcgggaagaaagagaaaacaaacaaaacaatggcgttcgcttctttcctcggcagagtcctcttcgcttctgtcttcatactctctgcttaccaacaatttaatgaatatggagttgatgggggaccngctacaaaagcactcagacctaagtttgatgcctttacacatcgggtgcatctcaagtgggctttcaaattccagagattaatctgaaattttt

SEQ ID NO: 30594 - DNA, 299 bp, Glycine max
  unsure (1)..(299): unsure at all n locations; Clone ID: 701062837H1
gcgagcnagcagtttcaaagagaggatttgggattgggaaggcgagggattgcnctgcgtctcttcctcttctctttcgattcatccctcattcatnatcttccaatccaacaacctcagcctcacactcacacatacanacatctgaacgcgtatcgtccctcccatggcttcaaagcgcatcctcaaggagctcaaggacttgcagaaagacccaccaacttcttgcagcgctggtccagtagctgaggacatgttccattggcaagcaacgattatgggtcctgctgatagtcctt

SEQ ID NO: 30595 - DNA, 297 bp, Glycine max
  unsure (1)..(297): unsure at all n locations; Clone ID: 701062838H1
cgcaagactttgtagctagcagaaatgaagaagcaattagcatcaaggcgtttgctgatgtgggttatggtacatttgagcatttcaggcgtgttgtccaagtccaaccacaccacaacttctgtagtgtgcgatggctccgtagaggactgcctcaacgttcaccacttggactcacagcttcccaccatctccagcacccacttccgcagaatccttgccggagtcatcaatcctgtgactgccttacgaataatcccgccattccccccggctcgtccganttcccaggttatg

SEQ ID NO: 30596 - DNA, 294 bp, Glycine max
  unsure (1)..(294): unsure at all n locations; Clone ID: 701062839H1
tctctttcaccgataaaacaaactaaattcttcttcttnctactgaaaacgatagtaatggcgacgaatccaatcgaagcggggaacggcgacgccgctcctaaccctaacgcgactaccaaaccctccgtctacctccaagacacggaggagctgaagcgagtcttcagccgcttcgacgctaattgcgacggcaagatctccgtcaccgagttggacaacgtcctccgctcnctcggatccggcgtccgcggaggatatccagcgcgtcatggacgacttcgaaacggacca

SEQ ID NO: 30597 - DNA, 291 bp, Glycine max
  Clone ID: 701062841H1
ctggaactttcctcagctcttgagaagatgttcagctgcttcaccattggtcaatgcaattctcctggacttcctgggaaagatggactaagtgagagctctttgagggatcttctccatggatctgaatatgttcttacatatgaagataaagatggagactggatgctgtgggtgatgttccttgggagatgttcactgattcatgtcggagactaaggatcatgaagggctctgaggcaattgggctagctccaagggccatggaaaaatctaggagccaaaactatg

SEQ ID NO: 30598 - DNA, 293 bp, Glycine max
  unsure (1)..(293): unsure at all n locations; Clone ID: 701062842H1
gtaacttanggnttcanacctaggaagttggaagtcatggcagcaacattgatggcagcaacaacaagttctggtactcttaaagcaactcctttccttggccaaggcaagggtgccaatgccaatgctcttagggatgttgtctccatgggaactgggaagtacaccatgggcaatgatttgtggtatggaccagacagagtgaaatacttgggacccttctcagctcagaccccttacatanttganaggagaattccctggggattatggatgggacactgctggcttat

SEQ ID NO: 30599 - DNA, 289 bp, Glycine max
  unsure (1)..(289): unsure at all n locations; Clone ID: 701062843H1
gtgtattnccttgttggggagctgtaaaatgngggnatatantcangatcttgatgagctcttcaattgttnatatttgncaagancttaatcctctntaatcagaaactgcntttgaagtctttcgtctcgcatggntcatcatccaactttgtgattcagtttggcagcntaacgaggcgtcttaatgggttcatttcaaaagcggaaaagcattcaaggaaaagcagttggtggcagaattttttttcaatgatgatgggaatggctggtttgagggacgatgata

SEQ ID NO: 30600 - DNA, 292 bp, Glycine max
  unsure (1)..(292): unsure at all n locations; Clone ID: 701062844H1
gtagtcgcaaccctaatcagaagaagcgcagttcaagcgagtgacagccaccagccatgggtcgtatgcacagccgcggtaagggtatatcctcttctgctttgccctacaaaancacacctcctagctggctcaagatctcttngcaagatgtcgaagaaaatatctgcaagtttgcgaagaaaggtttgaccccgtctcagattggtgtcattctcagagattctcacggtattgctcaggtcaatagcgtcactggcagcaaaatcctcgcatcctacaaagctcacgg

SEQ ID NO: 30601 - DNA, 291 bp, Glycine max
  Clone ID: 701062847H1
tttctatagtcccaattatagtaacagtgcaagatctattttccgcatcttggatatctggctaaaagattgaatattgtgttaatctttctagtagtcaaggggaacaatgaatgcactagcagccaccaacaggaactttaagttggcctctaggcttctgggattggattcaaagcttgagaaaagtttgctgattccattcagggaaatcaaggttgaatgtaccatacctaaagatgatggcacgttgcaatctatgttgggttcagggttcaacatgataatgcc

SEQ ID NO: 30602 - DNA, 271 bp, Glycine max
  unsure (1)..(271): unsure at all n locations; Clone ID: 701062848H1
ctgagatggcaaagaatgtggggantctcgctatccgacatnnacttccctcccacctgtactcagcaggaattgctggaggctcatgatggtgccagtaaagggaaatatactattggacttggtcaagattgcatggcgttttgtacagaagtagaagatgtcatctcgatgagtttgacagtagtttcttcccttcttgaaaagtatgcgatgatcctaaacaaattggtcgtctggaagtaggcagtgagactgtgatgacaaaagc

SEQ ID NO: 30603 - DNA, 301 bp, Glycine max
  Clone ID: 701062849H1
gggaccttaccttgttcttcatctaagaatggagaaggatgtgtgggtgaggaccggatgcctccccggtttgagtcccgaatttgatgagattgttaacaatgagaggatacaacggccggagctcttgactgcaagatcaagcatgacttaccatgaaaggaagatggctggtctatgccccttgaatgctgtggaggttactaggctttgaaaggtctaggagctccaaagaatgcaagaatttactgggctggaggacaaccattgggtggaaaaaaagccttgcttccattgatcc

SEQ ID NO: 30604 - DNA, 294 bp, Glycine max
  unsure (1)..(294): unsure at all n locations; Clone ID: 701062850H1
gnaactcatttcnttagagtgagagagagatagngagagagagacgggtatcacngtgaaacgaagaagccgtcnctacgcacgcactcattcttgagaaagctcnatattcnnncgaccanggcacnctcntctngtcnctnatncanatccanattgatctatggctgtcaaatacttcngnaaaaggngnatgctattccanttcgtnncttngctaaagagtctgcccctcctgccctacgggagatcaannctgaagaactttntgtggaggtgtagagaatttgcgac

SEQ ID NO: 30605 - DNA, 298 bp, Glycine max
  unsure (1)..(298): unsure at all n locations; Clone ID: 701062851H1
cnaactcanacactttgtactctccgtcctttcttcttccatccagatctctctccttctccctcaaatgggctcccttctgcaatgttccatgcccctcgtctctctttccaatcgagctctggtacccggtaccaggatctccaacccaagttcagtttccctttcaattaagggangaagtttcccatccgttacattgcagcccagagggcgtcggtttcagcttagatgtgcggcaaaaccagagacagtggaagaaggtgtgtgacacataannnantannggcnntncnaa

SEQ ID NO: 30606 - DNA, 297 bp, Glycine max
  unsure (1)..(297): unsure at all n locations; Clone ID: 701062853H1
gcacatttaatcnacattcatgtgacanngattatcactcatccacggaacatangnnnaannanggatanaatgggctctttttcagtggaagaattcataggaggnggaattttgggggaactgctccaaaagttgttggaagaagggtgggatgatgtaccaancctgaagatgatgagttcagaggacatggatntactacagatgacacaagagcaaaaggatgcacttggaatcaggtcatacctgcatgatcgtggactatgcaatatgcagataagatggaagattgtg

SEQ ID NO: 30607 - DNA, 293 bp, Glycine max
  unsure (1)..(293): unsure at all n locations; Clone ID: 701062855H1
tgctcatcaagtccaagaaccaacctaccttttgcaatctcaattcaatggcgtcctctctcattgcgaancgctntcctctcctcttcnctcctctccaggtccctccttcgccccgccgttccgcttcccaccgncatttcaacaccaacgccatgcgccagtatgacaaccgcgccgacgaccacagcaccgacatcgatcgtcactccgaagctctttccctagcactgcgcgccgcgacgatatcttctcagatgtgttggatccatttttccgatcggagnntgagc

SEQ ID NO: 30608 - DNA, 293 bp, Glycine max
  unsure (1)..(293): unsure at all n locations; Clone ID: 701062856H1
gcaagaatggcacttcgttgcttggtgatgtccctttctgttctcttcactcttggtcttgcgagagaaagccatgccagagacgaagatttttggcatgctgtttggccaaacactcccattccaagttcattgcgagatcttctaaagcctggccctgcaagtgtngaaatcgatgatcaccctatgcaaattgaagaaacacagtacccgaaaaccttcttctacaaagaagaccttcatccaggcaaaacaatgaaagtacaatcagcaagcctcccttcaacaaccag

SEQ ID NO: 30609 - DNA, 292 bp, Glycine max
  unsure (1)..(292): unsure at all n locations; Clone ID: 701062857H1
cattaattgcaagaatggcacttcgttgcttggtgatgtccctttctgttctcttcactccttggtcttgcgagagaaagccatgccagagacgaagatttttggcatgctgtttggccaaacactcccattccaagttcattgcgagatcttctaaagcctggncctgcaagtgttgaaatcnatgatcancctatgcaaattgaagaaacacagtacccgaaaacctcttctataaagaanaccttcatccaggcaaaacaatgaaagtacnntcagcaagcctcccttc

SEQ ID NO: 30610 - DNA, 292 bp, Glycine max
  Clone ID: 701062858H1
ttcccttcccatggtctctctctcttcaattaattccatttagctttccccaaatcccaaaccctttttcgcttagatcccaatccaattgggttatggacatggcttccagtccccgcaccgtagaagagatcttcaaggattacagcgccagaagaacctctgttattcgcgctctcactcacgacgttgatgaattttacggcctctgtgatccagataaggataacctgtgcctctatggacatccaaatgaggcctgggaagtaatctgccagcggaggaagttccg

SEQ ID NO: 30611 - DNA, 292 bp, Glycine max
  Clone ID: 701062859H1
tttctatcaacattattatagattaccgtgaaccgtgttagctcaaatctgacctatactagcttcaatattctcagttacttcaagacgtggagcccaagttttcagaatcatcacattttgcattgctggaccagcagcagtcattgcaatagtgatggcatgctgtgtgtgctacaaggagagactaaccaacaggtctgcacttgcagctacaatcctcgccggtgccacaaatcgcaaccacgggtctcgacgagtccacgatcgagtcctacgagaagatggtggt

SEQ ID NO: 30612 - DNA, 292 bp, Glycine max
  unsure (1)..(292): unsure at all n locations; Clone ID: 701062861H1
gggagactccaaattggactactgataagaaggcattagaagctttcaaaaggtttggaagcaaactgactggaattgaaggnaaaatcaatgcaaggncacagtgatccaagtctgagaaaccggactgggccagttcagctgccatacactttgctccatcgttcaagtgaggnagggttgacttcaaaggaattcccaacagtatctctatctaattaaaaagagtttgtggtttcctatctatgttgtacttctgaataacataggactttatgcatgtctatgcgta

SEQ ID NO: 30613 - DNA, 280 bp, Glycine max
  unsure (1)..(280): unsure at all n locations; Clone ID: 701062862H1
cttttacaatcacaactaaggttactgaagaagatgcttctaaacgccatgagaaagaaataatggagtttggaacctcctctccaatgctcactgtattagccactcttgcattgctcaatttattttgttttcttagtgtattgaaggatgcaatcctaggtgaaggtgacattggagctatgagacaatggggttgcaagttctattgtgtggnttctgttttcatcaattgcctatataccaggantttctaaggangacaaggagatgcctagct

SEQ ID NO: 30614 - DNA, 300 bp, Glycine max
  Clone ID: 701062865H1
tgaagggggtcggggggaatattgaacacaacacccactgcacagcttcataactaaaccgccatcgcctccaagactttccgtgcccaaaagatgagaaaacgcagcatttacgcatggctagtagcacttgtttgcttcctcctactcatgatcgtcaccccagccattccccagtcacaagaataccatgatttcgccgaccaccgcaccttcctcggtattcccaatgcacttaacgtgatatccaatttccctttctggttattggcctcgttggacttgtatctgtcatcatgg

SEQ ID NO: 30615 - DNA, 290 bp, Glycine max
  unsure (1)..(290): unsure at all n locations; Clone ID: 701062867H1
agctagtttatcgtgaggngaatatgaagntgtttgttttctttgttgntgcagtagttttggtagcatgggccatgccatggcgcaggctaccaaaggttccctctccgaatgaaaactggctatggtgagcgttcttcggaggtaaaatgcgcaagttttaggcttgctgtggaagcacacaacatncgatcnttaaaaccattcctgaagngtgcgttgaaccaacaaaggactacnttaatggcgaacatttagatcagatctaaaacgttaccacagntttnttt

SEQ ID NO: 30616 - DNA, 291 bp, Glycine max
  unsure (1)..(291): unsure at all n locations; Clone ID: 701062868H1
tgcatgcttgtncagcatggctganaatgagttgatnatatcagctcagaaggcagtanattacaccttctccattagttggngnaaacctgtacagaaaagtgggatgagaattgtaatattagcggggttccatttattttctgttcttgtgcattggatganaataggttgccattccattcaggcactgaggggggataaaggggtaaacattgtcaaacaaaaaccaaaaannaaaaaaaanttnccccnggatttagaacccgntggatgtaancggcattgtag

SEQ ID NO: 30617 - DNA, 293 bp, Glycine max
  unsure (1)..(293): unsure at all n locations; Clone ID: 701062869H1
cgcatcgancgtggagaaagagaaggattatgaggttaaggtggagtgtactcgtaatggtcacgctgctgtaactttgaaatggcntggacccctgcaagtacaaagcctctaattctgtttccgccttcgttcaaaacgccatctactccaacagaatcgccgttttctccaaatcctattgcccctactgtttgcgcgccaaacgcttgcttgctgaactcaatgaaaaacctttgtggtggagcacgatttgcgagatgatgggtttcaaattcagagtgntcttctgg

SEQ ID NO: 30618 - DNA, 291 bp, Glycine max
  unsure (1)..(291): unsure at all n locations; Clone ID: 701062870H1
gttttgggctgtggacgtaaaataatggctctgtcttttggttttgggctcttgnnnnnnnnnnnnnnnnnnnnnnnnntatgtgttctccctccatcagaaacccacactttcatgatgaggccttctgcttcttctggtttgcgcatgatgcgtaccagtcgcattacctgttgcaccctttctcagtcttctaagccagcccgcaaaatccgtggtatcatgaaaccccgcaaagtctccccgagatggaagactcgtcggcgctccgagatggctcgaaccaagtct

SEQ ID NO: 30619 - DNA, 293 bp, Glycine max
  unsure (1)..(293): unsure at all n locations; Clone ID: 701062872H1
tcatttctccatttccattttctctctcacttttcaagaatcgtaagctatgggaaagtcttacccaactgtgagtgctgattaccagaaggccgttgagaaggcgaagaagaagctcagaggcttcatcgctgagaagagatgcgctcctctaatgctccgtttggcatggcactctgctggaaactttgacaagggcacgaagnaccggtggacccttcggaancatcaagcaacctggcgaatgggttcancccgcnaacaaaggtcntgacatcgctgttaagcttttg

SEQ ID NO: 30620 - DNA, 224 bp, Glycine max
  unsure (1)..(224): unsure at all n locations; Clone ID: 701062873H1
tagtgcctccttgccagaagttaaaatggcccaaganactttcctattcacatctgaatcagtgaacgaggggcaccctgacaagctctgtgaccagatctccgatgctgtgctcgatgcatgcttggagcaggaccctgacagcaaggttgcctgtgaaacctggcaccaagaccaacatggtgatggttttcggagagatcacaaccaaggccaagtggata

SEQ ID NO: 30621 - DNA, 288 bp, Glycine max
  unsure (1)..(288): unsure at all n locations; Clone ID: 701062874H1
cnaatcctctaattcaagtttgcaccaagttttcctgaganaatgtctggtcgtggaaagggtggaaagggtttgggaaagggaggtgccaagaggcacaggaaggttcttcgcgacaacattcagggcattacgaaacctgcgattcgtaggttagcgagaagaggtggcgtgaagaggatcagtggtttgatctacgaggaaaccagaggggttctgaagatattcttggagaacgtgatcgcgatgctgtgacttataccgagcacgctaggaggaagacggtta

SEQ ID NO: 30622 - DNA, 269 bp, Glycine max
  unsure (1)..(269): unsure at all n locations; Clone ID: 701062875H1
gcagactgggtgttaccaaacacagctacaacacaacacagngtntgttgctacttctacntgccggcggcacctacttcaccgagaagagtgttccaacacaacacaacatnagncaanatgacaatttcancctctctgaccttaacacccaccaccccgagaatcaccgcaacaacccacacttcccacacttcccacacttcnaaccccacctatctcaaactcaatcctatttccagntttcccctctacgcgccttcctcccc

SEQ ID NO: 30623 - DNA, 237 bp, Glycine max
  unsure (1)..(237): unsure at all n locations; Clone ID: 701062876H1
gccatggttctctccaaaaccacctccgaatccgacgtctctgtccacacaacatacgannaccgatntgtcagaacttcgcttcccaggtttaagatgccggaggagtcgataccaaaggaggcagcgtatcaaataataaacgatgagttgtgttggatgggaacccaaggttgganttggcatcatttgtgacaacctggatggaggcagagtgtgataaactcatcatggctg

SEQ ID NO: 30624 - DNA, 179 bp, Glycine max
  Clone ID: 701062877H1
tgctgtgtgttgtgcaagtactaccttctctagctagattgctagagctagaatttcaacctacctatgtgtactgataagatctgcttccctacttaaagagagcatcatcctgtgatcagtgtgcttcgtattctctctctctatatatatatggtaaaaagtggttatctcgtgcc

SEQ ID NO: 30625 - DNA, 135 bp, Glycine max
  unsure (1)..(135): unsure at all n locations; Clone ID: 701062878H1
gtaattttnttgnaanctatccagtacctgcganngantagcatctcgnntcttgtgtttagcgnaggggattgannatgagtangtacggtagggatccgtggggagggccgttggagatccacgccancnact

SEQ ID NO: 30626 - DNA, 292 bp, Glycine max
  Clone ID: 701062879H1
ggagttcagaagcttgaacctaggccatccccaaaatcccattccatagtgaaggagtatgggagtagattactataagattttgcaggttgacaagcatgccaccgatgaagagttgaagaaagcttacagaaagcttgcaatgaaatggcaccccgataagaatccaaccaataagaaagaggctgagactaagttcaagcagatatccgaagcttatgaggttctgagtgatccccagaagagagcaatctatgatgaattacggagaagaagggcttaaagggcaagt

SEQ ID NO: 30627 - DNA, 291 bp, Glycine max
  unsure (1)..(291): unsure at all n locations; Clone ID: 701062880H1
cttgcaagangtttctgagcttttatatcctctatatatagttctcnggcanttaaggtctcatccnaataagcacaaatgggtagccagagttacttcaaggctttgattatttgccttatagcactaattggatcaactcaagctcaattgcagcttggtttctatgccaaaagttgtccaaaggctgagcaaataatcctgaagtacgttgttgagcatatccacaacgctccatcactagcagctgctctcataagattgcacttccatgattgttttgtcaatggt

SEQ ID NO: 30628 - DNA, 298 bp, Glycine max
  unsure (1)..(298): unsure at all n locations; Clone ID: 701062881H1
gtttcgtggttctgncttacataggctcntncactggggcatgagtcngtgaactttggataagnnttttgtgtaangaatttgtataataatggcaggcatggcaagangaagagcagatgtgnaatctagaaaaaatttggtcactacaactgtgttggttttggtgactgttggtggttttttctacttctattctcagaatagtgatcatcatcttctgttgagtatggtgctaaatctttgagccacactggtttgggancggacaaagatgatggtgtatcttcctccacac

SEQ ID NO: 30629 - DNA, 295 bp, Glycine max
  unsure (1)..(295): unsure at all n locations; Clone ID: 701062882H1
cattaccagctgatctcgtcaagagaggnttggcaattgaagatccctctagcaccccatgggccttcgccttgtgatagaggactacccttatgctgttgatggacttgaaatatgggatgctattaagacatgggttcatgaatatgtctccttgtattacccaacagatgcagcagttcaacaagatactgaactacaagcatggtggaaggaagctgtggagaagggtcatggtgacttaaaagaaaagcctggtggcctaaaatgcagacaactgaagatctcttcaatc

SEQ ID NO: 30630 - DNA, 297 bp, Glycine max
  unsure (1)..(297): unsure at all n locations; Clone ID: 701062883H1
cgagataaccctagttcgcttgcagtcacacaagaggccaatcctattcatagctcgagatgggtgaagaagtgaaggtagttgttccagaatcagtgttgaagaagcgcaaganggangaggaatgggcgttggccaagaagcaagaactcgatgctgccaagaagaagagagccgagagccgcaaactncatctacaacagagctaagcagtacgctaaggagtacgattcaccaggagaaggattgattcggttgaaacgcgaggccaagctgaaaggtggtttctatgtggat

SEQ ID NO: 30631 - DNA, 286 bp, Glycine max
  Clone ID: 701062884H1
cgtcaaggcaatccgcagaaagaccaccggaactggcaggatgaggtacttgcgtaacgtgcctcgccgatttcaagagtggcttcagagaaggtaccgaagctgcacctaggaagaagggagcagctaccactgcataaacctgtcaacgatcgttgtttgctgggtacggacttacaagaatagattgctttttgtgctatggcaagtattttggaacaattattttagagtctgattgctacttgtcctcattaattgtagttgcttatattcaacaagatca

SEQ ID NO: 30632 - DNA, 294 bp, Glycine max
  unsure (1)..(294): unsure at all n locations; Clone ID: 701062885H1
gaaattgagcagtgcagagactcctgaacgtcaacggctatngcagcttctncctntacaacatcttccnggtctcttccnattcanaactggttcnaaatcccctnnttctcaactattcccctcttttccttgcaaacatcataccctccgtctcagacccgtctcagtctcagccgcttcaaccccaaccccctccatccaagccgacaaatccccggtctccgccatccctccaagcttctcnccnttggggttgggcaggggttgactccnaaggatggaaacgggtng

SEQ ID NO: 30633 - DNA, 291 bp, Glycine max
  unsure (1)..(291): unsure at all n locations; Clone ID: 701062886H1
ctagttcacagcttcagttcgtttttnttgatcctgtgaacttatgnctgacggggtggttctgttggatacatgggccagcatgtttgggatgagggttaggattgcattagctgaaaagggtgttgagtatgaatacaaggaagaaaatctcaggaacaagagtccttgcttttgcaaatgaacccaattcacaagaaaattccagttctgatccataatggcaaaccaatttgtgaatctgcaattatagtgcagtacattgatgaggtctggaatgataaagctcca

SEQ ID NO: 30634 - DNA, 292 bp, Glycine max
  unsure (1)..(292): unsure at all n locations; Clone ID: 701062887H1
cngcttgatnacagagcagagcgaccttgaagagctatggctgtcggaaagaataagaggntttccaagggaaagaagggtggcaagaagaaagccgctgatccttttgccaagaaagactggtacgatatcaaggccccttccctcttccaggtcaagaatattggcaaaaccctcgtctctcgtacccagggaaccaagattgcatccgaagactcaaacatcgggtttttgaggtctcattggctgatctccaaggggatgaagaccatccttcaagaagattcgtttg

SEQ ID NO: 30635 - DNA, 292 bp, Glycine max
  unsure (1)..(292): unsure at all n locations; Clone ID: 701062888H1
ctcgtgagttcgagcccgaagtctccacaagacctcccagtncctagtgcaactgtttttggagtttcaacanantccatgcagttatcatatccacacgagagggaacagtgtgccaaccatactgctactaatgcaaaggcacttgtatgctctcggagggttgcaggaagagggaattttcagaattaatgcagataatagtcaagaggagtctgttagggatcaattaaataggggatggtcccagaagatgttgatatacattgtttggcaggacaantaaggctgg

SEQ ID NO: 30636 - DNA, 289 bp, Glycine max
  unsure (1)..(289): unsure at all n locations; Clone ID: 701062889H1
taggaattaacatatatatagcaagcatggcagtcacactctacgaccttagctcttcctctgggttgaanaaacttgatgagtaccttctcccacgcagttacatcaccgggtaccaagctacaaaggatgatcttactgtttatgcagctttgccaactgctccatcagatgaatatggaaatgtttccaggtggtacaagcacattgatgctttgttgagaatctctggtgttactggcgagggatctggtgttatgttgagggatctctagttgcagagcctgtt

SEQ ID NO: 30637 - DNA, 286 bp, Glycine max
  unsure (1)..(286): unsure at all n locations; Clone ID: 701062890H1
cngaccttaattnttctctcattcncttcanatttcaggaaatcaattatggctcaaccctcaacaagaataggccttgctggactggctgttatgggccaaaatctagcactcaatattgctgagaaaggctttcccatttctgtttataaccgaaccacttccaaggttgatgagactgtagaacgagcaaaacaagaaggaaatcttccagtttatggctaccatgaccccgaagctttgttcatccatcaaaagcctagggtgataataatgcttgttaagg

SEQ ID NO: 30638 - DNA, 286 bp, Glycine max
  unsure (1)..(286): unsure at all n locations; Clone ID: 701062891H1
tcacntttcccttggcgacgccgtgagaaangaaaagcgaacaannaaaaaancagagtggggtgggaggcanacgcacaaacgcagagttngaatctcnaatcttcaatcggagacaaagctagntcgaacgaacgaagtagagtagtgtgctacgaaaaatgtggcggtgcatcgnacgtggtctccgtggacctgnttccacaagatcnactcaaacctcatcanttggatctcaactttctagattcttctctagtggggcgaatcctcgtanaccgtggtg

SEQ ID NO: 30639 - DNA, 289 bp, Glycine max
  unsure (1)..(289): unsure at all n locations; Clone ID: 701062892H1
ctataatatcccattcgatttttgcttctctccctttcaacattataattcagaaaattcactatccaacattgataagagagagagattttttgtacacttcataacatgtcttcatattttccaagctttggtacaaanatcccacgtatggggaaggggtacgatgatgtgttgttcacagtgatcaaccaattagttaaaccaggttcatggtccaactataaagtcccctgcaacctctcaaagcaacacattagcttgtatcgaaattcgaccaaatttgttc

SEQ ID NO: 30640 - DNA, 282 bp, Glycine max
  unsure (1)..(282): unsure at all n locations; Clone ID: 701062893H1
ctccaattataacacccaccaaagaaccatggctacccagttcctcaaatccctccttctcctctccaccttaaccctaaccntctcagcagaatacacaggctttgtgggcacaatagacccaaagtcaataggcataaagcacaagaaaaccctaagccacttcagattctactggcacgaagtcttcagcggagaaaaccccacatcggttagaatcattcccgcactccccaaatacaacacaaccacaacctttggttcggttgggatcttcgacaa

SEQ ID NO: 30641 - DNA, 288 bp, Glycine max
  Clone ID: 701062894H1
gtttcaacacacacactgtctctgtacactacaaagtgtaagttgttaacaaagaaaggaaggagcatagactcaaagatgagcaaagattccatgagaggttcaaagaagaaacttttatgcagaaggcttggagggtacctcaaagagcaaaaaggaagactatacataatcagaagatgtgtagtcatgcttctctgttggcatgactagaatcattctcaacaacaagcattgtttaacgttctcttgcggctcatcatatcgtggatcagcacactctagagt

SEQ ID NO: 30642 - DNA, 262 bp, Glycine max
  unsure (1)..(262): unsure at all n locations; Clone ID: 701062895H1
gcaacacaaaagtggaaagaatgagngacncaaaactaccangcagtagtattcttgctactnttcaccttaattcttgcatctaaatttacgcaaggtcatcgtcatgtcacactcttctacatgaattcttcatttcatatgagttccattcaattcncaccttattttcacctagtttcttctactctctntcctttatgatttggatcttcttctcaactaaagaaccnatttcatncaaggcanngggngcccngca

SEQ ID NO: 30643 - DNA, 294 bp, Glycine max
  unsure (1)..(294): unsure at all n locations; Clone ID: 701062896H1
ctggatttggactgaatgaaaatataaagaaagagaagagagaaataattttccgggaaaattcaagttccaatcggaaccggaaatgaatanggtttggtttctaatattccttctgctgatctcgaaatgcgatcatgtgtggagctcttacgcgggttccgctagctccgtcatcaacccttccaaggtcaaacagatttcctgggaagccaagagctttcgttttatgaagggttnctcacnggattggaatgcggaccactgatctctcnagcggaatcggagcttaag

SEQ ID NO: 30644 - DNA, 267 bp, Glycine max
  Clone ID: 701062901H1
ttcaccgattgctagaatgcaatttcgatgctcagtcatctcttttaccattctcttctctcttgctcttgcaggagagagccatgtccatgcatcgctacctgaggaagattattgggaagctgtttggccaaacactcccattcccactgcactgcgagagcttctaaagcctctccctgcaggtgttgaaatcgatgaactccctaagcaaattgatgatacacagtacccaaaaacattcttctataaagaagccttcatcca

SEQ ID NO: 30645 - DNA, 261 bp, Glycine max
  Clone ID: 701062902H1
gtttgttgtgagctataactagtttatcgtgaggagaatatgaagttgtttgttttctttgttgctgcagtagttttggtagcatggccatgccatggcgcaggctaccaaaggttccctctccgaatgaaaactggctatggtgagcgttcttcggaggtaaaatgcgcaagttttaggcttgctgtggaagcacacaacatccgagccttaaaaccattcctgaagagtgcgttgaaccaacaaaggacacattaatgg

SEQ ID NO: 30646 - DNA, 261 bp, Glycine max
  Clone ID: 701062903H1
tttggggagagaggcatttacttggtgctgttcatggggttgtggagtccctgtttaggagatacactgaaaatggaatgaacgaagatctggcctataagaatactgttgagtctataacaggaattatatctaaaaccatctcaactaagggcatgctagctgtatacaatgctttatctgaagatgagaaaagggaatttgagaaggcttatagtgcttctttttatccttgcatggaaattctgtatggtgctacga

SEQ ID NO: 30647 - DNA, 259 bp, Glycine max
  Clone ID: 701062904H1
cttagtttgtgttattgcattcttttcatttccatttcgtcaacttattgctggctgcctccttacagttatagtgttatagcatttatttttatttcattaacactcatcatatgatggctaaccataccatgaagatggccaacttgttgcttctcgtgactttggctcagctcttagccaccgcaatctcatcagatcctgaccttcttcaagacctctgtgtcgccgaccttgcctcaggtgtgaagtgaatgga

SEQ ID NO: 30648 - DNA, 259 bp, Glycine max
  unsure (1)..(259): unsure at all n locations; Clone ID: 701062905H1
caaaaaaagagattaggattggtgttgcgcanccgcaggagatatggccatggctttggtgagcctcagcaccattctcacaccgcnnnnnnnnnnnnnnnnnnnnnnnnnnnnnccaaaaccttcttcttcctccatcgttcggtttcgccctctcactccccttcctcgctttcggaggcacctcgttcgtatggctcccgatgaggagaagatgactcgtcgctcccctctcgatttccccatcgaggggaaaggc

SEQ ID NO: 30649 - DNA, 258 bp, Glycine max
  unsure (1)..(258): unsure at all n locations; Clone ID: 701062906H1
aatcttggtttcttcattttctaccctccattcatatgaatatccaaacttacaattaatcaacaataacagttggtgtagtagtattatgagcatgcaaagagagaaaatggcaaagaaatccatcggaagcttaatgcgaaagangctttctgatatcaccaacaacactaatcctaattactctcaacaacttgacactactctttcctccgataacaattccattcaacaactcctcncggaaagacggcattg

SEQ ID NO: 30650 - DNA, 259 bp, Glycine max
  Clone ID: 701062907H1
ctcattaattgcaagaatgcacttcgttgcttggtgatgtccctttctgttctcttcactcttggtcttgcgagagaaagccatgccagagacgaagatttttggcatgctgtttggccaaacactcccattccaagttcattgcgagatcttctaaagcctggccctgcaagtgttgaaatcgatgatcaccctatgcaaattgaagaaacacagtacccgaaaaccttcttctataaagaagaccttctccaggcaa

SEQ ID NO: 30651 - DNA, 199 bp, Glycine max
  Clone ID: 701062908H1
aatccttttataacatttatagtttcattcttaatcgttgggaaaaatgttcatcgagaattttaaggtagagagtcctaatgtgaagtacaccgagactgagattcagtccgtgtacaactacgaaaccaccgaacttgttcacgagaacaggaatggcacctatcagtggattgtcaaacccaaatccgcaatacca

SEQ ID NO: 30652 - DNA, 263 bp, Glycine max
  Clone ID: 701062909H1
caattactactttctctcttttgtaacttgtaagcatggagtcctcaaagatctatgcttacctcttcctttgcatgctcttcctctcctccgccactcccattctcggttgtggctactgtggcaaaccccccaaaaagcacaagcctggtaaaacaccaaagacacccacagtacccgttgttaagccaccagtcacaatccctcccattgttaagccaccagtcacaatccctcccattgttaatccaccatcacaatcc

SEQ ID NO: 30653 - DNA, 260 bp, Glycine max
  unsure (1)..(260): unsure at all n locations; Clone ID: 701062910H1
gcagttttcttagtccaaatctatcattcttatcccccaagtagaaaaagatgagttttgaagattcctacgaagaaacatcagtacagttggaccatggggaggcaatggagggtcccgttgggatgatgggatatactcaggagtaaggcaattggtgatagttcatngaacaggcattgactccatccaaattgaatatgataagaaaggaagctctatttggtcagagaagcaggtggaagcggaggctaaaaccg

SEQ ID NO: 30654 - DNA, 262 bp, Glycine max
  unsure (1)..(262): unsure at all n locations; Clone ID: 701062911H1
cttcaacccgacggtgctgngcctcagtcgcctcatggccgccctcgaaggcaccgaggccgcctactgcaccgccagcggcatgtccgccatctccgccgtcctcctccagctctgcagccacggcgaacacgtggtcgcctccagaactctctacggtgggacccacgcgctcctctcacactttctcccgcgcacgtgcggaatatccactagcttcgtggaggtgacggatcttgacatggttgatgctccatagtag

SEQ ID NO: 30655 - DNA, 264 bp, Glycine max
  unsure (1)..(264): unsure at all n locations; Clone ID: 701062912H1
ctccgataggcggcgccggcgacttcgccagancagttcttcgccgagtcgaagaagctctggtacctcgccggccctgccatcttcacctccgtctgccagtactccctcggcggcgtcacccaagtcttctccggccacgtcaacaccctcgtcctcgccgccgtctctgtcgaaaactccgtcatcgccggcttcagcctaggcatcacgtttggnatgggaagcgcgttggaaagctatgtggacaagcttcggagcggg

SEQ ID NO: 30656 - DNA, 260 bp, Glycine max
  unsure (1)..(260): unsure at all n locations; Clone ID: 701062913H1
taaaaaataaaaaaagtttgcgtgtattttcgcgcattcagaatttnatggcgaagtttggcgagggcgacaagcggtggatcgtggcggaggtcccgacggcactaacgtgcacaactggcactgggcggagaccaactgcctcgagtggtccagaaccttcttcaagaacaatttcagtaacgtcgccgtcggtggcggcgacggcgatgccaccatcacgatcaagaaggtggagaagctcgatggcgagctacgtg

SEQ ID NO: 30657 - DNA, 265 bp, Glycine max
  unsure (1)..(265): unsure at all n locations; Clone ID: 701062914H1
ctccttctctcgttgattcggtctagagtcttttttcactcttcagttctcgttgttgttcttcgctttcctgaaactagggttttcaatttcgattcattcgttaataattaaagatgtttgggagggcaccgaagaagagcgataatacgaggtactacgaaatcctcggcgtctcgaagaacgcttcgcaggatgatctgaagaaggcttacaagaaagccgccatcaagaatcaccctgacaaggcggtganccgagaagt

SEQ ID NO: 30658 - DNA, 268 bp, Glycine max
  unsure (1)..(268): unsure at all n locations; Clone ID: 701062915H1
caacactttccacttgtctccgaattagttatcttgagaaacattattcccattgctatatattatggctagcatgaaggttacatgggtggttgtgatcatgtgcatggccgtggtgggtgcaccgatgatggcgcaagccatgcacatgcaatgatgtgacggtgaacatggcacagtgcctatcctacctgatgcagggaggaacaccttcaacactttgctgcagcggagtcaagaacattcttggctctgctgnaccaccgtt

SEQ ID NO: 30659 - DNA, 272 bp, Glycine max
  Clone ID: 701062916H1
tgaatagtgagttcttctcaacaagcctctaccttgtgatccctcaagcttaccaaagtatcctcctagcaaagaatttgatgccaaagttcgggatgaagaagctagaagacaaggagcagcaggaagcaagggccagagacatgatcttgagagaagaggtgctagagaatcacgagccattcctgcacctgatgccaatgctgaactggtcttgtccaatgcagaagagacaagggcaggccaattctcagagcaagaggagaagttta

SEQ ID NO: 30660 - DNA, 261 bp, Glycine max
  Clone ID: 701062918H1
atccctctccctcttcatctcttttgtgcaaatggccaaatgtttggcactctcactaatcatggcaggcctcttcattggcttggtgagtccacaatggaacatattgaacccaaaatggggaaaaagtgttgaagtagtgaatcgtccagaatggaacatcttgaatcaaagattgagaaaaggggttgttggagacaacttgaagaactactgcgagagttggaggataaatgttgaactaaacaacatagagggttc

SEQ ID NO: 30661 - DNA, 263 bp, Glycine max
  Clone ID: 701062919H1
ttttaatcctaattctgcacttcttgatcattcgatttttctcctcaagatgcagatattcgtaaaaactttgaccggcaagaccatcacccttgaggtggaatcctccgacaccattgacaacgtaaaagctaagattcaagacaaggaagggatcccacctgaccagcagagacttatctttgcgggtaaacaacttgaggatggtcgcacccttgtccgattacaacatccaaaaggatcaaccctccattcgtgcttcg

SEQ ID NO: 30662 - DNA, 259 bp, Glycine max
  unsure (1)..(259): unsure at all n locations; Clone ID: 701062920H1
atttatttcgttcaatttccggcggcaccgcaaccgattccgccaccgcatatggcaaaaggtcgaaaactaacgaacagccggagcgagcgcttcttnggaacctatgcttacagccaaggctccgccgccgtgaacccgtcggagcttcgggaagaggatgtatggggcgccggagatgacgccggcgaacgcgagtgggcatccacacttcgccgccatgagcaacggcggcggaagcggcgccggatccgcgtga

SEQ ID NO: 30663 - DNA, 259 bp, Glycine max
  unsure (1)..(259): unsure at all n locations; Clone ID: 701062921H1
ttaattgcaagaatggccttcgttgcttggtgatgtccctttctgttctcttcactcttggtcttgcgagagaaagccatgccagagacgaagatttttggcatgctgtttggccaaacactcccattccaagttcattgcgagatcttctaaagcctggccctgcaagtgttgaaatcgatgatcaccctatgcaaattgaagaaacacagtacccgaaaaccttcttctataangaagaccttcatccggcaaaaca

SEQ ID NO: 30664 - DNA, 258 bp, Glycine max
  unsure (1)..(258): unsure at all n locations; Clone ID: 701062922H1
cgaacggcgaacgttcgcagagacgcaacacaaagttgaacgaggaataggcgtgtagggaaaccgtttcattttcnngcgcgtgactttcaaatccaatcttccataccaatggccttcagcaacgctctcagatctgccgcgaagttgtcgcttcttccgaatcctccctctctaactcagtgagcagaggttttcattcaactggcatgaagaggatgggaggtggacatggccatgatgagccctatatcttca

SEQ ID NO: 30665 - DNA, 260 bp, Glycine max
  Clone ID: 701062925H1
ccgtaactggatctcttgtggtcttaagcctggtctccatggcttccatgtccatgccttgggggacactaccaatggttgcctgtcaactggagcgcatttcaatcctaataacaacgagcacggtgcccctgaggacgagaatcgtcatgctggtgatcttgggaatgttaatgtcggtgatgatggtaccgttagcttcagtattaccgacagtcagattcctctcactggaccaaactccatcatagaagggctgt

SEQ ID NO: 30666 - DNA, 261 bp, Glycine max
  unsure (1)..(261): unsure at all n locations; Clone ID: 701062926H1
gggaaatcgaganaccctatggagccggaagtggnagtgaagagagtaaatgacgatcncattncggtggtgatacagaagctgcttagcaccaatgctcaggtgggtcgacgtgttgccgctcaccatttgaaggagttcacctatggcttccgcnccaaaatggccnnccatcgactccgacaagaccctacatttgcatgcgcatgcctgcaacttcatggctccctcgcccgccacaacggccgcttcnttcatcaa

SEQ ID NO: 30667 - DNA, 258 bp, Glycine max
  Clone ID: 701062927H1
agaaaagaccatcaaagttcacttcagccttatccggtttagggtttcggtttttgacccaacctttgacgtatcgaaaccttaagtttcggatcaggtctgagcaatctggttggtagaacctttggtcttagagagtcaagttttatgtctgaattagacgatcaaattcctactgccttcgatccttttgctgatgcaaatgctgatgactcgggtgctgggtcaaaggagtatgtgcatattcgctacagcagc

SEQ ID NO: 30668 - DNA, 263 bp, Glycine max
  unsure (1)..(263): unsure at all n locations; Clone ID: 701062928H1
cctttcttctctctctttcgtttcagcgcaacacaaccctcgttgttccgtgttcaggtgaaacgacaccgttttacccttcctcttctcggcacagcatctagcangttgtagaaaatatggccaagcatcatcctgatttnattatgtgccggaagcagccagggattgccattggacgactgtgcgnnanatgtgacggcaaggtcgatgtgtcatatgcggaggagttggaatatctgatgcctactactcaaggnatg

SEQ ID NO: 30669 - DNA, 264 bp, Glycine max
  unsure (1)..(264): unsure at all n locations; Clone ID: 701062929H1
aacagcctcaaagcgctctctctcttcaggcaactgtcaccaatttcgccaccaatttcatctcttccggtttagccggtttcttcttctttcacgaatcactctctttccagtggtttgcaggtgccatacttataataattggtgtagtaatacttagcaactcaagtattgagaaganggttagcactgattaggtgttacagttcaacacgatacctttaaggcttgcttgttcaagaaggaggcaagcattgcagctgc

SEQ ID NO: 30670 - DNA, 265 bp, Glycine max
  unsure (1)..(265): unsure at all n locations; Clone ID: 701062930H1
anaggctctgcctgttgctttgatgattcatgataactcgtcggatcgcacggcctttgtgccggcgacgcatcnttcaaatttctgccctatcaactttcgatggtaggatagtggcctaccatggtggggacgggcgaggttaaccgaagttgctcatttaggangaagggagattgaatggtttgttaaccagacttttctttgtcaatgatttgacattttcggttgtnaggtttttgagatggaatcaattcagttatgg

SEQ ID NO: 30671 - DNA, 268 bp, Glycine max
  Clone ID: 701062931H1
ctctgaaatcatagtaaaatactccccactgaagttcaagttcttgtgtgtaaaatggccaacattttcctacacaatgggggcaacacttgcaaggctaccctctatctcttattcataaccacaaccttttttatcgcaaactctgcaaggattctagatgaagtggaatcccaaccccaagccataggcaatctaccagcacctggagctaccaatccttcactcacaacagctccagtcaccaccacaccacagaagatcctgc

SEQ ID NO: 30672 - DNA, 271 bp, Glycine max
  Clone ID: 701062932H1
ggaaccgtgctttctaatcttgtcattttctgcgttgcttcgtggttaattcttcgtgttcttgtgatctttctgttggagtatttacaacactcctttgtaagtttaactaaagaggctaattaattttcaattggaccacagcagatggctgaggagggtcacagggttactctaaatgtttatgacttgagccaaggtcttgcacggcagctttcaatgtctttttggggaaagctattgaaggcatatggcacacagggttgttgtt

SEQ ID NO: 30673 - DNA, 261 bp, Glycine max
  Clone ID: 701062933H1
cagggagctcgagtaagagtattcatgtatccaagtaatatatgaggtaatctcttttgttgatgttctctaactagttgttctgtctttctattctatgtaacattctttggaaatcctgtgctgtattccatgcgttatgtcagtggatgtactgcatcattgggtctccaaatgtgtatataacatacatgatgacgatccatttgttcattatccaaatgtgtgtaaataacatacacgatggttatctttgttgat

SEQ ID NO: 30674 - DNA, 245 bp, Glycine max
  unsure (1)..(245): unsure at all n locations; Clone ID: 701062934H1
gagtttgttgtgactataagctagtttatcgtgaggngaatatgaagttgtttgttttctttgttgctgcagtagttttggtagcatggccatgccatggcgcaggctaccaaaggttccctctccgaatganaactggctatggtgagccgtcttcggaggtaaaatgcgcaagttttaggcttgtgtggaagcaccaacatcgagtcttaaaaccatctgagatgcgtgaaacnccaggntaa

SEQ ID NO: 30675 - DNA, 255 bp, Glycine max
  unsure (1)..(255): unsure at all n locations; Clone ID: 701062937H1
tcatcggaggtggattgctgggcttatctacgaggttgtcttcatcagccacacccacgagcagcttcccagcactgactactagaggggannnnnnnnnnnnnnnnnnnnnnnnnnnnnnnnnnnngantttcnccggaatcttcttctgtgtatggttttccttcctttgtgttttcttncctgttgaatcggtggccgttgatctttcnctggatggttgatgatcctgaagttttcttttaattaatttaa

SEQ ID NO: 30676 - DNA, 258 bp, Glycine max
  Clone ID: 701062938H1
ttgattacaagatgccaacgtctaaacctcttttccccaaagagaagaaaacataatagatatctcattctcatcttcatactgcatctgcccatgtttcttgtttctgtctgcaattttcaattccaactctctctcacatgcaattctccatccaacaaaagtttctcatcatttctgtttcccataagcaattaattaaaatactgaatttggtataatttctttctcaaatataattagttttacattatttta

SEQ ID NO: 30677 - DNA, 256 bp, Glycine max
  unsure (1)..(256): unsure at all n locations; Clone ID: 701062939H1
ctctgtgccgtgttttntattcccaatttgaaaatcgtgacagangaaaaagaacgaagaaaaggggnnagggtttcgatttcggaagangaataataaggagcttctgaaagacagggttcagtgttcgaaaatgaagacgacgaagggcggcaaggtcatgaaccctaccgatgcttaccgaaaggngattcggaagacagaattganaaggaataagananacagacagaaggtgagggaggtgggnttttga

SEQ ID NO: 30678 - DNA, 258 bp, Glycine max
  unsure (1)..(258): unsure at all n locations; Clone ID: 701062940H1
gtttatcgtgaggagatatgaagttgtntgtnttctttgttgctgcagtagttttggtagcatggccatgccatggcgcaggctaccaaaggttccctctccgaatgaaaactggctatggtgagcgttcttcggaggtaaaatgcgcaagttttaggcttgctgtggaagcacacaacatccgagcncttaaaaccatnncctgaagagtgcgttgaaccaacaaaggactacattaatggcgaacaattagatcag

SEQ ID NO: 30679 - DNA, 259 bp, Glycine max
  Clone ID: 701062941H1
gagagatggtgatggctggaaatggattgtgcgaagaacccgcgaatcgaaacccttcttccttgcattccgccaccgtatgcggcgtcgttcctggcgtcataggctatggtgtcatgcaactcactaacacccgcaacgagaagcttgagtcccatcttcgcacaaatgcccgtcccgaatcattgatgatggggcaagtcaataaagagagactggcagagtacctgggagagctacagcgtaaagagatacgaat

SEQ ID NO: 30680 - DNA, 260 bp, Glycine max
  unsure (1)..(260): unsure at all n locations; Clone ID: 701062942H1
gattccacaacagtggnagggagatccaaaaagagagagtggaaaagatggcgcggttgatcacagtggtgtggtgcgcggtggcggtgctattatgcgccgcggccggtgcgtcgtgggtggaggaggcggaggtggttcgggtgatcgnntggnctgccggcgtgcgttgaagtttgctaggttcgtgagcaggttcgggaagagttaccaaagcgaggaagagatgaaggagaggtacgagatattctgcagaatct

SEQ ID NO: 30681 - DNA, 259 bp, Glycine max
  unsure (1)..(259): unsure at all n locations; Clone ID: 701062943H1
cagaaccatatttttctgaaaagtgatggaactttgacgccattggccattgagttaagtaagccgcatcctacaaggtgaagaatatggtcctgttagcgaagtctacgtgccttcgagcgaaggagttgaagcttatatttggttattggcaaaggcttatgttgttgtaaatgactcgtgctaccatcaactcgttagccattggctaaacactncatgcggttgttgagccatcgtcatagcaacaataggcatc

SEQ ID NO: 30682 - DNA, 260 bp, Glycine max
  Clone ID: 701062944H1
gtttctccgccatcgcatagcacccatagcttcgctagggggggcaaaaccaatcgtagtctctgaagtccaaagggaggtatcatcttttatagaaggggggcaaaaccaagaaaatttcagattggtgactgtgacagcacttggcttaattgttttggttgacagtttttcctcttgatgtggcaaaaactttaattcagacaaaccctgataaaaattgtccaagaaatcctttttgggtcttgagtcaggctgga

SEQ ID NO: 30683 - DNA, 260 bp, Glycine max
  unsure (1)..(260): unsure at all n locations; Clone ID: 701062945H1
ggcgttctatatattatgnattgacaatgaggcctgctcttgctttgcttcctcttctatttgctttcttgttagctgccacttggaatcaagaaaagatccaggggaatattggaaaatgatcatgaaagatcaggaaatgccagaaggacttcaaggtcttgtttcatttcaatctgaaaataaccctaagactcaagagcagcttggtaaaggttccaaaaaccattgtgaagagtctctagttacaatanacaagt

SEQ ID NO: 30684 - DNA, 263 bp, Glycine max
  unsure (1)..(263): unsure at all n locations; Clone ID: 701062946H1
taaggaactctcccagnaaagaggcatcagttgcaatggctcgttacggtgagggcgacaagcggtggatcgtggaggaccgccccgacggcaccaatgtccacaactggcattggtccgagaccaactgcctcgactggtccaagaccttcttcaccagcctcctcactaacctccctatcctcgacggcgagggtaacctcttcctcaaaacgacgtcgcttcgctccctcgacggcgaggcctacatcaatgccganagg

SEQ ID NO: 30685 - DNA, 264 bp, Glycine max
  unsure (1)..(264): unsure at all n locations; Clone ID: 701062947H1
tttatccctccattgcttgcactgccgccgataacaattttctgtatcgtgtattttttttttctttgttcacagctctgcgagatcttcattcgccgattttaaaagatgagtaagcttcagagtgatgctttgcgtgaagccatttcaggaatcatggccgattccaaggagaagaatcgcaaatttgtggagaccatcgaactccaaatcgggttgaaaaactacgatccacagaaggncaagcgtttcagtgctctgtca

SEQ ID NO: 30686 - DNA, 189 bp, Glycine max
  unsure (1)..(189): unsure at all n locations; Clone ID: 701062949H1
ctatggagcttggagacactaccacagtgatggaaacgtcgtccggtgaggctgtgncggcgcatggcggtggcgaggtgattatgatggatgcgaattccggtgaagaagagaataataatcataataataaaggaaaattagaagagggtggtggagaagaagaagaaggtgacaatagatcaacaa

SEQ ID NO: 30687 - DNA, 257 bp, Glycine max
  unsure (1)..(257): unsure at all n locations; Clone ID: 701062950H1
ttcttctcttgcggtagggttttagcgcagttccttctagatttnaggaagatgggtaaggaaaaggttcacatcagtattgtggtcattggccatgtcgactctgggaaatccactaccactggtcacctgatttacaagcttggnggcattgacaagcgtgttattgagaggtttgagaaggaagctgctgagatgaacaagaggtctttcaagtatgcctgggtgctggacaaattaaggctgangtgaaagag

SEQ ID NO: 30688 - DNA, 259 bp, Glycine max
  unsure (1)..(259): unsure at all n locations; Clone ID: 701062952H1
gtacgacanttccatttcatcgtaaacnaacctcaaagttgcattccaccatgtctaaacanncccattgatncctttcgcnacatcaacatagttctgcaaccctaacggaaccctaaatncgcttgcncccatattcccagcaccgcaccctcttcngancccactctcccagttctanaccaaagacatcaccatcaacnaacaaaacaacactggctcgnttattctcccccgaatagcatatcccanagngtaa

SEQ ID NO: 30689 - DNA, 258 bp, Glycine max
  unsure (1)..(258): unsure at all n locations; Clone ID: 701062953H1
gnattccattgttgtnatattgtattgtagccggagaagaagagaagagatagcggcgnagaaagaaagatgacggaggcatatataaggaagaagcccgggatggcgagcgtgaaggacatgccggttctccaggacggtccaccaccaggcgggttcgctccggtccggttcgcccggcgcatccccaacaagggccccagcgccgttgccatcttcctacatgctttcggcgctttctcttggggctgtaccagg

SEQ ID NO: 30690 - DNA, 227 bp, Glycine max
  Clone ID: 701062954H1
gcgttccatgggttggtttggaccaatccatagccgaagaagagaaaaaagagacaaggaccgtcttgagttaatttgattcagtgtagcagccagcagccataagcaacgcaacaattccatttccagtttctgattcgtcacgtccagacaaaggaaggggttagggtgtgacctgagatcaaaatgttgcggaggcttctctcttctacacctacaaaacccta

SEQ ID NO: 30691 - DNA, 252 bp, Glycine max
  unsure (1)..(252): unsure at all n locations; Clone ID: 701062955H1
gttctcttaactgaggcccctcttaaccccaaggctaatcgtgagaagatgacccaaatcatgtttgagaccttcaacacccctgctatgtacgtagccatccaagctgttctttcactgtntgcaagtggtcgtacaactggtattgtgttggattctggtgatggtgtcagccacactgtccctatctatgagggttatgcattcccacatgccatcttcgtcttgatcggccggtcgtgactatgattt

SEQ ID NO: 30692 - DNA, 258 bp, Glycine max
  Clone ID: 701062956H1
tttgaaggaaattattattcgcacgcttcttcttttgctcgaatcatggagggtggttatgctcgtcgactcttgcaggtcggtataagatcaataaacaaagaagggcgtgaacaagccaaaaagttcggggtagagcagtttgaaatgcgacatttttcgaaagatcgtccatttttggaaaacctgaatctaggagaaggtgctaaaggagtatacatttcaatcgatgtggattgtcttgatccggtatgctgt

SEQ ID NO: 30693 - DNA, 257 bp, Glycine max
  Clone ID: 701062957H1
cgagtcttgaatcccttttcaaccttaacactcctcacttcgtttccgtcgcagctttttacacactccaccgctgcttccccttcacctccgatttcgttaatcagagatcaaaatgtctcgaagatatgacagccgtacaacaatcttctccccggaaggacgtctttaccaagtggaatatgcaatggaggctattgggaatgctggtaccgcaatagggatcttatcaaaagatggggtagtgctgttggtga

SEQ ID NO: 30694 - DNA, 259 bp, Glycine max
  unsure (1)..(259): unsure at all n locations; Clone ID: 701062958H1
cctttcgttcacttccgtttccctctcactcacacacttctccccaaaactcaaaaccntaactctctttcgcgctcgttctctcgctcgctgcaaccatgaattgctccatctccggcgaagttccggaagatcccgtcgtgtcccggaactccggtctcctcttcgagaagcgtttgattgagcgacacatctcggattatgggaagtgtccaattactggagaaccacttactatggatgacattgtccaatcaag

SEQ ID NO: 30695 - DNA, 257 bp, Glycine max
  unsure (1)..(257): unsure at all n locations; Clone ID: 701062959H1
gtcgggtgtactttctgcgaaaccgagagagcgaaggggcaaacacaattttttttatcttcttttttattttttgtnnnnnnnnnnnnnnnnnnnatgttggggatcttcagcagttcagtggtgtcgccgccggaggagctggtggccgctggcagcagaacgccgtcgccgaagacgacggcggggaagctgctgaaccggttcgtggagagcaaggcgtcggcggtgtcgctgcaggtggggganagtgcagt

SEQ ID NO: 30696 - DNA, 262 bp, Glycine max
  unsure (1)..(262): unsure at all n locations; Clone ID: 701062960H1
gtgtatttccctacctctcccttcaagatgcagatnttcgtacaagnccctcaccggcaagaccatcacccttgaggtggaaagctctgacaccatcgacaacgtcaaggccaagatccaggacaaggaaggaatccccccggaccagcaacgtctcattttcgccggaaagcaacttgaggacggccgtacccttgctgactacaacattcagaaggagagtatcttcactcgtcctccgtctccgtggtggatgcagatc

SEQ ID NO: 30697 - DNA, 263 bp, Glycine max
  unsure (1)..(263): unsure at all n locations; Clone ID: 701062961H1
ccaacgccgcngangagcaccgcacgtcgcgtggtgtccggtgcgcctccggcggcccttgaaaatccggaggaccgantgcctcccacgcccggtcgtactcataaccgcatcaggtctccaanntgaacagcctntggtcgatggaacaatgtaggcaagggaagtcggcaaaatggatccgtaacctcgggaaaaggatnggctctgagggctgggcacgggggtcccagtcccgaacccgtcggctgtcggggactgct

SEQ ID NO: 30698 - DNA, 262 bp, Glycine max
  unsure (1)..(262): unsure at all n locations; Clone ID: 701062962H1
gngagacncagacatngggcgaagacccgcgangtgtnanaggnnnattannaanaaaccataccccaagtcacggttttgccgtggtgttcctgatcccaagatcaggatttacgatgttggtatgaagaagaagggtgttgatgantttcctttctgtgtccanctggttagttgggananggaaaacgtttctagtgangccctggnagntgntcgtatgcttgcaacaagtacatggccaaatttgctggnaggatgc

SEQ ID NO: 30699 - DNA, 263 bp, Glycine max
  unsure (1)..(263): unsure at all n locations; Clone ID: 701062963H1
aaactatacaacgttgctttgttttgttttgttttgtctctctctaatncattccaatggccaaagaaggacccaactgggacgggttgctcaaatggagcattgctcattccgatgggactcgccccactcgcaatttaagtgaggaggatcggagatggtttatggaagcgatgcagtcacagaccattgatgttgtaaaacgtatganagagatcacattgtgatgcaaatccagaacaagtcttgaaagacaaggagtt

SEQ ID NO: 30700 - DNA, 258 bp, Glycine max
  unsure (1)..(258): unsure at all n locations; Clone ID: 701062964H1
cgtntcacctctcaacctctgcagcgccttcgatccagaaaacatgactaagagaacaaagaaggctggcattgttggaaaatacggtacccgttatggcgccagtctgcgtaagcagattaagaagatggaagttagtcaacacagcaagtttttctgtgaattttgtggaaagtatgctgtgaagaggaaagctgtgggaatatggggatgcnaggntgtggtaaagtgaaagctggcggtgcttacattgaatac

SEQ ID NO: 30701 - DNA, 260 bp, Glycine max
  unsure (1)..(260): unsure at all n locations; Clone ID: 701062965H1
cgtgaccgcacgataagctgtggaacaccctgggagngtgtaagtacacaatccaagacggcgatgcgcattctgattgggtaagctgcgtccgtttcagccctagcacccttcagcccactattgtttctncctcgtgggaccgcaccgttaaggtttggaacctgacaaactgcaagttgaggaacacgcttgctggacacaatggttatgtgaacactgttgctgtttcccctgatggctctctgtggccagtggtg

SEQ ID NO: 30702 - DNA, 256 bp, Glycine max
  unsure (1)..(256): unsure at all n locations; Clone ID: 701062966H1
ttaggttcctctccctcacggataaggaggtgttgggagaaggtgataacaccaagcttgatattcagattaagttggacaaggaaaagaaaattctctcaattcgagacagaggtatcggtatgacgaaggaggatttgataaagaatttggggacaatagcgaaatctggaacttctgcatttgttgagaagatgcaaacaagtggagatctcaatctgattgggcagtttggngtcggcttctantgtttatc

SEQ ID NO: 30703 - DNA, 256 bp, Glycine max
  unsure (1)..(256): unsure at all n locations; Clone ID: 701062967H1
gnactacttagtctccgttacctccacgaatcaggttttnttcattctgcatttgcattcggcncatgaagctgggattgataaaagcaaaaatgatgatagtgtggttccaccgggtgctcttgctcactttcatacagaaaggaattcaatatcttgagctggaagcaaacttgagtggtagtgatgctgacatggatgaggatttttcatttctacaacctctggatcttatcacaaagggcccaatgaatac

SEQ ID NO: 30704 - DNA, 255 bp, Glycine max
  unsure (1)..(255): unsure at all n locations; Clone ID: 701062968H1
cgttccgagtttttgatcgctcatagagagttcgacgcggcggttgcagaagangattgcaagatgaagttcaacatcgcgagtcccaccactggatgccagaagaagctcgagatcgacgacgatcagaaactacgagcattttgggacaagaggatctcacaggaggtcagcggagatgcacttggtgaggaatttaagggctatntcttcaaaattactggaggttgtgacaaacaaggattccgatgaaac

SEQ ID NO: 30705 - DNA, 256 bp, Glycine max
  unsure (1)..(256): unsure at all n locations; Clone ID: 701062969H1
cctagcccctgcagaaaaagaagaaaacatcagtacactgctgatgacaatggctgtaaacggtgcaactgtaagaagngtaaatgtttaaaactttactgtgattgttttgctgctggaacgtactgtaccgacccttgtgcttgccaaggctgcttaaacagaccagaatatgtagagacagttgtcgagactaaacaacaaattgaatcccgtaatccaattgcatttgctcccaagattgttcgcctaccac

SEQ ID NO: 30706 - DNA, 253 bp, Glycine max
  unsure (1)..(253): unsure at all n locations; Clone ID: 701062970H1
gtttggagctatgtattggctgttgcagtcttgggatggcagatttcttttggtttactgctttggaatacgcctggaattatgtaagtatgctgctagtatgcctattgcttcgcagaggaaattagtgtagatgaaaattaagtactgttctttgcatggccatgggaggctgtcctaaggaagagataggctatataacatggatgatttttctgttagcaagtcttgagtagaggnagtgtgatgcagg

SEQ ID NO: 30707 - DNA, 255 bp, Glycine max
  unsure (1)..(255): unsure at all n locations; Clone ID: 701062971H1
ttctgngagtgtnggttganagtagcnaagatgtttccctttccgggcaaaagggtcaaaagataanngggactatggtggttatgcagaagaatgtgttgnntatcaacagcatcaccnntgttggagggatcgttgaccanngcttaggcttcataggcagtgcagtcgatgcacttacttttgcagccaccaaaatctccatccagttgattagtgctaccanggctgatggtgggnnaggaanattggaaa

SEQ ID NO: 30708 - DNA, 255 bp, Glycine max
  unsure (1)..(255): unsure at all n locations; Clone ID: 701062972H1
gtagaaccttcacttgctctcacccttattcctctctttcctttctttcttctgcaacaaaaatncatgtctgggtccttgggattcttctttgtgggtcttacgttgttgttgttggtcggggtggctaatgctgtggccaacacttccaacaaatttgatcaactcttccaaccaagctgggcttttgaccacttcattcatgaaggggatctcctcaaactccaaactagacaatttttccggcgtggtttt

SEQ ID NO: 30709 - DNA, 255 bp, Glycine max
  unsure (1)..(255): unsure at all n locations; Clone ID: 701062973H1
cnatgcccaattggggggcatgtgtgtcgggttattttggattttccgtggcgcccttagccttaggcgtagttttgggtcattcagcaatagccgcggtgaagatcggaaccctccactctacgctctgctctgcaatggcgaagatcgaagaactgaacgaatccatccccaaatcgaagaataagaggaatcacggctccaccacgttctttgtctttgtcgattaccttttcatttgttctnctcggattc

SEQ ID NO: 30710 - DNA, 258 bp, Glycine max
  Clone ID: 701062976H1
aatttaactcgacctgtatgatgaatgggttaacaagggcaatgcaccggcactgcccgagactcttaagaattacaacaagctggtgtctcttggcttcaagattatattcttgtcaggaagaacactggacaaacaggccgtaacagaagcaaacttaaagaaggctggctaccacacatgggaaaaattaattctcaaggatccacaagatccttccactccaaatgcagtttcatacaaaacagcgcgagagag

SEQ ID NO: 30711 - DNA, 261 bp, Glycine max
  unsure (1)..(261): unsure at all n locations; Clone ID: 701062977H1
gcatttggtcacttgcagtcatcagattttctcgcttatggnatcaaatctgtatcccaagatgtcttgcctgtacttgactgatgcattcgatggaaatattttgagccttgagtttgataattttgctgaagtgcacaaactctatgaaggtggagttacactacctacaaactttcttagcaagatcgcccctataccagtgatcaaggaaatttttcgaactgatggcgaacagttcctcaagtatccccacctaaa

SEQ ID NO: 30712 - DNA, 261 bp, Glycine max
  Clone ID: 701062978H1
aaaaagacaacccaggagcgcgtcttaataaacgctcttctctgaaaacccccatttcttttcttctttcttcttctctttcgcttcttcgatcttcgatcttcgtcgctgaaaatgagagagtgcatttcaatccacatcggccaggccgggattcaggttggaaacgcctgctgggagctttactgcctcgaacacggcattcagcctgatgggcagatgccaagtgacaagaccgttggtggaggtgatatgctttca

SEQ ID NO: 30713 - DNA, 264 bp, Glycine max
  unsure (1)..(264): unsure at all n locations; Clone ID: 701062979H1
ctaacactttcttctctctgttttccttcttcctcgcatcaatggngttggacggcgttctcctacggcatgtgcaaccctctcctcgacatctctgccgtcgtcgacgacgctttcttgcaaaaatacggtatcaagttgaacgatgcgattctcgccgaggataaacacaaacctatgtatgaagaattggctaacaatcctaatgtggagtacattgctggaggtgctactcagaattcaatcagggttgctagtggatgc

SEQ ID NO: 30714 - DNA, 267 bp, Glycine max
  Clone ID: 701062980H1
ctcaagcacaacatctctatcgagtaaattaactatgaagcctaccctactattatccctttccttcctgcctctctttgctttcctggctctttcagaagatgttgaacaagttgtggacataagtggcaaccccattttcccaggtggcacatattacattatgccatcaacttggggcgctgccggtggtggattgaaactaggccggacaggaaactcaaactgcccagttactgttttgcaagattactcagaatcttccgt

SEQ ID NO: 30715 - DNA, 259 bp, Glycine max
  unsure (1)..(259): unsure at all n locations; Clone ID: 701062981H1
gaggacgggccatagacgcaagcgacgacccgggagcggattccccaccggcagggggacaggagacggccatctncgaggcacatcacgacctacaggcaagaccggcgagacctgggaaggctacccgattgggagtcngaggatccatagtacctgcagccccgcggacttcatcttcatcatttttgaaagcggggggaagggatctcctttctgcaacggaaaaaaacggagcttatttgactcgcacaaccta

SEQ ID NO: 30716 - DNA, 254 bp, Glycine max
  unsure (1)..(254): unsure at all n locations; Clone ID: 701062982H1
ctttcacgtcaacttcgtttttctccctctcagtgaaaattgcatctaaagagacagaatgcaaggncctgggggtggcagggatcctttcttcgattttggtggttttggaggctttggttcctttgggcctcccaggagtttaatctcaagcttttttgggggtagggacccatttagtgaccctttcttcgcccaaccttttggagggatgtttgagtctagtccctttggtggtcctactggatccttcc

SEQ ID NO: 30717 - DNA, 242 bp, Glycine max
  Clone ID: 701062983H1
tttgttttcatttactaatgatgctttggtacaaggctgttatatcgtgggtgtttgagcagtgttgacatctaaagcttctattggatagtttaacccttatttttttttgttgcttttcgcctgttgttggtcaacatgaaaggggtgagtctgttcatccaatttatgtcgagaaatttgttttaacttcttgccacattcgttgagtgcgtcatgttatattaacaagatcgcattct

SEQ ID NO: 30718 - DNA, 254 bp, Glycine max
  unsure (1)..(254): unsure at all n locations; Clone ID: 701062984H1
gttgatcgagatactagaaacagtgtgatgaaaatgaaggtccttgttttcttcgttgctacaattttngtagcatggcaatgccatgcgtacgntatgttccctctccgaatgaacactggctatggtgcccgtactccggaggtgaaatgcgcaagttggaggcttgctgtggaagcacacaacatctttggctttgagaccattcctgaagagtgcgttgaagcaacaaaggaatacatccaggcgaacaa

SEQ ID NO: 30719 - DNA, 119 bp, Glycine max
  unsure (1)..(119): unsure at all n locations; Clone ID: 701062985H1
cttgaagattgaaagaattctgaaaaaaaaaattaaactaagaggttccctttncgcngttagtggcactgcatgtggtaaggaatcactcagtttaactttatatatgcatatcnccc

SEQ ID NO: 30720 - DNA, 254 bp, Glycine max
  Clone ID: 701062986H1
gcaaaaatggcactgcaacactgtctctgtctctcctcctcctgttctcactcagcatcgccgtaaccgttagatcgagcgactacgactacgattgtgtgtacactgcatacgttagaaccggttcggtgttgaagggcggaacggactctaagatcgggctgaagctgtacgacaagtacggctactacatctacattaaaaacctcgaagcatggggcggcttgatgggcaagggctacgatacttcgagc

SEQ ID NO: 30721 - DNA, 221 bp, Glycine max
  unsure (1)..(221): unsure at all n locations; Clone ID: 701062987H1
atggctttgcccaatcagcaaaccgtcgattaccctagtttcaaactcgtcatccgtcggtgacggtggtacaggaaagacaacgttccgtgaaaaggccattcttaccggtgaatttgagaagaaataacgaaccggaccattggagtggaggttcacccattggatttctttcacaaactgtggaaagattcgctntctactgttgggtactggccgga

SEQ ID NO: 30722 - DNA, 256 bp, Glycine max
  unsure (1)..(256): unsure at all n locations; Clone ID: 701062988H1
tgctttctccctccaaaaaactcccctcttttccgtcggagaatggcgtcatcttcacaaagccgctgtggcagcggcagcgccgcctcacgactgaggaacgcagcttccaccttctgctccgactcacagcctctccttgccgatatccgaaaaaccgtgcttatgatgaaggacatcgcagttcaattggagaaagacaacctcctgacaaggcgaaggaatggnagatgcggttattgagttatagggctat

SEQ ID NO: 30723 - DNA, 258 bp, Glycine max
  unsure (1)..(258): unsure at all n locations; Clone ID: 701062990H1
gtgtgggcataaaatttcgaagttgaagcgagaacttgccatttgcaagggttttagggttagggttttctncaaattgcaaggacatgggtttcaaccttcaaccatatgggattcaatccatgctcaaggaaggccataagcacctttctggcctcgacgaagcggttctcaagaacatcgacgcttgcaaacaactttccactattactcgaatncncctcggtcccaatggcctgaataagatggtataaatca

SEQ ID NO: 30724 - DNA, 259 bp, Glycine max
  unsure (1)..(259): unsure at all n locations; Clone ID: 701062991H1
ttcctaaactcttctcttctacactttgctctctnnccctctttctttctctttctttttcccttccctcaagtactatcatacacaaacacaaggtacttcacatacccacatacacacacataagcaaaaactcttacttccctttttcaagttcttaaactcatcactacttaactcaggagtgtgcatattttcgttgtatggatggatccttctagtggacaacaccagcaaatgtctagccagtcttggagaa

SEQ ID NO: 30725 - DNA, 232 bp, Glycine max
  unsure (1)..(232): unsure at all n locations; Clone ID: 701062992H1
tggaaccaaatagatccttanatgttaagattgggatgcatggatgaaactaaggatctgcncttctngtaaatgtcaactccacgggaggtgttgttgaggataatttagtaattnagcctaanattcncgtnccgttctgttccaaatggcatcantctccnccaccgnacccggngtccnacccttccctcngccnacngcngcccgccgcgcngcttnanacgattcc

SEQ ID NO: 30726 - DNA, 261 bp, Glycine max
  unsure (1)..(261): unsure at all n locations; Clone ID: 701062993H1
aattagttcattctcttgcgcagttccctacctctcctttcaagatgcagatcttcgtcaagacccttcaccggnaagaccatcacccttgaggtggaaagctctgacaccatcgacaacgtcaaggccaagatccaggacaaggaaggaattcccccggatcagcaacgtctcatcttcgccggaaagcagctcgaggacggccgtaccctcgccgactacaacatccagaaggagtcaacccttcacttgnttcgtctc

SEQ ID NO: 30727 - DNA, 262 bp, Glycine max
  unsure (1)..(262): unsure at all n locations; Clone ID: 701062994H1
gtncccgtgagccntgaccgacagttggnttacatctcttagttttntccgtggaaggagcttttnccggtaaatatttctaaaaacatgatttaatgcattacttaccgggaccagctttttcctgccagatctagccaaatgcattttcctgtaaaaagatcacaaatatgacaatgttgcattcaattttccctaaacaatataaaaaggtcagagtgggactcgctaagttagtagttcgcacaatggcgaggtaggg

SEQ ID NO: 30728 - DNA, 266 bp, Glycine max
  unsure (1)..(266): unsure at all n locations; Clone ID: 701062995H1
ctcccaaagaatgatggtaagagcaacaccgtcaagtcatgatcgcaacctcgctcgacctcaaactcacacnnnnnnnnnnnnnnnnnnnnnnnnnttgaccataacctttcatccattcgcaatgtcagangtttcgccctatcctcacacacaacttctctcactctcaatctccctcgcctagttaagattttntntgagcttntcnttaagtttgatttgtgaatgaatttcttcaatttctttggaattagatggtcaga

SEQ ID NO: 30729 - DNA, 246 bp, Glycine max
  unsure (1)..(246): unsure at all n locations; Clone ID: 701062996H1
gttttagtncaagtatgaagcatgcantgaagatggaactcanntggcaaaatctgntggnantggagttcacagtcaatgatggttatttttgtcctgctttgtcaaaggctgttaaaaccatgaagaagggagagcaagtgcttctgacagtgaagccacaatatggatttggtgagaagggtaagccagcacatgatgaagaaggtgcagttccaccaaatgcaacangcagatatcttgagt

SEQ ID NO: 30730 - DNA, 277 bp, Glycine max
  unsure (1)..(277): unsure at all n locations; Clone ID: 701063001H1
ctttgttcactcttcttctcttgcggctagggttttagcgcactnccttctagatttaaggaagatgggtaaggaaaaggttcacatcagtattgtggtcattggccatgtcgactctgggaaatccactaccactggtcacctgatttacaagcttggaggcattgacaagcgtgttattgagaggtttgagaaggaagtgcctgagatgaacaagaggtctttcangtatgccngggtgtggacaacttgagnctgancgtnaaagggatncccc

SEQ ID NO: 30731 - DNA, 80 bp, Glycine max
  unsure (1)..(80): unsure at all n locations; Clone ID: 701063002H1
tttatgtttcagtgatggttttgttactaganttctgagaagtaaaannatatntnttttccnccaccnagaacatanat

SEQ ID NO: 30732 - DNA, 271 bp, Glycine max
  unsure (1)..(271): unsure at all n locations; Clone ID: 701063003H1
tctcgggaaaattcgagaagatttttcgaatttttcaccactgctttgtgcgcangatcggtttcggattcgggctccgattttcgcctctcgcgaagagcnctnggttcattngcactaatggaggggaangaggtttgcgcgtcggagtcggcggttgatggaagccgcgacgtttggagttcggagccctcgctcgcttcctccgcggatcacctcgttgtaatggtgaacggaattctcggacgtgagacggattggaaatatgctg

SEQ ID NO: 30733 - DNA, 269 bp, Glycine max
  unsure (1)..(269): unsure at all n locations; Clone ID: 701063004H1
tttgggccagaaaacttgcaggtgatcctaacttgcactttgtggagtctccagcattggctccaccagaagttctaattgatttagctgcacagcaacaacatgaggccgagcttcttgcagctgctagtcagccccttcctgacgatgatgatgaatcntttgngtaaaattatgccttttgagtcgtgctactgcttatgctacagtatgtattttggggggtgtaatgttgacagttttggatgccggatttgagtgtcagaaat

SEQ ID NO: 30734 - DNA, 266 bp, Glycine max
  unsure (1)..(266): unsure at all n locations; Clone ID: 701063005H1
acagaagaggcggcgagtgttgggntgagaatcctatcttgttcgtctttctcgtcttctttcttntctnttgtctttcttgtggatgtgaaacagaatctatgacgagtcaatcggcgaagaacctattggttttnttggggctgggtttagctggaatncntctaatcaccaganagctcaagaagtctgtcagaaaggatttgggggctttcattgagaagcttcagcngcttcctcctccccagcctgntcctcccaaggct

SEQ ID NO: 30735 - DNA, 264 bp, Glycine max
  unsure (1)..(264): unsure at all n locations; Clone ID: 701063006H1
ttcaggtgacccatctcgcgggagtcctcggttttggtggattttgcttccttttaggggcacgaccccaagatattccctatgtatattgtttgtnttacgtcatctttgttcctcttcgttggatatactataggtccaagaaatggcattactatctactggatttttgctattatgccaatacaatatttttgattgatcttcttttttactcatcaaatgagaagcttttcatggtttgcttttctttngcggagggcc

SEQ ID NO: 30736 - DNA, 268 bp, Glycine max
  unsure (1)..(268): unsure at all n locations; Clone ID: 701063007H1
tcctcccaacacattctgntcaccggtngtgccggtttcattggcacccacncggtcgttcagcttctcaaagctggcttcagcgtttcaataatcgacaatttcgataactccgtcatggaagcagtggaccgcntccgccaagtggttggccctctgnttnctcagaanctccaattcacccagggcgatctccggaatagggatgacttggagaaactcttctccaaaacaacatttgatgcggtgatccctttgcntggcttga

SEQ ID NO: 30737 - DNA, 270 bp, Glycine max
  unsure (1)..(270): unsure at all n locations; Clone ID: 701063008H1
aacatgccaaacgacagcnttctgagtcttttcttcttcgttaccctcttcacatgccttctctctgctaattcccacgatgancatattttcctaccgagtcaantccatgacgatgactcagtgagttncactgctaccgncccaaaccttaactacaatccggtnatcggagtcctgacccaccccggngacggtgcntcnngccggctcagcaacgccaccggggtttcttacatcgccgttcctagttaaattngtngagtcggg

SEQ ID NO: 30738 - DNA, 269 bp, Glycine max
  unsure (1)..(269): unsure at all n locations; Clone ID: 701063009H1
tttcacttntgccttccctcacagtcacattgatcttnccaactcctcagangttgaatgtagtttggtgatacggagagaggttgccctgtctgtcggtggctctgatntatgtatgacatttccacgatgctatatgcnngttngccatttcatcnctagtgtcttcttgtcttggaagttgctatggaatctaggggttcaacangctaaataaangtanggtgataaagcatggngtttttgaaaatcaggaagttcagaaatct

SEQ ID NO: 30739 - DNA, 271 bp, Glycine max
  Clone ID: 701063010H1
ggaaaacaaagtatagagtgaaagaatgggtgagaaaagcaagattttgatcataggaggcaccggctacatcggcaaacatatagtggaagcaagcgcaaaggctggaaatcccacttttgctttggtgagggaatccacactctctgacccctccaaggcacaactcatccacaattttgaggctttgggcgttaatttggtccgcggggatctgtacgatcatgagaagttggtgaaagctatcaagcaagtagatgtcgtcatatcc

SEQ ID NO: 30740 - DNA, 271 bp, Glycine max
  unsure (1)..(271): unsure at all n locations; Clone ID: 701063011H1
gtttttcttcctttctctttctttttcttctttgccttaaacaagcataactgaagttcaatggaagtttctgatatttgatcttgtccttcatcatagcataccaaagaggatctgcaattggagaaaagcatctgcttgtaagatttgcagtagacatnggaggattagttggnccagatggttccacacactatggtgcacttgatgtcactttgagggnctgcctccctaacntggtggtgatggttncttctgatgacgnaganat

SEQ ID NO: 30741 - DNA, 268 bp, Glycine max
  unsure (1)..(268): unsure at all n locations; Clone ID: 701063012H1
gcggtgctgacgttgaaatagagtatagactagagtcagtgagtgaaagaggggtttgtagtctgcaaattgcagttgaaatttggaacgtgcaagatccggtgctgtagtctctacattctgtgatggcaccaaaaccgataacgagtcccgtccccgattcgtggtaccccacactctccgtcttcactctcgccatcggcctcgtcttaaccgcctctttcttcatttatgaagcancatcttctaggaanagtcgtccatttgt

SEQ ID NO: 30742 - DNA, 278 bp, Glycine max
  unsure (1)..(278): unsure at all n locations; Clone ID: 701063013H1
ggctaacttgcggtngccacgattaccttgtagcttcttcctcctcctttctnatcncgttcttatncactctgaaaccctaatcatgccgnccattagcgtctctggnaacttcggaggctcttantccgttctcgttccttancattcacatctnccctctncgatnnatcactctcntgctgtttccncganattcctccttcncatttctattctcgaactctcttcaccccttcgttcttcataacaaganatctnctcatcggaaaccnaaa

SEQ ID NO: 30743 - DNA, 273 bp, Glycine max
  Clone ID: 701063014H1
catctgcatcttcaccctcctcggagtgtttcaccctaaatgaggctagattgaaagaacgcaattacctgggattgtcagattgctcttcggtggacagttctattgtcccgagtttgtctgatgagaaaaaggagaatctgaatttgaaggctactgagttgaggcttggacttcctggatcccagtcacctgaaagggatccggatcttttctcgttgagctcaacgaaactcgatgagaagccactgttctctttgcttcctacaaagg

SEQ ID NO: 30744 - DNA, 280 bp, Glycine max
  unsure (1)..(280): unsure at all n locations; Clone ID: 701063016H1
cttttctcagctgctgttcctgcgcgtgaacaagcctcaggtaagccaaagccatggttaancataacaatgttatccccaacggacacttccgtaagcactggcagaactatgtgaagacctggttcaatcagccagcacggaagacaagaagacggttggctcgtcagaagaaagctgtgaagattttccccagacctacagctggacctcttagacccattgtacatggtcaaactttgaaatacaacatgaaagtgagagctggaaggggattttc

SEQ ID NO: 30745 - DNA, 273 bp, Glycine max
  unsure (1)..(273): unsure at all n locations; Clone ID: 701063017H1
attangntttncncgattganagagnaaganaaatgggagaacganaaggaatcccaatgggctttggggctcttggcgatgatcctcttcttcattgcttcctcttcctctcacctcgttcgcncttccgntgacgtcgangacgcgatctgcnacgagtcgttcnangaggatttgatggacggtggatngtatccgacaaggaggattacaatggtgtccggaancatgcnaagatggtggnatgatgttatggatgcnnggnagnaaca

SEQ ID NO: 30746 - DNA, 270 bp, Glycine max
  unsure (1)..(270): unsure at all n locations; Clone ID: 701063019H1
caccgcacgaatatcttgttgtttggagcgatccgagaaaaactctgtaaacatgttggtttaccaggacctccttacaggtgatgagcttctctctgactccttccgttaccncgaaattgagaatggaatgctgtgggaagttgaggggaagtgggttgttaaaggagcagttgatgtagacattggtgcaaacccttctgctgagggtggaggagangatgagggagttgatgatgcagctgttaaggttgttgacattgttgacac

SEQ ID NO: 30747 - DNA, 271 bp, Glycine max
  unsure (1)..(271): unsure at all n locations; Clone ID: 701063020H1
cttccttttctcttctctgtctaaggggtgccctgagatcacattcgnacaatggtgaaggctgtggccgttcttgggcagcagtgagggtgtcactggaactattcacttcgttcaggagggaagtggtccaaccaccgtaactggatctcttgctggtcttaagcctggtctccatggtttccatgtccatgcctngggggacactacnnatggntgcctctnnactggatcacatttcaatcctaataacaaggagcatggtgcccct

SEQ ID NO: 30748 - DNA, 268 bp, Glycine max
  unsure (1)..(268): unsure at all n locations; Clone ID: 701063021H1
agaatccgaggcgaagagaagagaaaaattaagatggaggggaaggagcaggatgtntcgctgggagcnaacaagttcccggaganacagccgattggnacggcggcgcagagccaagacgacggcaaggactaccaggagccggcgccggcgccactggttgacccgacggagtttacgtcatggtccttttacagagcagggatagcagagtttgtggccacttttctgtttctatacatcactgtcttaaccgtcatgggagtcg

SEQ ID NO: 30749 - DNA, 270 bp, Glycine max
  unsure (1)..(270): unsure at all n locations; Clone ID: 701063022H1
ctanaanattttgtcagaggatgtggtgcagtaatcctntgccattccttntttatttttaagnntacagnatntgcaatnatctcttnttattactncnaaagtggcgatcacactatcattcattcagctganccttgnngantttgtggcaggcatnaaacntgcaatgaganggnttnnttccnagcanatttcatgctcnaaacccctcaccatgntgatcaccatgcatcatngacctccagttctctgagntcaattctangg

SEQ ID NO: 30750 - DNA, 269 bp, Glycine max
  unsure (1)..(269): unsure at all n locations; Clone ID: 701063023H1
cattttctctctttctctttctctccgacctagcgagaccgagcgatccgatcctaaccccgcgatgctccgccgcgcaaccanctccctcatctccggcgcctcccgccgccgcctctccaccgacgtgccggcgacgcggcggcggattccgtcttcgcggaggcgtggaagaaagtgagccccaacatcgacccgccgaagacgccgctgggtacatgaagccccgaccacccactccttcgactctcccctccaaactcancgtc

SEQ ID NO: 30751 - DNA, 288 bp, Glycine max
  unsure (1)..(288): unsure at all n locations; Clone ID: 701063024H1
tccatttcattttgcaganaacaacagggaaaganatttctgaccctaaccgcgtgtcgttaaaatcctcaaacgcagagtagacatagaattattcaaaaagcggggaaagggagattgaattcgatcctgggacgttaacgttgtttcaattcaattgtggtcctgtccggtgcccctatcctcagaacgacgatgncatctttatataggnggggaatccagggaggtacaaacaataaanccaagaggaacgtcntaantttgaccaanncagaggagccaaga

SEQ ID NO: 30752 - DNA, 272 bp, Glycine max
  unsure (1)..(272): unsure at all n locations; Clone ID: 701063025H1
ggaaattgattcttgttctttgggaaggataaggaatcaatctgatcgctggaagagaggaagtagtantggaaatggggatttccaagacaacaacaagcactgaggttaccgacgncaattccaatagcagcagcaccactcatactcaaactcgcaaccatatctcctttgctgctccctacgccgtaggagaaaaggtcttaaccaatcattctgattgtcttacgaagccaaggtgaggcaagtngaataccgcaacactaaaggat

SEQ ID NO: 30753 - DNA, 274 bp, Glycine max
  Clone ID: 701063028H1
aaagaaaggaaaaagaagtaaagcatgaacgaacacctcagaacttttgcacttcaactcagctactgcaacaacgacgccaaaatcctcttccacaccgcacactgctacttccgttctctcaaggtttctttacactgaaattcagtaagaaatttggaaaactggcataatggaagacaacgactacataaggagatgggaggatctggacatagatattttggtgaagatttttcagttgcttgacatttttgagttgacatccggcatc

SEQ ID NO: 30754 - DNA, 278 bp, Glycine max
  unsure (1)..(278): unsure at all n locations; Clone ID: 701063030H1
ggaatatgaccgggcacggggcacgtatctttagtagccctagaagctctgaatcaggtgatacctcatccgtggttccaatggatgggagatattcttctactagcaaggatgagaatgaaactagcaagaaccccatggctgattcagaaagatatatcagtaccagggatagttgttcgactcgagttgccatactcagagatagggaaaaggatcgtagtgatccagattatgaccgtagttatggaaggtatgctagnagtatcccaacctct

SEQ ID NO: 30755 - DNA, 277 bp, Glycine max
  unsure (1)..(277): unsure at all n locations; Clone ID: 701063031H1
antatgagcagcagtgcagggaagttggtgtgtgtcaccggtgctgccggttatattgcttcatggattgtccaagttcctacttgaacgtggttacactgtcanggccactgttcgaaacccaaatnatcacacgaaggtagaacatttgctaaaacttganggtgcaaaggagagactgcacctttttaaggcagatcttttgggtgaaaattcttttgactccattgttgagggctgtgatggcgtctttcatactgcttctccttttattatc

SEQ ID NO: 30756 - DNA, 282 bp, Glycine max
  unsure (1)..(282): unsure at all n locations; Clone ID: 701063032H1
ttgggaagaaagcttgtacactgcagtacccacactgccagtatcgttatcttgattgtcaaagcatgggtgacccagataggattgtttggttaagatcaagcaatctctcacgtctatgtgatcagaacagtgatttctttcaatttggcatttttgtngatgctctcaatttggaagttacagcttcacaattcttcagcaaatactgctactgtctatggtggggactaaggaatctaagcnccggggggacagaatccttaacnggtacacgtgtng

SEQ ID NO: 30757 - DNA, 276 bp, Glycine max
  unsure (1)..(276): unsure at all n locations; Clone ID: 701063033H1
gagctataagctagtttatcgtgaggngaatatgaagttgtttgttttctntgttgctgcagtagntttggtagcatggccatgccatggcgcaggctaccaaaggttccctctccgaatganaactggctatggtgagcgttcttcggaggtaaaatgcgcaggttttaggcttgctgtggangcacanaacatnngncnctnnaagncnangcggaagngtgcnnnnccnngnngaggcctacattaatgggggnanntttgagagcanncgnt

SEQ ID NO: 30758 - DNA, 270 bp, Glycine max
  unsure (1)..(270): unsure at all n locations; Clone ID: 701063035H1
ttccttctcnttctctctgagaacaacacnccacactcctctctntctctccgcttccttctcttctcacacctccatggcccacacttcccttccctccgccgatgccgcncatggacgctgtccagcgccgtctcatgttcgaagacgaatgcattttggtggatgagaatgaccgtgtggttggtccatgattcaaantacaattgtcacttgntggaaaattttgagctgagaatttgcngcanngggtnnacagngtattctgnc

SEQ ID NO: 30759 - DNA, 269 bp, Glycine max
  unsure (1)..(269): unsure at all n locations; Clone ID: 701063036H1
annctatacaacgttgcttttgtnttgttcttgttttgtctctctctaatcattccaatggccaaagaaggacccaactgggacgggttgcncaaatggagcattggctcatnccgatgggactcgccccactcgcaatttaagtgaggaggatcggagatggtttatggaagcgatgcagtcacagaccattgatgttgtnaaacgtatganagancatcacacttgtgatgcaaactcccanancaagncttgagagaccaaggngt

SEQ ID NO: 30760 - DNA, 278 bp, Glycine max
  unsure (1)..(278): unsure at all n locations; Clone ID: 701063037H1
ttttngttctgttttggcttnttcgctgcaactctctaccttccctctttttccgaatctgantagaaatggcttncggagactgagacgttcgcttttcaggccgagatcaancaggctcgtcagtgctaatantgcaacaccttctanagcaagaagggagaacctgtccttgcgtgagctncatncagcaatggcctctgcacgcnttggacaagnttcgatttgagagtcttacagannagagcaagttgntgcttcngncagagttgttcatt

SEQ ID NO: 30761 - DNA, 264 bp, Glycine max
  unsure (1)..(264): unsure at all n locations; Clone ID: 701063038H1
taattactaactagcgaaacaggaactgagggaagacgatgtcgatgtcgatgtcaatgttgtatatgtgtctcttccacactcacactcgtcgtcggaatgttatctatgctatctgatgccgttgatgacaaatgtgccgcctgcaaagccgnnnnnnnnnnnnnnnnnnnnnnnnnnnnnnnatgctattgncgantcaaactcctaaactaataganccattnantcttattggggattttatatattgtggtggcngga

SEQ ID NO: 30762 - DNA, 269 bp, Glycine max
  unsure (1)..(269): unsure at all n locations; Clone ID: 701063039H1
cttcatccaattcaaaacgannttgacacaaactcaacagatcganaatccataatgtngttgcgtaannacaataaaaatctcccatttgtgttttcttctcttcacgcacaccaacaaaacntctctctcatcggaatctccaaaaagaatggacaacaanacgcagcagtcccgagagtaagcaanacnnnnnacgacgaggagttngcgccaaaacgacaagaccctancccgtcgtctggcgggtgggggttttcacggctctc

SEQ ID NO: 30763 - DNA, 272 bp, Glycine max
  unsure (1)..(272): unsure at all n locations; Clone ID: 701063040H1
cgagctctgcgagatcttcattcgccgatttnaaaagatgagtaagcttcagagtgatgctttgcgtgaagccatttcaggaatcatggccgattccaaggagaagaatcgcaaatttgtggagaccatcgaactccaaatcgggttgaaaaactangatccacagaaggacaagcgtttcagtggctctgtcaagctgccccacatccctcgccccaagntgaaaatttgcatgcttggtgatgctcagcatgttgaagaggcggagaagt

SEQ ID NO: 30764 - DNA, 268 bp, Glycine max
  unsure (1)..(268): unsure at all n locations; Clone ID: 701063041H1
tttattctatctcactttcctattacagtntctttacctcaatggcaccaagttctgcagtgccagatgaacaggttgttgttggagaggagattgagcatgtaagantggtcactttgaacaggccaaggcaattgaatgccatctcaccagaactggtttctcagctagcaacatatttggaaaagtggganaaggatgagaanncagaantagttataataaaagggagtggtcgggnttttgtgctggaggagattnganantc

SEQ ID NO: 30765 - DNA, 269 bp, Glycine max
  unsure (1)..(269): unsure at all n locations; Clone ID: 701063042H1
gaggaatttaatgaaaccttatatgatgaatgggttaacaagggcgacgcaccggcattgccagagactcttaaaaattacaacaagctgttgtctcttggcttcaagattgtattcttgtcaggaagatatcttgacaaaatggccgtaacagaagcaaacctaaagaaggctggcttccacacatgggagcagtnaattctcaaggatccacatcttatcactccaaatgcactttcntacaaatcngcatgagagagaatctgttg

SEQ ID NO: 30766 - DNA, 244 bp, Glycine max
  unsure (1)..(244): unsure at all n locations; Clone ID: 701063043H1
gctgatatgcactattcaaataggagcattagctatgtttgtnaatgtcactttatgttatgtgggtaagtcacctaagacactccacgtacctacttgttgtctcttacgcggctttaataaatcttctgcccttggttccatatttanngatgnntccgnagggnnannggggggnncgnnggtnttgggcncgntgcgncgggnatnnttncngggnggtnnctgcggggtgngnangttt

SEQ ID NO: 30767 - DNA, 269 bp, Glycine max
  unsure (1)..(269): unsure at all n locations; Clone ID: 701063044H1
aganatggaagttgtgaagggtttggatttgcaaaggtacatggggcgttggtatgagatagcctctttcccttcaaggaatcagcccaaggatggtgagaacaccagagccacatacactcttaggaatgatggtactgtgcaagtnctcaacgagacttggagtaatggcaagagagggtacatacaaggaactgcttataaggttgaccccaaaagtgatgaggccaagttcanggtcaatttttatattcctcccttcttgccat

SEQ ID NO: 30768 - DNA, 279 bp, Glycine max
  unsure (1)..(279): unsure at all n locations; Clone ID: 701063045H1
ctgggcttgngcctagcgcttattctcnccgcattccgtggagatctantgctnctgcngcaagacctgcgctgaaaattanggtttncgattgcggaggtagacgaagatgttcggaagggttncgaaganaagcgacagcaccaggttnctacgnnatcntcggcgtttccaagaacgcttcgccggatgacttaaagaaggcttacaaganagccgccattnaganccatccngacaaaggcggggatcccgnnannttnaangggctgncccagc

SEQ ID NO: 30769 - DNA, 272 bp, Glycine max
  unsure (1)..(272): unsure at all n locations; Clone ID: 701063046H1
gcaccaagaccaacatggtgatggttttcggagagatcacaaccaaggccaacgtggactatgagaagattgtgcgtgacacatgcaggaacattggtnttgtctctgatgatgttggtcttgatgctgacaactgcaaggtcctcgtcaacattgagcnacagagtcctgatattgctcaaggtgtgcacgnccacctcacaaagaggcctgaggagattggtgctggtgaccaaggtcatatgttcggctatgccactgacgagactccc

SEQ ID NO: 30770 - DNA, 274 bp, Glycine max
  Clone ID: 701063047H1
agagtccagcctgccgcttcatgagatggaaggaggaagaacttactatctgggaatgtttttgggtggggcttacgaggaggcgctcggtggagtccacaacttgttcggcggccccagcgtggtcagggtgtcgcagagcgatggccctcacagctttgcggtcacgcgtgccgtgccggggccatcctgtggagatgttcttcgagtgatgcagcaccagcccgagctcatgttcgagacactcaagcaccgcgcgcaggagtatgtcagc

SEQ ID NO: 30771 - DNA, 280 bp, Glycine max
  unsure (1)..(280): unsure at all n locations; Clone ID: 701063048H1
atcgtcctcaagagccctagggttcagtacctcgcccttgtcctcctcgaaacccttgttcaagaactgcgananggccttctccgaagttcgccgccgagcgtgtcctcgacgagatggtcaggctcatcgatgaccctcagaccgtcgtcaacaaccgcaacaaggccctcatgatgatcgaagcctgggctgagtccaccggcgagttgcgctatctccctgtctacgaggaaacttacaagttttaggtctgaacagaccaaggaagcctttgatg

SEQ ID NO: 30772 - DNA, 276 bp, Glycine max
  unsure (1)..(276): unsure at all n locations; Clone ID: 701063049H1
cttcgtgttgtagctagctcctcgaaaatgctggcacgcctcgccgcgagtcgcttgcaacgagatccgtcagattttccgtcagccttctagggctttctcgancgctcncganntaccaccttgacacaccgnataacaatcctagnnttccatgggaattcaccgaggccaatcanncaaaggttanggngattttgtctcannatgccatccagntatncccantngtnacagtncctcgtttgttnttgcncagcannagctgggtggtcc

SEQ ID NO: 30773 - DNA, 270 bp, Glycine max
  Clone ID: 701063050H1
gtattttcattcgagttgcagtttggcggttaaacgtcttcttctcttctcttctctgcatccatcagatccaaattttctcgcgatacgagggagcaatgtcagatgctaaggttgaggatttgaagaaggaagaggaggttggtgatgattctcctaggaacgaagttgacagtgaaaaatctgcggatgatctgaaagattcggataacgataaaagcgatggaaaccccatgccctcatcccagcaggaggaagcagctgttaaga

SEQ ID NO: 30774 - DNA, 276 bp, Glycine max
  unsure (1)..(276): unsure at all n locations; Clone ID: 701063052H1
gattgaggaaaatatggtcaaaatcgacatgagangatgtcgagccacactatctnctacttcctgtncctgatnngaactggctgttgttngtntgggctattatttggnnaacccagttggtctgtagttgannattnttgcnatgtatgtnttaatcctagggcaagtagcagcaangatgccctctcggtgacatgntcaattatnantttatatgaattgcccttggattngttgagtatatcaggttcgtangtgtttctctagttgtat

SEQ ID NO: 30775 - DNA, 264 bp, Glycine max
  Clone ID: 701063053H1
ttcaagagttggtgtgtttcaaagttatttgttatttttcacatattaccaaaacagtttattaagggggtggattttgtgatggtttgctaatgctaagtgtaattgcaacaacagtgagcgtccaagttcccctcaaaaaagattgaaatgttttcgttgtttatgtaattgtgttggtttgtttgtaccccacaaaagattgggatgcttttgttgtttgtgtaattgtgattgcactattactttagtccttttcctgtt

SEQ ID NO: 30776 - DNA, 266 bp, Glycine max
  unsure (1)..(266): unsure at all n locations; Clone ID: 701063054H1
acagaatttcctgtttacgatcttattgcanttttgcaactttcaaagcttattagctaaagtaacatcaaaagatgtcattgattccaagtattttcggtggcccaaggagcaacgtgttcgatccattctcactcgatatgtgggatcccttcaaggatttncatgttcccacttcttctgtttctgcngaaaattctgcatttgtgaacacacgtgtggattggaaggngacccaagaggcacacgtgctcaaggctgatatt

SEQ ID NO: 30777 - DNA, 266 bp, Glycine max
  unsure (1)..(266): unsure at all n locations; Clone ID: 701063055H1
gcattccctgacgcagagaaagcaaaagacagtcgcagcattcgtcctggaaaggggaaaatgcgtaaccgtcgctacatctcacgccgtggaccactcatcgtgtacggaacggaaggagccaaagccgttaaggccttccgtaacgtccccggcgtggaagtcgctaacgtcgagaggcttaacttctgaaacttgctccaggagganacctcgggaggtttgtggtttggaaaaaaagcgttttgagaagctggnttcgattt

SEQ ID NO: 30778 - DNA, 272 bp, Glycine max
  Clone ID: 701063056H1
ccggagcatacacaatgtacgtggatgaggatcacgcagatcagatctgcagtgccaagcttgtaagcagccctcaccctcaatgcaaggaagtcaccccaggccgcgacgaagccgtcgtgattctcacccgctacaacggcattgcctccgacgataggttcgccaatgccatgggcttcatgtctcaggaggttgcttctggctgtgtgagatcctcaggcaataccaggagttcgacaatgagaattaattacgtaattaatttcagt

SEQ ID NO: 30779 - DNA, 275 bp, Glycine max
  unsure (1)..(275): unsure at all n locations; Clone ID: 701063057H1
attnncttctttctctctcncttagtcnaagggactgcggtgttgcttctcccangttatttagaaaagcncnatggtgaagattngntgcattggtgctggatatgtggggggnnctactatgggcagtcatttgcacttaagtgcncatctattgaagttgtttgttgttgatatctctaaatcccgcattgcagnctggnnccngtgtaccngcttncctatctntgaactggtctgatgggtnntgnggcatgncgtgggcangaacntct

SEQ ID NO: 30780 - DNA, 269 bp, Glycine max
  unsure (1)..(269): unsure at all n locations; Clone ID: 701063058H1
gctctactagctagggtttcgcaagtncgatcgaagaagaacgatggcgatggctgctgctctgcgtcgcgaaggaaggcgtttgacccaaccaatcaacgccctccgttcctctctcatctctcaagaccaatcccctcatggcgcgcgcttcatttccactcaagtggtgagaaaccgaatgaagagtgtgaggaatatccagaagatcaccaaggccatgaagatggttgccgcatccaagctgagagccgttcagaccagagctg

SEQ ID NO: 30781 - DNA, 270 bp, Glycine max
  Clone ID: 701063059H1
agacgcttcgcaaatctcaatcgaatctcagaaaaatgagagaaatcatcagcattcacataggtcaggccgggatccaggtcggaaactcctgctgggaactctactgcctcgaacatggcatccagcccgacggcatgatgccttctgactccaccttcggtgtagcccacgacgccttcaacaccttcttcagcgaaaccggatctggcaagcacgtcccccgtgctgtcttcgtcgacctcgaacccaccgtcatcgagaggtccg

SEQ ID NO: 30782 - DNA, 274 bp, Glycine max
  unsure (1)..(274): unsure at all n locations; Clone ID: 701063061H1
atcgagataactagaaacagtgtgatgaaaatgaaggtccttgtnttcttcgttggctacaatnttngtagcatggcaatgccatgcgtacgatatgttnccctctccgaatgaacactggctatggtgcccgtacttccggaggtgaaatgcgcaagttggaggcttgctgtggaagcacacaacatcctttggctttgagaccattcctgaagagngcgttgaagcaacaaaggaatacatccatggcgaacaatatngatcagactccaaa

SEQ ID NO: 30783 - DNA, 235 bp, Glycine max
  Clone ID: 701063062H1
cgtacctttccttcatcctcagggcgttttgtctcattttgttattcaagaatcaattaaaaaaaatgactcgcggtaaccagagggaacgagatcgtgaaagggctcaggcaagagctggtggaaagacaaagcagcctaagaatgatgggttgacccctgaacagcgaagggaaagggatgcaaaagcattgcaggagaaaacggcaaagaaagcagctcaggctgcaggagg

SEQ ID NO: 30784 - DNA, 212 bp, Glycine max
  unsure (1)..(212): unsure at all n locations; Clone ID: 701063063H1
caaaaacaaagtaagacttcactcaatctcactgtgttgtnagtngtgtgtnagaccaaccaacaatngtgtctctgactccgttatgtttcttatacttgtgatcgtggtgagcgagcggcgacccaaacggtggtttgcacggggtngaggnacttccaagatctatgacgcagttggacagtgaggatgccaaagcgnggncanattga

SEQ ID NO: 30785 - DNA, 239 bp, Glycine max
  unsure (1)..(239): unsure at all n locations; Clone ID: 701063065H1
cttcagtngtgaaggttgtcagatgggggcggtctgtatatgcaaatattcagaaatttatccagtttcagttacagtaaatgtggccgctctagtgattaatgttgttgtgcanttcgctggtgangtccattaatgcagtgagttcttgggtgaatntacatggatacctgggacnntgcctggaactgaacacagtgtcactcatgatcgncccagnggcgagantctnananaat

SEQ ID NO: 30786 - DNA, 176 bp, Glycine max
  unsure (1)..(176): unsure at all n locations; Clone ID: 701063066H1
aataatagtgacttanaaaagtaacagcaacgacggcaacagaagtggtcatgtgaattttgcaggtcttgtctctcctcttttctncccttttgccatgngccattagaaancaanttgannanggacaacacaatcatcagttgntgcaantggtnnggaagaggatgaagaag

SEQ ID NO: 30787 - DNA, 90 bp, Glycine max
  unsure (1)..(90): unsure at all n locations; Clone ID: 701063067H1
acttactggaagccttgttgtgagtnagagcanaaggcttcctgcaccgagcacnccatactngntacctctgnattctgntgctttgct

SEQ ID NO: 30788 - DNA, 266 bp, Glycine max
  unsure (1)..(266): unsure at all n locations; Clone ID: 701063068H1
ggaagttttgttgccttgtatcactatccatgcaaagtgaagatgttttgtgagaagtgattggcccggttgaattatgttgacatcagtatgttatttgggggcacccaagttgttaaggaacataaatagcaacattttctcacctttggatcttttagtaatatgcttccatgatcaactccccttttgccccagatccgtngacacatttgtttcatcatctgtggcctctggttgctgtctttcagtgaaatttattngng

SEQ ID NO: 30789 - DNA, 266 bp, Glycine max
  unsure (1)..(266): unsure at all n locations; Clone ID: 701063069H1
cgttctctgaaattttaattgacttttctcccctcataaaaaaaacctaccaatggctcccgcaaaggcagagaagaagcccgcggagaagaagccggcagagaaggccccagcggagaagaagccgaagggtangaagangatatcgaaggaaggaggaagcgnnnnnnnnnnnnnnnnnnnnnnnnnnagcgttgagacctacaagatctacatcttcaaggtgttgaagcaagtgcaccccgacatcgggatctccagcaagg

SEQ ID NO: 30790 - DNA, 266 bp, Glycine max
  unsure (1)..(266): unsure at all n locations; Clone ID: 701063070H1
acaaataggcagagtgatctgatataataagctatttttcacgcaccatttaaccagtgctctaaaacccccttctccgatttaagctctttccggtcccaattttgcagattcgaccgatctcgcaacagtaggtaagcaagttcacactccaaattccatttcgaaacttcaccagcttcaacgctcgacacttttnttctctctntctctntctctnctctnncnnagtcatgcgntgttatgtgagnttgaaaaaaagaccg

SEQ ID NO: 30791 - DNA, 252 bp, Glycine max
  unsure (1)..(252): unsure at all n locations; Clone ID: 701063071H1
cagaaatatcatatatcgtatcatccttnatataagctcttatttcgtntcaatncnngcactgtttaatttctacaaatatcaaagatcccccttcctcttntagtcaaaccatatttcatattggcnccaaatttntnttaccangntttgtaagatcacaattcacaagncccagagaagnaaaggganaataaatncttgaangttttcatttttggcaaatacagttggngncaanattganttngg

SEQ ID NO: 30792 - DNA, 282 bp, Glycine max
  unsure (1)..(282): unsure at all n locations; Clone ID: 701063072H1
gnacttcacagtgtactttaacttggaagaatgcatctcatacttatgcgaatatattncagccaatggtccctttgatggttccgtggcntctcacagggtgcaactctttcagcactttttgataggttaccaggccacagggaaagttactaaagggagcatccaccaataaaatttctcatatcaatatcaggntgcaaattcagnntcccagcatatgcngatgttggcctacaaagacaccatcagagctaaatctgttcatttcntgggggaaaa

SEQ ID NO: 30793 - DNA, 268 bp, Glycine max
  unsure (1)..(268): unsure at all n locations; Clone ID: 701063073H1
gcttctgattattcctcttcccattctagggttcccaaatggacgctggcggaaagatcaagaagggcgccggaggaagaaagggcggcggccctaagnagaagccggtttcaaggtccgtcaaggccggtctccaattccccgtcggaagaattggccgttatttgaagaaaggaaggtacgcccagcgtgtcggtaccggtgctcccgtttacttggccgcagttctcgagtactaagctgctgaagtgttgagttggctgggaat

SEQ ID NO: 30794 - DNA, 267 bp, Glycine max
  unsure (1)..(267): unsure at all n locations; Clone ID: 701063074H1
ttgatcgagataactagaaacagtgtgatgaaaatgaaggtccttgttttcttcgttgctacaattttngtagcatggcaatgccatgcgtacgatatgttccctctccgaatgaacactggctatggtgcccgtactccggaggtnaaatgcgcaagttggaggcttgctgtggaagcacacaacatctttgngctttgagaccattcctgaagagtgcgtcgaagcaacaaaggantacatccatnggcgaacaatatagancag

SEQ ID NO: 30795 - DNA, 169 bp, Glycine max
  unsure (1)..(169): unsure at all n locations; Clone ID: 701063076H1
canncanagaagagaacgttcaagaagttcagcttcaggggggtggatctggacgcgcttctggacatgtccactgacgaacttcgtgaagatgttcagtgctcgcgcacgcagaaggttccagagaggtctcaccagaaagcccatggccttgattaaaaactccgca

SEQ ID NO: 30796 - DNA, 272 bp, Glycine max
  unsure (1)..(272): unsure at all n locations; Clone ID: 701063078H1
ctttggtcccttgtntttgttgtgctatggcgcctgatgctgccgccgccaacggcaaaaagagaagacgctatcttcctcataacaaggcagtncaagaagaagggttcgtaccctctgcggccaggcgtgcaaggttttntcatcacttgcgatggcggcagagaacaccaagcctctcgtgaagctctcaatattctcgattccttttatgaagagctagttgatggggaacattcaagtgtaaaggagttacccagcaaacctttaat

SEQ ID NO: 30797 - DNA, 274 bp, Glycine max
  unsure (1)..(274): unsure at all n locations; Clone ID: 701063079H1
aaattattttctcttctccaaaattcaactcaataatcccttccctggttcccatcatggacgaattagaagaaaccctactcacccaaatcgactgggaatcgttcctcgacgacatacctgnacttaacgtcgatgattttttgcaggacgacaacgccgttcctgttgttaccgacaatcattcctccccgaacgacgaccccgttttgtccgagatcgagaacatgctcatgacgcaggccgaaaacgacgctgtcgttttgcccgagac

SEQ ID NO: 30798 - DNA, 211 bp, Glycine max
  unsure (1)..(211): unsure at all n locations; Clone ID: 701063080H1
ccttcttcagaatcatcaacaggcttctccgaaaccatttgtgtgancggcgctggtggcttcatcgcctcttggatggtcaaactcctcttggagaaaggctacactgtccgaggaaccctcagaaacccagatgatcccaagaacgggcacttaaaagagtttgaaggagcttcccagagactaactctgcataaggttgacctccttc

SEQ ID NO: 30799 - DNA, 276 bp, Glycine max
  unsure (1)..(276): unsure at all n locations; Clone ID: 701063081H1
cactatagtatgaaaaaggacattcattncatctatggctacccttattgctcccagcaaccantctcccccaagaagatngctgaagctctcagaaaggcttttgaaggatggggaactgntgagaacactgtcatagtaattttgggtcatagaactgtgtatcagaggcagcaaatcagaagagtttatgaggaaatttaccaggaggatcttgtgaagcncctagagtctgagatcaaaggagactttgagaaagccgtgtaccgatggata

SEQ ID NO: 30800 - DNA, 268 bp, Glycine max
  unsure (1)..(268): unsure at all n locations; Clone ID: 701063082H1
gacaccgcttgttggtttatgagtacatgaaccgtggttcccttgaccgaaacctctttgctggtgaaccggttttggaatggcaagagaggttcgatgtggcgnctggaacagcacgtggacttgcttaccttcacagtggatgtgtacaaaagattatccattgtgacatcanaccagagnacattctcttgcaggatcagtttcagnctaagntatcngattttggactctccaaactcttgagtgccgaacagtctggtttgtc

SEQ ID NO: 30801 - DNA, 267 bp, Glycine max
  unsure (1)..(267): unsure at all n locations; Clone ID: 701063083H1
acaatctcatagcacnaaanacatagtantatacagccgcantttctctatctctttctctncactctaaagtctaagcatccatggccatggcgtctgcanagctnaacaccttgtcttnccagtngntcgccnacaattcctnntctcctcgccgtggatcntcttcacgccgagtcnctcttccgatccgngnttgctnctnacnancacgaactcgcncataccgccaaatctattgcatctcncggtcgtggaatncntgca

SEQ ID NO: 30802 - DNA, 263 bp, Glycine max
  Clone ID: 701063084H1
atttctccatttccattttctctctcacttttcaagaatcgtaagctatgggaaagtcttacccaactgtgagtgctgattaccagaaggccgttgagaaggcgaagaagaagctcagaggcttcatcgtgagaagagatgcgctcctctaatgctccgtttggcatggcactctgctggaacctttgacaagggcacgaagaccggtggacccttcggaaccatcaagcaccctggccgaactggctcacagcgctaacaag

SEQ ID NO: 30803 - DNA, 263 bp, Glycine max
  unsure (1)..(263): unsure at all n locations; Clone ID: 701063085H1
tccaattcccgtctttgatattttaatcacagagagagaagagggtttgtntctgggttttggaaatttcagcccccatcaaagaagaagccccataatcttcgaatcgaaggcatttgattgaaaggtcgaaactttagcatctgggatcgcgcaattggggtttttntnggttaaaagggtatcttcggaattcatggcaaaactgtacntnanggcggtgcnacnggcggatctgaacaggaccacggagtggttcacgt

SEQ ID NO: 30804 - DNA, 211 bp, Glycine max
  unsure (1)..(211): unsure at all n locations; Clone ID: 701063086H1
agaacaaagaagcataagcaggctcctccttctctcttccctattagtgtgagaaaggggtttagtggtgaaagagtgaagagagatgagtggagtgaaggggcagtgtcaaccctacttgaggcctatgaggccaaatgggtgctaagaaacagagccaagctcaagggccatgactgggagnacgtggcccggcacgtgtcatcangtg

SEQ ID NO: 30805 - DNA, 272 bp, Glycine max
  unsure (1)..(272): unsure at all n locations; Clone ID: 701063087H1
ctcttcctcaccgattgcnagaatggaatttcgatgctcagtcatctcttttaccattctcttctctcttgctcttgcaggagagagccatgtccatgcatcgctacctgaggaagattattgggaagctgtttggccaaacactcccattcccactgcactgcgagagcttctaaagcctctccctgcaggtgttgaaatcgatnaactccctaagcaaattgatgatacacagtacccaaaaacattcttctataaagaagacttcatcc

SEQ ID NO: 30806 - DNA, 269 bp, Glycine max
  unsure (1)..(269): unsure at all n locations; Clone ID: 701063089H1
caaatcttaaaaatattcagtgaagatcaacctcaatggcatctcttggcgtgcgaccagttcttccccctccattaacttccatctccgacccacctcctcttttcgatggcaccaccaggttgtacatcagttattcttggcccctatgcacaacgtgtgtggatcgctaggaactacaaggggctacaagataagatcaattggtncctattaaccttcaagacaggccagcttggtataaggagaaagtctacctgangataagg

SEQ ID NO: 30807 - DNA, 268 bp, Glycine max
  unsure (1)..(268): unsure at all n locations; Clone ID: 701063091H1
ctagatatcaagtatcnaaatctnaacggcatcagcaaacatgtctcaacaccatggtgatgaaatggagtatgcggcagatgatantgaaatggcagaggtagaagaggatatgtatttccgtggcagggcatttggtgaatcagattcggatgatgacgacgactacgaatatgaccctttggaaaaccgaatatcagataccactgctgctgaagctaggagggggaaggatatccaaggtatacctngggatangttgngcatg

SEQ ID NO: 30808 - DNA, 268 bp, Glycine max
  unsure (1)..(268): unsure at all n locations; Clone ID: 701063092H1
ctcacttcgtgcaatgtggtgacagttgaatggttcccgtagatgtcgccggcgctgaccggaatacttgatctgattcactctctcaaatggagcatcagaagagcgggagcaagctaancagaacccactcctcccttctccgttctccgttcacagcctctcttccatcatcacccagcacgaacacgaacacgaacacgaacaacaactcctcctcgatgttgacgaccacgatgacaagaataagangcccaagacaccccat

SEQ ID NO: 30809 - DNA, 269 bp, Glycine max
  Clone ID: 701063093H1
aaacagagagttggcccatctaatttgggttctcctttgaaggttgtcagtgagccggttaaagaagtgatacctcagttctactttcaatttgggcgtcctcctccaaatgatctgaaagaacaatgcctgattagaattgaccatttattccatgatcacatggatgggctgcagatacatgaattcaagtcagttactaaggaagtatgcaagctgccatcttttttttccacatctcttttcagaaagatcgataatggaactgg

SEQ ID NO: 30810 - DNA, 272 bp, Glycine max
  unsure (1)..(272): unsure at all n locations; Clone ID: 701063094H1
ctctcttctctctgcatcgcntcaggttcttctgaaaagatgtctcncgtgtatgtnggtaacttggattcacgagtcaccgagaganatctcgaagacgaattccgtgttttcggagntattcggagtgtttgggttgcacgtagaccacctggtcatgcttttattgactttgatgaccgcagagatgcacaggatgctatccgtgaattggatggcaagaatggttggagggttgagctttctcacaactctagaggtggaggtggtgg

SEQ ID NO: 30811 - DNA, 275 bp, Glycine max
  Clone ID: 701063095H1
ccagttcaaaggtaaggtaggttaacactcttcttcatcgtcgtcgcaatgggacgtgtgatccgtgcgcaggtaagggagcaggctcggtcttcaagtcccacacgcaccaccgcaagggccctgcacgcttccggagcctggacttcggggagcgcaacggctacctcaagggcgtggtcaccgacgtcatccatgaccctggccgcggcgcgccgctcgccaaggtcgccttccgccaccctttcagatacaagaagcagaacgagctcttc

SEQ ID NO: 30812 - DNA, 282 bp, Glycine max
  unsure (1)..(282): unsure at all n locations; Clone ID: 701063096H1
gaaacgatccgtttcaaatcctccaacagcaacgtctccgacgaccaagaacccttcatgggcatcaaggttcgccgaaaagcctcttctccacagagaccacaaaggagactacctcaacgtcccttcccaccctttcctaatcaaaattctacagaaacaaggggacaatgaggttctgtttgcggacagggttctgaagtttacgggctccgggaagatgaaacgctgcgttctgatgatcacggattctgcgattnacatcgttggnccctgaggngg

SEQ ID NO: 30813 - DNA, 275 bp, Glycine max
  unsure (1)..(275): unsure at all n locations; Clone ID: 701063101H1
caattgctacaagaacaaataccagggctcatcagaaaggacaaattggngtcaccatagtgactttcttctttgaaccaaaatctaatagtgatgctgatcgcaaggcagcaaggcgagctctggactttatgtttggctggtttgctaatcccattacatttggtgactatcctgagagtatgagatctttagttggttctagactccccacattcaccaaagctcaatctgaaagtctcaaaggtcatatgattttcttggtataaattatt

SEQ ID NO: 30814 - DNA, 271 bp, Glycine max
  Clone ID: 701063102H1
cagttagcctcttcttgtttctcctgcaatcaacgacacccccccaaaaatgacaggagagacagtgaacccaaaagcttaccctttggccgatgcgcaactcgcaataacaatactggatcttgtgcaacaagctgccaactacaagcaactcaaaaagggtgctaatgaagcgaccaagacactgaacagaggcatctctgagttcgttgtgatggccgcggacactgagcctcttgagattcttctccatcttcctctcctagctgag

SEQ ID NO: 30815 - DNA, 240 bp, Glycine max
  unsure (1)..(240): unsure at all n locations; Clone ID: 701063103H1
ccagcggtgcagcttcgaaattgctggccatggcgaagaagctaagctcgaagcccaccattttgttcatcttcgtctctttcatgcttttttgcgcctttcttcctgttttcgctcctcttccttctttctcctctcaccattctcatcgcaatacagttncacagaaagttcgagatcgccaacgataggttctggaaagatggtgaaccattcagatcatcggtggtgacgtgcatt

SEQ ID NO: 30816 - DNA, 267 bp, Glycine max
  unsure (1)..(267): unsure at all n locations; Clone ID: 701063104H1
cagaagttttaaacattcaacctcaatttgcagagttctaatattacattgcaganaaaatgtctttgattccaagtttctttggtggcagaaggagcaatgttttggatcctttctccctcgatgtgtgggacccttttaaggattttccttttcccacttctctttctgctgaaaattcagcgtttgtgagcacacgagtggattggaaggagacaccagaagcacacgtgttcaaggctgatattccagggctgaagaaggagg

SEQ ID NO: 30817 - DNA, 266 bp, Glycine max
  unsure (1)..(266): unsure at all n locations; Clone ID: 701063105H1
tgtcactcttgggggaacatggttccagatactacaccaagagtttcaaaggatcggtagatgctttccatgtcaatacagttgatacaactggtgccggtgantcctttgttggtgctttattggccaagattgtcgatgatcagtccatacttgaagatgaaccaaggttaagagaagtactaaagtttgcaaatgcatgtggagctattacaactacccaaaagggagcaattccggcccttcccaaagaggaggctgcactg

SEQ ID NO: 30818 - DNA, 266 bp, Glycine max
  unsure (1)..(266): unsure at all n locations; Clone ID: 701063106H1
aaattcaagcacttccatcttgcctgcngtcagtacatttcatgggcttgcagctccttctatcccaagtctgaagagcatgctaaaaaatgaagtgcaaggattccttcagtattgcaatgctgacacaagtttganaganacacattttggaggagctttacaaaatgcaaatccttctttgcagaagaggttactgatctttgaccgctctgataataagacaaggttgtnttatggtcctgtcctccctcttgtccagagtc

SEQ ID NO: 30819 - DNA, 266 bp, Glycine max
  unsure (1)..(266): unsure at all n locations; Clone ID: 701063107H1
ctccgatcaaagttcctcactttctctcccttngatcgacanccaccacgcgttagagagagaaaaaaaaccccgagagatcggaaagatgggtacgcttcagtcttggagaagagcctacggtgccatcaaggataccaccaaagtgggtcttgcccatgtcaatagcgattacgcggatttggacgttgccatagtcaaagccacgaaccacgtcgagtgtccccccaaagagaggcacctcagaaagattctgtttgccacgt

SEQ ID NO: 30820 - DNA, 134 bp, Glycine max
  Clone ID: 701063108H1
catacatccctcattaggaaaagctttttcataactgacttcccgttcaacatgtcttaccaaatgtgtcctaaagaacaagggaatgtggattactttccgggaattaagatccacactttgcaaattttaca

SEQ ID NO: 30821 - DNA, 268 bp, Glycine max
  unsure (1)..(268): unsure at all n locations; Clone ID: 701063109H1
cnacaattgatccgtctaangatcctaggaagtctggtgcacagcttattcttccggatagtaaagataagatggcactggagtncagcaggggtgaaagatatgaagacgttgaatggggatttgattaagaatcataaaananagattaaganaaaagctaagcaagcagcccatggatgtgttgaaaaggaagcttctgaaggagttgagggtaatgctgaaacctctggggctgtggagttgtctcccaatgcgagttctgcaa

SEQ ID NO: 30822 - DNA, 266 bp, Glycine max
  unsure (1)..(266): unsure at all n locations; Clone ID: 701063110H1
cacaaccaggtccctgaatgctttttagagagagaaagagtaataataataaagtggaagaanaaagaattaggagagtgannnnnnnnnnnnnnnnnnnnnnnnnnnnnnnnnnnnnnttgagaagatggtgtttgaggaaactgagctgaggctgggactgggactatgtctccctggaaatggaaccacggcaacaactgaagctgctgctgcggaattaggagtgaggaagagagggttctctgagactgaaactgatgaaa

SEQ ID NO: 30823 - DNA, 243 bp, Glycine max
  unsure (1)..(243): unsure at all n locations; Clone ID: 701063111H1
ggtttccattatctcctccaaccttcacgttccgaaacngtagatagaagatcacacttgctcaattcccttctcaagttattgttggttggcaatgcaagatccaaggattcctttgtcagaggagatcttgaataataaaccaaggaagaagaaaaactcaacccagaaggcatctttatttcttttgcaagcgaatggtgtcaaggaagatggacaggcatctctgtctttaaaatcagg

SEQ ID NO: 30824 - DNA, 263 bp, Glycine max
  unsure (1)..(263): unsure at all n locations; Clone ID: 701063112H1
ctgccttcttctctccctcgattcaattcaattctcatcatnttcctcagatttagataaagaagatgcagaagggtagagaagttcgagataataacatttttgaaccaagaggatttggagattttgggggctttggatttcatagaagtatgatgccaagtctttttggagacagggacccatttgatgatcccttttttcactgatccatttgatagcttgtttggtccaagttctgcatcaagagcaatgcagaagac

SEQ ID NO: 30825 - DNA, 246 bp, Glycine max
  unsure (1)..(246): unsure at all n locations; Clone ID: 701063113H1
ggcttttaatttcctagatctacccaaacaaattgtancataagtcccatggccaaacagactagtgttgtttatctatatcccagcaaatcacaagtttggggtgagaattttgatcataaaaaacttgtaataacaacactagctgctaatggaaagaaggaggagagtaatggagcacctaatgacacatatcctgcgtttcccgggtggtatgctgatgtttcctggccaggagaagcacac

SEQ ID NO: 30826 - DNA, 270 bp, Glycine max
  Clone ID: 701063114H1
cgccacgttgcaggctatggtggtgatgtttggcccatacaaccagctccaaaggaccatccatggcgctacatgccaaaccatgccatgactcctcatatttctggcaccaccattgatgcacagttacgttatgctgctggtgtcaaagacatgcttgataggcacttcaagggtgaagactttccagaacaaaactacattgtgaaggagggtcaacttggcaagccagtatcgttgaagtgatgcttttgttgaatttgaatcttc

SEQ ID NO: 30827 - DNA, 267 bp, Glycine max
  unsure (1)..(267): unsure at all n locations; Clone ID: 701063115H1
cataaatatatatgtagatcgaatataanatgtggaaatgaagggttganaagcaacaganaaaaaatcgttgcttnttcctataattgactgggggnggggggtaggattttgaatgtcctcactgagagcaaaccaaaatcttccaaaggnggtgagcncttctgnnaattttgcnaatcctgggggcaatgaaagatgggntcaacaacggaggatttgctatggatggggtggaatatgtgtgggctatttgggggccctttc

SEQ ID NO: 30828 - DNA, 269 bp, Glycine max
  Clone ID: 701063116H1
cattagacaacgtgtttttctactagagatctcttttctctagctagtgtaatatcattaatcaatggctggcactatctttggataccctttcagacacttcatctggggtcacccaccaattttcaaagaatggtccggctcaacagccctcttagattggctcgaatcacccactgcccacatcttaaaaattaacgttccaggattcagcaaggaagacataaaggtgcagattgaggatgggaatattcttcacatcaaagggg

SEQ ID NO: 30829 - DNA, 269 bp, Glycine max
  Clone ID: 701063117H1
gccgaagctgggctattttaggccactggtacagtatttgaaagaagggtctgacatgaacaagatcctaatggcaaaagcactttctaggttggagctcactgatcacagcaaactttcccttggagaagctggggcaattgagccccttgccaatatgtttagtactgggtaactcgagtccaagttatcctctctaaatgcgctacaaaatctgtctagcatgacagaaaatttgcaacacttgatcagatctggaattgcaggaa

SEQ ID NO: 30830 - DNA, 265 bp, Glycine max
  unsure (1)..(265): unsure at all n locations; Clone ID: 701063118H1
caagtttcgtttccaggtttcggcgcaatcggcttctgcttcaaggaaggagagcacgttattctctatcaacaagtaaaatgtcaggtgaagagggtgtcattgcagttgagcnnnnnnnnnnnnnnnnnnncatcccaggcgagccaatggatatcatgactgccttacaacttgtgctcagaaaatctctggcttatggtggtttgtcgcgtggccttcatgaaggtgcaaaagtgattgagaagcatgctgcacaactctg

SEQ ID NO: 30831 - DNA, 265 bp, Glycine max
  unsure (1)..(265): unsure at all n locations; Clone ID: 701063119H1
ccctggcggcggctttngtggtcgtncgtggcatgncngnatggaggtagtgggcaaggtgggcgaggtgatttctttcctggtaggggcaacancgggtaggggatccggtggccctcgtgggggtcatgttggttggggtaggggtgaacgtggtatggatgatcggtacaacatggaggggcgtggacaaggtcgtggacgtggaagatttgacaatagaaganatgtttcttccaaaggtagaggcagaagtcatagtcgt

SEQ ID NO: 30832 - DNA, 151 bp, Glycine max
  unsure (1)..(151): unsure at all n locations; Clone ID: 701063120H1
gcaagttgagcanaggaaaaacaagcgacaagagaaagaaaagaagaaaaaatggtgggagaagaagtagtaccaatggacgacaaagcgaagaggatgcgagatctgctatcgagtttctactcccctgacccttccatctccaacaaca

SEQ ID NO: 30833 - DNA, 116 bp, Glycine max
  Clone ID: 701063121H1
cagaataacaggtttcttattttactggcctgagattttctcttttttagataaaccttgtcataccaaatatttacaatacatggtgaagaatgacgaaaatttcttattttatt

SEQ ID NO: 30834 - DNA, 262 bp, Glycine max
  Clone ID: 701063122H1
attgatttcttgcttctatatattacttgcttcttttcttgatcatgtcccttgctggtaaaatcagctctgaaattggtgttcaggcaaccgctgcaaagtggttcaacctcttcacaacacaacttcatcacgttcaaaatcttactgatagaattcatggaaccgagctgcatcatggtgaagactggcatcacaatgagtcggtcaagcactggacttataccatagatggcaaggttacaacttgcaaggagagtat

SEQ ID NO: 30835 - DNA, 263 bp, Glycine max
  unsure (1)..(263): unsure at all n locations; Clone ID: 701063123H1
ctcattgttgaaaagaaaccctagcaagtggagcaatggcagacgttgaagtcgatgtgnnnnnnnnnnnnnnnnnnnggctgccgaagaagagaacgttcaagaagttcagttttcgaggcgtggatctcgatgcacttctcgacatgtccaccgatgaactcgtcaagatgttcagtgcccgcgctcgtagaaggttccagagaggcctcaccagaaagcccatggccttgatcaagaagctccgtaaagcgaaaagggaa

SEQ ID NO: 30836 - DNA, 266 bp, Glycine max
  Clone ID: 701063124H1
ctgaagagttccgagggttatattggaaactacaatgttactagtagacaacctaatcagagattcttgagctcaccagtgagtgtttactgcaatccaagtagaaatattccttgcaacttcctgtacttatgtgaatcgctacctaggagatatgatagttggaaatgtcatggtagcagtagatcaaggaaaactggtcaaaggttaatgaggtattgtgaattcatacatctcaatcacctaagagatacagctcataagga

SEQ ID NO: 30837 - DNA, 263 bp, Glycine max
  unsure (1)..(263): unsure at all n locations; Clone ID: 701063125H1
gtcgcagaggaaaaccctagctagtagtctcagttcgtttganaganaaaaaatggcagagggtctcgttctccgcggaaccatgcgcgcccacaccgacgtcgtgacggcgattgccactcccatcgacaactccgacatgatcgtgacggcgtcgcgcgacaaatccatcattctctggcacctcaccaaggaggacaagacctacggtgtcccccgccgccgcctcaccggacattctcattcgtccaggacgtcgtctc

SEQ ID NO: 30838 - DNA, 260 bp, Glycine max
  Clone ID: 701063126H1
gtttgttgtgagctataagctagtttatcgtgaggagaatatgaagttgtttgttttctttgttgctgcagtagttttggtagcatggccatgccatggcgcaggctaccaaaggttccctctccgaatgaaaactggctatggtgagcgttcttcggaggtaaaatgcgcaagttttaggctgctgtggaagcacacaacatccgagcctttaaaaccattcctgaagagtccgttgaaccaacaaaggactacattaa

SEQ ID NO: 30839 - DNA, 260 bp, Glycine max
  Clone ID: 701063127H1
ttacaggcctgatgcaccactagtacttcgtggaatcacatgcacatttgaaggaggtcacaaaattggtattgttggcagaacaggcagtggaaagtctactcttataggcgccttattccgtctagtggagccagcaggtggaaaaatcattgttgatggaatagacatttgttctattggacttcatgacttgaggtcacgctttggtattatacctcaggatcctactctttttaatgggacagtcagatacaatt

SEQ ID NO: 30840 - DNA, 51 bp, Glycine max
  unsure (1)..(51): unsure at all n locations; Clone ID: 701063128H1
tgaaacacccagatcananggnnaacgctttttgcacccttgctctccatt

SEQ ID NO: 30841 - DNA, 264 bp, Glycine max
  unsure (1)..(264): unsure at all n locations; Clone ID: 701063129H1
attgancgtgtggctatgcgaaacaaattcgaaaaaccctagttggatttcagaattggaagaaaaanaataagagcatggggtttagagtgagaaatctgaatcccatataccgaaagtncgtaacaaggttttcgtcttctaattttctcccaccggtgctggaatcacttaattcccatccgttagagtcttgtttaactgaaaatcccgcgtttcaaaatcccaaggagatggcatttgggtcatagtcattcccaccac

SEQ ID NO: 30842 - DNA, 266 bp, Glycine max
  unsure (1)..(266): unsure at all n locations; Clone ID: 701063130H1
ctagcattctggttganactcgaagtgtgaagcactgagcagttgagngaaatgggaacccttggnagancgatctacagcgttggtaactggattcgagaaactggacaggccattgatcgtctcggttcccgtcttcagggcggttactacttccaagagcagctctctaggcatcgaactctgatgaacatatttgataaggctcctgttgttgataaggatgtatttgttgcgccaagcgcctccgtcatgggagacgttca

SEQ ID NO: 30843 - DNA, 266 bp, Glycine max
  unsure (1)..(266): unsure at all n locations; Clone ID: 701063131H1
cacacactctcatagctgtagcggcgacactaanatcggagaaagaatggcgaaaacgacgtcgttgctgctctttacactgctcctcttcggaaccctagctctcatccaggcgaagaaatcgaaggaggatttgaaggaggtgacccacaaggtttactttgatgttgagattaatggaaaagaagcaggtcgtattgtaatgggtctttatgggaaggctgttccaaaaactgcagaaaacttccgagcactttgcacaggga

SEQ ID NO: 30844 - DNA, 180 bp, Glycine max
  Clone ID: 701063132H1
gcttgtctgaattcagcatgccaatggtgtactatttgagtctcagctaaaaatttgcgtgataatgcttcagatctggaaggaaatatttacagcatgatgtggcattctgtaattttggatgttcagttgtaagctaactcattttttcccctatccttttcatttataataatagcg

SEQ ID NO: 30845 - DNA, 268 bp, Glycine max
  Clone ID: 701063133H1
agagtttgttgtgagctataagctagtttatcgtgaggagaatatgaagttgtttgttttctttgttgctgcagtagttttggtagcatggccatgccatggcgcaggctaccaaaggttccctctccgaatgaaaactggctatggtgagcgttcttcggaggtaaaatgcgcaagttttaggcttgctgtggaagcacacaacatccgagcctttaaaaccattcctgaagagtgcgttgaaccaacaaaggactacattaatggc

SEQ ID NO: 30846 - DNA, 264 bp, Glycine max
  unsure (1)..(264): unsure at all n locations; Clone ID: 701063134H1
ctcacactggtcttcgcttctcattcatcatttctcacctaaccttctcttcctctcagtctcagatcngaaacctcagccagccatggcagcgttccagaagatcaaggtcgtcaaccccatcgtcgagatggacggagatgaaatgactagggttatctggaagtcaatcaaggacaagctcattttgcccttcttggagttggacatcaagtattatgacttaggccttccttaccgtgatgagaccgatgataaagttac

SEQ ID NO: 30847 - DNA, 266 bp, Glycine max
  unsure (1)..(266): unsure at all n locations; Clone ID: 701063135H1
ctcacactggtcttcgcttctgcattcatcanttctcacctaaccttntcttcctctccagtctcagatcagaaacctcagccagccatggcagcgttccagaagatcaaggtcgtcaaccccatcgtcgagatgtcncggagatgaaatgactagggtnatctggaagtcaatcaaggacaagctcattttgcccttcttgggagttggacatcaagtattatgacttaggccttccttaccgtgatgagaccgatgataaagtt

SEQ ID NO: 30848 - DNA, 267 bp, Glycine max
  unsure (1)..(267): unsure at all n locations; Clone ID: 701063136H1
gcatctttatgcntcctcagggtcttcnatacaagtttgnaanacacggnaaagatccgtgaagcagtaagcgaattggcctgcagaagaacattccaagtccatagttgtaagtgnctgcnagaacggatcctgggtcttggggatcttgnttgtcaggggntgggaataccagtgggaaaactttctttatatacagcanttggaggagtccgcccttcagcttgtttacccattacaattgatgtgggcacaaacantgagaag

SEQ ID NO: 30849 - DNA, 262 bp, Glycine max
  unsure (1)..(262): unsure at all n locations; Clone ID: 701063137H1
aaaaaaaaacaaagagactcaaaaaagagttctccgtcaactgaatctccatcatctttcccctttcccccctttcgcntcttcgtgttttttcttctctctcacttttgcttcttcttcatttcttcacgatccactctctctcgtagttgtnngtggtgctggtngcgtgctctcatggtgatcgancatgacattgagagttgcgggagcagagcgatgcaatctttgcacgcgcatcaccctcgccaccaccggcaga

SEQ ID NO: 30850 - DNA, 262 bp, Glycine max
  unsure (1)..(262): unsure at all n locations; Clone ID: 701063138H1
cgaagacaaacctctgttctcaactgtgtttctttacctctcacctactttcagaccataccaggntnagaagatgcagcagacaccgnctatgattcctatgatgccttcgttcccacctacgancataantcncgagcagattcaaaaataccttgatgagaacaagaagctgattctggcaatattggacaatcaaaatcttgganaacttgcagaatgtgcccagtaccaagctcagcttcaaaagaatttgatgtat

SEQ ID NO: 30851 - DNA, 261 bp, Glycine max
  Clone ID: 701063139H1
cgcccatcatcaaagtttcttcctttctctgctctttgccttctctgacacatttggtgccttgtagagcgtgttttggcaggaaggtggtatggcgaaggacgttgaggttgctgagcgtggctccttctctgggaaggactaccaggaccctccaccagcaccactcattgatgctgaggagctcacaaagtggtccttttacagggctctcattgctgaattcattgccactttgctcttcctctacattactgtgct

SEQ ID NO: 30852 - DNA, 261 bp, Glycine max
  unsure (1)..(261): unsure at all n locations; Clone ID: 701063140H1
ttttagtanagccttcttccaaaaccaccggcgtcgtctacttcgccgttaatggagtttccaaacaagactggtatncgtcgagcaattggccgaaacatactcttccgtcattccttgcttcggtttccatcctttgtaattgtntttgtntttgtttcttggtttcctcaactgaaatgaccttattttctgacgttgttgcaggtttgttaaagaacggagcccccaattggtttgaaacgttgagagagtattcgt

SEQ ID NO: 30853 - DNA, 260 bp, Glycine max
  unsure (1)..(260): unsure at all n locations; Clone ID: 701063142H1
cggctcgncggaagcatcgagaacatcgcagcgatggcgagantgggtagaatgaagttgggttcacaaggcatggaggtgtctttgcagggacttgggtgcatgggcatgtctgcnttctatggtcctcccaagcctgaccccgatatgattgctctcatccaccacgctgttcaaactggtgtcacttttcttgacacttctgacgtctatggtcctcacaccaacgaaccgnttctaggaaaggctctgaagggagg

SEQ ID NO: 30854 - DNA, 261 bp, Glycine max
  unsure (1)..(261): unsure at all n locations; Clone ID: 701063145H1
gtgtgatgaaaatgaaggtccttgttttcttcgttgctacaattttggtagcatggcaatgccatgcgtacgatatgttccctctccgaatgaacactggctatggtgcccgtactccggaggtgaaatgcgcaagttggacgcttgctgtggaagcacacaacatctntgggctttgagaccattcctgaagagtgcgttgaagcaacaaaggaatacatccatggcgaacaatatagatcagactccaaaacagttaac

SEQ ID NO: 30855 - DNA, 268 bp, Glycine max
  unsure (1)..(268): unsure at all n locations; Clone ID: 701063147H1
cgaaccaactccagttcaagcctcaacatttccttccatgtnatcaantcgattngncgattntcntggntgtncataatttggcanatgggtccaccacctagnntgggnatctcaattcantacaataatgtggtgcccatgccaaattatgcacaaccatcanaatctncagatccatntgntgtcantnncgaancaatgngagttcnagctgaaacatttcgtgtnccatggtcatctgtnncnaaggngtctggctagttgt

SEQ ID NO: 30856 - DNA, 264 bp, Glycine max
  unsure (1)..(264): unsure at all n locations; Clone ID: 701063148H1
cttcttcgtctcaaatctcttcgttccttcgattcgttccatttcttccaaaatggccaaagacccagttcgcgttctcgtcactggagctgcagggcaaattgggtatgctcttgtccctatgattgctaggggagtgatgttgggtcctgaccagcccgtgatcctccacatgcttgacattcctccggcagcagagtcattgaatggggttaaaatggaattggtggatgctgcattccctcttnttaaaggtgttgttgc

SEQ ID NO: 30857 - DNA, 265 bp, Glycine max
  Clone ID: 701063149H1
gagaattacagagcattttccaacacgattacacgacccgaatcaaacccctctttctctccgaagctgcttttaatatcgtactggccttcgattgttctcctctttaatacatactgttctctcttcgatttgagggaacagtacaagagtctgagcatcggttaacccaactgcacaggtagtctccaaataatggagcctcatgatgagactggatgccaggctcctgaacgccccattctttgcattaataattgtggct

SEQ ID NO: 30858 - DNA, 52 bp, Glycine max
  unsure (1)..(52): unsure at all n locations; Clone ID: 701063150H1
ggcatcttcaagctctgaatctgcaatggcttctcnacncaacatggnancg

SEQ ID NO: 30859 - DNA, 205 bp, Glycine max
  unsure (1)..(205): unsure at all n locations; Clone ID: 701063152H1
catgtccatctgataaccctttcctgattctctttcgtggttgttgctattctgagtgatgggtatgccctgccgctgttcccacacctcccacatcactgaaatcatcatcaccagcttcttccgccacaagtcttagancaacaatttccgtcaattattccaaaaccaccttaaganccttttccaaatggccccttaaaga

SEQ ID NO: 30860 - DNA, 162 bp, Glycine max
  Clone ID: 701063153H1
tggctgctgctcatggtaatttacatgtttaaggggatttcatcttccactccttggtatggtccggatttcaagtgcaattaaatttcattacatgtatcagaaatatttttattacaacctatatatctagattaaattattgctctcaagaattttctt

SEQ ID NO: 30861 - DNA, 260 bp, Glycine max
  unsure (1)..(260): unsure at all n locations; Clone ID: 701063154H1
cttctggatctctctggaagttattatggacacaagcaggtatcnanggaaaaagggtcttgaggtacaaannnnnnnnnnnnnnnnnnnnnnnnnnnnnnnnnnnnnnnntgagtnaggtgggttttggagcagacagaagaaggaataagagagtaatgagagatctccatggaaagagatcagggtccaaaggtggaggctcaatgccaccttcttgtcaagtggataattgtgatgctgatctgagtgaagctaag

SEQ ID NO: 30862 - DNA, 257 bp, Glycine max
  Clone ID: 701063155H1
aaagtggtccttgtcgggcatagctttggagggatcagtatagcccttgcaatggacaaattcccagagaaaatatcacttggaattttcctaacagcttttgttcctgatacccaacacaaaccatcacatgtcttagaagagtacattgatagatacccatataccggatggatggacactgagctctggaatagtggaggcaaaacaacattgctttttggcatcaaattcttgtccactaagttctatcaact

SEQ ID NO: 30863 - DNA, 265 bp, Glycine max
  unsure (1)..(265): unsure at all n locations; Clone ID: 701063156H1
aacaagctaggctattagttcgattttgtagtaagtgaggtgccaatatggtgaagatagctcntggtantttggatgactcttttagcgctgcctctcttaaggcttatttcgcanagttccacncaacttctgatttnccgtgttcgctggtgttggatcagccatcgcttacaacgagcttacanaagntgcagccttggatccaacgggggctggtgggcagtagntgtggcacatggcatttgcactggttgtaggtgtc

SEQ ID NO: 30864 - DNA, 257 bp, Glycine max
  unsure (1)..(257): unsure at all n locations; Clone ID: 701063157H1
aaattcgcactgttgagcaggatgggaagacaattaaactacagatttgggatactgctggacaagaacgatttaggacaataactagtagctactatcgtggagcacatggaatcattattgtttatgacgtgacagatgaagatagcttcaataatgtgaagcaatggctcagtgaaattgaccgctatgccagtnataatgttaacaaacttttggttggaaacaagagtgatctgacagcaaatagagttgtc

SEQ ID NO: 30865 - DNA, 256 bp, Glycine max
  unsure (1)..(256): unsure at all n locations; Clone ID: 701063158H1
tgtgagtnaattgggaggatgctgtgtctgggtcgattcggcggggtctctcactacccaatcaaatccggttggagtcggagggactacaccaataacaggcccagatggtgtttgatggccgcccaggaatccgactcttcttttgcaccctctcttgactccgacaaaaccgcctctgctggattctgcatcattgaaggcccagaaacggtacaggattttgccaagatggaacttcaagaaattcaggaca

SEQ ID NO: 30866 - DNA, 256 bp, Glycine max
  unsure (1)..(256): unsure at all n locations; Clone ID: 701063159H1
ccaccacttgccggaaaatcttcgccggtaantttttccgatcattactctctttgtttggccttttcgcttcccttgctttcaaacgctttaacttctctcttccgttccgttccgttctcgcatcatcttaaactagggttcccggaaaccctagccttggttggttgccatatctgctcnatgagtttgggagaaaccttactggagctattcagattcagctggttcagataaacgaaggcgtttcgctctg

SEQ ID NO: 30867 - DNA, 258 bp, Glycine max
  unsure (1)..(258): unsure at all n locations; Clone ID: 701063160H1
gtgaganangngcncacatcaccggcacttgttttcattttcagttcatcttagggttcaattctcaatatcctcattccccgttccctcgcctttgcttcctagttcctactgtgacctgtgantctccccttcccggcctcgccaacgggaaattcaacggagttttaattctcgtgtttcttcggagcgagcagaaggacttcagcatcggagaccgaatcgttagggtgaggggagtaaataaacagggtgaac

SEQ ID NO: 30868 - DNA, 260 bp, Glycine max
  Clone ID: 701063161H1
ccaaaccaaagcaagaatagtgttctaagagtgagcaacaacttcaaacaccattgtgagaaatggcttccaagggtgcacttctcttgtgtctcaacattctcttcttcactgtggtaagctccacatatgtcccatgcaacccaccccctaaaactcctaaacacacacctgtcccaaagccaccttccccaaagcaaccaagttgccccaaagacaccattaagtttggtgtgtgtgctgatgtgttaggtttgatt

SEQ ID NO: 30869 - DNA, 260 bp, Glycine max
  unsure (1)..(260): unsure at all n locations; Clone ID: 701063162H1
ctgaagctaacttaagggnaatnagatggccaatggcaacactagtcatcgcttcaagctcttgcttttccttctaactctgcactcttcattcgctgagattttcttcgaagagagattcgaagatggatggaagagccgttgggtgctatccgattggaaaaggagtgaaggaaaagcgggtaccttcaagcacacagcaggaaaatggtctggggatcctgatgacaaaggtcttcagacatataatgacgccaagc

SEQ ID NO: 30870 - DNA, 261 bp, Glycine max
  unsure (1)..(261): unsure at all n locations; Clone ID: 701063163H1
tttgttgtgagctataagctagtttatcgtgaggagaatatgaagttgtttgtnnttctttgttgctgcagtagtnttngtagcatggccatgccatggcgcaggctaccaaaggttccctctccgaatgaaaactggctatggtgagcgttcttcggaggtaaaatgcgcaagttttaggcttgctgtggaagcacacaacatccgagcacttaaaaccattcctgaagagtgcgntgaaccaacaaaggactacattaa

SEQ ID NO: 30871 - DNA, 263 bp, Glycine max
  Clone ID: 701063164H1
tgatttacaacagtggaggagacataatttaaccgctctctatcacagatatttgcaaatgggttccaagaggccgttgtggaacattggaagtctgcctttaggctggctcactttctataacaagactaaggttttggacagacggtggcacattcttggccttggttatgactcaggtgtcgataaaaacgagattgaaggggctgccgttatacactacgatggaattaggaaaccatggttggacattgcaatgggaa

SEQ ID NO: 30872 - DNA, 264 bp, Glycine max
  unsure (1)..(264): unsure at all n locations; Clone ID: 701063165H1
cgcaataaaatctcttctgcggtgttatcnctttgactgaattccaaattttgtaagtataatagttggctatgaaagannactgtaccaagaagcatagtgtgagagtcagagatcagttgttaagtatgagatgtgagaacatttgttgaatgtatattgctaaatagaagtgcaaaanatgattatagatacataattgatttatttttaagtgcttcaacttcaaatcactcatgaacattatatttgctcagtagtgaa

SEQ ID NO: 30873 - DNA, 128 bp, Glycine max
  Clone ID: 701063166H1
ctaacttcaaacatcgtagttaaatgtgacaaaagaaaaatgtaataacgccctagcttgctagaggctggtgctactaataatgtttgtcacaaaaattatataataataggtgttttactccgtct

SEQ ID NO: 30874 - DNA, 258 bp, Glycine max
  Clone ID: 701063167H1
atacccacacacaccttgttttcctttctatagagacacacagagagagcaataaacacccttcaatggctaccactaccactaaagtttacattgtttactattctatgtacggacatgttgagaagctagctgaagagattaaaaaaggagctgcttctgttgaaggagtagaagcaaagctatggcaggtacctgaaacactgcctcaagaggtccttgggaaaatgggagcacctccaaagagtgatgtaccaa

SEQ ID NO: 30875 - DNA, 259 bp, Glycine max
  unsure (1)..(259): unsure at all n locations; Clone ID: 701063168H1
cttaaaccctaatnttgcaatcagagagtgaagagaagagaagnggttgatgggtcggcgaaagaacaacagcaacaacaatcagtgctcctcaagcaaggaagacgctgacatgaatagcaaccaccttcggtttgaagaagctgacgaggctgtcgacgagagttccaacctcgaccaatccatgtgcgacatcgaagaatccgatgataaaaccagcgccgactattacttcgattcctactctcattttggaatt

SEQ ID NO: 30876 - DNA, 257 bp, Glycine max
  unsure (1)..(257): unsure at all n locations; Clone ID: 701063169H1
ganactttggagatctgaggaaaagggaaatggagttggggaattggaatctgtttcggatagtagctcaccttcaaggtatgagaatggtccattagagaataggtatagaggtatatatgacagtnaacattgggtgaaattgagaaatggagtgcgcaggctgtgcagacaccctgtatttcaattgagcaagcccactaagaagcgtgcaagtcttggtattgtaaatactagggaaggaggtggagaggctt

SEQ ID NO: 30877 - DNA, 258 bp, Glycine max
  unsure (1)..(258): unsure at all n locations; Clone ID: 701063170H1
ggaagctccaatccaatggcaatttttgtctgtnactgtgatgcacagtgaaataatcaaccctattcatcaatctccagtgttgcactgccatcaatgtccaccaccatttcttcccttcccttctctctcccccttcgccaaaactctagggttacccttttcaatccaccctcttctcctaatccatcccaatcatcagtcacctttcctaaaaaaaaatggagacttttgtggtttaggcatggaaacacttca

SEQ ID NO: 30878 - DNA, 179 bp, Glycine max
  Clone ID: 701063171H1
caaaagtcacattttttatgtagaaatctggaggctacaaagagttgtggtgagattgaatgtgaaaaaaataattgtatccctttcaccacaccgcaggaaccaaacacaccagtataccatctatttagattgtagcaagtcaagtttataaattttacatggaagcttagtcccat

SEQ ID NO: 30879 - DNA, 236 bp, Glycine max
  unsure (1)..(236): unsure at all n locations; Clone ID: 701063172H1
gcatgtggtttttatgttgcatgtgttgttgtnnttattaacagctatatgatcttcgttttaattttgtgnttttccttcctgcccttgttatgtttgtgcattaaataaaagtaagaaatgccccaccactaagtaatgctatatggattatgtatgtgttccatatatgtcaagtgagtggtgtgtggttgtgaagaatctattgcttttaatgaatcagatcctttggtgtg

SEQ ID NO: 30880 - DNA, 256 bp, Glycine max
  Clone ID: 701063173H1
aaatgtggaagagaacgggttttgaagaagaagcagttcaattgatcaactcagatttcagggacctaagtctagctgctaatagactcgcccatcatgccatcaaacttggtggcattggctttggagcctcttttttcggattgtttgctgccattgctgctatttatctgttgattttggatcgtacaaactggaaaacaaatattctcacagcactactcattccatacattttcttcagcttgccttcatt

SEQ ID NO: 30881 - DNA, 255 bp, Glycine max
  unsure (1)..(255): unsure at all n locations; Clone ID: 701063174H1
ctgtaatgctactgggtgttgggagttgagagtgaagctcctgngtgtggtgtggtgtaggtgaagtgcaatctgtgttgatgcgttccacgttttgctgtcacttgaacctttcacccgtcatgattatgaagggcttctctgctcccatttcatcatatgtttcgcctcgagctcaagccgtcactgagccaccggcgcggattggctttttgggcctcggaatcatgggctccccaatggcccacaatctcc

SEQ ID NO: 30882 - DNA, 255 bp, Glycine max
  Clone ID: 701063175H1
gccgattacaatattcagaaagaatcgacgcttcatctggtgcttcgactccgcggagggatgcagatcttcgtgaagacgctcaccgggaaaactattactctggaggtggagagttctgatacgatcgataacgtgaaggcgaagattcaggataaggaagggattccaccggatcagcagcgtcttatcttcgctgggaagcagctcgaagacggacgcactctcgccgattacaatattcagaaggaatcc

SEQ ID NO: 30883 - DNA, 256 bp, Glycine max
  Clone ID: 701063176H1
gcggaaagaacaacagtaggattggcagcaagagacccttcagggattctctccccatacacctacaatctaagaaacacaggccctgatgatgtttacattaaagttcactactgtggaatttgccattctgatctccaccagattaaaaatgatcttggcatgtccaactatcccatggtcccaggacatgaagtggttggtgaggtactggaggtgggatcaaacgttagcaggttcagagtgggagagttgg

SEQ ID NO: 30884 - DNA, 228 bp, Glycine max
  unsure (1)..(228): unsure at all n locations; Clone ID: 701063178H1
tgaatcgcgattgttctgtgcgaganaaagaagagaganatcgaaaatngcgttggctttcgacgagttcggaaggccgttcataatcctgaaggagcaggagcagaagagcagactccgaggattggacgctcagaaagccaacatctccgccggcnaagccgtgggctcgcatcctccgaacctccctcggccccaaaggcatggacnagatgctccagagccccg

SEQ ID NO: 30885 - DNA, 238 bp, Glycine max
  unsure (1)..(238): unsure at all n locations; Clone ID: 701063179H1
cgcgggtgaggtagaacccttcaatgtggtgactctgacgatgggtgcctacaagtaacnttcagagctatggcgcaagaagcagtctgatgtcatgcgcttcttgcagcgggtgaggtgctgggagtataggcagcaaccttccattgttcgtttgacaaggtctacccgccctgacaaggctcgtcgcttgggcttcaaggctaagcagggctatgtgatttaccgtgttcgtgtt

SEQ ID NO: 30886 - DNA, 260 bp, Glycine max
  Clone ID: 701063180H1
gaagattgagagaagatacaaaacagaagagagatgggcgtgacgaaggaacaagttgaattatccttgaaggccaaactgaacccttctcaccttgaagtggttgatatatctggagggtgcggtgcaagttttgtggtagagattgtatccgaacagtttgaaggcaaaaggctacttgagaggcatcgaatggtgaatgctgccttagaggaggaaatgaaacaaattcatgctctctctattaagaaagctgttac

SEQ ID NO: 30887 - DNA, 257 bp, Glycine max
  unsure (1)..(257): unsure at all n locations; Clone ID: 701063182H1
tgcaaaggaggaagaggaaaagaggattagagggtcgccacgtttanccaataaccaaaccctctctactcttttttcttctccttctcttcgctagggttttagcttcttcctcttcacttcgttctttttcgcctctacaatgagcaacgacaaggncacattcaacgtcgccgatctcacttctgctctcaacgaggacaatagagcagaccttgtcaatgctcttaagagcaagatacagagtttggctggac

SEQ ID NO: 30888 - DNA, 255 bp, Glycine max
  Clone ID: 701063183H1
aattattgtatttggaaaatagttttgagttgaggatctaatcattaccagatttaatatatttgacaaatggggtctgaaggtcctacgacaccgacgacaacaattcatgtgacaggatttaagaaattccatggagtttcagagaatccaacagaaacaattgccaataatttgacagagtacatgaataagaagggtttgccaaagagattagttattgggagctccagcattcttgagactgctggtcaa

SEQ ID NO: 30889 - DNA, 238 bp, Glycine max
  Clone ID: 701063184H1
tctaaaagagatctttttctgctctttgaagaaagaagggtctttgcttgattttggagatgtctctgctctcagatctcatcaaccttaacctctccgataccaccgagaaggtgatcgcagagtacatatggatcggtggatcaggaatggacctgaggagcaaagcaaggactctcccaggaccagttagcgacccttcagagcttcccaagtggaactatgatggttccagcac

SEQ ID NO: 30890 - DNA, 256 bp, Glycine max
  unsure (1)..(256): unsure at all n locations; Clone ID: 701063185H1
tcactgctcaaatacctctgaatgattcgatggataaagcaacgcacgcaantgacaaacatnaccgataaaccaaagtcccatcgccanttgcaattcctttcaccgaactcactcgttcatacccctcattactantattatttattcccctacnttctcntcacttcttactcatctattttctaaaacactactcttctctccataaagccaccantttctgatacccttttgatcgaattgaagaataacg

SEQ ID NO: 30891 - DNA, 254 bp, Glycine max
  unsure (1)..(254): unsure at all n locations; Clone ID: 701063186H1
cccaattccanaagacccttcgaagagaggtaatcttaggatcaaattcaacatcaaattcccagcaaagttgacgtcagagcagcaagccggaattaagaaacttctgccgtattgaactgtatcttgttgtgtatagtcttccaatttgctctcattcttctctgtctcctcttttattttaggtggctttcgtttgtgtagtttgcgtgtaatatgtttagagttgggagaggcaatggtatgacattttg

SEQ ID NO: 30892 - DNA, 255 bp, Glycine max
  Clone ID: 701063187H1
gtccgagacatctcggaaaggatatcttgctgccctgtctgcatcaagttactcttatatttctttactcaaacactttcttccaatcatgaacccagatggatctgcaatttctcttacatacattgcttcagaaaggatcattcctggatatggtggtggtatgagttctgcaaaagctgctttagaaagtgatacaagagtgcttgcttttgaagctggtagaaagaaaagaatcagagtcaatactatatc

SEQ ID NO: 30893 - DNA, 256 bp, Glycine max
  unsure (1)..(256): unsure at all n locations; Clone ID: 701063188H1
cgagataactagaaacagtgtgatgaaaatgaaggtccttgttttcttcgttgctacaattttngtagcatggcaatgccatgcgtacgatatgttccctctccgaatgaacactggctatggtgcccgtactccggaggtgaaatgcgcaagttggaggcttgctgtggaagcacncaacatctttggctttgagaccattcctgaagagtgcgttgaagcaacaaaggaatacatccatggcgaacaatataga

SEQ ID NO: 30894 - DNA, 251 bp, Glycine max
  Clone ID: 701063189H1
tgagttgcactgctaccgacccaaaccttaactacaagccggtgatcggaatcctgacccaccccggcgacggtgcctctggccggctcagcaacgccaccggggtttcttacatcgccgcctcctacgttaaattcgtggagtccggtggtgctagagttattccccttatctacaatgagtcacctgagaaccttaacaagaagctcgatttggtcaatggagtgctcttcactggtgggtgggctgtt

SEQ ID NO: 30895 - DNA, 252 bp, Glycine max
  unsure (1)..(252): unsure at all n locations; Clone ID: 701063190H1
cttctganagtgtttggttganagtagcaaagntgtttcctttcgggcaaaagggtcaaaagataaaggggactatggtggttatgcagaagaatgtgttggatatcaacagcatcaccagtgttggagggatcgttgaccaaggcttaggcttcataggcagtgcagtcgatgcacttacttttgcagccaccaaaatctccatccagttgattagtgctaccaaggctgatggtgggaaaggaaaaattg

SEQ ID NO: 30896 - DNA, 254 bp, Glycine max
  unsure (1)..(254): unsure at all n locations; Clone ID: 701063191H1
cgcaaaaagactgttgttgggaaagagtgcttctattgatgcaganaaatctatgatctccaagttgaagaccgagtgtggcagccagttcacaaacaaactagaagggatgtttaaggacattgaattatcaaaagaaataaacgagtccttcaaacagtcatcccaggctaggacaaaactcccatccgggattgaaatgagtgttcatgttttgacaactgggtactggccgacgtatccacccatggatg

SEQ ID NO: 30897 - DNA, 251 bp, Glycine max
  Clone ID: 701063193H1
caaagccatggccacctccaacttctctattgttctctccgtctccctagcacttctttttggtgctacttaccaaggcacactcgaccgataccgtttctttcaccttcaacaagttcaacccagtccaaccaaacattatgctccaaaaagatgctagtatttcatcctctggggtgttacaactcaccaaagttgggcagcaacgggcgtgcccacctcgggatctctcggtcgtgccctttacgctg

SEQ ID NO: 30898 - DNA, 255 bp, Glycine max
  unsure (1)..(255): unsure at all n locations; Clone ID: 701063194H1
cgatttatccaagcaggactgaatgaactaatggagtctaaaggtgggaaaaagaagtcnnnnnnnnnnnnnnnnnaatcattgttctacgaagctcccctcggatacagcattgaagacgttagaccaaacggtggaatcaagaaattcagatctgctgcttactccaactgcgctcgcaaaccttcctgatatccatccagattgatagttcattgcatgcaaccatagttttattaggttttttcttcttgt

SEQ ID NO: 30899 - DNA, 288 bp, Glycine max
  unsure (1)..(288): unsure at all n locations; Clone ID: 701063201H1
catttttttaggctcataaatcttttttatgggtttcagggtcactactactctgtctctgctctccctgttttggctcttgtccctgcaccaagcaagagctgcaaagttccacaatgtgagtggcttgagagggaaaaagccagttgtagcaaatgggtgcaatttgttcctgggaagttgggtggttgacacgtcttatcctctctatgactcttcaacatgcccctcncattgatcccgagtttgattgccaaaagtatggaagacctgacaaacagtacctca

SEQ ID NO: 30900 - DNA, 283 bp, Glycine max
  unsure (1)..(283): unsure at all n locations; Clone ID: 701063202H1
cgtanttttgggttattcagcaatagccgaggtgaggtgaagatcggaaccctccgctctctgctctgcaatggccaagatcgaagaactgaacgactcggttgccaaatctaagaataaaaggaatcatggctctacaatgttctttgtcattgttgattacctttttattttgatcttcctgggattcctctgcttcatcgttttcaaaattctcagcatttgattcgattcccgaaatcacacaatccaccgtgtgttatgtgctaggatattcgcatga

SEQ ID NO: 30901 - DNA, 284 bp, Glycine max
  Clone ID: 701063203H1
cctttcacattctaatggggttccagtgcataaagattatgttgtatttgttcccaatggagaaccacggcaggacctgtggcttgcattgcatccaaatgaaagtaataagcccatgtattatgatgcaatcttgaatggagtggagatattcaaaattaatgatactgcaggtaatctggcagggacaaatcctattcctcctcctgtgcaagacataattgacccgtcaatggctagggcatctcatcatggtaaatcaaagaatcatacaggcataattg

SEQ ID NO: 30902 - DNA, 282 bp, Glycine max
  Clone ID: 701063204H1
tgctgctgcgccactcaggatggtggaacctgcatatactgtgacatctgacagtgaaaccactggtgaagaaaaatcgtctacttttcctgaaatagcaattggcattgatattggcacatcacaatgtagtgttgctgtgtggaatggctcccaagtggagcttttgaagaacacaaggaatcaaaagattatgaaatcatatgtaaccttcaaagataacatcccttctggtggagttagcagtcaactctcccatgaggacgagatgttgtctggagc

SEQ ID NO: 30903 - DNA, 285 bp, Glycine max
  Clone ID: 701063205H1
gtttgttgtgagctataagctagtttatcgtgaggagaatatgaagttgtttgttttctttgttgctgcagtagttttggtagcatggccatgccatggcgcaggctaccaaaggttccctctccgaatgaaaactggctatggtgagcgttcttcggaggtaaaatgcgcaagttttaggcttgctgtggaagcacacaacatccgagcctttaaaaccattcctgaagagtgcgttgaaccaacaaaggactacattaatggcgaacaatttagatcagactc

SEQ ID NO: 30904 - DNA, 288 bp, Glycine max
  Clone ID: 701063206H1
acagaatcaagaaaagatacaggggaatattggaaaatgatcatgaaagatcaggaaatgccagaaggacttcaaggtcttgtttcatttcaatctgaaaataaccctaagactcaagagcagcttggtaaaggttccaaaaaccattgtgaagagtctctagttacaaatacacaagttaatagtgacttcgaacccataccaagtgttaccaaatatgatgatttggaattcaagtcaagcattatcaagaacgatgattttgaatcgagaccaagtgttaccaag

SEQ ID NO: 30905 - DNA, 286 bp, Glycine max
  unsure (1)..(286): unsure at all n locations; Clone ID: 701063207H1
tcggtgatctgaggaagggtgatgaatcataatagtaataggtctggccgggttaaaaagaatagcagcggggccacttgggcagaggaagaagatcaagaagacaacaacatcancaccctcaccaaacaagcttatggagatttgccgcaacatcattttccccctcaggcgtctctgccttgctctctctgctcgcctcaagcctcgcaaaaacggagctggactgctcaagcttcaggatgatgtacagacatgcggatatcaagatgtacaagtgatgtgg

SEQ ID NO: 30906 - DNA, 284 bp, Glycine max
  unsure (1)..(284): unsure at all n locations; Clone ID: 701063208H1
ttcatatgcatataaaactcaaccgagtccacaagccttacaactgtagaagccgatccagtgtgttngcagcgaaagggtgagacaagaggcttcacctgtaatcagacaattgtggtcaatgcgagagtcataccattacaatncaagtaaatgaaggacacaacagaccttgctcagacccatttttacagtggagtaaatggcagttgcttgattctcttttacctactggtggatttgctcattctntgggcctcgaagcaacagttcagtcccactta

SEQ ID NO: 30907 - DNA, 286 bp, Glycine max
  unsure (1)..(286): unsure at all n locations; Clone ID: 701063209H1
ggcatacgataggtacaagtgcttgccgatctttcgcagacagaatatacaaccccaatggcactgatccttccatcgacccttcatttcttccatttcnncnacanattttcncacanacacaaccaacganncgagttgnactagacacaggangccaattcanattcgacacgtcctacttcgctcacctagttagaggccgtggaattctccgttctgatcaggttctttggactgatgcttccacaagaggctttgttcagaaatacttaggcacaggtcc

SEQ ID NO: 30908 - DNA, 282 bp, Glycine max
  unsure (1)..(282): unsure at all n locations; Clone ID: 701063210H1
tgcttggtgcgaccaaatattcccgttcctcgggccttgactattgncgccatatattcgcattcgcgcgtttccttcggctcttgcttccgtgacttgagaaaagagaattagggtcacgagggtttcatcctgcggcatcagacatgggaggaggcaatgggcaaaaggcaaagatggctcgcgagaagaacatcgagaagcagaaggccgcctcaaagggaagccagctggattcaaacaagaaagcaatgtcgatccagtgcaaggtgtgcatgcaaa

SEQ ID NO: 30909 - DNA, 259 bp, Glycine max
  unsure (1)..(259): unsure at all n locations; Clone ID: 701063211H1
cgatgatgaaaatgaaattggtnccaaacattactgcttaccctttgtgtgaaactcttctnttatgcagtgattggtgctcctcaaacttgtcctgctaacaatgaggataaatgcggcgattcagatgaatggaaaggggagtttntccctgacattcccaaaattaaatatgagggnccgtcaagtaagaatgtgctttcatttaaatggtataatgcagaggaggaaattcttgggaagaagatgaaggattngt

SEQ ID NO: 30910 - DNA, 277 bp, Glycine max
  Clone ID: 701063212H1
gagtgagtcactcttcttgcataacccagatctgacaatatgcgaagaactggcttgttacatttgttatgccttgtcattgctttagtaagtgtgcaagcagaagatgcgtataagtattacacatggacggtgacttatggaactatttctccattgggtagtccccagcaggttattcttatcaatggtcagtttcctgggcctagacttgacttggtgactaatgagaatgtaattctcaaccttatcaacaagctggacgagccatttttac

SEQ ID NO: 30911 - DNA, 279 bp, Glycine max
  unsure (1)..(279): unsure at all n locations; Clone ID: 701063213H1
caacgacaatgcttcttcgtagctcatccacgccgattctcaattctcgcatccctcactcgaatctcaaccccaaggattcgcctcacgaacctgaaatccttcaccggagcccgcngacgcgctcgctcacgctctccgcgtcgttgagttcgctgtcgcctagcagaatgacgcgagcgttgtcggagactgatctttccgcgcgctccaaaacggcgtcgttcggctccgctttgttttccttctacgagtcggacgatggagacgttgcggttg

SEQ ID NO: 30912 - DNA, 262 bp, Glycine max
  unsure (1)..(262): unsure at all n locations; Clone ID: 701063214H1
ctcatttcacacattcacagttatacctcttctctctctttgncgcttggatcactgatctcactctcaattttcagatatgtcgacatctgataagccagaagtggtggaaaggggtagcaaggatgaaaaacacaaggaagatgatcaagaggaggggaagggtggattcattgagaaggtgaaggatttcattcatgacattggtgagaagattgaggaagctattgggtttgggaagccaactgctgacgttactgcg

SEQ ID NO: 30913 - DNA, 279 bp, Glycine max
  unsure (1)..(279): unsure at all n locations; Clone ID: 701063215H1
ctgatcataaatcacatagctagttgtttaaagtgagaganaaanaaagaagaaaatggcaaactttccagttgttgacatggggaaacttaacaccgaagagagagcagcagccatggagattataaaagatgcctgtnagaactggggtttctttgagttggtgaaccatgggatatccattgagttgatggacactgtggagaggctcacaaaagagcactacaagaagactatggagcaaaggttcaaagaaatggtggccagcaaagggcttga

SEQ ID NO: 30914 - DNA, 278 bp, Glycine max
  unsure (1)..(278): unsure at all n locations; Clone ID: 701063216H1
gattgaggaaaatatggtcaaaatcgacatgagaggatgtcgagccacactatgctctcttctgtcctgattggaactgctgttgtttgttcttgctattatttgaaaaaccaatttgtttttaattnagattgttgcatgtatgttttaatcctaggcaagtagcagcaaagatgcttctctgtgacatgttcaatnattaatttatatgaattgcgcctaatttgttgaatatatcaggttcgtacgtgtntctctagttgtatagcatttgcntc

SEQ ID NO: 30915 - DNA, 284 bp, Glycine max
  unsure (1)..(284): unsure at all n locations; Clone ID: 701063218H1
gctctgtttctgtctctgtgtttgcggctgaggattccgaacgagcgaccttcttcgtttctcgcaaagtttaagtcatcatgggtaaggaaaagactcacatcaacattgtcgtcattggacatgtcgactctgggaagtcaactaccactggtcatttgatctacaagcttggaggtattgacaagcgtgtgattganaggttcgagaaggaggctgctgagatgaacaagaggtcattcaagtatgcctgggtgcttgacaagctcaaggctgagcgcgaa

SEQ ID NO: 30916 - DNA, 283 bp, Glycine max
  Clone ID: 701063219H1
gttccacgttgttgtccgctctgtggctctctacatttcatcattcatcggaaaaatggctctcgaggttgctgttaaggctgctgttggtgctccaaatgttctcggagattgtccattttcccaaagggtcctcttaactttagaggagaagaaaatcccttacaaactccacctcatcgatctcagtagtaaacccgaatggtttttgggtgtgaatcccgaaggaaggtgccagtggttctttttgatggcaaatgggtggctgattctgatgtgattg

SEQ ID NO: 30917 - DNA, 284 bp, Glycine max
  unsure (1)..(284): unsure at all n locations; Clone ID: 701063220H1
gcaattgcaatgttctcacagtgccattttctctctcactccccaattcccaatactacctttcgtctcagagccatggcgcctcacagcacgcctcttgaactcaatcgcttcgccgaggtcggtaacaaagtcgccgatgctgccggagaagttatccgcaaatacttcagaaaaaacttcgacgttattcacaaacatgatctcagtccantaaccattgcagatcaatctgctgaggaggctatggtttcaatcatactagacaatttcccttctcatgc

SEQ ID NO: 30918 - DNA, 287 bp, Glycine max
  unsure (1)..(287): unsure at all n locations; Clone ID: 701063221H1
ccagcgtcgaaggatgctcagcccataaatatagacagcaaatcataaacaccatggaaattcatctaatttcgagagtctgctttctttttattattcgtggacatttagaaattttgatggattatgcatgtggatggagacaaattttgtttcgctagttccaagaacgtggaaatcccggcaaaattaaacatttgtgacgntgtnctttttcctatatttntgtgtggagtntattgtttcggcatgatcgcgacaacaaaatttcgtttaaaatctactgg

SEQ ID NO: 30919 - DNA, 287 bp, Glycine max
  unsure (1)..(287): unsure at all n locations; Clone ID: 701063222H1
gtnttngctgtggacgtaaaataatggctctgtcttttggttttgggctcttgacttcttcttcntcttctgtcttcnttatgtgttcaccctccatcagaaacccacantttcatgatnaggccttctgcttcttctggnttncgnatgangcgtaccagtcgcattacctgtngnagcctttctcagtcttctaagccaggccgcaaaatccgtggtatcatgaaacaccgcaaagtctcccccgagatggnaganctcntcggcgctcccgagatggctcgaac

SEQ ID NO: 30920 - DNA, 284 bp, Glycine max
  unsure (1)..(284): unsure at all n locations; Clone ID: 701063223H1
cttgaattcccatgtcagtaattaacatgttctacnaaagatcagtctgtaccctggaatctttctaatttgactcctaaacatttcctattggtaatggcaacagaaccagacaagcaaatgttcaacaatatattgggtactgaacatgttgcagattccaatttcagttggggtatctggatatgaggcagcttccttgtataaaggacggagacaaatttcttcagtgggagatcaanggaaaacttttacttctcagcagctaactatatattgtatcc

SEQ ID NO: 30921 - DNA, 288 bp, Glycine max
  unsure (1)..(288): unsure at all n locations; Clone ID: 701063224H1
ccgccgtcaaaatacccattcccatcgcntttctctctncntnttcctctgcnccccaaaaaaatgantggtttcatgctccgaagaaaccctttcagcgacgcaggagagcttncttcttnncnaagcccaaccccaantancagcnttgcnaaactccgtccctcttctcagaaacacaaacccncnaaagagaacgacnttncctgccgatcccaatntcgttactnccncnnctgcnaaattgaagagcncctngcccccaagancnncttcttncaacccttc

SEQ ID NO: 30922 - DNA, 281 bp, Glycine max
  unsure (1)..(281): unsure at all n locations; Clone ID: 701063225H1
aacgctacataaaccccgcaacaaacaaccaacccccaaacccctcactcttctcggcgtccatcggaaatttccaaggtaaaaagatgaatctgaagaacatgaagattccgaacgttccaggcggcggtgcgtccnctgcgctgctgaagcttgggcttcttggtggaattggtttatatgcagctgctaacagtctctacaacgttgaaggaggtcaccgagccattgttttcaaccgtctagttggtgtcaaagacaaggtctatcctgaaggaaca

SEQ ID NO: 30923 - DNA, 268 bp, Glycine max
  unsure (1)..(268): unsure at all n locations; Clone ID: 701063226H1
ggacaaaccagagaacacaggctctgcttaatttttgtnaattttgtctggtctctacattttgcataactatttgaattgtgcttggaaaaatagttgtgggtgagagttgatgctgaaattctgctggaaaaattggtaatgggtgaattatggtccctgagattcggattatttttagtcaaatctacgttctctaggtttttagattattatatgtgnaccattttctataagtggaattacgatgcttgttttcatttgagtt

SEQ ID NO: 30924 - DNA, 280 bp, Glycine max
  unsure (1)..(280): unsure at all n locations; Clone ID: 701063227H1
atcatcacatgcttcatgaactcatgggagttgatcctggaactaaccctgtttgccatttccttggaagcaaggccattttatggccacccaatttatctatggacactgcctatcagactaacgttgttgtttacntagtccatgcatctgcatcttgggcaccataagattgtatataaaataaattatggtgtgttgtgtatgttgtgcaagacctggaacttcacctttctacgtacgtgtgctgtnaggatgcagtgtgctttgatgatgcttt

SEQ ID NO: 30925 - DNA, 280 bp, Glycine max
  unsure (1)..(280): unsure at all n locations; Clone ID: 701063228H1
atttctctctgtctcgtttacacatntctccaacctttcactttcgtttctcagtnttattcgaatccctctctcaatctcctttccaaatggccagcgttgaggttgcacagnaaacaccaacaacagttccagaaaatgaaacaaccgaggtaagcaagacccaggaaacaaccccagtcactgaggctcctgcaacagaacaaccagcagctgaggttcctgcaacagaacaaccagccgctgaggctcctgncccagaatcaaccaccgaagcacc

SEQ ID NO: 30926 - DNA, 224 bp, Glycine max
  Clone ID: 701063229H1
ttatgttttcttattctgaggatcatttgtgtgagtcgtgtgaaaaatatttcaggttttatgttggctaagaggcctaatgtttgggccctagaaatctctggttaaactgtgtaaagatctgttacttggtttaaagtttgtgtgttttgttcacttccaaggaatttatgtgtgcaagaaagatgtaattgaaaaatttagcaatagactaatggttttat

SEQ ID NO: 30927 - DNA, 282 bp, Glycine max
  unsure (1)..(282): unsure at all n locations; Clone ID: 701063230H1
gtgaggctttgccgcgcggtttcatttcatttcaccgcagcnantncgtntcggtgactccataattcccaatcatcaccgcagncaaccaaatagggtctgcgtttcgtgcaatcaatccattanattacactgcatgtnatataatnnnnnnnnnnnnnnnnnnnntctgncancaatttaggtttagaggaaacggcatcgtcgatggctgagaaggatgcgacgangcttaagctgaagcctcgaagactcaagggtcangangacagcacaanctgt

SEQ ID NO: 30928 - DNA, 279 bp, Glycine max
  unsure (1)..(279): unsure at all n locations; Clone ID: 701063231H1
atttgagcagactgagaaagtgagaatggagttggangaacaaagaatgaggcaatcaaggatgttggtgagcgcaatccaagaggcaatggtgaataagctgaaggaaaaagacgaagagattcagcgtatggagaagctgaattgggcccttcaagaaagagtcaaaagcatgtgcatggagaaccaaatttggagggaattggcacaaacgaacgaagccacagccaactacctaagaagcaatttggaacaagtcttggcacatgtcggcgaggt

SEQ ID NO: 30929 - DNA, 284 bp, Glycine max
  unsure (1)..(284): unsure at all n locations; Clone ID: 701063233H1
cgattgcgcaattcatcaagcactttggtaaatacggtgagataacggattccgtcatcatgaaggaccggaagaccggccagccgcgtggtttcggcttcataacttacgctgatccctccgtggttgatacagtgattgangacactcacattatcaatggcaagcaggtggagattaagcggacgataccgaggggggctgctggctcgaactcaaaggacttccgaacgaagaagatttttgtgggtggaattccttcgactgttactgaagatgaattt

SEQ ID NO: 30930 - DNA, 280 bp, Glycine max
  unsure (1)..(280): unsure at all n locations; Clone ID: 701063235H1
tagcaatgctaattggntagcagttttgatatggagatctttattagttgtgtcaagggaatggaaatattgtnggctgcatcttattctttatatgcttctcacgctgtgtattggaactgtattttctggtctggggcattctctgtcttctgttgtgacaagagttgcagcaatttttgnatttgcatcattctcttcccttctaagcattgccagggtgcctgcacttaagaaaganatcaaggttcgtttcattattggagttgatggactaagc

SEQ ID NO: 30931 - DNA, 281 bp, Glycine max
  unsure (1)..(281): unsure at all n locations; Clone ID: 701063236H1
cagcagtgcagggaagttggtgtgtgtcaccggtgctgccggttatattgcttcatggattgtcaagttcctacttgaacgtggttacactgtcagggccactgttcgaaacccaaatgatcacacgaaggtagaacatttgctaaaacttgaaggtgcaaaggagagactgcacctttttaaggcagatcttttgggtgaaaattcttttnactccattgttgagggctgtgatggcgtctttcatactgcttctccttttattatcaacgtcaaagacc

SEQ ID NO: 30932 - DNA, 283 bp, Glycine max
  Clone ID: 701063237H1
gcaaaaatggcacctgcaacactgtctctgtctctcctcctcctgttctcactcagcatcgccgtaaccgttagatcgagcgactacgactacgattgtgtgtacactgcatacgttagaaccggttcggtgttgaagggcggaacggactctaagatcgggctgaagctgtacgacaagtacggctactacatctacattaaaaaccttcgaagcatggggcggcttgatgggcaagggctacgactacttcgagcgcggcaacctcgacatcttcagggaa

SEQ ID NO: 30933 - DNA, 285 bp, Glycine max
  unsure (1)..(285): unsure at all n locations; Clone ID: 701063238H1
ccgattgcnagantggaatttcgatgctcagtcatctcttttaccattctcttctctcttgctcttgcaggagagagccatgtccatgcatcgctacctgaggaagattattgggaagctgtttggccaaacactcccattcccactgcactgcgagagttctaaagcctctccctgcaggtgtacnnatcgatgaactccctaagcaaattgatgatacacagtacccaaaaacattcttctataaagaagaccttcatccaggcaaaacaatgaaagtacaat

SEQ ID NO: 30934 - DNA, 282 bp, Glycine max
  unsure (1)..(282): unsure at all n locations; Clone ID: 701063239H1
accaggagttggatactggtcgtgctagctagcgggccaaagtagtgcctaagtcttcctcatatcttccaccctttggctnattagtgggagcaatacatatcattcattcagaggcaacaaaggagttgtaaattaagagcatggctgcacaagctcttgtatcatcatcatctcttaccttctcagccgaggctacaagacaaagtcttggaccaagatcactccaatctccatttggcttctcaagaaaagcctcctttcttgttaaggnagctgtac

SEQ ID NO: 30935 - DNA, 282 bp, Glycine max
  unsure (1)..(282): unsure at all n locations; Clone ID: 701063240H1
gtttgtcattagcacttcttcttttcacacngccgctgcaacaatggcttcagagaagaaactttcnccacccaatgagggagataaaagtgcagaagctcgttctcaatatctctgttggcgagagtggagatcgtctcaccagagccgccaaggtgttggaacaacttagtggccaaaccccagtgttttccaaagcaaggtacactgttcgttccttgggattagaaganatgagaagattgcatgctatgtcactgtcagaggtgacaaggcatgcaa

SEQ ID NO: 30936 - DNA, 280 bp, Glycine max
  unsure (1)..(280): unsure at all n locations; Clone ID: 701063241H1
cttccttcagttgacaacgcccagaagtttctcgaagcttccaagaaggggaacgtcattcctctcttccgctgcatatnttccgatcacctcactccggtgcttgcgtaccggtgcctggttaaggaggacgagagngatgctccgagttttctctttgaatcggtcgagccaggccaaatttctagcatcggacggtacagtgtggttggagcacagccgtgtatggaaattgtggcgaaagagaacgtggttactattatngaccacgtggaanggc

SEQ ID NO: 30937 - DNA, 249 bp, Glycine max
  unsure (1)..(249): unsure at all n locations; Clone ID: 701063243H1
cgcgtttccgaacgaagttcagtcaggagcagaaggagaagatgcacaagttcgcggagaaagtggggtggaagattcagaagcgggacgaggtttgattcacgagttctgcaacgaggttggggtcgatanngcgnctcaaggttggatgataacaacaaaacacttcgcaaaaagtacaatatgtatantatgtataatatactatagtatatatttatacagtatatgngtatgtgcnatggggtg

SEQ ID NO: 30938 - DNA, 274 bp, Glycine max
  Clone ID: 701063244H1
gtcaacacaggctctgcctgttgctttgatgattcatgataactcgtcggatcgcacggcctttgtgccggcgacgcatcattcaaatttctgccctatcaactttcgatggtaggatagtggcctaccatggtggtgacgggtgacggagaattagggttcgattccggagagggagcctgagaaacggctaccacatccaaggaaggcagcaggcgcgcaaattacccaatcctgacacggggaggtagtgacaataaataacaataccggg

SEQ ID NO: 30939 - DNA, 164 bp, Glycine max
  unsure (1)..(164): unsure at all n locations; Clone ID: 701063245H1
aattctttctgttcctattgactatatcattatattcatcgccttgatgcccccctatccctcatgttagatgtactcatattttagagaatgaaaagganaaaaaatgcagataagaatgtttgtncccgtttgcncaagcaaataagtatttgctacctttt

SEQ ID NO: 30940 - DNA, 279 bp, Glycine max
  unsure (1)..(279): unsure at all n locations; Clone ID: 701063246H1
ctctaggaaaagactgcaaacctgtaattcctaaagtccntnaggaagtgaganctattcatgtatatcactnanccccagccccaccatcctttctaattatgggggggctgggctcagtgatatacatgaatngaaaggatggtggactactgtgtatganaaggttgtttttttnttttnggtttgatcacttnngatgtnatnngctgaaaanaaaagaaaanaaaaaaaanaaaaaanaggccnaaggggggnccccnngctgnnntcnntccc

SEQ ID NO: 30941 - DNA, 279 bp, Glycine max
  unsure (1)..(279): unsure at all n locations; Clone ID: 701063247H1
atcactacctctgnatttngctctcgctctctgccttccatcaccctcgccannacnccttcccaagatagtagaagatggcagacgctgaggatattcaacctactagtnngngacnatggaacaggaatggttaangctggtttgnntggagatgatgcnccangtgctgngtttcccancanngtaggtcgtnctgcgtnacactgntgtgatggnnggcatgggncaaaaanatgnanatggtngnnatgaggcacagtctannaggggtatttt

SEQ ID NO: 30942 - DNA, 275 bp, Glycine max
  unsure (1)..(275): unsure at all n locations; Clone ID: 701063248H1
tttaaaaattagggcttcttcatttggtacccgattcccttgtnttcttgggcttctggaattgatgcaaattttaggtctggtgggtggtggttgttaaatcaaatcgacgacaaaaattagttttttntctncttctggggtgttgggatatngatttgggggtttctgatgagatgttaggcacttttgtgccaatagtagtttactggatttattctgggatttacgttgttctggggntgtttgcngagaattatcggttacattcgang

SEQ ID NO: 30943 - DNA, 282 bp, Glycine max
  unsure (1)..(282): unsure at all n locations; Clone ID: 701063249H1
ggttcttcgcttctcttcttcnattcattctagttctggcttccgnctcgccgcattgnctcggtccgggttggggtcgactcagttcggtttttcgttctctcgngaatctnatctnttggncangctnagggcncntcacgctgnaggcattgntnnctggttggggggtttggtncgnggctgnggccactgncactcagttttcctnaggactcttgttggttttgctnacacacctatggttctgcntccggtagaggcccttcaggccttggcgtt

SEQ ID NO: 30944 - DNA, 281 bp, Glycine max
  unsure (1)..(281): unsure at all n locations; Clone ID: 701063250H1
gcttacaagggacacgcttctatattctaatgncaagcttgattaggcatggatcatggtgcgtacgaagacgaatcttttcaaccaacgaatggaccggtgtagccaattactatattcataatatgaggtattggaaactagtccaatcaggatttgggtcttagaggataggggattattgtaccgatgttgtttaaatgtgaagcattgtgcccccgtgtttaatcaggacgtagatagtcatagtagatgtgttattattccagccatttatttac

SEQ ID NO: 30945 - DNA, 282 bp, Glycine max
  unsure (1)..(282): unsure at all n locations; Clone ID: 701063251H1
tcaaaatctagtttcatacttttncatcttcttcttganatggctctccaggctgctnctcttgttcctgcttctttctcggttcttaaaganggnnagagtggtntgtctctnaaggactcnanctngntcggtctgncatttncagaacctatcaaagctaacttcagctcntctgcatngaggtgcaagagggaatnagnacaaaagctctgtgctgtgagggccganacagtggctacagcntctncagcagntaccnagtctacannagangggaag

SEQ ID NO: 30946 - DNA, 285 bp, Glycine max
  Clone ID: 701063253H1
gtgagctataagctagtttatcgtgaggagaatatgaagttgtttgttttctttgttgctgcagtagttttggtagcatggccatgccatggcgcaggctaccaaaggttccctctccgaatgaaaactggctatggtgagcgttcttcggaggtaaaatgcgcaagttttaggcttgctgtggaagcacacaacatccgagccgttaaaaccattcctgaagagtgcgttgaaccaacaaaggactacattaatgggcgaacaatttagatcagatctaaaacc

SEQ ID NO: 30947 - DNA, 282 bp, Glycine max
  Clone ID: 701063255H1
taattaataacaagctagctattagttcgattttgtagtaagtgaggtgccaatatggtgaagatagctcttggtactttggatgactcttttagcgctgcctctcttaaggcttatttcgcagagttccacgcaactctgattttccgtgttcgctggtgttggatcagccatcgcttacaacgagcttacaaaagatgcagccttggatccaacggggctggtggcagtagctgtggcacatgcatttgcactgtttgtaggtgtctccgtcgccgccaa

SEQ ID NO: 30948 - DNA, 282 bp, Glycine max
  unsure (1)..(282): unsure at all n locations; Clone ID: 701063256H1
cggttaagcggtgagatttgcgaatctgananatggcggattcttctcgggaggagaacgtttacatggcgaaattcgcggagcaggccgagcgttacgaggagatggttnanttcatggagaaggttgcnaagactgtggaggttgaggagttgacggtggaggagaggaatctcctctctgtggcttacaagaacgtgattggtgcgacgagggcttcgtggaggatcatatcctccattgagcagaaggaggagagcaagggcaatgnggaccacgtgg

SEQ ID NO: 30949 - DNA, 279 bp, Glycine max
  unsure (1)..(279): unsure at all n locations; Clone ID: 701063257H1
tttttccaaaaaggttcaaactttgggtgcagaactgcagatgtataggcaccgtanggaaactcatgancatcgcaacgcgttaggtagcttcctctccactattcaaaatcggttccattccaatataaganctgaaagagcccagaactaccaggcaagaacatagtgtatgtgtttcaaaactgtgattttgttatctgttcttcaaaaccattgaagatgaggtggctcttcctctcctctttcttttntcgcttggtcttactgttactggtc

SEQ ID NO: 30950 - DNA, 283 bp, Glycine max
  unsure (1)..(283): unsure at all n locations; Clone ID: 701063258H1
cttcttnctccagtggctggtggtgatcgcatntggaattgcacaacagcnatgggcnangtngttagttcagcnnccggganagtgttaatgancgngggttacctgattttngagcgacccaatgcaggctntntcctcatgcacaaacgctgcgnttctacgcnattcgtcaaaccaattcatcncgagatcatatnctcgattcctgggcangggcagngacagatgtcagattaagcctctcctcaactctccagagaagncctctacaaacncgctc

SEQ ID NO: 30951 - DNA, 281 bp, Glycine max
  unsure (1)..(281): unsure at all n locations; Clone ID: 701063259H1
gcttccgtgggcagtggtagttgccaaactagtagcaagaagtaagtcacgtttttctccgttttcattcatcacaatattaaagcnncttagtttccttcagtatgggggacacttacgttttggccacaccgaagcgcaaccgttccgatgacgtngacggcgncgatgcgaagaagctgctgttgcagcagggcgaggcagacccggcggcggcgctggcgagcgcgcggcacgagttccggggagcacggcggggtgaacatgtcgatcgaggcgtt

SEQ ID NO: 30952 - DNA, 275 bp, Glycine max
  Clone ID: 701063260H1
ctccttctctcgttgattcggatctagagtcttttttcactcttcagttctcgttgttgttcttcgctttcctgaaactagggttttcaatttcgattcattcgttaataattaaagatgtttgggagggcaccgaagaagagcgataatacgaggtactacgaaatcctcggcgtctcgaagaacgcttcgcaggatgatctgaagaaggcttacaagaaagccgccatcaagaatcaccctgacaagggcggtgatcccgagaagtttaaaga

SEQ ID NO: 30953 - DNA, 276 bp, Glycine max
  unsure (1)..(276): unsure at all n locations; Clone ID: 701063261H1
ctttttgttcttgcaagantaacaganaggaggtggacaaacaaagctataatttttagangggttaccaccctcaccttctgccaaaccaaacccacccttttctctctttaagctactattgtgctgagagctgaagaggagatggggggtggaaatcaagaggcagtgaagcagctgcagaccctgatggaaaatgtggatgntgagcagctgaagancacattccagnttatgcaccagggntatcaaactgaaacgttaatacggtttctc

SEQ ID NO: 30954 - DNA, 275 bp, Glycine max
  unsure (1)..(275): unsure at all n locations; Clone ID: 701063262H1
aattgcaatcaccctccttgatccaccttgatctcgattttngtctcaacaaagactcatgagcttnggctgctgcccaaagatcttcctgnagctgtttcttttctgctcttctagttgggataattgtctttggattgtgtcttcctccaanttgactanntccanattcaatccggttanctttgnaaaagtatcaccataatgtgctctattccatntcttcaagctatgcnttagtaatcttaaatngttctntaaggatgnatcctccc

SEQ ID NO: 30955 - DNA, 277 bp, Glycine max
  unsure (1)..(277): unsure at all n locations; Clone ID: 701063263H1
cttacacctctctgtttccctcttcatttcgatncntctgcatcncggcaagcagtttgtgatgaagattgagtaagagatttattttttctatgangtcaatcaaatcatggaggtggtccacgagaaaaaggngtctcttgcctaatgggaaaatcnagtttgaagatgannnaacngcctttnatggcggttgtntgtatagtaatgttgtttgtngtgtataggactctaaagtatcaaanttancangaagagatagacanacagtgggatt

SEQ ID NO: 30956 - DNA, 281 bp, Glycine max
  unsure (1)..(281): unsure at all n locations; Clone ID: 701063264H1
cctgtttcgtgaagctcagtgcatcaagatctctctctctgtaatcgaaaatgagcaagggaccgggtctctttaccgatatcggcaaaaaatccaaagatcttttgactaaggactacaactccgatcagaaactcaccatttcctcatacagcatctccggagtggccctcacttcaacatctgtcaagaaaggaggactctccactggggatgtggcagcactgtacaagtataagaacactatnattgatgttaaactggacaccgcatcaactatc

SEQ ID NO: 30957 - DNA, 280 bp, Glycine max
  Clone ID: 701063265H1
cgttattctctctccgagcttcactctcttttcgcctctgctaaagggagaaaaatggggttctcctcctttctgggtcgtgttctctttgcctccctcttcatcctctccgcatggcagatgtttaatgaatttgatgccaatggtggacccatctcgaaagagttgattcccaaactcagtgtggtgaagaataatttatcctctaaactgggggtagcgctaccagatattgatgcccggcaattcattgctaccatcatatttcttaagggggttg

SEQ ID NO: 30958 - DNA, 276 bp, Glycine max
  unsure (1)..(276): unsure at all n locations; Clone ID: 701063266H1
aaaaaaaggagacgaaaaggaaaaaacagaagaacagtgttcgaagatggagaaaatgatgcgactganaccattgttccgatcactgagttgcagatcttatcatttcgttcttcgtccttctcttctctctcgctctcccaatcctcttccttctccttcaccctcagaatgcaggtctcctctctcaatgggtttagggagtatgagattctatagtgaagatgtgacccacatgcccaatattaaggaccctgtgctttacaatgctttcaa

SEQ ID NO: 30959 - DNA, 277 bp, Glycine max
  unsure (1)..(277): unsure at all n locations; Clone ID: 701063267H1
caacaaaccagagtaataaaaatcttcaacttttagcagtttttnttttctatattgcagaagccatggatttcagggtgatgggtttggattctccattgttccacacgctgcaacacacgatggacatgtcagaggacgctgcaggggacaacaagacatacagtgctccgacacggtcatacgttcgagacgccaaagcaatggctgcaacacctgcggatgtgaaggaatatcccaactcctacgtattcgagattgacatgccagggttgaa

SEQ ID NO: 30960 - DNA, 278 bp, Glycine max
  Clone ID: 701063269H1
ggtcaacacaggctctgcctgttgctttgatgattcatgataactcgtcggatcgcacggcctttgtgccggcgacgcatcattcaaatttctgccctatcaactttcgatggtaggatagtggcctaccatggtggtgacgggtgacggagaattagggttcgattccggagagggagcctgagaaacggctaccacatccaaggaaggcagcaggcgcgcaaattacccaatcctgacacggggaggtagtgacaataaataacaataccgggctc

SEQ ID NO: 30961 - DNA, 280 bp, Glycine max
  Clone ID: 701063270H1
gagggccacattgtgacaaattatcacgtaattggcaatgccctttcaagaaacccaaattctggtgaggttgttgcccgagttaatattctagcatcagaagggttacagaagaattttgaaggtagactcattggagctgaccgtttaaaggatcttgctgtcttgaaggtagaagcccctaaagatattttaaggcctatcaaggtgggtcaatcgtcatctctaaaagttgggcagcaatgtttgggctattggaaatccattgggctttgatcac

SEQ ID NO: 30962 - DNA, 278 bp, Glycine max
  unsure (1)..(278): unsure at all n locations; Clone ID: 701063272H1
tcgcctccgccaagttcctctctcgctctttcactcgcaccttccacacaacaaannanancaancgctgcgncgcaagctctcaggtggcgcagacgganttcacaccatatggncatgngaggggattnttggtgctgttgatgcagcgcnagttagtaaacaacaaattgtagagnatgagcattaatgaaaggtcttttggagcaaaaggatggcttggctagaaggatatttaccaaggcaggattggacaacacgtccgttctaacngctag

SEQ ID NO: 30963 - DNA, 273 bp, Glycine max
  Clone ID: 701063273H1
agaaatagagagagaacttcaagtgagggtgagagtgacacaaatctagagagagcactagtactctaaaagtctattatattcttcaaaatatgaccatgcatcgcgagtcttgggcttttgtcttcggcgttatgggcaacatcatctcctttggagtgttccttgctccattgccaaccttttaccaaatctacaagaagaaatccactgaaggtttccagtcacttcctatgttgttgcactgttcagtgcaatgcttggatttactat

SEQ ID NO: 30964 - DNA, 277 bp, Glycine max
  unsure (1)..(277): unsure at all n locations; Clone ID: 701063274H1
ctcgtgaatcgtgatttagcatttaccacaccaaaatcancccagcggagtcagaangccatggatccctacaagaatcggccatcaagcgccttcaattctcccttctggactacaaattccggtgctcccatctggaacaataactcatcgctgactgttggatctagaggtccaattctgctggaggattaccatctggtggagaagcttgcnaactttnacagggaacggatccccgaacgtgttgtccacgctcgtggagctagcgcaaagg

SEQ ID NO: 30965 - DNA, 270 bp, Glycine max
  unsure (1)..(270): unsure at all n locations; Clone ID: 701063276H1
cattgtngcaatggtgtgtgcaatctcatcatcaccgttctcaactctctcgtttcggcgtctcgtncgtgagcnatgcgacggtgtctccgtgcaagccgcgtgccgtgaaactcttaacggcgcttccgagcgcggggcggaggcagttgctgttttttctaacggcgacgacagcgttcacggcgagggaagcggcatccgtggcgcaggacattcccttgttcgggatacggaagagtctaaagaaggtggaggaggaagcggagg

SEQ ID NO: 30966 - DNA, 273 bp, Glycine max
  Clone ID: 701063277H1
cgttatcacaaattggattgttcctccgaacagtgaaccctcacctaacaatcagaacccaggatttggtgaaacgatgaacagtgataggaaaattggggttgccttggacttttccaaaggaagcaaaatcgctctgaaatgggctattgacaatcttatcagcaacggtgacactctctacatcgtccacaccaagccttccggaggaagtgaatcaggaaatcttctctggtccaccactggttcacctctgattccattgtcggagtt

SEQ ID NO: 30967 - DNA, 272 bp, Glycine max
  unsure (1)..(272): unsure at all n locations; Clone ID: 701063279H1
aagaagagcatcactgaactaacaaagcaaccctatgtcgaaggtggttcgtgtcaccggagccagcggcgccatcggatcatgggtggtcctactcctcctccagcgtggttacaccgtccatgccaccgtccaaganatcaaggatgaaaatgagacgaaacatttggaggaaatggaaggagcaaagagtcatctccatttttttgaaatggatcttcttgacatcgactccattgccgctgccataaagggttgttccggcgtaatcc

SEQ ID NO: 30968 - DNA, 275 bp, Glycine max
  unsure (1)..(275): unsure at all n locations; Clone ID: 701063280H1
cttttatccggttccttatttccagggcaacaganatcntcgtatcnaatatccaagaggctagctttcttgcttactggccttcatgcattgcngctgcagccatactcactgcagctaatgaaattcctaattggtctgtggttaagcccgaaaatgctgagtcatggtgcgagggactangagaagacaaagtaatagggtgctaccagttgatgcaagagcttgtgattaacnnnnncccaacggaaacttcctactaaagtgttgccgca

SEQ ID NO: 30969 - DNA, 278 bp, Glycine max
  unsure (1)..(278): unsure at all n locations; Clone ID: 701063282H1
ctcttctgtccctttttccttntcttnttnttcttctctcagcattctccatcncttccaaaaatgangttccaagattatgagcctccctctagcccaaaacacatgatcccanaagtgaccttactagcantcttggtcattctaatatttgccatcacccctttgtggtaccctttgttgagctactctacttcacacttgaagatcaataagaataatattccatcatcttcatcacatgatcaagggcaagaagagaacttgccctcaacata

SEQ ID NO: 30970 - DNA, 277 bp, Glycine max
  Clone ID: 701063283H1
ggcaccaatttcattgctcagagttcccaaattctccccaagagataaaatgtctctaatcccaaacttcttcggtggccggagaaacaatgtgttcgatcctttctcactggacgtgtgggatcccttcaaggattttcctttcccaaatacgctttcttcagcttccttccctgaattttctcgggaaaattcagcatttgtgagcacccgtgtggactggaaggagaccccagaggcgcacgtgttcaaggcagatattccaggactgaagaag

SEQ ID NO: 30971 - DNA, 276 bp, Glycine max
  unsure (1)..(276): unsure at all n locations; Clone ID: 701063284H1
ctctccctttcctcgcaaatggattcancaaganccagctcctcccccgtggcaggagctggacttggacagcctcaaacccctcaaagtcctaggaaaaggcggcatgggtactgtcttcctcgtacaggccgccaacaatacccgcttcgccctcaaagtggtggacaaaacgtgcgttcacgcgaagtggacgcggagggcgcgcgcgttgggaaatccaagtcctctcaactctatcccacctttcctcctttccctcatgggaacgttcga

SEQ ID NO: 30972 - DNA, 282 bp, Glycine max
  unsure (1)..(282): unsure at all n locations; Clone ID: 701063285H1
aacaaatcacaactaagcaacacaaactattgcaatggcttctgttcagtgtgagaaacccaacaccacagttgaagttagccaaccaaaaagccatcacaaacccaatactgcaattgaagtatgccaacccaaaacccaacacagctcgttcggccaaaaattatctgagataactagcaaggctttcaaagggcgtantggcagcaaccaaaatcaacttcaatactatagccaaactcaggttgagtcccaaggccacaatggcaccaaaacagaggc

SEQ ID NO: 30973 - DNA, 279 bp, Glycine max
  unsure (1)..(279): unsure at all n locations; Clone ID: 701063286H1
attatgtctgtntcttcaatcggaatcacgaacaacatggaagtgagaattgggcaaagggtttctcgcggaatgctccctatcctcgctctccacacnttnagcgagntggaccgctccgaccanaaacctccggtcacngcngncctcatcgccgncaacancctcatctanctccgcncctccttcctngancggntcatncccnacatngaacaagtntggttnaaccctnacntnatnctcaaggangaggactngaaacgnttcttgctgtca

SEQ ID NO: 30974 - DNA, 275 bp, Glycine max
  unsure (1)..(275): unsure at all n locations; Clone ID: 701063287H1
aacaagctagctattagttcgattnngtagtaagtgaggngccaatatggtgaagatagctcttggtactttggatgactcttttagcnctgcctctcttaaggcttatttcgcagagttccacgcaactctgatttccgngttcgctggtgttggatcagccatcgcttacaacgagcttaacanaggngcagccttcgatccancggggcnggtgncagnanctgtggcacatgcatttgcactgtntntaagtgtctcngtngccgccaana

SEQ ID NO: 30975 - DNA, 280 bp, Glycine max
  Clone ID: 701063288H1
ctttacttgaaactcagaccaactgacacagagagagagagaagcatcagcagacatgggaagagctccttgctgtgacaaagccaacgtgaagaaaggtccatggtcacctgaagaagatgccaaactcaagtcttatattgagcagcatggcactggtggcaactggattgccttgccccagaaaataggccttaagagatgtgggaaaagctgtcgtcttagatggctgaattatcttcgcccaaacatcaaacatgggggtttctcagaagaagaa

SEQ ID NO: 30976 - DNA, 275 bp, Glycine max
  unsure (1)..(275): unsure at all n locations; Clone ID: 701063289H1
gatccttctgtttttgcactactgatgcctttttgggcaaccagatttccaccattctgngtaacntcacacactatataacagaaaatgagggggggcttatggcaactcgggcaatcaatcactcgccgtcttgcccagggtgataagaaggctgttgctcgtaggtattttgcctcagatgctgagctgaaaaagacagtcgtttatgacttccatgttgctaatggagggaagatggtgccatttgctggatggagcatgccaattcaata

SEQ ID NO: 30977 - DNA, 274 bp, Glycine max
  unsure (1)..(274): unsure at all n locations; Clone ID: 701063290H1
ccggcatagataacaccgtactctctaatatcccatactatgaaaaacatggatatggggtggaggaatttaatgaaaccttatatgatgaatgggttaacaagggcgacgcaccggcattgccagagactcttaaaaattacaacaagctgttgnctcttggcttcaagattgtattcttgtcaggaagatatcttgacaaaatggccgtaacagaagcaaacctaaagaaggctggcttccacacatgggagcagttaattctcaaggatcc

SEQ ID NO: 30978 - DNA, 273 bp, Glycine max
  unsure (1)..(273): unsure at all n locations; Clone ID: 701063291H1
gagatcagatacaaagagatcgagnaatggcatnagtgacttcactttctcctgcgacccnttcttcggntcannccaacattngaacccattgggatggactgatgatcagatcctggagaaggtttacattacccacgtccacaccgctgaaaggttccgatgtggaatcgcttttcaacgttactacaaacatcatcaagcgtgctactgcacttgctgacagtgttgctgttnagactggcacacccgttggtcttattgaagacaagg

SEQ ID NO: 30979 - DNA, 268 bp, Glycine max
  Clone ID: 701063292H1
atgatccacgttcttttcctctttgctcttgtctcgttcacttcccatgcttctgtcaatgatttctgtgtagcagacctaaaaggtccagatagcccttcaggctatcagtgcaagccacctaacacagtcacagtggatgactttgtgttctctggctttgtagctggaaacaccacaaacactttcaatgctgcattaacctccgcatttgttactgattttccaggtgtgaatggtcttggtgtatctgtggcacggttagaca

SEQ ID NO: 30980 - DNA, 270 bp, Glycine max
  Clone ID: 701063293H1
acatgggttcgtggggcagctaaagtgaggagacttgcattgcctatcagcatacttgttggtcttactgcagtctctggtgcattcgttgctggaaatgatgctgggcatgcttttaatactttcccaaagatgggtgatacatggataccaggagacatttttgaaatgaagcctctgattcgaaatttctttgagaatacggcaactgtgcagcttgatcaccgtatacttgcaactgcaactctgatttctgtgagcattttatgg

SEQ ID NO: 30981 - DNA, 273 bp, Glycine max
  Clone ID: 701063294H1
agttctagatcgcgagcgcctccgcgggcttcaaccttgtagttattctctttcttcttttttagctatccctctcttgaaaaatctagatctcgttcttccttgatctacgttacgcttttagtgaccggatctgtatggatctgaaccagatctacacgcccgatggtggttttggcctggtctttcatagatctgatgcatggaggctcagatctactgtacagagatactgtagataatcgatgagaagaacgcagatccagccgcttc

SEQ ID NO: 30982 - DNA, 271 bp, Glycine max
  unsure (1)..(271): unsure at all n locations; Clone ID: 701063295H1
gttaacaacttagatgatgcacacgaanggattgacacggccattgcaactgctttgagaganagcaagcctgtctatatcagcatagnctgtaacttgnctgccatccctcaccattccttcattgatcagcctctcccattttatttgactcccaagttaactagtgaaaggngtntggaaattgcggtggaaataacatcagagtttttaaataaggcagtgaaaccagtgatggtgggtgggccaaggttgcgaatggcaaaggcta

SEQ ID NO: 30983 - DNA, 290 bp, Glycine max
  unsure (1)..(290): unsure at all n locations; Clone ID: 701063301H1
tgaatttntttgcaactcatgggtttacaacttcaggagttacaaaaagaatcgcatttnctttgtcaatgatatntatcttcccaagtgccacaccagctccactacttaagtacagaaaagaagaattggaggttttaagaggagatggaacagggaagagaaaggactttgacagaatctatgattatgatgtctataatgatttgggcaatccagatggtggtgatcctcgcccaatcctggtgggtctagcatctatccctaccctcgcagggttagaacaggaa

SEQ ID NO: 30984 - DNA, 284 bp, Glycine max
  Clone ID: 701063302H1
atttctctctcctctctctctctacaaatccttctttctttcttctcttcgctgctcactgtagccatggctttcagagtaggaggagcgggagggggaaatgcctcttctggcatgggtgttgctgagcatagtgtaaacaccttcctggaattgcagaggaagaaagttcatcgctatgtgatttttaaaattgatgagaaaaagaaagaggttatcgttgaaaaaactggaggccctgctgagagctatgatgatttcactgcatccttgcctgaaaatga

SEQ ID NO: 30985 - DNA, 278 bp, Glycine max
  Clone ID: 701063303H1
ctagggtttagaatctcgcagttacagaaaacatggcgactgtggtgccaacctccgaagaagacgctgcactctccgtcgttcgattcgcctctgaacttgcctgggccgatgccggtcctgaggttgctgagccccaagttagcagactctgcacggaggctgaagagttcattgttatgggaaagtggttggagttagcatcattgatgattacctctgctgaatgattttctcaaaggtttctgaaaaagatatagagtccatcttcactatca

SEQ ID NO: 30986 - DNA, 279 bp, Glycine max
  unsure (1)..(279): unsure at all n locations; Clone ID: 701063304H1
aaatgagcaatttccagagaatatcgcacgaatcctaccctcccccagggcacggatctccttaccctccaccccaaccgggttacccatgcggcgccgcctcatgaagggtacnnnnnnnnnnnnnnnnnnnnnggatatggtgggtaccctccaccgcatccgccgcagcgtccgccgtatgactcctaccagggctacttcgacaacgggcgtccaccgccacctccgccgccgcactaccattaccagcacgtggatcatcatcactccacgatg

SEQ ID NO: 30987 - DNA, 278 bp, Glycine max
  unsure (1)..(278): unsure at all n locations; Clone ID: 701063305H1
gtcctgntcttcttccagacagcagnagnnntgnnnaaacnaactgctttctggattcagtttttgatgtgaaaatggcagtgantcttacatatntnantctttctggctttgctatttgntgnttcagcttttgctgctcttcagcctagagtacctgaagcttacntccaaaatgggaactttgaggagcagccaaaccctaaatacctgaagaanacaaagntctttggtaaatacgctttgcctaaatgggagatcaatggtctggttgagta

SEQ ID NO: 30988 - DNA, 277 bp, Glycine max
  unsure (1)..(277): unsure at all n locations; Clone ID: 701063306H1
ctttaacaacaccaccaacaatgggagcncgaaaganactctcttcttccgaacnnnnnnnnnnnnnnnnnnnccgcaacaaatgaaaanacaaacacaactgccaaacccaccataacagaccctccaatcgcgcctcccaaatggggtcttcttctgaagctctctctctttttgctcccttacttgtacctcctctttcaccactaccccatcganacggagctccgaagttcgatcctcatcaacgccggaatgagcntcgcggggctcttcg

SEQ ID NO: 30989 - DNA, 239 bp, Glycine max
  unsure (1)..(239): unsure at all n locations; Clone ID: 701063307H1
gagaaatgagaagaagaagaaaaggagagattagtaggctgaccgaccgactncgagctcaggcttctctacagtaatttagtttgtggagaatacataattagctgtttagatgatgttggtcncttgtgtagttagttagctatgtgtttgctgtaatggtaaatgtcaggatttcttttaaacatcttcatatgtatttgccaatatcataatgtgtcgtataacatcatacctgg

SEQ ID NO: 30990 - DNA, 272 bp, Glycine max
  unsure (1)..(272): unsure at all n locations; Clone ID: 701063309H1
gtttggttgaaagtagcaaagatgtttcctttcgggcaaaagggtcaaaagataaaggggactatggtggttatggcagaagaatgtnttggatatcaacagcatcaccagtgttggagggatcgttgaccaaggcttaggcttcatnggcagtgcagtcgatgcacttacttttgcagccaccaaaatctccatccagttgattagtgctaccaaggctgatggtgggaaaggaaaaattggaaagagtacaaatttaagaggaaagataa

SEQ ID NO: 30991 - DNA, 266 bp, Glycine max
  Clone ID: 701063311H1
cgatacttatggaggatggggtgctcatggtggtggtgctttctccgggaaggaccctaccaaggttgataggagtggtgcttacattgtgagacaggctgctaagagcattgtggcaagtggacttgccagaaggtgcattgtgcaagtgtcttatgccattggtgtgcctgagcctttgtctgtgtttgttgacacctatggcactgggaagatccatgataaggagattctcaacattgtgaaggaaaactttgattcaggcc

SEQ ID NO: 30992 - DNA, 274 bp, Glycine max
  unsure (1)..(274): unsure at all n locations; Clone ID: 701063312H1
ctcaatcacaatttctctctcttttctctcttctgaattatngtcatggctaagagcttcattcaagatggaacacccacttgagaggaggcacgctgaagcatctcggataagggagaagtatcccgaaagaattccagtaattgttgaaagggcagagaagagtgatgttcctgaaattgataagaaaaagtatctggtccctgctgatttgactgttggccagtttgtgtatgtggtgcggaagagaatcaagctgagtcccgagaaggcc

SEQ ID NO: 30993 - DNA, 277 bp, Glycine max
  unsure (1)..(277): unsure at all n locations; Clone ID: 701063313H1
cttccaagaaacacaacaaagcttaaaagaaaaaaaganaggnagagagaaagatgattcaggttgagattcaaagaggttttcaagaagcagctccaagcctggaaacaatgggagcnaagcagcatcatcatccccagaaaaggattgcaaaagtattggtgaaatcaagtgggaacttaggcctggtggcatgcttgttcaganaaggganagtaatcaaagttctggggaaggggtgatcactattagagtgtcaatgtgtcacagtggcatg

SEQ ID NO: 30994 - DNA, 258 bp, Glycine max
  unsure (1)..(258): unsure at all n locations; Clone ID: 701063314H1
ctcaaagcaacacaagaacacacctcttgaacattcancggatccagtgagcgtgtnnggtaacacgcccttggcgacggtggatcccgagatccatgacctcatcgagaaggagaagcaccgccaatgccgcggcatcgagctcatcgcctccgagaacttcacctccttcgcagtcatcgaggccctcggcagcgccctcaccaacaaatactccganggcatgcccggcaaccgctactacggcggcaacgaatt

SEQ ID NO: 30995 - DNA, 277 bp, Glycine max
  unsure (1)..(277): unsure at all n locations; Clone ID: 701063315H1
tgattttntgttgggaaccgattttngcgcacccctaaattgtaaaattgtacttcttgaacatnagtcccncggtgctgcaattttggtcgaagatgaagaattggtcgaaggagggttggaggtggntatctaagattgattttcacggaaatgttgcttcgaaggtgatcgtgactcgccgatttggaagcggcgttaacggtggaaaggnnaatgaaatggatgttcacaagttgacgagggagttcctggtaaagctttgggttgatgatag

SEQ ID NO: 30996 - DNA, 283 bp, Glycine max
  unsure (1)..(283): unsure at all n locations; Clone ID: 701063316H1
acagnattgancatctaccattctgtcttagactcttgtgtnnaccttggattggatatntgtagttttccatgnatactgnacgcntactactgaaagttgagacattnttcaagaagtagtaaagcncnttntnnaatatttcctgacttggtgctngccttnnggatctacaatgggtgacagtgangaagagaaatntactaagactgaagagccttcttcanctgtaanaanggatcaggcgaatcagaccttcagagcagtattcagnngatgctgg

SEQ ID NO: 30997 - DNA, 284 bp, Glycine max
  unsure (1)..(284): unsure at all n locations; Clone ID: 701063318H1
agaagacccttctcttcggtgacaagccagttcactgtttttggacacaggaaccctgaagagatcccatggaagtncgactggagctgacatcattgttgagtccaccggagttttcaccgataaggataaggctgccgcacatttgaagggtggtgcaaagaaggttattatttctgcccccagtaaggatgcccccatgtttgttgttggtgttaacgagcacgagtacaagccagagcttgacattatttccaatgctagctgcacaaccaatgccttgc

SEQ ID NO: 30998 - DNA, 279 bp, Glycine max
  unsure (1)..(279): unsure at all n locations; Clone ID: 701063319H1
cttttgttctgcagtagttgagtttgatctctttagttgctnccagcttctctgataaagtgatacttgattgctatgtgttttgttctgctgtgatggactggattctttgtcattggaattgctgatttgttgtcacagttgattttagtaggctcatcttgtttttctcccatgtcttcaagtatcctacaaagccatatagcttgactcgttgcttcagcagctgccacatactctacttctactgttgattgtgctattgtagctcgcttctcc

SEQ ID NO: 30999 - DNA, 268 bp, Glycine max
  unsure (1)..(268): unsure at all n locations; Clone ID: 701063320H1
ctttcttttacgccggggttttggttgcgctcacatcgtgtnctctgcggcgcgagctagctagggtttagaacctcgcagttacagaaaacatggcgactgtngtgccaacctccgaagaagacgctncactctccgtcgttcgattcgcctctgaacttgcctgggccgatgccggtcccgaggttgctgagccccaagttagcagactctgcgtggaggctgaagattcatgttatgggaaatggttggagtagcatcatgatga

SEQ ID NO: 31000 - DNA, 273 bp, Glycine max
  unsure (1)..(273): unsure at all n locations; Clone ID: 701063321H1
cctctctctctttctctttctctctcatccagatcttgcaaaaaaaaaaaancacaatggcagcgagngctcccattcnangcgaagagttcgtgtacatggcgaactggcggagcaggccgagcgctacgaggagatggtggagttcatggagaaggtctccgcntccgccgagagcgaggagctgaccgtggaggagcgnaacctcctntcngtngcntanangaacgtaatnggngctcgccgngcctcctggccatnatctcctcnttg

SEQ ID NO: 31001 - DNA, 275 bp, Glycine max
  unsure (1)..(275): unsure at all n locations; Clone ID: 701063322H1
aaaccaaagccatgaccaatatggaatccaccacacctatactcaccnnctctagtgctcctcctcctcttctctctagccaaagggcttcacaaccccaaatgtgatgctgcctatcaacatgaccatgatggctcaaccctccaagtgttccatgtgttcagcccttgttccccattcaggccctcaaaaccaatgtcatgggaagagagtgtcctacagctacaagccaaggaccaagccaggatgcagtacctttctaacttggtggctag

SEQ ID NO: 31002 - DNA, 272 bp, Glycine max
  Clone ID: 701063324H1
cactatagtaaaaaaaggacattcattcatctatggctacccttattgctcccagcaaccacttctccccaagaagatgctgaagctctcagaaaggcttttgaaggatggggaactgatgagaacactgtcatagtaattttgggtcatagaactgtgtatcagaggcagcaaatcagaagagtttatgaggaaatttaccaggaggatctgtgaagcgcctagagtctgagatcaaaggagactttgagaaagccgtgtaccgatggata

SEQ ID NO: 31003 - DNA, 252 bp, Glycine max
  unsure (1)..(252): unsure at all n locations; Clone ID: 701063325H1
cntgagcttccattgtgctcactcatnntcttacaacgaaaccctcttcatcttgttctatctgtgacgagcatcatggcctcaagagcagtgttattgttggctatgtgtgtgcttccggcgatggttgtggccattcgcccagcaaagaaccctttttgcgtgaagggtcgtgtctactgtgacccttgccgtgctggttttgagacctcagctaccacctacnntaactggtaattgctaacccttttc

SEQ ID NO: 31004 - DNA, 269 bp, Glycine max
  unsure (1)..(269): unsure at all n locations; Clone ID: 701063326H1
gccaattgtgataagccattcactcaggtgaaaagaaaaaaaaaacatatagtaacaaaaccatggtgattcacagactcgaattgtgcataaacatggttcaactcgccatagagttcgtcgtgagcgtcgcggaaacagtggtcatagttcagcagagaaccgtggagcctctcggaatgttgaatcgcgcaagtacacctcttcctttctatggctacctccgttgaatgttgaagagcatcgcttgattantactttctagcttt

SEQ ID NO: 31005 - DNA, 269 bp, Glycine max
  unsure (1)..(269): unsure at all n locations; Clone ID: 701063327H1
catcgaggttctttccatgttgttggataggtctttcaatgttgacgtattgaatcgccataaacagaccccgttgatgttggctgtgatgcatggaaagactggttgtgttgagaagcttattcatgccggagcaagtatattgatgtttgattctatacgtcggagaacttgcttgcactatgccgcttattatggaaatatagactgccttaaggtcattctttctgctgctcatccacacctgttgcagatnctggggattgcaa

SEQ ID NO: 31006 - DNA, 276 bp, Glycine max
  unsure (1)..(276): unsure at all n locations; Clone ID: 701063328H1
gtanaaccatattctcctgtgcatcgtntgatttctttcctgagttcttagcacttacttttttccataacacatttgtngtcttgttgggaagccatggatgaggatttcgagttcccaagtnctggcaacatggaaatgccagacgaggaagagattganagtccgattctgaaggttggggaggagaaggagattgggaaaatggggctgaagaagaagttgctaaaggaaggtgaaggttgggacatccctgactgtggagaccaagttgaa

SEQ ID NO: 31007 - DNA, 265 bp, Glycine max
  unsure (1)..(265): unsure at all n locations; Clone ID: 701063330H1
caaaacnntcttttttntntntnttgcanaanctaattttnatttnttncctnaaatttnanaatgcgtgagtcttnagatcnagaaggncaatgcggnaaccagatcggcgcaagttctgggaggtggtttggggagacgggatcgacnctaccggaagtaggtggggatcggagttgcagctcgagaggatcaatgtctagtacaacgaggcnagttgcggtcggttcgtgngnggnggttntcatggactcgaaangggcac

SEQ ID NO: 31008 - DNA, 282 bp, Glycine max
  unsure (1)..(282): unsure at all n locations; Clone ID: 701063331H1
cttcttcgtctcaaatctcttcgttccttcgattcgttccanntcttccaaaatggccaaagaccccagttcgcgttctcgtcactggagctgcagggcaaattgggtatgctcttgtccctatgattgctaggggagtgatgttgggtcctgaccagcccgtgatcctccacatgcttgacattcctccggcagcagagtcattgaatggggttaaaatggaattggtggatgctgcattccctcttcttaaaggtgttgttgccacaactgatgtggttg

SEQ ID NO: 31009 - DNA, 288 bp, Glycine max
  unsure (1)..(288): unsure at all n locations; Clone ID: 701063332H1
gttaccagaagtgacactgtgacagagtgacgaggagaagaaaggcnactanacacattacanagcncctacttaattcgtttcagaggatagcgctcactatttcggaacttcagttgaatcattttcacgctcggaaccccaaaactaagaaaagagagagactcctcattcaagatanatagatgaatttccgttgacaacgttgtgaagttatgaaaatgntgttctccaaaccatttcttacctagaccttctcactttttgtgatgctagtttgcatccatg

SEQ ID NO: 31010 - DNA, 60 bp, Glycine max
  unsure (1)..(60): unsure at all n locations; Clone ID: 701063333H1
tgcaactatgagcaaggattatctagtnatactntntgtcnttntttncanggtgcatgc

SEQ ID NO: 31011 - DNA, 281 bp, Glycine max
  Clone ID: 701063334H1
gaagaagttaaaatcgtgaagggttcaatagattttgttggaatcaaccaatatactacgtactacatgtatgatcctcatcaagcaaaacctaaagtcccaggctatcaaatggactggaatgcaggatttgcttatgcaaagaacggagtgcctattggtccaagggcttattcttattggctttacaacgtaccatggggcatgtacaaatcattgatgtacataaaggaacgttatggaaacccaactgtgttcttatccgaaaatggcatggatga

SEQ ID NO: 31012 - DNA, 274 bp, Glycine max
  unsure (1)..(274): unsure at all n locations; Clone ID: 701063335H1
agctataagctagtttatcgtgaggagaatatgaagttgtttgtnttctttgttgctgcagtagttttggtagcatggccatgccatggcgcaggctaccaaaggttccctctccgaatgaaaactggctatggtgagcgttcttcggaggtaaaatgcgcaagttttaggcttgctgtggaagcacacaacatccgagcccttaaaaccatcctgcaagagtgcgttgaaccaacaaaggactacattaatggcgaacatttagatcagactc

SEQ ID NO: 31013 - DNA, 274 bp, Glycine max
  unsure (1)..(274): unsure at all n locations; Clone ID: 701063336H1
caaaatgtcctccatggnttcctccaccgctttcttcacacccctccatgatttcactcaagccagaacaacnccatcaccccctttgcctttcatcaaatcctcctttgcttcctccaagtcaaccttttttcaccctgcnctttccctacaaacctcttccaactttcccaggctttttggaaagcctaagtttttctctgttcatgcaagggctgccacagaaaaaaccatttatgattttactgtcaaggatattgacagaaaggagttt

SEQ ID NO: 31014 - DNA, 265 bp, Glycine max
  unsure (1)..(265): unsure at all n locations; Clone ID: 701063337H1
gaacgatcatggcttatatntcctctctatcatctttctccctctccaatttctctgcaccttcttcccatttccatttgnncctcatcttccgcattcctaacttcccgaataccatgcaaaccctccaaacgtagcaaaccaaaaggccatcatgtttccaaagtgtcatgcaacagtaaccaaaacaccccaacaccaaacccagaagaagaaaaaccatcgtcatacaacattctaggnaaacataggaggganttctcct

SEQ ID NO: 31015 - DNA, 279 bp, Glycine max
  unsure (1)..(279): unsure at all n locations; Clone ID: 701063338H1
gagaaaanaangagngaaaaagcgtnacgancgaganangaaggaagagaagagagatatcngagagcgancgtgntntgaggatcntncgatttanggttttcaatttcgnattcagcaaggcggtgagtgtgagattnttagngagagagaggtgagancgctgngtgntctngntgtagagattncattgccccaagananngangaggaggagaaggtggatcatgtatatatgtatttntntcnctgtttatttcatccttcagagtggtggag

SEQ ID NO: 31016 - DNA, 271 bp, Glycine max
  unsure (1)..(271): unsure at all n locations; Clone ID: 701063339H1
gtttgttgttgtaactcgttcttcttcttntgttgttctgtgtttgtgtttgtnttttctctcacctgaaaatgtcttgctgcggtggtaactgtggttgcggaagctcctgcaagtgcggcaacggctgcggaggctgcaagatgtacccagacttgagctacactgagtcaaccaccaccgagaccttggtcatgggnctggcacctgttnaggctccaatttgagggtgctgaaatgggtgtgcccgctgagaacgatggctgcaaat

SEQ ID NO: 31017 - DNA, 270 bp, Glycine max
  Clone ID: 701063340H1
gaatctgatgcaggcggttcgctacgacgcctacgggggaggtcctgccggcctcaagcacgttgaagttgccgttcccagtccaaaggcaaatgaggttttaatcaaactggaagcagttagcattaaccctattgattggaagattcagaagggtcttctccgtcctttatttctccccagaacctttccccacataccttggcactgatgtggctggagaaatagttgagatcggaactcaagtcaaagatttcaaagttggcgacc

SEQ ID NO: 31018 - DNA, 269 bp, Glycine max
  Clone ID: 701063341H1
gtacaagtccaccatcaagggagtgatctccaagggcaagttgtcgaagctgaaaggtgttagtgtgaagattgaagtgttgtggctcaaaatcgtggagctaactcgcgacggcgatgacctccaattctcggtgggtgttgcctctgctggcttcagcgtcgacagcttctccgagagcccccagtgtggctgtggattcgcttgcgacaatttcaatcaaaatggtgatgtttcttctctttagaattcggatctgttactatgtt

SEQ ID NO: 31019 - DNA, 266 bp, Glycine max
  unsure (1)..(266): unsure at all n locations; Clone ID: 701063342H1
agaagatgaagttcaatccacgtgtgtcgagcagccgccgcaagagccgaaaggtcatttcacggcgccgtcgagcgtgcggcgggtgcttatgagcgcccctctgtcggcggactgcggtccaagtacaacgtgaggtcgatcccagtacggaaggaggacgaggtgcangtggtgcgaggaacatacaagggtcgcgaggggaaggtgactcaggtctacngtcgaaagtgggtgattcacattgagcgcataacccgcgagaa

SEQ ID NO: 31020 - DNA, 233 bp, Glycine max
  Clone ID: 701063343H1
ctcttcttgcttgcaatatggacatgaattcctcaggtggtgcctgcggttggctttatgattatggctttgatatccctgttgctggttctgacttcatggcttcagactctggtggtttcagttgggggccccagagttacaacttcaagggtccttcaaatatgagcttggaaatggaatactcactggattcaatgtcatggaaaatggtccttcaaagcggttaagga

SEQ ID NO: 31021 - DNA, 186 bp, Glycine max
  unsure (1)..(186): unsure at all n locations; Clone ID: 701063344H1
gggcaaagaggactctctcttccactgctcaaaccaccntagagattgattccttgtacgagggtattganttcccacacaacatacnacgnnngnngntnngnggagatnaacatggatttatncaggaagtgcanngagnncgtggaggagtgtttgngggntggnaagatggataaganagag

SEQ ID NO: 31022 - DNA, 277 bp, Glycine max
  unsure (1)..(277): unsure at all n locations; Clone ID: 701063345H1
gaatgannngatagagagtagccaaaatgggcatatggagaaacgagatttcagnngaagcaaagangccagntntngctancagggccattggtatntgtaaatntnactngtttcagtgtgntgntangnatgtcaagtgcacttnacacattttgtggtcantcatntggagcacagcantatcanatngttggcatacacatggcagagagccatagtgntcatcatgcttgtctactataccnntgtcttcnaatttgggcatacttgaggc

SEQ ID NO: 31023 - DNA, 288 bp, Glycine max
  unsure (1)..(288): unsure at all n locations; Clone ID: 701063348H1
tgcctcacgcagcttctgcagagangtcctcctccgaattgaatcgtcggagtccacgtgggccggtancggaggancgtcgtggcttntngcggagtgtgccgcacctggaggaggctcatcgtcaaggagattgtanagccacctgcaattctcttccancataaccttccccnactctctcaaacagcctggcccgagggaacatctacttcagtgcttcattaggcgcaacagtgnttcacaggcatattatnctgtttctcagtttatctagtggcctagtag

SEQ ID NO: 31024 - DNA, 137 bp, Glycine max
  unsure (1)..(137): unsure at all n locations; Clone ID: 701063349H1
cggtggcatttttctnggttcgagtgagcgagggangatgtactctagagattcatggggnnntncgttggagntaaacnggaaggactcgntanacggaggacnnccggangggaacntgnaggacgtgnacaagg

SEQ ID NO: 31025 - DNA, 276 bp, Glycine max
  Clone ID: 701063351H1
aaagaagctttcttgagttgagttaacagcatggagagggaggaagatgttaaggttggagcacagaaatttctcagagaggcaagcattggggacaggagctcagggtgacaaggactacaaggaggcaccaccagcacccttgtttgagccaggggagttaaagtcatggtctttttacagagctgggattgcagagtttgtggccacattcttgttcctctacatcactgtcttgactgtcatgggtgtcaacagggcacccaacaagtgctc

SEQ ID NO: 31026 - DNA, 271 bp, Glycine max
  unsure (1)..(271): unsure at all n locations; Clone ID: 701063353H1
ttcaaagangaagatgatccacgttctnttcctctnngntcntgtctngttcacttcccatgntttctgtcaatnanttctgtgtagcaganctaaaangtccagatagcccttcaggctatcagtgcaagccacctaacanagtcacngtggatgantttgtgttctctggnttgtagctgganacaccacaaacactttnaatgctgnattaacctcngcntttgtnactgattttccaggtgtgaatggnctnggtgnatctgtggca

SEQ ID NO: 31027 - DNA, 271 bp, Glycine max
  unsure (1)..(271): unsure at all n locations; Clone ID: 701063354H1
gccatttacaaaaatggtaaccattaaagcatcttacacagnccttccaaatgaaccaactcnggagggcctttnatggctatctgatattgatcaagtggcacgtctacgccacacacccancatctacattttccatgcaaaacacaaccctgatacattaattganaggatgagaaactctcttagcaagattttggttcactactatccaatagccggtcgattganaaggatagaaggtagtggtcgattggaattggattgcaat

SEQ ID NO: 31028 - DNA, 275 bp, Glycine max
  unsure (1)..(275): unsure at all n locations; Clone ID: 701063355H1
ttggttgcnnatgcggtgtgttgcgaatcactgtccaatcccgatcgcttgatnccagacagtgaatcagaatcagaatcagaatgcagaatcagagagaaacgatgagggcagtaagtgcgttaatggtggctcggatgttgacgcgggaccactcgctccctgtccttggcaacgaaagcatacccttncggatgcggtgttaaggttcgcctatgccggcgtctcctgtttcctcgtcctcttcgctggcatcatgtccggtctcaccctcg

SEQ ID NO: 31029 - DNA, 268 bp, Glycine max
  unsure (1)..(268): unsure at all n locations; Clone ID: 701063356H1
atcttaaaaatattcagtgaagatcaacctcaatggcatctcttggcgtgcgancagttcttccccctccattaactccatctccgacccacctcctcttttcgatggcaccaccaggttgtacatcagttattcttgcccctatgcacaacgtgtgtggatcgctaggaactacnaggggctacaagataagatcaatttggtccctattaaccttcaagacaggccagcttggtataaggagaaagtctaccctgaaaataaggtg

SEQ ID NO: 31030 - DNA, 125 bp, Glycine max
  unsure (1)..(125): unsure at all n locations; Clone ID: 701063357H1
agaggagaagagaagagaaaaattaagatggaggggaaggagnaggatgtgtngntgggagngaanaagttnnaggagaganagnagattgggatggnggngnagagngaagagganggnaagga

SEQ ID NO: 31031 - DNA, 270 bp, Glycine max
  Clone ID: 701063358H1
ctcaagcaaccatggcaatggcaacccaagcctctctcttaaccccacccctcttccggtctcaaagccagcgaccgcgcctccgtgccatggaagcaaaactccagcctctccttctccagcccgaagcccctcaagttctccagaacaatcagagcagcagccgccgacgagaccacagaggcaccagcaaaagtagaggctgcaccggtcgggttcaccccaccagaacttgacccaaacaccccttccccgatcttcgggggcagc

SEQ ID NO: 31032 - DNA, 270 bp, Glycine max
  Clone ID: 701063359H1
gataacagagaaaaaggatgaactaggaaagcttgaagcaattgattgtggaaaaccactagatgaagcactggcagacctggatgatgttattggttgttttaactactatgccgagcttgcagaaggattggacgcaaagcaaaatgctcctgtatcccttcctatggaaaccttcaagagttatgttctcaaggagcccatcggagttgttgcattaattactcccatggaactatcctctattgatggctacatggaaagttgctc

SEQ ID NO: 31033 - DNA, 271 bp, Glycine max
  unsure (1)..(271): unsure at all n locations; Clone ID: 701063360H1
ccatctcttgcttcttgcttctattacttgcttctttcttcaccatgtcacttgctgggaaaatcaccactgaaattggggttcatgcaaccgctgcaaagtggttcaacctctttgcaacacaacttcatcatgttcaaaaccttactgatagagtacatggaaccaagctgcatcaaggtgaagactggcatcacaacgagacagtcaaacactggacttataccatagatggtaaggctacaacatgtctgganagtattgaatccat

SEQ ID NO: 31034 - DNA, 273 bp, Glycine max
  unsure (1)..(273): unsure at all n locations; Clone ID: 701063361H1
gatgctttcacatccagatcagagctttttagggcagaatcaaaatactggaatgaaataatagcaagctatgttcgtgttttacactggaaaganatcagattaaganatgttatggacatgcgagcaggttttggnggatttgcagnnacattgattantcagaatcttgacagctgggttatgaatgtggttcctgttagtggcccaaacaccttgcctgttatatatgaccgtggattgattggagttatgcatgactggtgtgaggca

SEQ ID NO: 31035 - DNA, 276 bp, Glycine max
  unsure (1)..(276): unsure at all n locations; Clone ID: 701063362H1
atttgatcctttattgaaaagatttgatgaatctttcatcaatgagaatgccatcaatgccatcnaatctctttttggatttggtaagaaataacccattgtgtggacaaaagcatacagtttggccgactaaggagttggttgagcaatatggtaattatttcccatgtataactttatagtttaactacataggtccctcattttttgtcccttcagcgggatcttgttttatgtactagtataatcaagcaaaattataagaaacttatttat

SEQ ID NO: 31036 - DNA, 281 bp, Glycine max
  Clone ID: 701063363H1
aaaaccactctacaaaactctccagtaattctgaaaattttattttcttttggtgaaattaacagctctgtgattgatcaatggcgacaaaggaaggcaaagccataggcatcgatctcggcacgacctacagctgcgtgggcgtgtggcaaaacgaccgcgtcgagatcatccccaacgaccaaggcaaccgaaccactccctcttatgtagccttcaccgacaccgagaggctcatcggagacgcggcgaagaaccaagtcgccatgaacccgcagaac

SEQ ID NO: 31037 - DNA, 337 bp, Glycine max
  unsure (1)..(337): unsure at all n locations; Clone ID: 701063364H1
gaaagctgatgcaggtgaggaaggtctgaagctatcaccttggttcagactagttgtggacaaatttccntattccaaatggtgggaccatcttgaggcaagggaaacttcttgggggagngccaccgcacatgaagacacatttcacaagttggacataaagtaagttncagnagngaggctttcctggcattccctgttaatngaagggtgggctggcatttccggacccaaatttaggaaacganaattgggaccctatttttggagaagnaatttttcgggaggcagtggacttcatagggntgtttgttggggccttnatgnntattncgaa

SEQ ID NO: 31038 - DNA, 283 bp, Glycine max
  unsure (1)..(283): unsure at all n locations; Clone ID: 701063365H1
gagaacttcaactgagggtgagagtgacacaaatctagggagcactactctaaaagttctattagattctacanaacatgaccatggcatcgcgagtcttgggcttttgtcttcggcgttatgggcaacatcatctcctttggagtgttccttgntccattgccaacnttttaccaaatctacaagaagaaatccactgaagggttccagtcacttccttatgttgttgcactgttcagtgcaatgctttggatttactatgctntcgtcaaaagggaagctg

SEQ ID NO: 31039 - DNA, 225 bp, Glycine max
  Clone ID: 701063366H1
cagtttcagacacagagagaggggtttgggattggagggattgacgctgcgtctcttcctcttctctttcgatccatccctcattcctaatcctccaatccaaccacctcagcctcacactcacatatacacatatctgaacgcgtatcgtccctcctatggcttcaaagcgcatcctccaaggagctcaaggacttgcagaaagacccaccaattctgcagcgt

SEQ ID NO: 31040 - DNA, 276 bp, Glycine max
  unsure (1)..(276): unsure at all n locations; Clone ID: 701063367H1
gtcggtgntggcgtccgaggagccttcaatttcaaaaagtctcaaccaaacaaagcagcncnncncaanacacaacaacaanagttggtgttactgtttattgttgttagtgtttgtnttgagtctctcaactctcataagaggttccctctttggagtccccatggttgctctctcttccgcggagttcaaccactgctccaacggcctctttctctctcttcccttcctctctcctcgacccacccttttccacttgttaaggtnannaccngc

SEQ ID NO: 31041 - DNA, 269 bp, Glycine max
  unsure (1)..(269): unsure at all n locations; Clone ID: 701063368H1
caaatgcatacaattactacaatgttgtatctgcttctgcntggttctcactcaagttcttctctttcttccctncttcctcgatctcaatcttcccaaccggattttgctctgtggggggaggggataccgtcggacaggtcggtgactccgggagctaaaccacttcttgtttgggatttgtagtagatttggcctaatatttgaattagaccgtgtagaattgcatctggcaataggttgttgagtagtacgcataacgcattgtt

SEQ ID NO: 31042 - DNA, 269 bp, Glycine max
  unsure (1)..(269): unsure at all n locations; Clone ID: 701063369H1
taccccacaagctgctgctctcattcccttttccctccctattctctctcctactgttaacgttttctgtttttctttaagatggcgatgacgacaacgacggagtccgatctcgattacnagcttcgctatctcagtctcgccgtaaccgataccttcactggctttccaaaacctcttaccggatgcgatgacttccttttcagcttgtggactaatagaccctctttgttctcaaaacctcactcccaagcattccaccatcactg

SEQ ID NO: 31043 - DNA, 270 bp, Glycine max
  Clone ID: 701063370H1
cggatacttgttccaaccacaacttgaaggagacaaccttgaacttcttagttaaaaacattgagcacatggtgtcctcacctaaatttgaagcttttgtccataggagcccacatcttactgtgcaactagttacaagggcgtttgtgaatggtgccaaataatcaaaattgtctccaccaatgttttttcctttttcaatttaataatgtatttatccaagcctataaacataataatataattcatgccttgttctcttcaaaaaaa

SEQ ID NO: 31044 - DNA, 268 bp, Glycine max
  unsure (1)..(268): unsure at all n locations; Clone ID: 701063371H1
tttgttgtgagctataagctagtttatcgtgaggagaatatgaagttgtttgtnttctntgttgctgcagtagtnttggtagcatggccatgccatggcgcaggctaccaaaggttccctctccgaatgaaaactggctatggtgagcgttcttcggaggtaaaatgcgcaagttttaggcttgctgtggaagcacncaacatccgagctattaaaaccattcctgaagagtgcgnngaaccaacaaaggactacattaatggcgaac

SEQ ID NO: 31045 - DNA, 267 bp, Glycine max
  Clone ID: 701063372H1
agatggtggagtcagtaattttgatgttcaaggcacattgtctctccaaattcttgacaaagaggatggacatattcaagttcaggtccaaactggggagaatcaagccatcattttcaagacacaccctaacatgaataaagaattatttgccaatgaaaatgtactaggtctaaaggatcccaataggcctttccccacgggtcaagctggtggttctgaaggtgttggtcttttaaagtggcgaatgcaaagcactgatgagtc

SEQ ID NO: 31046 - DNA, 257 bp, Glycine max
  unsure (1)..(257): unsure at all n locations; Clone ID: 701063373H1
gttagagatgacagtaaaactctacttcagactggaatttctcatgataaccacctggatgctttgggcttcgccttggagcctaattgttcacaaaaccgatcatctgcatgtgctacaacagattctctctgcgttcctggtgcagatatgcatcagcctttaatagggtatccttcaagtcgtgctgtaattcatcagaggattcagggcnnttctaacatgttagctgagcatcaagcaaccagtttaggtaa

SEQ ID NO: 31047 - DNA, 264 bp, Glycine max
  unsure (1)..(264): unsure at all n locations; Clone ID: 701063374H1
ctcttctctgtcctttgantttttctatactctagttcgcgtcgcccaaggctcaacagcatgacaaacgattgacaactcggcaaggtacatagtgctgaacgcacgctttaatttattttaatttcgttgtttatacttaccgtattcaattttacaatatataaattaacatgatgactcgcatgtaataagtttatagtctggtaattaaagcaaaaggcaatcgatacaatttacttcatatttaggtatttgttcata

SEQ ID NO: 31048 - DNA, 201 bp, Glycine max
  unsure (1)..(201): unsure at all n locations; Clone ID: 701063375H1
aagcgtcacgagcnaganacgaaggaagagaagagagatagggagancgagcgtganangaagatcttcgatttagggttttcaatttcgtattcagcaaggcggcgagtgtgagatttttagagagagagaggtgagaacgctgagtgctctgctgagagattccattgccccaagananggaagaggaggagaaggtgg

SEQ ID NO: 31049 - DNA, 270 bp, Glycine max
  unsure (1)..(270): unsure at all n locations; Clone ID: 701063376H1
ctgatctaggcgaggattgaatagtaaattcttctcaatcaaagacagaagtggaagatttttgctctcaagtatgggacacatgccccgatgtatctatagtgaattctccatttgccccttcattacaaggtcaagcaggagcaccagctcacagcaatgctaccaanctctctgatttatggcagtccaaaacagacttttgcactgcatttggtggagcatctgataattcatcagtgtgctttgaaggggaacctgtttcactga

SEQ ID NO: 31050 - DNA, 275 bp, Glycine max
  unsure (1)..(275): unsure at all n locations; Clone ID: 701063377H1
gcacagcaaacaccaacaacagttccagaaaatgaaacaacngaggtaagcaagacccaggaaacaaccccagttcactgaggctcctgcaacagaacaaccagcagctgaggttcctgcaacagaacaaccagccgctgaggctcctcaccccagaatcaaccaccgaagcaccaaaggaagaaaccaccgaggcaccaacagaaacagtagannaaacaactacagaagtagccccagaggagcctaaagaagttccagttgagaccgaggag

SEQ ID NO: 31051 - DNA, 91 bp, Glycine max
  unsure (1)..(91): unsure at all n locations; Clone ID: 701063378H1
gaccatcgccacaagcgatgtgtcctcttaggacagttatacaatttatnttanaatttcgcnanttccananaanataggnccnggngtg

SEQ ID NO: 31052 - DNA, 280 bp, Glycine max
  unsure (1)..(280): unsure at all n locations; Clone ID: 701063379H1
catatgtggtcctcccacgtggcttcctttcaccacaacgatccatatncaggccttacgagtttttgnccagcatacgaaggtaccaaagacgaggagacaggtgaaagggcttcttttgatctcaacaaggcatattcaagctgtgacctttttcttctaagaacctccagagagcttgaaggagactggttggattatcctgctggtaattacaaggttcctgtggttccagttgggttgcttccaccatccatgcagataagggacgttgaagagg

SEQ ID NO: 31053 - DNA, 281 bp, Glycine max
  Clone ID: 701063380H1
ttgatcgagataactagaaacagtgtgatgaaaatgaaggtccttgttttcttcgttgctacacttttggtagcatggcaatgccatgcgtacgatatgttccctctccgaatgaacactggctatggtgcccgtactccggaggtgaaatgcgcaagttggaggcttgctgtggaagcacacaacatctttggctttgagaccattcctgaagagtgcgttgaagcaacaaagggatacatccatggcgaacaatatagatcagattccaaaacagttaa

SEQ ID NO: 31054 - DNA, 272 bp, Glycine max
  Clone ID: 701063381H1
caaaattagggtttttgtcgtagcaggaagaagcagcaatggcgccgaagataacacgcaaggttcagcagaaaccccgaattgataaggggaatcggaaagtactcgaggtcgcagatgtaccacaagaggggcatttgggctatcaaggccaaaaaccgtggcgttttacctcgccacgaccccaaacccaaacctgaaactcccactgaaaaaccacccaaattttaccccgtgatgatgtcaagaaaccccttgtcaacaagcacaaa

SEQ ID NO: 31055 - DNA, 278 bp, Glycine max
  unsure (1)..(278): unsure at all n locations; Clone ID: 701063382H1
cttcatttcaaatcccaacaaaaaaccaaagtaatctaacaaagntaagcacaatgagggagatattgcacgtgcaaggtgggcaatgcgggaaccaaatcggttccaagttctgggaagtgatatgcgacgagcatggcatcgaccccaccggaaagtacaccggcgacgaggcctccgatctccaactggagaggatcaacgtctactacaatgangcctccggcggaaggtacgttccccgggccgtcctcatggatctcgagcccggcaccatg

SEQ ID NO: 31056 - DNA, 274 bp, Glycine max
  unsure (1)..(274): unsure at all n locations; Clone ID: 701063383H1
cttacaagttacatccattgagaaacatgaaggtctcccccttngcattttcaatcctttttttgtccttcaccatagaactcttcattggcattgcttcagcagcacaagaaccagtgcttgacacctcaggccagaagctgagaacaggtgtcaagtactacattctaccagtcttcagaggcagaggtggaggcctaacagtttcaagcagtggcaacaacacatgccccctctttgtggtgcaagagaagcttgaagtctcaaagggcac

SEQ ID NO: 31057 - DNA, 269 bp, Glycine max
  unsure (1)..(269): unsure at all n locations; Clone ID: 701063384H1
ttacagccgcagcttgaaacagagnagagcgaccttgaagagntatggctnccggaaagaataagaggatttccaagggaaagaagggtggcaagaagaaagccgctgatccctttgccaagaaagactggtacgatatcaaggccccttccctcttccaggtcaagaatattggcaaaaccctcgtctctcgtacccagggaaccaagattgcatccgaaggactcaaacatcgggtttttgaggtctcattggctgatctccaaggg

SEQ ID NO: 31058 - DNA, 268 bp, Glycine max
  unsure (1)..(268): unsure at all n locations; Clone ID: 701063385H1
cttaagcttgctactgagtttccacactgcataccttangtcttccgaattcgaagttaatttgcaagatggctaaggaaaaggctcagatcaacattgtggtggttggtcatgtggaccctgaggaggcaaccaccattaacgagctgaagaagcctgttgtggagaaagaagctccagggcatgccatatgagggcatgcacgtacggcctcggaggggaaccagaaaattatgttaacaaaatatctggaaccctaatgtatcag

SEQ ID NO: 31059 - DNA, 266 bp, Glycine max
  unsure (1)..(266): unsure at all n locations; Clone ID: 701063387H1
cacaatacaattaagctcatcatctggtcctgaaattggtgaagaaagttgtnttgtggtggatgagtactnagtagtggtgcctattgtgggtggaganttccaaagggatcgcattgntctaattcttgtagatgtttacacttgcaagctttgcatgcaattccctggattcagatntgattcagtggttcactcattggatcatgcgatcccttaggaactttccatcaactctaaacatcttgttgatccattgaggaatt

SEQ ID NO: 31060 - DNA, 274 bp, Glycine max
  unsure (1)..(274): unsure at all n locations; Clone ID: 701063388H1
gttgnncagaccttgttttcagacacngtctttaagttactgtngangtttgagttctataatgcccagtggattcttntgttnatgctccaatggacacagcaatgggcagtgtncaatcccactacctaacctgcatnaggacttaccaagtggtagtggctggccactcaagattggggtatcggtaaggatgggaaattaccctggagattgcntactgatctcaagttttttaagagatcactatgaaaacatctgatncgggaagaag

SEQ ID NO: 31061 - DNA, 268 bp, Glycine max
  unsure (1)..(268): unsure at all n locations; Clone ID: 701063390H1
acccccaagtngggtccgcagaggtgctcaaccagtgggagaacgaagggagggcacctgcacgaagtggngagcttnccaagagtcgttaaagagttgangaagtncaagagatttccaagagccctcgaggtatatgantngatgaacaatagaccanagcggtttagagtttccgagagtgatgcagcaattcagttagnttnaattgcaaaanntcgtggagtttctagtgcagaagcattctttctgagtctggaagntaatt

SEQ ID NO: 31062 - DNA, 268 bp, Glycine max
  unsure (1)..(268): unsure at all n locations; Clone ID: 701063391H1
ctgtcctgctcgttccctcctcgatttcatcttagggtttccacgattccacctgccctcttcccaantctcttggatccattgccgtcaccgagggagatgaggtttctttgcagaaggcgctgaatatggttcacaagaataatcatgaatatgtggctgtgctcttctatgcgtcctggtgccctttctctcgggtgtttagatcagttttctctgttctctctgcgctacacccttccattcctcatttgccattgaagaatca

SEQ ID NO: 31063 - DNA, 242 bp, Glycine max
  unsure (1)..(242): unsure at all n locations; Clone ID: 701063393H1
aaacacagatttcatttccaattctctattctctaganaatgggaacaacaattcttcgttcccacgattgcctccaaggccggttcctccacaacgaagcctncgccattgccgcatcacgtgtcgcatcgcgaagaaactctaatcctaacaataatagcttcgcctcctccgccaaaccaaaccgctgccggaagcggagtccggtcaccaatcgagaccgccgtcgatctccggcgaa

SEQ ID NO: 31064 - DNA, 276 bp, Glycine max
  unsure (1)..(276): unsure at all n locations; Clone ID: 701063394H1
ctcactgaaaaggttggctggcaggatgaggccatatatgctanacaatcgaactgtgtcccgttgtagatcctgcgctggaaagcgtagtagtggctcacatgttagagcagacatatggcttgcatttctcggaccagatagacttggaaaaagaaaagttgcatcagcacttgctgagattttatttgganacaaacaaagcctaatcactgtggatttgagctcccaagacaggtcttatccaacaaactcgatttttgaattccaaaatnc

SEQ ID NO: 31065 - DNA, 280 bp, Glycine max
  unsure (1)..(280): unsure at all n locations; Clone ID: 701063395H1
agaaaatcaacatttttnttctatcaattcacacgacaaaatttanccagagttcaaaacaccaaccaagtaaagtaaagancggaagatgtcactgataccaagtttcttcggtggtcgaaggagcaatgttttcgaccctttctcgctcgacgtatgggaccccttcaaggatttgtctttcccttctgctgaagattcagctttcttgaaaacacgagtggattggaaggagaccccagaagcgcacgtgttcaaggctgatattccggggctgaag

SEQ ID NO: 31066 - DNA, 287 bp, Glycine max
  unsure (1)..(287): unsure at all n locations; Clone ID: 701063396H1
ggaacncttctacgtgttctccattccctctctcactcctccatctacgtttcttnaatcatttcctcctatntcgcgttctttatcttctcattntcctcattacactcttnnaccntctctcaacttttctcttattaaccatagttcacatattatatcatcacntatcanagtgatatattntatcatatcacaatgtgtggcatacttgcngtgttggttgctctggattcatctcaagccaaaagggttcgcgtccttgagctttctcgcagntgaagcac

SEQ ID NO: 31067 - DNA, 308 bp, Glycine max
  unsure (1)..(308): unsure at all n locations; Clone ID: 701063401H1
gcgacacgtatcttcatcaataatcgcagaagcagtttccggtgcatctcatcgtcttccaaaatgaacgacgcagatgtctncgaagcaaatccagcagatggtgcgtttcatccgccaggaagctgaggagaaagccaacgagatctctgtatctgccgaagaggaattcaatatcgagaagctgcagttggttgaagccgaaaagaagaagatcaggcaagaatacgaacgcaaagagcgccaagtcgaaattcgcaagaagattgagtactcaatgcagctgaatgcttcggattaaagttctt

SEQ ID NO: 31068 - DNA, 302 bp, Glycine max
  unsure (1)..(302): unsure at all n locations; Clone ID: 701063402H1
agagagagagagggaggagggagagtgttgacgctccatcaagatgggtatttctagggattccatgcacaagaggcgtgccactggtggcaagaagaaggcatggagaaagaagagaaagtatgagcttgggcgtcaggccgcaaacaccaagttatcaagcaacaaaactatccggaggattcgtgttcgaggtggcaatgttaaatggagggcattgaggttggataccggcaattactcatggggtagtgaagcagttactcgcaagactcgtattctagatntgtttacaatgcctc

SEQ ID NO: 31069 - DNA, 299 bp, Glycine max
  unsure (1)..(299): unsure at all n locations; Clone ID: 701063404H1
aattcttcttctggtcagagcagtggctatgatctctccttcaagatcttgctgatcggtgactctgctgtgggaaaaagtagcctccttgttagcttcatctccaattctgctgaagatattgcccccacaattggtgttgattttaagatcaagatgctcactgtagganggaagagattgaaactaactatttgggacactgctggacaggaaaggttcagaacgctaactagttcttactatagaggagcgcaaggnatcattcttgtttatgatgtaagagaagagacaccttc

SEQ ID NO: 31070 - DNA, 298 bp, Glycine max
  Clone ID: 701063405H1
agtgagttaggatagccccagaaatagaaactcagaaaaactcacccactccaagttactcactcaaccacaaccaccatgttctgatattcccccaaccacacttttcacacaccaatcaaactaatgcaaatgcaaagcatgtcaaccaccatggcttcgttttctcctccgacccatttctcagccactccttcttcctcgaaaccccgtcttgtctacaagaacaactttttcttctctctcaggtcgaggagtctttctctctctcccttgaaggctgtgcttctgagaacgg

SEQ ID NO: 31071 - DNA, 297 bp, Glycine max
  unsure (1)..(297): unsure at all n locations; Clone ID: 701063406H1
gcaaaattctcttccgtttcaggattagngtttcaccgttacagtgaaacatggcacaaccaaagcgaatctctctgcgtatctttgcgctgctcctcttgatttccacctcttcgtttcagcttctccgcgcttccgatgacgccgatgatgatgcgatcttctatgattcgttcgacgaggattttgaagaccgttgggttgtgtctcagaaagatgagtacagtggtgtctggaaacatgccaagagtgagggacatgatgattatgggcttcttgtcagagaaagcaaggaaa

SEQ ID NO: 31072 - DNA, 299 bp, Glycine max
  Clone ID: 701063407H1
ccctactctgaaaagcagaacagacttacagccctgcatggttcaattgaacagctattatttgctcctgagcagactgatgaatacattggtttattgaaagacaagtcaaagcccataattttctccatggcaaggctagacagagtaaaaaacataactggattggtagaaagctttggtaagaacagcaaattgagggaactggtcaaccttgtcatagtagctggttatattgatgtaaagaagtccagtgacagagaagaaattgcagaaattgagagatgcatgagctcatg

SEQ ID NO: 31073 - DNA, 299 bp, Glycine max
  unsure (1)..(299): unsure at all n locations; Clone ID: 701063408H1
ctcgccctcgactcacatccttgtccgattccgcgaacgantcgagtcaatcgggttggtaagatctattctgtttcttcgtcatggcaaccggacaactattctcgcgtactacacaggctttgttttacaactacaagcaacttcccatccagcggatgcttgattttgacttcctttgcggcagggaaacaccatcagttgctggaataattaaccctggttctgagggatttcaaaaacttttttttggtcaggaggaaattgccatcccagtgcatgnaccgttgangcagctt

SEQ ID NO: 31074 - DNA, 300 bp, Glycine max
  unsure (1)..(300): unsure at all n locations; Clone ID: 701063409H1
ctagagaggacgagagagcgtgcnactttcggcaaccacagaccatgacattncaagcgcangaatggaggtcgcaacaaacacggccgcggccatgtcaaattcatccgatgctccaactgcggaaaatgctgccccaaggacaaggccatcaagaggtttttggttaggaacattgttgaacaggctgcagtcagagatgtgcaggaagcttgtgtctatgaacaatatacacttccaaaactctatgtgaagatgcagtactgtgtttcctgtgctatccatctcatgttgtgangg

SEQ ID NO: 31075 - DNA, 298 bp, Glycine max
  Clone ID: 701063410H1
cagaagacaggttcaaaccggagcaaaaaaacttgttacgatggtttcttccgacaaggatccacgagaggaagtccttcaagcatggtacatggatgatagtgatgaagatcaaagactcccccaccacaaagaacccaaggagtttgtctcgttggaccaacttgctgaacttggagtccttagctggaaattagatgctgataaccatgaaaatgatccagagctgaaaaagattcgtgaagagcgtggctacacctacatggatgtttgtgaggtctgccagaaaagttgccaa

SEQ ID NO: 31076 - DNA, 245 bp, Glycine max
  unsure (1)..(245): unsure at all n locations; Clone ID: 701063411H1
tcttctcatcaagcacagagttacagactcaccgatcttccgattctctttcgtcttggtttatgagntcgaaggagagacccactcttggtggcacgcggattaagacccgcaaacgaaatattgctgcgccgctggaccctgcagcattctcggatgcagtggtccagatttatttggataatgctggtgatctggaacttattgctaagagtattgaatcttcagccttaacttttcaagat

SEQ ID NO: 31077 - DNA, 299 bp, Glycine max
  unsure (1)..(299): unsure at all n locations; Clone ID: 701063412H1
cacctttnttcactcttcttctcttgcggctagggttttagcgcagttcttctagatttaaggnagatgggtaaggnaaaggttcacatcagtattgtggtcattggccatgtcgactctgggaaatccactaccactggtcacctgatttacaagcttggaggcattgacaagcgtgttattgagaggtttgagaaggaagctgctgcnatgaacaagaggtctttcaagtatgcctgggtgctggacaaacttaaggctgagcgtganagaggaatcaccatgatattgctttgtgg

SEQ ID NO: 31078 - DNA, 276 bp, Glycine max
  unsure (1)..(276): unsure at all n locations; Clone ID: 701063413H1
tcttctcatcaagcncagagttacagactcaccgatcttccgattctctttcgtcttggtttatgagctcgaaggagagacccactctnggtggcacgcggattaagacccgcaaacgaaatattgctgcgccgctggaccctgcagcattctcggatgcagtggtccagatttatttggataatgctggtgatctggaacttattgctaagagtattgaatcttcagaccttaacttttcaagatacggtgacacctttttgaggttgctttcat

SEQ ID NO: 31079 - DNA, 307 bp, Glycine max
  unsure (1)..(307): unsure at all n locations; Clone ID: 701063414H1
ctccaaacccacctttctatcttttccatcagagcattatttgntaccctctctgcagcaacgcatttttcctcattctcttaaacactttctcttttctccttcgtttgatctgcattaaaattgcataaatatataaaanatgaagaagtttgtactcaagttagatttgcatgatgacaaggataagcagaaggccttgaaaacagtttcaactctttcaggaattgatgccatcgccatggatatgaaagagaagaaattaacagtgattggaacagttgatccggaactgtggtgagcaaat

SEQ ID NO: 31080 - DNA, 308 bp, Glycine max
  Clone ID: 701063415H1
gtttcacagcagcaatggtgtacgtcaaggctcagaaatcaaaagcctacttcaagagatatcaagtcaagttcaagagaagaagagagggaaaaaccgattaccgtgccaggattcggttgattaatcaggacaagaacaaatataacactccgaaataccgatttgttgttcgctttagcaacaaggacattgttgcacaaataatatctgctagcattgctggcgatattgttcttgctgcagcatatgcacatgagctgccacgatatggtcttgaagtagggcttcaaattatgctgcagctt

SEQ ID NO: 31081 - DNA, 308 bp, Glycine max
  unsure (1)..(308): unsure at all n locations; Clone ID: 701063416H1
cnaggcgcaacggagnccccgttccggttcgcaaagtgttntggcagtggccaattctaccaanggatccataactgcagttgaagtggcaaacngtatccatgccgattttnttgctgctgatgtgcggggaatnactaagatggatgcctcatctggatttaattcaagtttactgtcccaagcattacctccgataggcacacctcctttgaaaattgatgcccagcccgatttaagatcacagatgagcaggtcacataagacaagtctcccagcagtttctggtgggaaaaggaccctgggtc

SEQ ID NO: 31082 - DNA, 304 bp, Glycine max
  unsure (1)..(304): unsure at all n locations; Clone ID: 701063417H1
gatcgaagaaagangcatcataaagcaatacacttttttcccctcattctaccttccttcaccttcttcttcgttgcggtggtgccctagattttctctatccctttgatcgttcctgaattaccagcccccggccctcgctctagggtttcccatggattccgaggacgatatgcacgacgccaacgatgtggagtccctcgacgacgatttctacagtggcgagaccgaggaccctcccatggattactacagtgactacgacgacaacgccgacgattattcgagacgccgacgattctga

SEQ ID NO: 31083 - DNA, 303 bp, Glycine max
  Clone ID: 701063418H1
cttgctgagagaagaaagctagaagacttgacaatcggcccagtcctcacatgtacgactggtatgatgctagaacacaagaataaattgcttgagataccaggatcaaagctgctctttgggggtagtcctctagagaaccattcaattccacctatttatggtgccattaaaccaacagctgtctatgttcctctcgaggaaattatgaaggataagaattttgatcttgtaacaaaagaaatatttggaccctttcaggttatcacggactacaaaaacagtcactatcagttgtattgg

SEQ ID NO: 31084 - DNA, 301 bp, Glycine max
  unsure (1)..(301): unsure at all n locations; Clone ID: 701063419H1
tttcagctgaagagccatccgcaggtaagcaatggttaagcataataatgttatccccanccgggcacttccggaaacactggcaaaactatgtgaagacttggtttaatcaaccagcccgaaagaccagaagacggttggctcggcagaagaaggctgtcaagattttccccaggcctactgctggatctctcaggcctattgttcatggccagactctgaaatacaacatgaaagtcagagccgggagaggattttcactggaagaattgaaggctgcaggaatcccaagaaattgctc

SEQ ID NO: 31085 - DNA, 297 bp, Glycine max
  unsure (1)..(297): unsure at all n locations; Clone ID: 701063421H1
agataactagaaacagtgtgatgaaaatgaaggtccttgttttcttcgttgctacaattttngtagcatggcaatgccatgcgtacgatatgttccctctccgaatgaacactggctatggtgcccgtactccggaggtgaaatgcgcaagttggaggcttgctgtggaagcacacaacatctttggctttgagaccantcctgaagagtgcgttgaagcaacaaaggaatacatccatggcgaacaatatagatcagactccaaaacagttaaccaacaacttacttttatgccag

SEQ ID NO: 31086 - DNA, 297 bp, Glycine max
  unsure (1)..(297): unsure at all n locations; Clone ID: 701063423H1
gtggtgccttatcgctgtggttttcatcgtcttccttctcttatatttctnttttnttttngtctncgccgaacgccgaaacaatggccggaaaaggagagggtcctgntatcggaatcgatctcggaaccacctactcttgtgtcggtgtgtggnaacatgaccganttgaaatcatcgccaacgaccaagggancagaannncgccgtcttacgtcggnttcactgataccgagcgtctnatcggtgatgcggctaaganccaagtcgccatgancccctcaacaccgtnttnga

SEQ ID NO: 31087 - DNA, 298 bp, Glycine max
  unsure (1)..(298): unsure at all n locations; Clone ID: 701063424H1
gtgaggtagaacccttccacggtggtgactgcgcgatgggtgcctacaagtatgtttcagagctatggcgcaagaagcagtctgatgtcatgcgcttcttgcagcgggtgaggtgctgggagtataggcagcaaccttccattgttcgcttgacaaggtcgacccgccctgacaaggctcgtcgcttgggcttcaaggctaagcagggctatgtgatanaccgtgttcgtgttaggaggggtggccgaaagaggccagttcccaaaggtattgtttatgggagcccacaaaccagggt

SEQ ID NO: 31088 - DNA, 299 bp, Glycine max
  unsure (1)..(299): unsure at all n locations; Clone ID: 701063426H1
cttntctaaaacctanacanatcntctcttctccntcgntcngtggttctccntcngggtanatcgacaatggcggagacagngacgtttgcnttcnaggctgagatcaaccagctcctcagtctcatcatcaacaccttctactccaacaaggagattttccttcgtgaatcatcagcaacgcctccgatgctttgggacaagattcgatttgagagtttgacagataagagcaagctcgatgctcagccagagttgttcatcatatnattccagacaaganaacagnccatgaccat

SEQ ID NO: 31089 - DNA, 299 bp, Glycine max
  unsure (1)..(299): unsure at all n locations; Clone ID: 701063427H1
catgaccgtgaccatggcggctgcntttacaagtacaagtgcaacactgagactgtcaantgttggagagagcagaggtttgcagctgcgtaagtgntaaccctaatcctaataagctgaaggttatgggggggtttggaggttgttctggagtggcagtgggtgtgagagaaagaaaaggaattggaagggttagggttcgggttcgggcgagttcttcgtcggacgaggcatgagtgcgcagtcaaaagtgactcagaaagtatctttgacgtcagtattgaaatccagttgggaag

SEQ ID NO: 31090 - DNA, 301 bp, Glycine max
  unsure (1)..(301): unsure at all n locations; Clone ID: 701063428H1
agagtntgttgtgagctataagctagtttatcgtgaggagaatatgaagttgtttgtnttctttgttgctgcagtagttttggtagcatggccatgccatggcgcaggctaccaaaggttccctctccgaatgaaaactggctatggtgagcgttcttcggaggtaaaatgcgcaagttttaggcttgctgtggaagcacacaacatccgagcncttaaaaccattcctgaagagtgngttgnaccaacaaaggactacattaatggcgaacatttagatcagactaaaacagttaaccaa

SEQ ID NO: 31091 - DNA, 309 bp, Glycine max
  unsure (1)..(309): unsure at all n locations; Clone ID: 701063432H1
ctcggtcttatttccagagacgaggaaaacaaaaaccgatgactganccctaaggggaaaattgccgatgcggcaccgtaataccatttcccaattctagcactgttggctggggcaaattcctcacccaaaacgacacatgtttggggggccattttgatttgaggtgcgttgagacagaaaacattaggccaccntagttctcttctctctcgcaatttccatctggtctcaatttttctcgtgattccatctccattccggtgtaggctcctttgatttgaccatcttcttccgccatcatccatt

SEQ ID NO: 31092 - DNA, 303 bp, Glycine max
  unsure (1)..(303): unsure at all n locations; Clone ID: 701063433H1
attgcaagantggcacttcgttgcttggtgatgtccctttctgttctcttcactcttggtcttgcgagagaangccatgccagagacgaagatttttggcatgctgtttggccaaacactcccattccaagttcattgcgagancttctaaagcctggccctgcaagtgtngaaatcgatgatcaccctatgcaaattgaagaaacacagtacccgaaaaccttcttctataaagaagaccttcatccaggcaaaacaatgaaagtacaattcagcaagcctcccttcaacaaccatggggtg

SEQ ID NO: 31093 - DNA, 302 bp, Glycine max
  unsure (1)..(302): unsure at all n locations; Clone ID: 701063434H1
gcactataganaaaacgacattcattcatctatggctacccttattgctcccagcaaccactctccccaagaagacgctgaggctctcagaaaggcttttgaaggatgggggactgatgagaaaactgtcatagtaatattgggtcatagaactgtttatcagaggcagcaaatcagaagagtctatgaggaaattttccaggaggatcttgtgaaacgcctagagtctgagatcaaaggagactttgagaaagccgtgtaccgatggatactagaacctgcagatgtgatgctgttttggc

SEQ ID NO: 31094 - DNA, 268 bp, Glycine max
  unsure (1)..(268): unsure at all n locations; Clone ID: 701063435H1
ctgaaatctgaagctaacttaagggaantnagatggccaatggcaacaanagtcatcncttcaagctcttgcttttccttctaactctgcactcttcattcgctgagattttcttcgaagagagattcgaagatggatggaagagccgttgggtgctatccgattggaaaaggagtgaaggaaaagcgggtaccttcaagcacacagcaggaaaatggtctggggatcctgatgacaaaggtcttcagacatnatgacgccaagcatt

SEQ ID NO: 31095 - DNA, 295 bp, Glycine max
  unsure (1)..(295): unsure at all n locations; Clone ID: 701063437H1
cttcatgtggagacctttatgatgatcacaaggcttaccatcacagggtttcttacagaatcatactggctgtaattggttctggtttggctgtttttatgtcagtaactatagttgtcttgctgtttatgatcagagagaggcaggaaaaagtagccaaagatgctgggattgtngaagatggcaccaatgacaacccaactataattgcngggacgatttttgttgataatctaaaacaagcagtagatcttgatgtcgtcgttaaagcaactctgaagacagcaacaagctc

SEQ ID NO: 31096 - DNA, 295 bp, Glycine max
  unsure (1)..(295): unsure at all n locations; Clone ID: 701063439H1
gcaaaaagaaagaatcccaggcgaggagaaagatggaggggaaggagcaggatgtgtcgttgggagcgaacaagttccccgagagacagccgattgggacggcggcgcagagccaagacgacggcaaggactaccaggagccggcgccggcgccgctggttgacccgacggagtttacgtcatggtcgttttacagagcagggatagcagagtttgtggccacttttctgtttctctacatcaccgtcttaaccgttatgggagtcgccggggctaatnaagtgtagtaccgttg

SEQ ID NO: 31097 - DNA, 295 bp, Glycine max
  unsure (1)..(295): unsure at all n locations; Clone ID: 701063440H1
gctaacatgcgccacaatctccacattcaacaanagctgctgtgattttncttttttccatattcattttctgtntcacactctaattttctctccgcgtttgaattttctcaggatattttcaattgtcaagaaaatggttggacctaacttcatggatgagatagactgcggcagcttctttgaccacatcgacgaccttctcgattttcccgtcgaggacgtcgacggcggcgctgccaccttgccttccgtctccgccggaaacagcaatcgctgngagcatctggcctcc

SEQ ID NO: 31098 - DNA, 300 bp, Glycine max
  unsure (1)..(300): unsure at all n locations; Clone ID: 701063441H1
ctagccacaatgcagatattcccgaaanccctaacggggaagacgataaccctagaggncagagtcttcggacacgatcgacaatgtgaaggcgaagatccaggacaaggagggcatcccgccggatcagcagcgcctgatcttcgccggaaagcagctggaggacgggcgcacccttgccgactacaacatccagaaggagtccaccctccacctcgtcctccgcctccgcggcggcgccaagaagcgcaagangaagacctacaccaagcccaagaagatcagcacaagcacaagaag

SEQ ID NO: 31099 - DNA, 298 bp, Glycine max
  Clone ID: 701063442H1
ggagtacatgcatcataagatgaactcaagtgatcaaaacaaaactaagaaaaggtggtggattgggaagattgtgaagtgtggaaccttcaataaacaaatgagaggtgggaaacgaccagaaaatgagggttacaacatgcttaagcaccagaatatcaatggccttgcttccccgggtctcatgggaatgctctcacctctgcgcctcttctctccccgtcattcaccccgtcgttccttcggttgagaagtaacaaaaattattacaggatctataaaccattgtatatttagg

SEQ ID NO: 31100 - DNA, 300 bp, Glycine max
  unsure (1)..(300): unsure at all n locations; Clone ID: 701063443H1
gctaacactcattaattgcaagantggcacttcgttgcttggtgatgtccctttctgctctcttcactcttggtcttgcgagagaaagccatgccagagacgaagatttttggcatgctgtttggccaaacactcccattccaagttcattgcgagatcttctaaagcctggccctgcaagtgttgaaatcgatgntcaccctatgcaaattgaagaaacacagtacccgaaaaccttcttctataaagaagaccttcatccaggcaaaacaatgaaagtacattcagcaagcctccctt

SEQ ID NO: 31101 - DNA, 301 bp, Glycine max
  unsure (1)..(301): unsure at all n locations; Clone ID: 701063444H1
anatgaaccatatggctacagcgtgaatggctacagtggtggaaattttgcaccaggtagatgttctaactangttggaaaatgccctgcnggtgattcttccaccgagccctacattgttaaccaccacttaatacttgctcatggagcagcagtcaattgctacaagaacaaataccaggctcatcaganaggacaaattggngtcaccatagtgactttcttctttgaaccaaaatctaatagtgatgctgatcgcaaggcagcaaggcgagctctggacttatgtttggctggtttg

SEQ ID NO: 31102 - DNA, 304 bp, Glycine max
  unsure (1)..(304): unsure at all n locations; Clone ID: 701063446H1
ggtgattgggaaaggaagaataggctgaaagtgtatgaaggcctgtactgcatgtccactcgaaatttcaagaaggctgccaagttatttttggattctatttcaaccttcaccacctatgaactttttccctatgacacctttatatnttatactgttttgaccagcattatatcattggatagagtttccctaaagcaaaaggtagtagatgctccagagatcttgacagtgattggcaaaatcccatatctttcagagtttttgaatccttatatgattgccanacaagtcttttttctcc

SEQ ID NO: 31103 - DNA, 306 bp, Glycine max
  Clone ID: 701063448H1
cccaattcctaattgtttaaacctaattctcatttcttcatcgttcgattcttctcctcctaaagatgcagatcttcgtgaaaactttgaccggtaagaccatcacccttgaggtggagtcctccgacaccatcgataacgtgaaagctaagattcaagacaaggaagggatcccacctgaccagcagagacttccctttgcgggtaaacagcttgaggatggtcgaacccttgccgactacaacatccaaaaggatccactctccacctcgtgcttcgcctcaggggtgcatgcaaatctttgtc

SEQ ID NO: 31104 - DNA, 301 bp, Glycine max
  unsure (1)..(301): unsure at all n locations; Clone ID: 701063449H1
ccgagattccncctaaacccgtttgcnttgttgtttgcgaagaaatggcgactaagaggagcgtgggaacgttgaaggagggtgatttgaaagggaagagggtgttcgtgagggtcgatctgaacgtgcctttggatgacaaccttaacatcaccgatgacactagagtccgtgctgctgttcccaccatcaagtacttaactggtcatggagccaaagtgatcctttctagccacttgggacgtcctaaaggtgtaacacctaaatacagtttgaagcctcttggccaaggctgtctcaa

SEQ ID NO: 31105 - DNA, 129 bp, Glycine max
  unsure (1)..(129): unsure at all n locations; Clone ID: 701063451H1
ctgaggnctgtgctgtgctctgaggggccatagtttgggaccctttgaaccctaatctccacncaaacncatttnaaagggaaattgccttggaaaaganagagngaagaggaaaatgcagaatcacag

SEQ ID NO: 31106 - DNA, 298 bp, Glycine max
  Clone ID: 701063452H1
gctcgtgcctctagggttatcatatctccatttccatttcctctctctcagtttccaagaatcttaagctatgggaaagtcttacccaaccgtgagcgctgattaccagaaggccgttgagaaggcgaagaagaagctcagaggcttcatcgctgagaagagatgcgctcctctaatgctccgtttggcatggcactctgctggaacttacgacgtgagctcgaagaccggtggtcccttcggaaccataaagcacccctccgaactcgctcacggcgctacaacggtcttgacatcg

SEQ ID NO: 31107 - DNA, 297 bp, Glycine max
  unsure (1)..(297): unsure at all n locations; Clone ID: 701063453H1
ggccactgctacgaatgccgccgccgccccaccacgccagctctcccagaaggaagctgacatccagatgatgttggccgccgacgtccacctcggcaccaagaactgcgacttccaaatggaacgttacatcttcaagcgccgcaacgacgggatttacattattaaccttgggaagacgtgggagaagcttcagctagcagctagggttatagttgcaattgagaacccccaggatatcattgttcaatctgcaaggccttatgggcaaagagcggttngaagtttgctcagtac

SEQ ID NO: 31108 - DNA, 296 bp, Glycine max
  unsure (1)..(296): unsure at all n locations; Clone ID: 701063454H1
gacataacccactttctcttgatttctctctctgttgangaattctattcaatttccnctgtttcagatccaagtngggtattcgaacccagtcctgcatcagaatggaagggagtaacaccaccgtgcccagcattgttgtctatgtcactgttcccaacaaagatgcaggtaagaagttggctgaaagcatcgtcaaagagaagcttntaacttgtgtcaacagggtaccgggtattgaatcggtgtaccagtgggagggaaagatccaaactgattcgaggaacttcttataa

SEQ ID NO: 31109 - DNA, 294 bp, Glycine max
  unsure (1)..(294): unsure at all n locations; Clone ID: 701063455H1
tttgttgtgagctataagctagtttatcgtgaggagaatatgaagttgtttgtnttctttgttgctgcagtagttttggtagcatggccatgccatggcgcaggctaccaaaggttccctctccgaatgaaaactggctatggtgagcgttcttcggaggtaaaatgcgcaagttttaggcttgctgtggaagcacacaacatccgagcncttaaaaccattcctgaagagtgcgtcgaaccaacaaaggactacattaatggcgaacatttagatcaactctaaaacagttaa

SEQ ID NO: 31110 - DNA, 297 bp, Glycine max
  unsure (1)..(297): unsure at all n locations; Clone ID: 701063456H1
gagtttgttgtgagctataagctagtttatcgtgaggagaatatgaagttgtttgtnttctttgttgctgcagtagttttggtagcatggccatgccatggcgcaggctaccaaaggttccctctccgaatgaaaactggctatggtgagcgttcttcggaggtaaaatgcgcaagttttaggcttgctgtggaagcacacaacatccgagcgcttaaaaccattcctgaagagtgcgttgnaccaacaaaggactacattaatggcgaacaatttagatcgactctaaaacagtta

SEQ ID NO: 31111 - DNA, 295 bp, Glycine max
  unsure (1)..(295): unsure at all n locations; Clone ID: 701063458H1
caattnganngagggaagtgttcccgccatgggaatggagcgagtgcagtgtgcctatgcctctctggacgaagcgttcgaaatagggaaagaggcgtatcaggggcagnagtanagccanatttacttcgcgcgccttcanttgatgngaacactttatattccctcgtncctcattggaaatccaatttgcccgtgtgcanagtgctgggatggnagaggggaaggagtgtgtccttgttngaaccctctataaacacatgaagntcaaaccttgcttcttgnngagtagttc

SEQ ID NO: 31112 - DNA, 298 bp, Glycine max
  unsure (1)..(298): unsure at all n locations; Clone ID: 701063459H1
cgcgtttccgtcattnggagccttctcctcattgtctctttcttctctcctcaaatcaagggtgaggcttctggttccgtcttcttcgtcgatagctccagtaatcaattcattcgcgccagatcatccaactatgagcaaccttcactgttgctagaagaagctggtgctgttgtgtcagtcttgcttggttttgctcctccttccacccttccagctgccagctcatccaagttgaatgatgttctgattcctaacccattcaagaggcctcgtgctgtgtttgctggaagtgaat

SEQ ID NO: 31113 - DNA, 300 bp, Glycine max
  unsure (1)..(300): unsure at all n locations; Clone ID: 701063460H1
gaaaaacatggatatggggtggaggaatttaatgaaaccttatatgatgaatgggttaacaagggcgacgcaccggcattgccagagactcttaaaaattacaacaagctgttgtctcttggcttcaagattgtattcttgtcaggaagatatcttgacaaaatggccgtaacagaagcaaacctaaagaaggctggcttccacacatggnagcagttaattctcaaggatccacatcttatcactccaaatgcactttcatacaaatcagcaatgagagagactgttgaggcagggata

SEQ ID NO: 31114 - DNA, 52 bp, Glycine max
  unsure (1)..(52): unsure at all n locations; Clone ID: 701063461H1
ganagnnngcaagtcnctccttcctctgccttataattcttgtgancctttt

SEQ ID NO: 31115 - DNA, 303 bp, Glycine max
  unsure (1)..(303): unsure at all n locations; Clone ID: 701063462H1
attgagcanatggaggatctgactaccttggaaagggtgtatcaaaggctgttgacaatgtgaacaccgtcattggccctgctttgattggcaagganccaactgagcagactgctattgacaacttaatggntcaacagcttgatggaactgttaacgaatggggttggtgcaagcaaaagctaggagcaaatgccatattggcagtgtctcttgcagtctgcaaagctggtgctagcgtcctgaaaattcctctttacaagcatattgctaatatcgcgggtaacaaagttggttttgccg

SEQ ID NO: 31116 - DNA, 305 bp, Glycine max
  unsure (1)..(305): unsure at all n locations; Clone ID: 701063463H1
gagaatcgntcttcttccatcctttcntctcctctctccgcatttcccaagcagngcagatattccgaagatggcagacgctgaggatattcaaccccttgtttgcgacaatggaacaggaatggttaaggcaggatttgcaggagatgatgccccacgtgctgtgtttcctagcattgttggtcgtcctcgtcacactggtgtgatggttggtatgggccagaaagatgcatatgttggtgatgaagcacagtctaaacgtggtatctgactctcaagtatccgattagcatggtattgttagc

SEQ ID NO: 31117 - DNA, 310 bp, Glycine max
  unsure (1)..(310): unsure at all n locations; Clone ID: 701063464H1
ggctactgcgactgcgcttcagcacaatgggtgcctacaagtatgtttcggagctatggcgcaagangcagtctgatgttatgagattcttgcagcgggtgaggtgctgggagtatcgccagcaaccttctattgtccgtttgacaaggtctactcgcccagataaggctcgtcgcttgggtttcaaggctaagcngggttacgtgatttaccgtgttcgcgtacgaaggggtggccgtaagagaccagttccaaagggtattgtttatgntaagcccaccaaccaaggtgttatcaactganatttcaa

SEQ ID NO: 31118 - DNA, 299 bp, Glycine max
  unsure (1)..(299): unsure at all n locations; Clone ID: 701063465H1
tcacagggtaaagagtatgtatttntngccaattcagataacttgggagcnntagttgacttgatgtacttgactcattgatgnagagatcttaaatcatttgatccagagcaagaatgantactgtatggaggtgactcccaaaacattggctgatgtaaagggtggcactttgatttcttacgaaggaagggttcagcttttggaattgcacaagtcccagatgaacatgtcaatgagttcaagtcaatagagangttcaaaattttcaacacaatnattgnnnggtgaacttaaat

SEQ ID NO: 31119 - DNA, 296 bp, Glycine max
  Clone ID: 701063466H1
tcaggagttgggtttggaaattttggagaggttggtcctttggatgctaatttgaagccacgaaatttcacatggttgagaaaagcagatctcttgtttgtggacaacccagttggaaccgggtacagttacgtggaggattccaatctctatgccaaaacagacgaagaggcaaccacagacttgacaacattgttagttgaattattcaacaatgatgcaagtctccaaaagagtcctctgttcatgtggcagagtcttatggtggcaaatttgctgtgctcttgcattatcgg

SEQ ID NO: 31120 - DNA, 295 bp, Glycine max
  unsure (1)..(295): unsure at all n locations; Clone ID: 701063468H1
ccaaaaccctcttttttctctctcttgcaaaacctaattttcatttcttccctcaaatttcaaaatgcgtganatccttcacatccagggtggccaatgcggcaaccagatcggcgccaagttctgggaggtggtttgcgcggagcacgggatcgaccctaccggaagccacggtggggactcggagttgcagctcgagaggatcaatgtctactacaacgaggccagttgcggtcggttcgtgccgtgcgcggttctcatggacctcgaaccgggcactggacagcgtccggtc

SEQ ID NO: 31121 - DNA, 295 bp, Glycine max
  unsure (1)..(295): unsure at all n locations; Clone ID: 701063469H1
tttgtngtgagctataagctagtttatcgtgaggagaatatgaagttgtttgttttctttgttgctgcagtagttttggtagcatggccatgccatggcgcaggntaccaaaggttccctctccgaatgaaaactggctatggtgagcgttcttcggaggtaaaatgcgcaagttttaggcttgctgtggaagcacacaacatacgagcgccntagaaccattcctgaagagtgcgttncaaccaacaaaggactacattaatggcgaacaatttagatagactctaaaacagtt

SEQ ID NO: 31122 - DNA, 294 bp, Glycine max
  unsure (1)..(294): unsure at all n locations; Clone ID: 701063470H1
gcttctcaaggcggagagaganaatgccgataagaanaagagagangacctcaangtcacggaggagagacaaaaggtggagaagagattgaatgaagagaaggaactcaaagccgaagacaccaacaaaaacgaaagcgcctccagagttccaaacaaaggtaatggcttggatctggagaaatactcttggactcagtcgcttcaagnngttaatgtgaatgttccggtgccaaatggaaccaaatcgagatttgttaccgttgagataaagaagacatctaanagttggat

SEQ ID NO: 31123 - DNA, 296 bp, Glycine max
  unsure (1)..(296): unsure at all n locations; Clone ID: 701063471H1
cttcaaccgctacagagagatccatgggcacttccatctctaagaanttggtggatgaaggatctgatgagtttcaganggcattgtacactgccattcgtgccatcaatgatcctattaagtactatgaaaaggtggtgcgcaatgcaatcaaaaaggttggaaccgatgaggatgcactcactcgcgtggttgtgagccgggccgagaaggacctgaagataatctcagaggtttactacaagagaaacagcgttcttcttgagcatgctattgccaagaaatctcaggggact

SEQ ID NO: 31124 - DNA, 295 bp, Glycine max
  unsure (1)..(295): unsure at all n locations; Clone ID: 701063472H1
acaacgtcgttgttgttcttaaggtagctcctgnntctctgcctccatttcccataacaaacaatgctctcactttcnagagccaaagacacacacttcatctgaattgcttccaaaccaaaaacagaacaacctcattcccttcttcctcgtcaatcctcagaaacaaagctagttgctctgtgttggcgtgtctccctcctgaatcctcaacctcatcttccactgctaaaccctcttttccttctcctcaaactaagctttatgtcagtgggctacatttcgtaccactgaa

SEQ ID NO: 31125 - DNA, 285 bp, Glycine max
  unsure (1)..(285): unsure at all n locations; Clone ID: 701063474H1
tacaacttacggctaaattctcaaagatttaaactttgtctcagagtttccaaattcacccaaccccagagagaaantgtctctaatcccaaatttcttcggtggcagaaggagcaacgttttcgatcctttttccctcgacgtctgggaccccttcaaggattttcctttcccaaacactctttcttcagcttcctttcctgaattttctcgggaaaattctgcattcgtgagcactcgtgtggattggaaggagaccccagaagcaccgtattcaaggctgat

SEQ ID NO: 31126 - DNA, 298 bp, Glycine max
  unsure (1)..(298): unsure at all n locations; Clone ID: 701063476H1
cttgtgtttccctccagacattgattttatctaagaatcaaattanagattggccaggttcaattcttaaatcactttcgagcctttcatgtttgaagctggataacaatcccctcagacagataccttcagatggctttgaaatggtgcctaagcttcagatcctggatctaagtggtaatgcagcttcattactagatggtcctgcattttctagtttgccatacctgcaagagctttacctaaggagaatgaggctcagtgaagtcccatcagatatagggggctgcatcagcta

SEQ ID NO: 31127 - DNA, 246 bp, Glycine max
  unsure (1)..(246): unsure at all n locations; Clone ID: 701063477H1
caagantttccattgcatgcaaagcaaatacgcattatattactagttttaatttgttttgtcgtttgcttctttctttgattaatgatgactagctttaaggttgcatgtgtggttgcgatgatgtgcatggttgtnccatgagtntacaccaggcaaggccgcaatcagggggaggcgcgggaggctcggctagtactcganggcgaangcgagctgtgangatgagngtacgggnagnacggc

SEQ ID NO: 31128 - DNA, 301 bp, Glycine max
  Clone ID: 701063478H1
cacacctcagaagaacagaacagaaccaccacataacagtgcttttcaaaggcggtttgagcaatggcgttcttaaataaaattgggaatctgctcaagaattctgctgtcaagcacatcaatcaggatttttcggcgtctaccccttcacttttccaagcaattagatccatgtcatctgcaaagcttttcgtcggaggtatttcttacagcactgatgatatgagtttgcgagagtcttttgctcgctatggagaagtaattgatgtcaaggttattatggattgaaactggcaggtca

SEQ ID NO: 31129 - DNA, 302 bp, Glycine max
  unsure (1)..(302): unsure at all n locations; Clone ID: 701063479H1
cttgccataccatcttacttttactttgttttcacaacatagccatngccatctccagcaacgcttctccttttgattccatcatcttcgatttggacgacaccttgtacccgtcaagcaccggtattgacaagtgcgtcaagaaaaacatccaactctttctcatccagaaatgcggattctcagaatccgaagccttcaccctccgagttgatctcttcaaaacctacggaagcacccttgccggtttaagagcactaggccatgatatcaccgcagaggagtacatggtttcgtgcagg

SEQ ID NO: 31130 - DNA, 214 bp, Glycine max
  unsure (1)..(214): unsure at all n locations; Clone ID: 701063480H1
gnaggtcattatggattattatgatgatcttctctctacacctttgtnttctcgaagtctcaacttgccttgtcggatttcccacctgttccggtcaccaaacctccttctctggncactccctcagattcaccctctctagtctctagttcccaacaacaaactccanggttccacactacataanacnntaccaacggggaaacaaaccaga

SEQ ID NO: 31131 - DNA, 298 bp, Glycine max
  unsure (1)..(298): unsure at all n locations; Clone ID: 701063481H1
tggtaaataaataacctaacctaacccttgcgacttgcgacttgcgagtnagactgaggttgggtttggaaggcaagggcttgtgttgtcacaatccaaganagaagtaatggcgaacatagacatcgaagggatcttgaagcagcagcngccttatgatgggcgcgttccgaagacgaagatagtgtgtactttgggccctgcttctcgatccgtagaaatgaccgagaagcttctgagggcagggatgaacgttgctcgtttcaatttctctcatggcacacgactatcaccagga

SEQ ID NO: 31132 - DNA, 287 bp, Glycine max
  unsure (1)..(287): unsure at all n locations; Clone ID: 701063482H1
ggtcgcagctcgatttgctctctgttcatgaaacctcgcaggagccattgcctgantcgaaggatgatattaactctgcccattcgttgagcgttgaggctgcttatatcaaccagaatttctctcagcaggtgcttattagggatgggaataaggttacttttgatgaggctaacccttttgctaatgaaggtgaggaggttgcttctgtcgcttataggtataggaggtggaagcttgatgatgatatgtatcttgttgcgaggtgtgagttcatagtgttgttg

SEQ ID NO: 31133 - DNA, 296 bp, Glycine max
  Clone ID: 701063483H1
ctctgttccaaaaccctaatccttcgtcttccagaaaatggctgattctccccttgcaaggaattcaaggtccccttccccgtggaaagctcagtcgagatctaggtctaggtcaagatctaggtcgaggtctaggcctagacaaaggccaagatcccgttctagaagtcatggcaggtcaagatcaccaattcatggaaggtcaaggtcacccattcatggaaggtccgagccttcaaatcctggtgacacactttatgtaaccggtctatcttcaaggtcactgaaagagacta

SEQ ID NO: 31134 - DNA, 293 bp, Glycine max
  unsure (1)..(293): unsure at all n locations; Clone ID: 701063484H1
gtttgttgtgagctataagctagtttatcgtgaggagaatatgaagttgtttgtnttctttgttgctgcagtagttttggtagcatggccatgccatggcgcaggctaccaaaggttccctctccgaatgaaaactggctatggtgagcgttcttcggaggtaaaatgcgcaagttttaggcttgctgtggaagcacacaacatccgagcctttaaaaccattcctgaagagtgcgttnnaccaacaaaggactacattaatggcgaacaatttagacagactctaaaacagt

SEQ ID NO: 31135 - DNA, 293 bp, Glycine max
  unsure (1)..(293): unsure at all n locations; Clone ID: 701063485H1
ttcatatgagcaaaaagtaaacagaactgaacaactagtaatgggagatccttgcttctttgtggtcttatcgtccttgctgctcctcatagttagtacacaaacaagctcaggtcaacttactcgcggcttctatctaaacacatgccccaatgtggaacagttggttcgttcagctgtggagcagaagttccagcagacctttgtgactgcccctgccactcttagncttttcttccatgattgctttgtgaggggttgtgatgcttccattttnttgcatctccaaacaa

SEQ ID NO: 31136 - DNA, 293 bp, Glycine max
  unsure (1)..(293): unsure at all n locations; Clone ID: 701063487H1
gaagagctgcttcatttaacatcattcctagcagcactggagctgccaaggctgttggaaaagtcctccctgctttgaatggaaaattgactggtatggcattccgtgttcccactgtggatgtctctgttgtngacctcacagtgaggctggagaaggaagcctcctacgatgaaattaaaaatgctatcaaggaggaatcagagggcaagttgaagggaattcttggttacactgaagatgatgtggtctccaccgactttgtgggcgatagcagtcaagtatttttgatg

SEQ ID NO: 31137 - DNA, 295 bp, Glycine max
  unsure (1)..(295): unsure at all n locations; Clone ID: 701063488H1
cacagggnanaatgagggagatccttcacgtgcagggagggcaatgcnggaaccagatcggttccaagttctgggaagtggtgtgcgacgagcacggcatagatccgacggggaagtacgtcggaaactcagatctgcaactcgagcgcgtgaacgtctactacaatgaagcctcgtgcgggcgcttcgtgccacgcgcggtgctgatggacctggagcccggaaccatggacagcgtgcggaccgggccgtacgggcagatcttccgccccgacaattgtgttcgggcagtccg

SEQ ID NO: 31138 - DNA, 263 bp, Glycine max
  unsure (1)..(263): unsure at all n locations; Clone ID: 701063490H1
atcaatggaacccgcgaaaattgattggaagaggctagagtggagcttcgtggaagacaagctctacgagcacatcaacgcgcccaagtgggttgacttcttgtcccttgaccactccctcaatgatcatgctgacgaagcttggttctgcaagcctgattgcaaacatcccaagacagcagaggattttctgagatcaaaaactctccttccaagaagggttttagcccgggttatgtttcagagntcttccaagtggtgac

SEQ ID NO: 31139 - DNA, 297 bp, Glycine max
  unsure (1)..(297): unsure at all n locations; Clone ID: 701063491H1
gcatttgcagttccaaagggttataatgcacctcaacaagtgcacatcacgcaaggngactatgatggaaaagcagtaatcatctcatgggtgaccacagaagagccagggcacagccatatacagtatggcacatcagagaataaatttcaaactagtgaagaaggcacagttacaaactatactttccacaaatacaagtctggcctacattcatcactgtcttattgaaggcctgagtatgagactaaatactactatagaattggaatggtgattctctcgagaattttggtt

SEQ ID NO: 31140 - DNA, 299 bp, Glycine max
  Clone ID: 701063492H1
aaacattctcatcattcacccaacaaaatggctctgcttctgatagtacccatttcactggtaaccctctggctcggttacaccctataccagcggctacgcttcaagctccctcctggcccacggccctggccggtagtcggtaacctctacgacataaaacccgtccggttccggtgcttcgctgagtgggcgcagtcttacggccctatcatatcggtctggttcggttcgaccctaaacgtcatcgtttcaaactcggagttggccaaggaggttctgaggagcacgatcagcag

SEQ ID NO: 31141 - DNA, 292 bp, Glycine max
  unsure (1)..(292): unsure at all n locations; Clone ID: 701063493H1
ctgttctctctccccctccccgattcgttttgcccctttcgtngccctaatttnnaccatgcctcgccgtagctccggtggaagatctgcccgtcctgctcctcgtgcagcacctcgtcctgctccagttcaccatgctcctcctccagcccctgctcagagcggtggcggatctatgcttggtggcattggttcaaccatagctcaaggtatggcttttggcactggaagtgcagtggcacacagggctgtggatgctgtcatgggtcctcgtacattcaacatgaagcag

SEQ ID NO: 31142 - DNA, 300 bp, Glycine max
  unsure (1)..(300): unsure at all n locations; Clone ID: 701063494H1
gatagcaagagagaganaaagacagaggagagangcactgctgcaagtgcaactccaagaagcgcagtgccaagccaccatgtttcaacattcaacagaagcctttttccttccacttttctctttgganttggttcttctgcttaccaggcagaaggagcagcaagtgtagatgggagaggaccaagcatatgggacacctacactagacagcatactgaaaagatttgggatcatagcaccggtgacatgggagctgatttttatcatcgatacaagggtgataaaaatagcgaaaga

SEQ ID NO: 31143 - DNA, 304 bp, Glycine max
  unsure (1)..(304): unsure at all n locations; Clone ID: 701063496H1
cctaaaccctactcattctccatacctcaacgaagaggttaaagagacggcaacactttgctgtccgccttgaccgagcagagcttcgtcttggccctcgattttgccctaaagtactctcagtcacaacagacacnnnnnnnnnnnnnnnnnnnnnnaatggcaccgaagcagaccaaggctgagaagaagatcgcttacgatgcgaagtgtgcgacctaatggaggagtacggccagatcctcgttgtgaatccgataacgtgggatcgaaccagctccagaacatcgcaagggtctccgtg

SEQ ID NO: 31144 - DNA, 280 bp, Glycine max
  unsure (1)..(280): unsure at all n locations; Clone ID: 701063501H1
ttaaccccagtttcttcatctctgcatatgaataatcgtattgatttcaatctttgctgtatcgaacatctctgtacacttcattcccaaagccactcttttctctgctgtttcggcactgttttgagtaggtagatgagganaaaggattaaccaaatttgagtgggcatcaaagttggcatagcagaagtggaatcagctcttgtttcaagcaacaggaacatggatgcacaagccaaganaaaagcattgtttcgtgctaaattgaatgcccaaaag

SEQ ID NO: 31145 - DNA, 275 bp, Glycine max
  Clone ID: 701063502H1
gttttcttcagaaaatttgccatcgttgagggaagcgcgagagccttcgttgttcaagatgagagctaagtggaagaagaagcgcatgaggaggttgaagaggaagcgccgaaagatgagacaaagatctaagtaggtgcttgaacaaggagtggagatgatgtgcttttccatctgctaccagcttcatgacattttatgctgtcatggctcttatgatgatcttgaggtctagtggcgaggggagcttccatcttgactttagtttagcttta

SEQ ID NO: 31146 - DNA, 273 bp, Glycine max
  Clone ID: 701063503H1
ggaggatccaaacaacatgctaacaggagaaggcaatgctacaggatcattggattcaaaatcagtagcgtgaaaaaaccaagtaccacaaggaaatgatttttgtgaatgatcaacaaggtttccaatgaaattttcaacttttttggggcgtgagatggtatgcggtgtgattattttggtttgcattttgtttgctaatcgtttgtacccaagggagattgagtacagaatctctctgtattgattcgtttttagcaatgtatatggttg

SEQ ID NO: 31147 - DNA, 157 bp, Glycine max
  Clone ID: 701063504H1
ttgtgatgctataagcattaaatgctatgacttttctactctgctgatgtggtgcaacatttttctttaagcttttgtggttttaaaatagtttcaataatttgattatataggtgtatgatagatagaagttgttgatgtgacaccctctgctgcg

SEQ ID NO: 31148 - DNA, 272 bp, Glycine max
  Clone ID: 701063505H1
atttttcaagtaacttaaggtttcaaacctaggaagttggaagtcatggcagcaacattgatggcagcaacaacaagttctggtactcttaaagcaactcctttccttggccaaggcaagggtgccaatgccaatgctcttagggatgttgtctccatgggaactgggaagtacaccatgggcaatgatttgtggtatggaccagacagagtgaaatacttgggacccttctcagctcagaccccttcatacttgaaaggagaattccctgg

SEQ ID NO: 31149 - DNA, 271 bp, Glycine max
  unsure (1)..(271): unsure at all n locations; Clone ID: 701063506H1
atcctctatatatagttctctggcaattaaggtctcatccaaataagcacaaatgggtagccagagttacttcaaggctttgattatttgccttatagcactaattggatcaactcaagctcaattgcagcttggtttctatgccaaaagttgtccaaaggctgagcaaataattctgaagtacgttgttgagcatatccacaacgctccatcactagcagctgctctcataagattgcacttccatgattgtnttgtcaatggttgtgat

SEQ ID NO: 31150 - DNA, 270 bp, Glycine max
  unsure (1)..(270): unsure at all n locations; Clone ID: 701063508H1
gcaataagtccctccttcctctggnntataattcttgtgacccttntngctggtancattgaaagtgcaccagcaaacgtgaagcnaagccattatgctgnacccttcaataggagtgtttttccttctggttttctatttggaataggcnctgcagcttaccagatagaaggagcagcagctatagatggcagaggaccaagtatatgggacacctatactaaacagcaaccagggaagatttgggatcatagtgatggaagtctagca

SEQ ID NO: 31151 - DNA, 271 bp, Glycine max
  Clone ID: 701063509H1
tactgctgaggttatgaagtccttgaatatccctagaggtgtaagccgcgtgcttttcagaactttaaacactgacaggcaactcatgtttaagaaagaatttgacacaagctatgtgggattcaaggaggatggtgcaaaatggctggcagagaacactgacatcaaacttgtaggagtcgattacttatctgttgctgcttatgatcactccattccatctcatcttgttttcctggaaagcaaggaaatcattcttgtggaaggccta

SEQ ID NO: 31152 - DNA, 271 bp, Glycine max
  unsure (1)..(271): unsure at all n locations; Clone ID: 701063510H1
gttccgcacccattatccctcgcaagtgtangttttgctaaccgaacctcctccatctccagatccactctcaaatgctgcgctcaatctccttctccttcactagttgacaacgcccagaagtttctcgaagcttccaagaaggggaacgtcattcctctcttccgctgcatattttccgatcacctcactccggtgcttncgtaccggtgcctgnttaaggaggnngaganagatgcacnacnntancnctttgnatcggtcgagccag

SEQ ID NO: 31153 - DNA, 271 bp, Glycine max
  unsure (1)..(271): unsure at all n locations; Clone ID: 701063511H1
gcgcgtgaacaagcctcaggtaagccaaagccatggtnaagcataacaatgttatccccaacggacacttccgtaagcactggcagaactatgtgaagacctggttcaatcagccagcacggaagacaagaagacggttggctcgtcagaagaaagctgtgaagattttccccagacctacagctggacctcttagacccattgtacatggtcaaactttgaaatacaacatgaaagtgagagctggaaggggattttcccttgaagaact

SEQ ID NO: 31154 - DNA, 255 bp, Glycine max
  unsure (1)..(255): unsure at all n locations; Clone ID: 701063513H1
cacaacanaaaaagantacacagagagaagcgtcttaataaacgctcttctctgaaaaacctgatttcttctcttcttctcttctctttccgtttcgatcttcgatctctgaaaatgagagagtgcatttcaatccacatcggtcaggccgntattcaggtcggaaacgcctgctgggagctctactgcctcgaacacggcattcagcctgatgggcagatgccaagtgataagactgttggtggaggtgatgat

SEQ ID NO: 31155 - DNA, 273 bp, Glycine max
  unsure (1)..(273): unsure at all n locations; Clone ID: 701063514H1
ctttgaaacanagctagcatagcatttttcttttacaaagcaagacacccttttccttttcattccatcatctctttagctttgtccaaagaccatgtctgtggtggctgataattctgcaaacaatggaagccaccaagtggttttaaatgtaaacggtnatgcccccaagaagtgtgatgactcagccaaccaagactgtgtacctcttctgcagaagttggtagcagaggtggtggggacgtacttcttgatatttgcagggtgtgcttc

SEQ ID NO: 31156 - DNA, 274 bp, Glycine max
  unsure (1)..(274): unsure at all n locations; Clone ID: 701063515H1
caaactgcgatttctctgcagtttcttctaccctccaactctgacctttctttacgcgattttggctttcatcaacttcttantgaaatccttcctcagtcttctcccattttccagagttcttaaaaattgattnttccttacaagtctttctgagcattccgtttccttcctccagggaaaagttagcgtgtctttaggtcacaggattttgagagatttactttttaatctgcctctgaatcaattctgcaagaagatatataatgtttgg

SEQ ID NO: 31157 - DNA, 277 bp, Glycine max
  unsure (1)..(277): unsure at all n locations; Clone ID: 701063517H1
gtttagtggtaaaagtgcgattcgttccatggacccctaaatagttaagggatcccccgtttgattcatattccgatcaaaaactttatttcttacttaaagggaatcctttataccctcaatgaatgatttgcggtataatatacattatcgtaatttgtatacaagangaatcaattctaaattgacaacttgagttctaaaattatganacataagtntttggaattggatctataatccgaatttttttgagtatgacgaaaggntctatgga

SEQ ID NO: 31158 - DNA, 274 bp, Glycine max
  unsure (1)..(274): unsure at all n locations; Clone ID: 701063518H1
aganatcatcatgagttcaaaaaatagtatagataggaagccgaagcactatgttctggtgcatggggcttgctatggagcttggctttggtataagctcaagccacgcttggaatctgcagggcacaaggtcacagtgctcgaccttgcagcttctggaaccaacatgaagaaaattgaagatgttgacactttctcacagtacactgagcctttgttgcagctaatggccacaattcccccaaataagaaggnagttctagttggtcacagt

SEQ ID NO: 31159 - DNA, 273 bp, Glycine max
  unsure (1)..(273): unsure at all n locations; Clone ID: 701063519H1
gactacgggaacttggccagctggagcaagatcttgttttcggagatgcaacaacaaaagatgtgatcaaattttttaccatgaaagaagatataacccatgaaaataagttgcgcctgctaatgattcttgcatctgtttatcctgagaaatttgagggagaaaagggtcagaatttgatgaggctagcaaaattgacagaagaggatatgaacattgtgcccaatttcagaatgcttggaggncaaccagtaaccaaaaaaagtttgaccg

SEQ ID NO: 31160 - DNA, 274 bp, Glycine max
  unsure (1)..(274): unsure at all n locations; Clone ID: 701063520H1
cagagagtggtttcagtgagtgatcggtgttcacttgatccttcataagtcnnnnnnnnnnnnnnnnnnnnnnnnnnntgattnaagaagatgccgatcagaaacatcgccatcggaaggcctgangaggntactcaccccgacacgttgaaggcggggttggctnagttcatctccancttgatcttcgtgttcgccggttcaggttccggcatcgcctacaacaagctcaccgacaacggcgncgcnactcccgncggcctcatctcngctt

SEQ ID NO: 31161 - DNA, 217 bp, Glycine max
  unsure (1)..(217): unsure at all n locations; Clone ID: 701063522H1
ttgaattcgaaaaatcgtagcgtacgntggttgcgattgaaacggtacgatgggaagaggaaaattcaagagcaagcccaccggtcgccgccagttctccaccccggaagatatgcttgctggaacctctaaccgtcctcgaacttttagacagnaagaagctgagcatgaagaggagcctgaggaagtatctggggatgaatctggagaagaatca

SEQ ID NO: 31162 - DNA, 269 bp, Glycine max
  Clone ID: 701063523H1
gtttgttgtgagctataagctagtttatcgtgaggagaatatgaagttgtttgttttctttgttgctgcagtagttttggtagcatggccatgccatggcgcaggctaccaaaggttccctctccgaatgaaaactggctatggtgagcgttcttcggaggtaaaatgcgcaagttttaggcttgctgtggaagcacacaacatccgagcctttaaaaccattcctgaagagtgcgttgaaccaacaaaggactacattaatggcgaac

SEQ ID NO: 31163 - DNA, 271 bp, Glycine max
  unsure (1)..(271): unsure at all n locations; Clone ID: 701063524H1
cttttcttttcttcaaatcaaggagctcagctatgactaccanagaaatccttcaaaagatgnaggtaaaagttggtttgggttcatcagaccctgattcagggaaaggaaagagcaagatgtcaaagaacataactcatggctttcatttggtgaaaggnaaatcntatcntgncatggnggattacgttgtggctcaatnnnngcaantaganaacaatganttgggnttgtntgcaatatntgncggccatgcgggtcacnncgtacc

SEQ ID NO: 31164 - DNA, 269 bp, Glycine max
  unsure (1)..(269): unsure at all n locations; Clone ID: 701063525H1
gtttgttgttgtaactcgttcttcttcttttgttgttctgtgtttgtgtntgtatnntctctcacctgnaaatgtcttgctgcggtggtaactgtggncgcggaagctcctgcaagtgcggcaacggctgcggaggctgcaagatgtacccagacttgagcnacactgagtcaaccaccaccgagaccttggtcatgggagtggcacctgttaaggctcaatttgagggtgctgaaatgggtgtncccgctgagaacgatggctgcnaa

SEQ ID NO: 31165 - DNA, 226 bp, Glycine max
  unsure (1)..(226): unsure at all n locations; Clone ID: 701063526H1
aagaatgctaaaggagaggaagggttggttataccggtntgtntgccttctgaagncatggngaggtttcagaaggngttngactgtgtgctnaancaccacatcgtnnaacctanngccatngcncnaaactctaggttcanngnatcttcctngtagatccagtactnttcgactgtacttcgtgcnaatgaaggaatnaataattgagnatttgatncnnctc

SEQ ID NO: 31166 - DNA, 184 bp, Glycine max
  unsure (1)..(184): unsure at all n locations; Clone ID: 701063527H1
ctcntcttctcttgcggctaggnttttancgcanttcttctagatttaangnagcngggtgaggnaaaggttcacatcagnantgnggtccattggccatgtcgactctgggaantccactaccactggtcacctgatttacaancctggaggcatganaagcgtgnnattgngangttngnna

SEQ ID NO: 31167 - DNA, 272 bp, Glycine max
  unsure (1)..(272): unsure at all n locations; Clone ID: 701063529H1
ccttgtgtgncngagagtattcttggattgattnccaactaaggacaatctaaggaataggaacattatggatgcttcacaggatgtgttttgcgctttttgcggacaatttgaggaaacaaccccnattgaaccattttggcagcatttacataaanttttgaaaaaagaagcagaaatgtgggtggtagtttggtgcacagttatatggtacgtttggtgggtaagaaataaatgtggtttcacggaatctgtttttgacaggnagctgg

SEQ ID NO: 31168 - DNA, 274 bp, Glycine max
  unsure (1)..(274): unsure at all n locations; Clone ID: 701063530H1
gttcaaagatgaagatgatccacgttcttttcctctttgctcttgtctcgttcacttcccatgcttctgtcaatgattnctcgngtagcagacctaaaaggtccagatagcccttcaggctatcagtgcaagccacctaacacagtcacagtggatgactttgtgttctctggctttgtagctgganacaccacaaacactttcaatgctgcattaacctccgcatttgttactgattttccaggtgtgaatggtcttggtgtatctgtggcag

SEQ ID NO: 31169 - DNA, 277 bp, Glycine max
  unsure (1)..(277): unsure at all n locations; Clone ID: 701063531H1
tgaatctgatgcaggcggttcgctacgacgccnacgggggangtcctgcnggcctcaagcacgttnnagttgccgttcccnngtccaaaggcaaatgaggttttaatcaaactggaagcagntagcattaaccctanngattggaagattcagaagggtcttctccgtcctttatnctctccccagaacctttncccacataccttgcactgatgtggctggagaaatagttgagatcggaatcaagtcaaagatttcaaagttggcgaccaagtcc

SEQ ID NO: 31170 - DNA, 278 bp, Glycine max
  Clone ID: 701063533H1
gacggcagcacgcgcaaaaatggtgaagtttctgaaaccaaacaaagccgtcatcgtccttcagggacgctacgccggcaaaaaagccgtgatagtgcgaaccttcgatgaaggcacgcgcgaggcccctacgggcactgcttggtggcagggataaagaagtaccctgcgaaggtgatcaagaaggattcggccaagaagacggccaagaagtcgcgtgtgaaggcgttcgtgaagctcgtgaactaccagcacctcatgcccacgcgctacacgct

SEQ ID NO: 31171 - DNA, 277 bp, Glycine max
  unsure (1)..(277): unsure at all n locations; Clone ID: 701063534H1
ttcacttgagacagtnatcttnatctacggaagagaagaatanaacaatggatatcaggttgancggatttgggactctccattggtntcaacactctncaccgaatcatggatctgacagaggacgcagagaagaacttgancgctccgacgcggacatacgtgcgcgacgcgnaggnaatggctgcgactcctgcggacntgaagnagtanccnaactactacgtgttcgggatcgacatgccaggcctganatccggggacattaaggtgcagg

SEQ ID NO: 31172 - DNA, 75 bp, Glycine max
  unsure (1)..(75): unsure at all n locations; Clone ID: 701063535H1
ctcnttcangaagcatctnagtgnntactagcaatgtannanattcatatatagtcantaccagcttcgaggatt

SEQ ID NO: 31173 - DNA, 273 bp, Glycine max
  unsure (1)..(273): unsure at all n locations; Clone ID: 701063537H1
attgttcaagtaacttaaggtttcaaacctaggaagttngaagtcatgngcagcaacattgntgggcgcaanaacaagttctggtactcttaaagcaactcctttccttggccaaggcaagggtgccaatgccaatgctcttaggnatgttgtctccatgggaactgggaagtacaccatgggcaatgatttgtggtatggaccanacagagtgaaatacttgggacccttctcagctcagaccccttcatacttgaaaggagaattccctgg

SEQ ID NO: 31174 - DNA, 270 bp, Glycine max
  unsure (1)..(270): unsure at all n locations; Clone ID: 701063538H1
cttttaatttcctagatctcnccaaacaaantgtagcataagtcccatggcnagngagactagngttgtttatcnntatcccagcaaatcncaagnntggggtgagnattttnatcanaanaaacntgnaatancaacactagctgctaatggncagaaggaggagagtaatggagcacntaanganacatntcctgcgtttcccgggtggtatgctgatgtttcctngccaggagaagcacacacntataanatancaaagnttctgtt

SEQ ID NO: 31175 - DNA, 269 bp, Glycine max
  Clone ID: 701063539H1
gttcaaacaaatcaaagccatggccacctccaacttctctattgttctctccgtctccctagccttctttttggtgctacttaccaaggcacactcgaccgataccgtttctttcaccttcaacaagttcaacccagtccaaccaaacattatgctccaaaaagatgctagtatttcatcctctggggtgttacaactcaccaaagttggcagcaacggcgtgcccacctcgggatctctcggtcgtgccctttacgctgccccaatcc

SEQ ID NO: 31176 - DNA, 271 bp, Glycine max
  unsure (1)..(271): unsure at all n locations; Clone ID: 701063540H1
gttctttctctctcaaaggaangaaaaggaaagaaaagaanagaaaaagaagagagtgtaggtaaacagaagcacacactacacagttaccaaaatcaggttcaaacgcacagatctgggagaagnnnnnnnnnnnnnnnnnnnnnnnggacangatcagaaccagagatcgctgatctacgcgttcgtgtctcgcggcacggtgattctcgccgagtacactgaattcagtggcaacttcancacaatcgcgttccagtgcctccagaag

SEQ ID NO: 31177 - DNA, 271 bp, Glycine max
  unsure (1)..(271): unsure at all n locations; Clone ID: 701063541H1
ctgttctctgtcactgctggcgtctctcgtaaccatgcctaagcaaatccacgagattaaggatttccttctcactgctagaaggaangacgcaaggtcggtgaagatcaagaggagcagagatgtggttaagttcnaggtcagatgctcgaagtacctctanacactttgtgtgtttgacccagagaaagctgatnaattnaagcaatctcttcctccaggtttgagtgttcaagacctgtaaaggtacagggcgaganaccaagangaa

SEQ ID NO: 31178 - DNA, 267 bp, Glycine max
  unsure (1)..(267): unsure at all n locations; Clone ID: 701063542H1
caaaactagctcggttggnccaattcgaagcgaacttagacggagagagtganaganantgatgttggacgganccgaagacgaagngcagtttctcgccgccggaatcgccggccttcngcagaattccttcnacatgcancgtgcatcggnctcgaacaatctcagggntgctttgangtnttcggctcagatgctctccgagnncnggacttccaagctttctccacacaaataaannnnngaaanatncaagaatnncnccaa

SEQ ID NO: 31179 - DNA, 271 bp, Glycine max
  unsure (1)..(271): unsure at all n locations; Clone ID: 701063543H1
gaaacctgaaagagatnacaanaagaagaatatgctgctttctacaagagtcttaccactgaccattaaggaggtatctcatgagtggtcattggtgaacaagcagaagcctatttggatgaggaaacctgaagagatcanaaaagaagaatatgctgctttctacaagagtcttaccaatgattgggangagcatttgnctgttaagcacttttctgttgagggtcagctggagtttnnngctgtcctctttatccccnagagggcacct

SEQ ID NO: 31180 - DNA, 274 bp, Glycine max
  Clone ID: 701063549H1
ggaagagagagggagattctttgtttgctaccttctctcggaaaaatggttacgttcaggtttcaccagtaccaggtggttgggagggctcttcccacggaagcagatcagcaccccaagatctaccgaatgaagctctgggccaccaacgaggttcgcgccaagtccaagttctggtattttctgaggaaactgaaaaaggtgaagaagagcaatggccaagtgcttgccatcaacgagatttttgagaagaacccaaccaaaattaagaata

SEQ ID NO: 31181 - DNA, 134 bp, Glycine max
  Clone ID: 701063550H1
tgagagtcccttctcttattttgcgcctggtagagagaatgtggttataggtagagatgctgtgatttgtttatgttggaatttgtactgccgtgtcaggtatacttgaaatatagttcgtgctttcaactagt

SEQ ID NO: 31182 - DNA, 271 bp, Glycine max
  Clone ID: 701063551H1
ctacaaaacagtctccatttgacacagtcctagtggtgtactacttattatggccacaccagcatccatcactaatgtcactgtggagttccttcaattccccgcactggtgacacctcctggctctaccaaatcctatttccttggcggcgcaggggtgagagggttgaatattcaagaagaatttgtgaagttcacgggaataggtgtttatttggaagacaaggccgtgtcatcactcgctgccaaatggaagggcaagagtgcagct

SEQ ID NO: 31183 - DNA, 269 bp, Glycine max
  Clone ID: 701063552H1
ggaagagagagggagattctttgtttgctaccttctctcggaaaaatggttacgttcaggtttcaccagtaccaggtggttgggagggctcttcccacggaagcagatcagcaccccaagatctaccgaatgaagctctgggccaccaacgcggttcgcgccaagtccaagttctggtattttctgaggaaactgaaaaaggtgaagaagagcaatggccaagtgcttgccatcaacgagatttttgagaagaacccaaccaaaattaa

SEQ ID NO: 31184 - DNA, 269 bp, Glycine max
  Clone ID: 701063553H1
tgcacctttctctttctccgatggctaatccctcactcttgttcttcagtctcctcctattatccgccaccgtagccgccgccgaacggatcgacgatgaagacgaccttctgatccgtcaagtggtgccggatgcggaggaccaccacctgctcaacgcggagcaccacttctccgccttcaagacaaagttcggcaagacctacgccacgcaggaggagcacgaccaccgcttccgtatcttcaagaacaacttgctccgcgccaag

SEQ ID NO: 31185 - DNA, 248 bp, Glycine max
  unsure (1)..(248): unsure at all n locations; Clone ID: 701063554H1
gcgccaccatcaagttctgaagggtggatctagtataaggnagacactgcagggcagtttttcagtcgcaggatactatatatcataatgttgtaaaatttatattaatgaaaatanagagaggacgatgagggctctagtacttaagcgagtcccttagttgtctccacttgttgttgcatgtaatactatatgtagttctctgctactttacttttttgacaatnaanaatatttacacgtccctt

SEQ ID NO: 31186 - DNA, 267 bp, Glycine max
  unsure (1)..(267): unsure at all n locations; Clone ID: 701063555H1
gagagtagaaaagatggcgcgnttgatcacagtggtgtggtgcgcggtggcggtgctactgtgcgccgcggcgggcgcgtcgtgggtggaggaggcggcgaacccgatacgaatggtggcgggggtggaggcggaggtggttcgnctgatagggcagtgccggcgcgcgctgaagtttgctaggttcatgagcaggttcgggaagagctaccgaagcgaggaagagatganggagaggtacgagatattctcgcaaaacctcaggtt

SEQ ID NO: 31187 - DNA, 269 bp, Glycine max
  unsure (1)..(269): unsure at all n locations; Clone ID: 701063556H1
ctataagctagtttatcgtgaggagaatatgaagttgtttgtnttctttgttgctgcagtagttttggtagcatggccatgccatggcgcaggctaccaaaggttccctctccgaatgaaaactggctatggtgagcgttcttcggaggtaaaatgcgcaagttttaggcttgctgtggaagcacacaacatccgagtccttaaaaccattcctgaagagtgcgttgaaccaacaaaggactacattaatggcgaacaatttagatcag

SEQ ID NO: 31188 - DNA, 259 bp, Glycine max
  unsure (1)..(259): unsure at all n locations; Clone ID: 701063557H1
ctttcttcgattttcgccttttcaattcactctctgatgatcaccgattccntttttcgttttcatttttcctcccaacattctattacctctttttttgcatttcattttcgatcatccgcagatcgcttgcgtttttgttctacgacgctgatcgtatctttatnttntattttattttntnnttccttctgtnacttcggtttttnttttagaaanatatatattncntatncantnatttngtnnaacnccngca

SEQ ID NO: 31189 - DNA, 268 bp, Glycine max
  unsure (1)..(268): unsure at all n locations; Clone ID: 701063558H1
gccaggtttaaagttctcaaccgactgaatggaaccattcctaagagttttgagttcctcaganacctgcaggtattaaatcttggaactaattctttgactggtgatatgcctgtaactcttggaactctctcaaatttagtaatgttagacctttcatctaatttgttagaaggatctataaaagagtcaaattttgtaaaacttttgaaattaaaggaactacgtttgtcttggacaaacttgttcctcagtgtcaactcaggat

SEQ ID NO: 31190 - DNA, 268 bp, Glycine max
  unsure (1)..(268): unsure at all n locations; Clone ID: 701063559H1
gcttganctctgcgagatcttgagtcgccgatttgaaaagatgagtaagcttcagagtgatgctttgcgtgaagccatctcaggaatcatggccgattccaaggagaagaatcgcaaatttgtggagaccatcgaactccaaatcggtttgaagaactacgatccacagaaggacaagcgtttcagtggctccgtcaagttgccccacatccctcgccccaagatgaaaatttgcatgcntggtgatgctcagcatgttgaagaggca

SEQ ID NO: 31191 - DNA, 271 bp, Glycine max
  unsure (1)..(271): unsure at all n locations; Clone ID: 701063560H1
ctctctctctctcttcccaaccttctcttccctccatttccctttcctctttcaaaaaagcatatatctatataaacttgtgatattgggagttgaaattaaacttgagaaaatggacaaccagcgtagccctcttctaagctgggcttactacttccagggaaagtcaatggaggagctgaggcagtccctgatatacacaactctggagctagaacaaacaagggatgcagtgnaagangagctaaaaaagagggatgaacaactactc

SEQ ID NO: 31192 - DNA, 273 bp, Glycine max
  unsure (1)..(273): unsure at all n locations; Clone ID: 701063565H1
tttatccctccattgctttgcactgccgccgataacaattttctgtatcgtgtatttttttnttctttgttcacagctctgcgagatcttcattcgccgattttaaaagatgagtaagcttcagagtnnngntttgngtgaagccatttcaggaatcatggccgnttccaaggngangaatcgcaaatttgtggagaccatngaactccaaatcgggttgaaaaactacgatccacagaaggacaagcgtttcagtggctctgtcaagctgcc

SEQ ID NO: 31193 - DNA, 270 bp, Glycine max
  unsure (1)..(270): unsure at all n locations; Clone ID: 701063566H1
gnnacagtgatttagaatancttgtgaatagtttctcancgcttgaagcgnaggnccttggacaatatactntngcaaaggcaaacttnatcagntctgcngccatgaattatctgctgcattctggcattcagtggggacgagcanctgnngtnaanggtgtncgggatgcagcagtagagttcctgcacacattggtagctgtgccatgcagaggtttttgctggtgctaagcctctcttggataanncgcttggcattcttgtngna

SEQ ID NO: 31194 - DNA, 268 bp, Glycine max
  unsure (1)..(268): unsure at all n locations; Clone ID: 701063567H1
gnagcccatggctgcctgtctgaactgtactctggtgggagggtgaaagagttacntgcacaaggtgtgtcacaaagtcgctatcatgagaagactccagaacaggaaaggttggaaagaagacggcaaatgccttatcatatgcacatcaatcttgagctcctggagacagtacatcttgtatctgctatgctgctggaagttcctaatatggcagccaatgttcatgatgcaaaacgcaaactcatatctaagactttccgtcgct

SEQ ID NO: 31195 - DNA, 268 bp, Glycine max
  unsure (1)..(268): unsure at all n locations; Clone ID: 701063568H1
anaaagtatagagtgaaagaatgggtgagaaaagcaagattttgatnataggaggnacngggtanatnggnanacatatagtggaagcaanngnaaaggctggaaatcccacttttnntttggtgagggaatccagactctctnaacgtaanaaggcacaactcatccacaattttgaggctttgggngttaatttggtccgcggggatctgtacgatcatganaagttggtgaaagctancaagcaagtagatgtcgtcatatccac

SEQ ID NO: 31196 - DNA, 266 bp, Glycine max
  unsure (1)..(266): unsure at all n locations; Clone ID: 701063569H1
ctatgncancgaggcagagagagaaactagagcgagaaagagagagagcgccacgcaccgttcattccttcgtcctcgccgtttctaaccgtcgcagttttccggcgaagtttctccgatttgtttaaccgaaatggcggatctgtccgttctcggttggattctgtgctccgctctgagcctcttcgcgctctacagcttggccttcggcggaggagccgtaaccgcgcttcgccggagaagaggaatgagttatcggagaccgt

SEQ ID NO: 31197 - DNA, 266 bp, Glycine max
  unsure (1)..(266): unsure at all n locations; Clone ID: 701063570H1
gttcgtcaccatgactttcaagcgcaggaatggaggtcgcaacaaacacggccgcggccacgtcaagttcattcgatgctccaactgcggcaaatgctgccctaaggacaaggctatcaagaggtttctggtgnggaacattgttgaacaggctgcagtcaganatgtgcaggangcttgtgtctacgaacaatacacgcttccgaagctgtatgtgaagatgcagtattgtgtttcctgtgctatccactctcatgttgtgaggg

SEQ ID NO: 31198 - DNA, 264 bp, Glycine max
  unsure (1)..(264): unsure at all n locations; Clone ID: 701063572H1
agaaaagaacacacattactagaaatttagaaaacatggcagcggtggccggagcatcctcgtccgtgattaaggtggctgcgctttcgggttctttaaggnnaggttcttacaacagaggnctcattcgttctgctattgagctaagcaaaggtagagttgaaggccttcaaatcgagtangttgatatnncgcnctngcccctnctnaacaccgatctcgnggtanatgggacctanccgnccgaagttgaagcctttcgcc

SEQ ID NO: 31199 - DNA, 67 bp, Glycine max
  unsure (1)..(67): unsure at all n locations; Clone ID: 701063573H1
caagggaggngnacgagcagntgataaacgtgnagancaagaactcttcatattttntcnnctggat

SEQ ID NO: 31200 - DNA, 119 bp, Glycine max
  unsure (1)..(119): unsure at all n locations; Clone ID: 701063574H1
gtgctgcnatggcttcaagtcaggaggnggngaccctttncggagctactggaagccnatgtgtgtgcaggggttcanattgcncncaagttnaagggagcgtcantacnaanangtcg

SEQ ID NO: 31201 - DNA, 265 bp, Glycine max
  unsure (1)..(265): unsure at all n locations; Clone ID: 701063576H1
cgagantgaagaaatggcgcaagacttggcattggatttngaggancttcgccgcctccacagcatctccaaaanacntcnaaccctctctcttctctcctccgaaatncgtaanctcgaaaagttatcgtcagaggaagcttctgcgcagattccggcgccgatttcgaccggnnctaaagtggcgccttnaccngggctgaagtatgcggnactcgcgtcgttcagntgggaccaggatgtgacnanctggcatatatgtgnt

SEQ ID NO: 31202 - DNA, 268 bp, Glycine max
  unsure (1)..(268): unsure at all n locations; Clone ID: 701063577H1
aattntcatttcttcatcgttcgattcncctcctcctaaagatgcagatcttcgtgaaaactttgaccggtaagaccatcacccttgangtggagtcctcngacaccatcgataacgtgaaagctaagattcaagacaaggaagggatcccacctgaccagcagagacttatctttgcgggtaaacagcttgaggatggtcgaacccttgccgactacaacatccanaaggaatccactctccacctcgtgcttcgcctcaggggtgg

SEQ ID NO: 31203 - DNA, 204 bp, Glycine max
  unsure (1)..(204): unsure at all n locations; Clone ID: 701063578H1
ctttggaaganaatgttgacatttatggntgacaccaaatgactgtntatggtgctgttcactactattttttagntgtatttntnattgacgtgcaactgcagttctacaatccgggacaaaattattcctcatgccgtgtcatggttcacgggggaggctgcacagagtgattttgaggatatagatgaagatgattatgaa

SEQ ID NO: 31204 - DNA, 93 bp, Glycine max
  unsure (1)..(93): unsure at all n locations; Clone ID: 701063580H1
ctacatacttcagtttgccatttctttgggccagctatacggaactgcngtntatnatataacagcaatcgcggaaggngataatntttctac

SEQ ID NO: 31205 - DNA, 267 bp, Glycine max
  unsure (1)..(267): unsure at all n locations; Clone ID: 701063583H1
tcgagatattattcaaaaccatctgctgcaggntctttgcntggttgnnatggaaaaaccagtnactcctnaggnntgancacatacnggatganatagtnaangttcttgaatcagtgcnccctatgaatgntgatgaggttgtcctgggacaatatgaaggctataaagatgacccaaccgnncctgatgagtctaacaccccaacatttgcanctgtngttctgcgaatacncnatganagatgggnaggtgntccttncatac

SEQ ID NO: 31206 - DNA, 265 bp, Glycine max
  unsure (1)..(265): unsure at all n locations; Clone ID: 701063586H1
gtgaatttactgaagtcanncatgttcggggtattctttccatnggaagnnatgatganccanncagngcntcatcttcnnttncaatactacttggagatgcccctcancttgatggcnagnatgcannatntggaaaagttacnaaaggngatgaaacgtngacaaagcncgancnactacctacccgcnaagagggtatanntgtantgccgatggaacgcatcactatcctgtcgtcntattactatgatacagagacagg

SEQ ID NO: 31207 - DNA, 265 bp, Glycine max
  unsure (1)..(265): unsure at all n locations; Clone ID: 701063590H1
ctctcccttagtcaaagggattcatcgtncttcttcccaggttatttagaaaagcaaaatggtgaagatttgctgcattggtgctggatatgtggggggtcctactatggcagtcattgcacttaagtgcccatccattgaagtcgctgtngttgatatctctaaatcccgcattgcagcctggaacagcgaccagcttcctatctatgaacctggccttgatggtgttgtgaagcaatgccgtggcaagancctcttcttcagc

SEQ ID NO: 31208 - DNA, 208 bp, Glycine max
  unsure (1)..(208): unsure at all n locations; Clone ID: 701063591H1
gttgtaaatgacatcagattatatatgtgatttttgcactgtacagncngtgaacatttgcaactaacaatttacctatanccactatatgcgtaataagcaacctgatcagaacatgcttcaactcatactttcgatctgggtactaaccctaacccgcttcgaaccgtggcttcctcaggctcgnagaacctctctcgaagaaaac

SEQ ID NO: 31209 - DNA, 239 bp, Glycine max
  unsure (1)..(239): unsure at all n locations; Clone ID: 701063592H1
gagaaagcgaaacgcatagaatcgaaagacngggaaaaacnaaagaaaagttagggttagggattttnagagatggcatcgactaagaagatcaccctgaagagttcggacggtgaggccttcgaggtggaggaggcggtggcgctggagtcgcagacgatncaagcacatgatcgaggacgactgcgccgacagtggaatccctctccccaatgtcaccagcaagattctggcgaagg

SEQ ID NO: 31210 - DNA, 269 bp, Glycine max
  unsure (1)..(269): unsure at all n locations; Clone ID: 701063593H1
caganacagaagcacagcaccacgaaccaatcccagcctttcggttcccccacaaataaaatanttaccacaacccatttgttgcttgctgcgagcgaatccctctctctctttctctttctntctcatccagatcttgcaaaaaaaaaaaaacacaatggcagcgagngctcccattccacgggaananttggngnanntggngaantgggggnncaggcngagcgntangaggnganggtggnttncatggagaaggtcnccgcctc

SEQ ID NO: 31211 - DNA, 269 bp, Glycine max
  unsure (1)..(269): unsure at all n locations; Clone ID: 701063594H1
cgcattctcaatacccttttgatttgtgaaaggnaagcaaacatggttgatcaggtccaacaccctacaatcatggacaaggttgctggtcagctccatctccgttctggtcttncatctggtattagangttatgatggagcctaccgccacccagctatgtaccaaagaccctcttttgggaattactcgaatgctgcattgcagtttcctgtgatgcccacatgcaaagctaccatggatttgtctgctactgcaacatctgcctc

SEQ ID NO: 31212 - DNA, 240 bp, Glycine max
  unsure (1)..(240): unsure at all n locations; Clone ID: 701063595H1
gagaaagcgaaacgcatagaatcgaaagangggaaaaacnnaagnatcgttagggttagggattttnagagatggcatcgactaagaagatcaccctgaagagttcggacggtgaggccttcgaggtggaggaggcggtngcgctggagtcgcagacgatcaagcacatgatcgaggacgactgcgccgacagtggaatccctctccccaatgtcaccagcaagattctggcgaaggtta

SEQ ID NO: 31213 - DNA, 70 bp, Glycine max
  unsure (1)..(70): unsure at all n locations; Clone ID: 701063596H1
ttataattcttgtgacccttttngctggtagcattgaaagnggaccagcanacgtgaanncangacatna

SEQ ID NO: 31214 - DNA, 191 bp, Glycine max
  Clone ID: 701063601H1
gctagagaatgatgatgaagtctgctatgtgtgcagtggtggttgtagcacttcttctctggcggaggtggggcccatggctgaggctgtgacatgcaccccaacagagttgagtccgtgtcttccagcaatcacttccggtgctaaaccttccaatgcttgttgcacgaagctgaagcagcaaaaaccat

SEQ ID NO: 31215 - DNA, 190 bp, Glycine max
  Clone ID: 701063602H1
tgatgagctgtcagctgggcaattgcgcaacttggagaagatttttggtggagatgtggagtttgtgatcgaactgctctcatccttgatatatttaatcaacgagcagcaacacatgaagcgtctttacaggtttcattagcacaaatggaataccaactacctcgtctaactaaaatgtggactcatc

SEQ ID NO: 31216 - DNA, 182 bp, Glycine max
  Clone ID: 701063603H1
aaattacatagcctcagtaatctgagagagaaacaaaaacaatgaaggttccattgccaagttccactcccttcccctatgttttttccttctcttggccttcaacacaaaacccctcctagcagcagaaccagagccagtggttgataagcaagggaaccctttggagccaggagtagggt

SEQ ID NO: 31217 - DNA, 191 bp, Glycine max
  unsure (1)..(191): unsure at all n locations; Clone ID: 701063604H1
agacgaagaagtgaagagaagagaagagaagggatttggatctgaaaagagaagatgggggaggaatggaagcnaacaagaacaagttcatagaggattggggcactgccagagagaatctggagttcaatttccgttggactcgccgcaaccttgctcttgttggcatcttcggcatcgctattcccgtc

SEQ ID NO: 31218 - DNA, 191 bp, Glycine max
  Clone ID: 701063605H1
gtaaagggtggcactttgatttcttacgaaggaagggttcagctcctggaaattgcaaagtccccgatgaacatgtcaatgagttcaagtcaatagagaagttcaaaattttcaacacaaataatttgtgggtgaacttaaacgcagttaaaaggcttgttgaagctgatgctcttaagatggaaattatt

SEQ ID NO: 31219 - DNA, 170 bp, Glycine max
  Clone ID: 701063607H1
gcggtgagagaatggaagcctcagagcagaacaattcaaggtagtgttgattgattctttgcagtcatgggagttccacgtcaaccaagcctataatcagaatactcctgttgttgttcacttcactgcttcatggtgcatgccatcggtggctatgactcctgtttttg

SEQ ID NO: 31220 - DNA, 192 bp, Glycine max
  unsure (1)..(192): unsure at all n locations; Clone ID: 701063608H1
tgttctctgtcactgctgcgtctctcgtnaccatgcctaagcaaatccacgagattaggantnccttctgcactgctagaaggaaggacgcaaggtcggtnaagatcaagaggagcagagatgtggtnaagttcaaggtcagatgctcgaagtacctctacacactttgtgtgtttgacccagagaaagctg

SEQ ID NO: 31221 - DNA, 189 bp, Glycine max
  Clone ID: 701063609H1
aaccatttgattaaaagttggtgcttttgtttccttctctcttcacagtctcaaggacgaatcacgccctcactctcagctcctccgtccaatcgccgccgctgaccgccattgctgtctgccaccgtcgcgtgtggtcccaccactccttctttctcagaagaggagggaagatatgggtgccagcga

SEQ ID NO: 31222 - DNA, 187 bp, Glycine max
  Clone ID: 701063610H1
cttttctcagctgctgttcctgcgcgtgaacaagcctcaggtaagccaaagccatgttaagcataacaatgttatccccaacggacacttccgtaagcactggcagaactatgtgaagacctggttcaatcagccagcacggaagacaagaagacggttggctcgtcagaagaaagctgtgaagatt

SEQ ID NO: 31223 - DNA, 186 bp, Glycine max
  Clone ID: 701063611H1
cagagacttatctttgcgggtaaacaacttgaggatggtcgcacccttgccgatacaacatccaaaaggaatcaaccctccatctcgtgcttcgcctcaggggtggcatgcaaatctttgtcaagactttgaccgggaagaccatcacccttgaggtggaatcctcggacaccattgataatgtta

SEQ ID NO: 31224 - DNA, 187 bp, Glycine max
  Clone ID: 701063612H1
ccggctttagcccaagtggcagaaaggcaaggtaaatatttagcattcttattacacaaaataggtaaagccaatggaggccgtgcaaacagtgcaaaagatgtagactttggggatcagtttgtttacaagcacatgggaagcatggcatctatagggagttacaaagctctagtggacctcagac

SEQ ID NO: 31225 - DNA, 186 bp, Glycine max
  Clone ID: 701063613H1
agaaagactaattcgaaatgtaattttacattccaggttaggtggaagcaattgctcaagttctttaagatctctgggcctttagcctcacttttctcaacagaaattatctggccgcacttgaagtccgaatcagaaaagtaggtttcatcctacagcacccatttagattttaggcttaccaac

SEQ ID NO: 31226 - DNA, 142 bp, Glycine max
  unsure (1)..(142): unsure at all n locations; Clone ID: 701063614H1
ctttctttttcttcccatttcacccctcgtctttccttgtttccggtgagggcnaccacaacatatgttaaacaaggaacaacctccaaaacataacatcctacgccaaacaaaactttgacctccttcagatctataccct

SEQ ID NO: 31227 - DNA, 189 bp, Glycine max
  unsure (1)..(189): unsure at all n locations; Clone ID: 701063615H1
gcaaataactattaccaacaaactctactttcggcaaccttcaatttttttganntcatggatttcagagtgatgggtttggagcctccgttgttccacacgctgncaacacatgatggacatgtcagaggacgctgcaggggaaaacaagacgtacagtgctccgacacggtcatacgttcgagacgc

SEQ ID NO: 31228 - DNA, 190 bp, Glycine max
  unsure (1)..(190): unsure at all n locations; Clone ID: 701063616H1
attttttttctatcaattcacacgacaaaatttanccagagttcaaaacaccaaccggtaaagtaaagaagggaagatgtcactgataccaagtttcttcggtggtcgaaggagcaatgttttcgaccctttctcgctcgacgtatgggaccccttcaaggatttgtctttcccttctgctgaagattca

SEQ ID NO: 31229 - DNA, 189 bp, Glycine max
  Clone ID: 701063618H1
atgatattgaagccattgatcctgatatgtaactttgactccaagaatgtgcttgtgaatgaccgagtaaaatgaacatccaagagtcaaagttacatatcatgatattgaagccattgatcctgattatttcaaaaatttgaaatggatgcttgagaatgatatcagtgatgttctggatcttacttt

SEQ ID NO: 31230 - DNA, 189 bp, Glycine max
  unsure (1)..(189): unsure at all n locations; Clone ID: 701063619H1
ttcatacctgctgctcttcggcaggtggaggatttttcacctcaatggtgggatctgtgaaatcttcaacatggtttcgngattattggttgagccaacataaggaggaagaatttgaagttgccaatgactctagtaatgatgatattgagaatatgctctcagaaacttttgatctaggcatggaag

SEQ ID NO: 31231 - DNA, 189 bp, Glycine max
  unsure (1)..(189): unsure at all n locations; Clone ID: 701063622H1
aaaaaaaaaaactgtgaacggaaattagggctcgtaagtttcgatttcggttgcagttggggtggtagcgttgcaattgcaacaattcttgaagaggaaaaaaaaaagattcggaatactttagncatttgcatccnccaattttganggaatatatgtaatctatgatttcgtnctttnaattctncg

SEQ ID NO: 31232 - DNA, 186 bp, Glycine max
  Clone ID: 701063625H1
ggaacacccccccaaaacaagccccaattatggctctgaatctttgtatctcactaactgtaaatgggtttcatctcctgcttccttagatagtgcatcttctttgagatcttcacttggttcttgttttggtaacataaacattgctagtgtgagtttaagcactagtagaagtttgagtttgag

SEQ ID NO: 31233 - DNA, 151 bp, Glycine max
  Clone ID: 701063626H1
caccatgtcacttgctgggaaatcaccactgaaatcggggttcatgcaaccgctacaaagtggttcaacctcttcgcaacacaactccatcatgttcaaaacctaactgatagagtgcatggaaccaagctgcatcaaggtgaagactggc

SEQ ID NO: 31234 - DNA, 184 bp, Glycine max
  unsure (1)..(184): unsure at all n locations; Clone ID: 701063628H1
agcaaatctgcatagcgatggcgcctccgaagctcttcgtatttgcgctttcataaccctgatttttgccatcgttggggccgaagccgatgtttccgtcgaaggagccactccagagcctgatacctccgccatcaanatccaattagatcaactcaattccaagatccaaattctcgagtct

SEQ ID NO: 31235 - DNA, 184 bp, Glycine max
  Clone ID: 701063629H1
caacgttgcttttgttttgttttgttttgtctctctctaatcattccaatggcaaagaaggacccaactgggacgggttgctcaaatggagcattgctcattccgatgggactcgccccactcgcaatttaagtgaggaggatcggagatggtttatggaagcgatgcagtcacagaccattga

SEQ ID NO: 31236 - DNA, 185 bp, Glycine max
  Clone ID: 701063630H1
cagggaagttggtgtgtgtcaccggtgctgccggttatattgcttcatggatgtgcaagttcctacttgaacgtggttacactgtcagggccactgttcgaaacccaaatgatcacacgaaggtagaacatttgctaaaacttgaaggtgcaaaggagagactgcaccttttaaggcagatcttt

SEQ ID NO: 31237 - DNA, 187 bp, Glycine max
  unsure (1)..(187): unsure at all n locations; Clone ID: 701063631H1
agtttaaaccagattcacagttggagagtgtgggaggatgaggctcatatgganggcataattcattaactganattacaaaagagttgaccatgcgaaggcaatcaacctttgtcaagtctcatgcatcaaacccattgaacaaaaatagttccctcatttgggtgacatgctttttccgtcaatt

SEQ ID NO: 31238 - DNA, 191 bp, Glycine max
  Clone ID: 701063633H1
ctatagtaaaaaaaggacattcattcatctatggctacccttattgctcccagcaaccacttctccccaagaagatgctgaagctctcagaaaggcttttgaaggatggggaactgatgagaacactgtcatagtaattttgggtcatagaactgtgtatcagaggcagcaaatcagaagagtttatgagg

SEQ ID NO: 31239 - DNA, 68 bp, Glycine max
  unsure (1)..(68): unsure at all n locations; Clone ID: 701063634H1
ctatangctagtttattcgtgaggngaatatgaggttgttngttttctntgtttngnaactacgnnca

SEQ ID NO: 31240 - DNA, 186 bp, Glycine max
  unsure (1)..(186): unsure at all n locations; Clone ID: 701063635H1
atagaaatggagcttctatattcaccacatctggtatagctgctaggaggttcngaatgaagttgaggcaggactggttgggatcaatgtgccagtacctgttccattaccgttttcctccaatgggtcaaaatcatcatttgctggtgatagtttttctggaaaagctggagtacagttttatac

SEQ ID NO: 31241 - DNA, 187 bp, Glycine max
  unsure (1)..(187): unsure at all n locations; Clone ID: 701063636H1
ctggtctaccanttgaccattctaacatggtcgatctntcaactcaaacttcngcactttgancagggattggagcccaatgagtatatgtcctcctcatggaagggtgtcatcatcagtcatttccttattggaagcagttctagtaatgctcctgtagatgttggaggttttcataatgaatttg

SEQ ID NO: 31242 - DNA, 187 bp, Glycine max
  Clone ID: 701063637H1
cactcataacacaaagcacaaagcaaagctcatccttgagttaaaaaatggcgagcttcttccatggctctctcatccccatccttggctggcaaggccgtgaagctgggcccatcagccccagaagtgggaagggtgagcatgaggaagaccgtcaccaagcaggtctcctcaggaagcccatggt

SEQ ID NO: 31243 - DNA, 187 bp, Glycine max
  unsure (1)..(187): unsure at all n locations; Clone ID: 701063639H1
ctataagctagtttatcgtgaggngnatatgaagttgtntgtnttctttgttgtgcagtagttttngtagcatggccatgccatggcgcaggctaccaaaggttccctctccgaatganaactggctatggtgagcgttcttcggaggtaaaatncgcaagtcttaggcttgctgtngaagcacaca

SEQ ID NO: 31244 - DNA, 193 bp, Glycine max
  unsure (1)..(193): unsure at all n locations; Clone ID: 701063640H1
ctgttctctgtcactgctgcgtctctcgtaaccatgcctaagcaaatccacgagattaggatttccttctcactgctagaaggaaggancgcaaggtcggtgaagatcnagaggagcagagntgtggttaanttcaangtcagatgctcgaagtacctctacacactttgtgtgtttgacccagagaaagctg

SEQ ID NO: 31245 - DNA, 183 bp, Glycine max
  Clone ID: 701063642H1
cagaatttaagaaggttagcaatttcttgagccggttcaagtcaatccccatattgttgagcttgacagtctaaaagtggcaggcgatgtatggtttggagctggtgtaatccttaagggaaaagcaagtattcttgcaaaaccgggtgtgaagctggaaatacctgacggagctgtgatcgc

SEQ ID NO: 31246 - DNA, 182 bp, Glycine max
  unsure (1)..(182): unsure at all n locations; Clone ID: 701063643H1
gatcgagataactagaaacagtgtgatgaaaatgaaggtccttgttttctcgttgctacaattttngtagcatggcaatgccatggtaccgatatgttccctctccgaatgaacactggctatggtgcccgtactccggaggtgaaatgcgcaagttggaggcttgctgtggaagcacacaa

SEQ ID NO: 31247 - DNA, 183 bp, Glycine max
  unsure (1)..(183): unsure at all n locations; Clone ID: 701063644H1
catacacttcggttaatccgaaagaagctcatcggaatcgcaagacaccgcgacgacatggccgccgccgtgaccgatatggcccgccgtcacacgattagccaaatactggtcgacctcgtcaagttcgccgtcggntccgccatcgacggctcacgcagaatcatccctggtaggaagcag

SEQ ID NO: 31248 - DNA, 187 bp, Glycine max
  unsure (1)..(187): unsure at all n locations; Clone ID: 701063646H1
cnagngagacnattaccggtatttggcagantttanagctggcantgaaaagacaangtggcagatcagtcacttaagagcatatcagacagcttctaccactgctgagagtgaactacancctacacatcctattcgtttgggtctggctctaaatttctcagtgntttatnatgagatatngaat

SEQ ID NO: 31249 - DNA, 184 bp, Glycine max
  unsure (1)..(184): unsure at all n locations; Clone ID: 701063647H1
ctttcctcagccattactctctctctgacacctacctgtgtctcttcatnatnttcttctgccttcaaacaaagtgatgaaagaggtgacggntgaagctgaaggangagcaccangagtggtgcaacanggtggaanagganccacggttangccagncatacacnacagtgccatgaaaatt

SEQ ID NO: 31250 - DNA, 184 bp, Glycine max
  unsure (1)..(184): unsure at all n locations; Clone ID: 701063649H1
gatcgagataactagaaacagtgtgatgaaaatgaaggtccttgttttcttgtgctacaattttngtagcatggcaatgccatggtacgatatgttccctctccgaatgaacactggctatggtgcccgtactccggaggtgaaatgcgcaagttggaggcttgntgtggaagcacacaacatc

SEQ ID NO: 31251 - DNA, 186 bp, Glycine max
  Clone ID: 701063651H1
gtcggcggcaaggccggtgcactcggcgattccattaccgtcaccagggacagagcaagatcaccgttcacctccgacagcaacttctctaaacggtatctgaaatatttgaccaagaagtacttgacaaagcacaatgtgagggattggcttcgcgtgattgcatccaacaaggagcggaatgtc

SEQ ID NO: 31252 - DNA, 189 bp, Glycine max
  unsure (1)..(189): unsure at all n locations; Clone ID: 701063652H1
cgctttccaccagtgncatcccctctgctatccgaannccacctggtagaccaagaaggcaatnnanaaagcgnattatgagccacaagacangtacaagttgcctaggcaaaaattatctgttgtttgcaaatttgtgganaagttggacacaacaaacgaacntgtaaaggtanaacaagggctgac

SEQ ID NO: 31253 - DNA, 185 bp, Glycine max
  unsure (1)..(185): unsure at all n locations; Clone ID: 701063654H1
gtggatggtgcaacagtggatcttcctacttcataactaccaaacctacctntgggcggaagtccaatgcagactcgttccaaatctcactttctcacattcttcactatgaagaatagtagccttcattctcttcctccttctttattcaccacaattgttgttgccaatggagattgcacttt

SEQ ID NO: 31254 - DNA, 186 bp, Glycine max
  Clone ID: 701063655H1
gagaagttttgtgcaaaatccttgggaacagtaattggttttgccatttcacgctgggaaagaacattcaagtactttcaagttcctttgtcaataagcaagaccaatacactgtggaaggagtgcagaatcttggagacaaagcagtgatgtgtcataggctaaatttcagaactgcagtatttt

SEQ ID NO: 31255 - DNA, 182 bp, Glycine max
  unsure (1)..(182): unsure at all n locations; Clone ID: 701063657H1
atttgtgtgcacagcagatccagatattgagccagcaatgatggngattacacagtgctatctgttanggcntatnattatccaactgaaaaattgantgtgtatctctctgatgatgctggatcgcaaatcacgttctatgctctgctagaggcttcanactntgcaaaacattgggtccc

SEQ ID NO: 31256 - DNA, 180 bp, Glycine max
  Clone ID: 701063658H1
gagtttgttgtgagctataagctagtttatcgtgaggagaatatgaagtgtttgttttctttgttgctgcagtagttttggtagcatggccatgccatggcgcaggctaccaaaggttccctctccgaatgaaaactggctatggtgagcgttcttcggaggtaaaatgcgcaagtttta

SEQ ID NO: 31257 - DNA, 180 bp, Glycine max
  Clone ID: 701063659H1
ttttttgtttagcaccttcctattgattcctgattccgggagtttgactttggccttcattagaagctatctgtgtttggtgttactaagtctccaacaagcaaagtacatggttgatttggaaatccaggtccccaccccattcgacccgtttgccgaggcgagagaatcggatgcccc

SEQ ID NO: 31258 - DNA, 181 bp, Glycine max
  unsure (1)..(181): unsure at all n locations; Clone ID: 701063660H1
tttagagtcttttcatctgtatcaccaccagtataagatgcagaataccatgaatgccctttgcttttgtaatgtttaggatttgtacttatgtatggaattgttgtacaatttcaatgcaaaaaagatttgaagattccaaaatctatagtaattccaaganatatatgtgaatatgcag

SEQ ID NO: 31259 - DNA, 182 bp, Glycine max
  Clone ID: 701063661H1
ttctagtcccaaagagctaacaagagattcaagaccggcatggctaatgagaggaacagaaaaaccacctcttcggcatcaaagatctcggtcacaagactctccttcagagtgatgcactctatcagtatatacttgaaaccagtgtctatccaagagagcacgagtgcttgaaagagata

SEQ ID NO: 31260 - DNA, 182 bp, Glycine max
  Clone ID: 701063662H1
catttctccatttccattttctctctcacttttcaagaatcgtaagctagggaaagtcttacccaactgtgagtgctgattaccagaaggccgttgagaaggcgaagaagaagctcagaggcttcatcgctgagaagagatgcgctcctctaatgctccgtttggcatggcactctgctgga

SEQ ID NO: 31261 - DNA, 184 bp, Glycine max
  unsure (1)..(184): unsure at all n locations; Clone ID: 701063663H1
gtttcagcanaatanttatntatgtcataaagttgttccaactgaagatggaangctttttctctctctctaaaagcagtggccatcatgtnctcttcctanaccctttcaatcatcatttagctctgaaaaaaataatagaaattagaacgcnaaatgtcctggctcttcaagtcnaaccacc

SEQ ID NO: 31262 - DNA, 186 bp, Glycine max
  unsure (1)..(186): unsure at all n locations; Clone ID: 701063664H1
cagtacgatagtncaagcaagtctaatctactatacatcatngtctaccaagnctncccttagtactagaaatgaggctanaacaactcaanttgttctntctnttgctttgtgttgccaaagcaaacgggtctctgctcccattcatggatcctcccatcactctcttggatgatctctggtccg

SEQ ID NO: 31263 - DNA, 183 bp, Glycine max
  Clone ID: 701063665H1
ctctggttgattcggatctagagtcttcagtttctcctcgttgttcttcgtttcctgttttcaatttcgattctttcgttaatttaataagatgtttgggagggcaccgaagaagagcgataatacgaggtactacgaaatcctcggcgtctccaagaacgcttcgcaggatgatctgaagaa

SEQ ID NO: 31264 - DNA, 184 bp, Glycine max
  Clone ID: 701063666H1
aaaagaagaagcgtgcgaataatggagggtggttatgctcgtcgactcttgcaggtcggtataagatcaataaacaaagaagggcgtgaacaagccaaaaagttcggggtagagcagtttgaaatgcgacatttttcgaaagatcgtccatttttggaaaacctgaatctaggagaaggtgcta

SEQ ID NO: 31265 - DNA, 183 bp, Glycine max
  unsure (1)..(183): unsure at all n locations; Clone ID: 701063667H1
aagtgcggtctctcaccgcacgcactagcactgtctctcactgaaacnnttcgcacattttcacggatctaactaagttatcgccatgaatcgccaccacgatcccaatcccttcgaagaagaagaagtcaatcctttttcgaatggcactactgctcctgcatcaaagtcacgtattccacc

SEQ ID NO: 31266 - DNA, 182 bp, Glycine max
  unsure (1)..(182): unsure at all n locations; Clone ID: 701063668H1
ctggggagtatcctagtcctccctctgaatanncaacctgcctgggtgctgtacantnttgcttggatggaagacagtgacatacacaatttgcaaacagaaactttacatcaacaatacgaattggtcaaacaaaggactatgaatgganattcaatttatggntcccacgngatgcagta

SEQ ID NO: 31267 - DNA, 182 bp, Glycine max
  unsure (1)..(182): unsure at all n locations; Clone ID: 701063669H1
gctgccatggctgcntcaagcagggggaaacttgtgattactgaggngnngactttgctggtcaananattgaagttaaaaagcttgtagatnctgactcaaaggaggcaatggaaagagccaaagctcctccaccttctgcagtggatactgtccttgaacaaatcaagaagaaacagaac

SEQ ID NO: 31268 - DNA, 182 bp, Glycine max
  Clone ID: 701063670H1
ctctctctctccgtctgtgcattttccattgttgaagaaggagaaaggttgaggtgtggggtcggtgatggacggtggagtgaactacaaccctcgcactgtggaagaggttttccgggacttcaagggtcgtagagccggcatgatcaaggctctcaccactgatgttgaagaatttttcc

SEQ ID NO: 31269 - DNA, 184 bp, Glycine max
  Clone ID: 701063671H1
caatcttaaagtttctttgactacagctcctctctcaagacctcgtgagttgaagaggattgcactataggtggctacactgtcaaaaagggaactcgtctaattacaaatctttccaagatccacacagatcataacgtttggtcaaatccattagagtttaaaccagaaaggttccttacga

SEQ ID NO: 31270 - DNA, 180 bp, Glycine max
  unsure (1)..(180): unsure at all n locations; Clone ID: 701063673H1
cttttcctcgtgaacgatcggctcactctcgctctccctagatcgcgntttcgctctccctcgtcgcgtgctcgttctcgctatcgtgctctcgcgctctctcggatctaactctgtctgtaatcatgtcaggcaagtatatcgtttctgctattcttggatcatttggagttgcatggg

SEQ ID NO: 31271 - DNA, 179 bp, Glycine max
  unsure (1)..(179): unsure at all n locations; Clone ID: 701063674H1
tgttaattcaatnatagcacctgctctgcttggcaaggacccaacgagcagactgaaattgacaattttatggtacagcagctnnatggaactgttaatgaatgggggtggtgcaagcagaagcttggagccaatgctattttggcagtgtcacttgctgtctgcaaggctggngctgc

SEQ ID NO: 31272 - DNA, 177 bp, Glycine max
  unsure (1)..(177): unsure at all n locations; Clone ID: 701063675H1
ataaaaaataaaaaaagtttcgcgtgtatnttcgcgcattcagaatnnatggcgaagtttggcgagggcgacaagcggtggatcgtggcggacgtcccgacggcactaacgtgcacaactggcactgggcggagaccaactgcctcgagtggtccagaaccttcttcaagaacaatt

SEQ ID NO: 31273 - DNA, 124 bp, Glycine max
  unsure (1)..(124): unsure at all n locations; Clone ID: 701063676H1
ctttccccttttaaaaccctcttttcttccccctccaccntaacccattcncttcttcacatctctcttttnantcaaaactacaanntttatttcctctccgtattctcacatttccacaaaa

SEQ ID NO: 31274 - DNA, 181 bp, Glycine max
  unsure (1)..(181): unsure at all n locations; Clone ID: 701063678H1
cgaagaagaggaagaatcagagctcagcgataagcagaaagtggagncgcgaaatggttcctcctcaactctcctcccggagaaatccaatacgttgccaaagatgtgaaatcgattctcaacaacgacgatttgtacaaggaagccgcttccgaggcttttccctattacaacaaatcgg

SEQ ID NO: 31275 - DNA, 181 bp, Glycine max
  unsure (1)..(181): unsure at all n locations; Clone ID: 701063679H1
gctctactagctagggtttcgcaagtgcgatcgaagaagaacgatgngatggctgctgctctgcgtcgcgaaggaaggcgtttgacccaaccaatcaacgccctccgttcctctctcatctctcaagaccaatcccctcatggcgcgcgcttcatttccactcaagtggtgaganaccgaa

SEQ ID NO: 31276 - DNA, 184 bp, Glycine max
  unsure (1)..(184): unsure at all n locations; Clone ID: 701063681H1
ctcggagtgctgggtgccatctccaaggtaaaattatcacttgagcgtagttcaaaagaagcataacctacaatttcacagcagaagatgatcacatcgaagatgtgtancgtagaccatgcaaaaatgtatgaatttgctgatttaacttggtatccatcaagacacacagttgtgtacagat

SEQ ID NO: 31277 - DNA, 182 bp, Glycine max
  Clone ID: 701063682H1
caagaacggcgagaagatcttcaaaaccaagtgcgctcagtgccacacgtcgacaaaggtgccggccacaaacaaggacccaatctgaatggtttgtttggaagacaatctggtacaactcctggatattcctattctactgctaacaaaaacatggccgtgatttgggaggaaaagaccct

SEQ ID NO: 31278 - DNA, 183 bp, Glycine max
  unsure (1)..(183): unsure at all n locations; Clone ID: 701063683H1
atttcacttgagacagttatctttatctacgcaaganaagaatagaaatggatatcaggttgatggatttggactctccattgttcaacactctgcaccgaatcatggatctgacagaggacgcagagaagaacttgaacgctccgacgcggacatacgtgcgcgacgcgaaggcaatggctg

SEQ ID NO: 31279 - DNA, 182 bp, Glycine max
  Clone ID: 701063684H1
tgagcagttgaggaaatgggaacccttgggagagcgatctacagcgttgtaactggattcgagaaactggacaggccattgatcgtctcggttcccgtcttcagggcggttactacttccaagagcagctctctaggcatcgaactctgatgaacatatttgataaggctcctgttgttgat

SEQ ID NO: 31280 - DNA, 183 bp, Glycine max
  unsure (1)..(183): unsure at all n locations; Clone ID: 701063685H1
gtaaaaacctgccatgacagtaataacaatgcctcctttcttatctctcctcttcttnccntcgcgttcttcttcactctcaagtaccttttccaaagaagcagnaaagtacgaaacctgccacctggtccgactcctcttcctataatcggcaaccttaacctcgttgaacaacctatacac

SEQ ID NO: 31281 - DNA, 182 bp, Glycine max
  Clone ID: 701063686H1
ggaaaataaaaaacaatggagttggacttgacaccaaagacagcagaatgttgtttgagggagatggtggaggttactacacttggtggagttctaaagtgccactgctggccaagaccaatgttggtgctggtcggttagtgcttcagcctcagggctttgctattcctcattattcagat

SEQ ID NO: 31282 - DNA, 183 bp, Glycine max
  Clone ID: 701063687H1
ggtgttcctcctccccaaggttacccaccgccggaatcttacggaaagacgcgtaccctccgccagggtaccctccacagggaggataccctccgcaggcgtatccagcacaggggtaccctccaccctacgcgcctcctcagtacgctcagcctccgccgcaacaacaccagaattcatctg

SEQ ID NO: 31283 - DNA, 180 bp, Glycine max
  unsure (1)..(180): unsure at all n locations; Clone ID: 701063689H1
ggaggttgantanttcttcatnatagtcttgaacattaaaccttagaaaactcancaatgctagacatcaaaggntanctcgtnctcttcttcctatggttcatatcanccattctgatacgttccatcttcaagaaaccacagcgtctaagactcccaccgggtcctccaatttcaata

SEQ ID NO: 31284 - DNA, 180 bp, Glycine max
  unsure (1)..(180): unsure at all n locations; Clone ID: 701063690H1
ctccaaggcccttccatctttcaaggnaaacgttgacggnggcttaccggttttctgccccaccgacagcgncgtcagcggtttcgcgccaaagtacaanaacctgaccgaagctcagaaggtttcacttctgttgtaccacgcnantcccgtgtncgagtcactgcagatgctcaagtc

SEQ ID NO: 31285 - DNA, 178 bp, Glycine max
  unsure (1)..(178): unsure at all n locations; Clone ID: 701063691H1
gaataatcgagacacagatcatagtgatcattttntaatttctcanttatccgacgtcgctgcagatccaccaaccgttatggctgccttcagcggtgatgaaacggcaccgtttttcggcttccttggcgccgcagctgccctcgncttctcctgtatgggagctgcctatggcaca

SEQ ID NO: 31286 - DNA, 178 bp, Glycine max
  unsure (1)..(178): unsure at all n locations; Clone ID: 701063692H1
gtttaaggtgacgcatttnngggttgtgcctccgattatncttgtctcgcgaaacacggtttggttgataagtatgatctntcgtctctcaagcatattggntctggcgntgctcctcttgggacagagnngntgnaggagtgngntaaacgnnatccncatgccatngttactcagg

SEQ ID NO: 31287 - DNA, 178 bp, Glycine max
  unsure (1)..(178): unsure at all n locations; Clone ID: 701063693H1
gcttcttgcaagaagtttctgagtttttgtatcctctatatatagtctctggcaattaaggtctcagctaaatacgcacaaatgggtagccagagttgcttcaaggctttgattatttgccttatagcattaattggatcaactcaagctcaattgcagcttggnttctatgccaaaa

SEQ ID NO: 31288 - DNA, 125 bp, Glycine max
  unsure (1)..(125): unsure at all n locations; Clone ID: 701063694H1
accacactaggcatctctgnatngcaatataatataagctttgtaganagtncaatnangntnctnctgttgcntgtctagagctagctaganattatnccanctgctcngagaagctcgtcnat

SEQ ID NO: 31289 - DNA, 179 bp, Glycine max
  unsure (1)..(179): unsure at all n locations; Clone ID: 701063695H1
gcaggaacaacgagtgtatagatcaacaactacctttcccttttcgctatcagtccaaacacnnnnnnnnnnnnnnnnnnnnnnnactctacaaccactaaactaagtggttggttttggtttagtttcatttttttgaagctcttaaacttaaggcttaagccatggcatcctcatcc

SEQ ID NO: 31290 - DNA, 299 bp, Glycine max
  unsure (1)..(299): unsure at all n locations; Clone ID: 701103701H1
cnatgatgagaagaaaggtcaatattctaagttctggaatgagtttggtaaatccattaaacttggtatcatcgaggatgccaccaacagaaatcgtttggcaaaactgctcagatttgagagcaccaagtctgagggtaaattgacatctctggatcagtacatatctagaatgaaaactgggcagaaggatatcttttacataactgggaaccagcaaagaacaactggaaaactctcccttccttgagcggcttaagaagaaaattttgaggttattttcttcacggatccagttg

SEQ ID NO: 31291 - DNA, 298 bp, Glycine max
  unsure (1)..(298): unsure at all n locations; Clone ID: 701103702H1
tggaatcttccaaaatgtttttntctgcgagctcttgtatgatcctgccgcctgggtcactgaagaagttgccggctaatataaaagtaaaatattcaagtggacaaacatctgatgctgcagctagaaagaggaaaggaaaatgtatagagggagatggtgtttcagagtccacaaaggaaggaaaaacattaaatgataaacgtttagcaaccttggacatttttgcaggctgtggtggcttatcagaggggttgcagcagtcaggagtttcatcaactaaatgggctattgagta

SEQ ID NO: 31292 - DNA, 296 bp, Glycine max
  unsure (1)..(296): unsure at all n locations; Clone ID: 701103704H1
cnanantntactactaaagacatgantnttgcnggtcttccttctcttcaatcaatgtctgctcacnnnnnnnnnnnnnnnnnnnnnnnnnacccttctcttctccttcttctccttcctcgtcttcatctccaggatgaagccctggtgtaactgcnatctttgcaaganctacttgacggtgagttggctganaaagttccccaatctctgcgactggtacactcatctcttgcgtaaatccccaaccggcaccatccacgttcacgtgctggggaacaccatcacctcgaatc

SEQ ID NO: 31293 - DNA, 294 bp, Glycine max
  unsure (1)..(294): unsure at all n locations; Clone ID: 701103705H1
caccatgccaccgaaactcacactcgtgttggtggtgctgtttttcgcccccgttgacgcgcattttccggcaaccggagagctgcaacgttccgcgaggcgccggcattccgcaacggaagagaatgccgcaaccgcgcgcggaggactccgtgatccacatcgcgatgacgctggacgcgacctacctccgcggctccgtcgccggtgtgttctccgtcctgcggcacgcatcatgtccggagaacatcgtgttccactttatcggcaccangcgccgaagcacggagctcc

SEQ ID NO: 31294 - DNA, 294 bp, Glycine max
  Clone ID: 701103706H1
taagaacgctcctcctcagatccagacggctgaatactctggaccatcacttagttactacatcaaccagttcaagccactggaaattactgaagtgtccgtgcctagtgaggcagaactatcgtcatctgttcaacttgaaagctcgcctccggaagtttcccaggttcaggttgaagctcaagctcctgagacctctagtgtgaacattgtatcgtaggtgtatcatgtggttaccacttttgctacgaaaacatagcaaagaagtttattttgtgtcaatagtatgagtca

SEQ ID NO: 31295 - DNA, 99 bp, Glycine max
  Clone ID: 701103708H1
ctgaagcacaaaccttgcagctgcagcagagtgtaaccgagcatggtggggaggtttgtgacacgtcacgaccttccttccttccacttccaacacaat

SEQ ID NO: 31296 - DNA, 293 bp, Glycine max
  Clone ID: 701103709H1
gccacctctgctattcagcaatcagcattcactggtcaaactgctctgaagcagctcaatgagttcgtccgcaagaccggtggcgccggcaaaggtcgcactaacatgcgccgcaccgtcaagagtgctcctcagagcatttggtatggccctgaccgtcccaagtacttgggtccattctcggagcagattccatcatacctgaccggagaattccctggtgactacggatgggacactgctggattatcagctgacccggaaaccttcgccaggaaccgggagctggaggt

SEQ ID NO: 31297 - DNA, 289 bp, Glycine max
  unsure (1)..(289): unsure at all n locations; Clone ID: 701103710H1
accctactcattctccatacctcaacgaagaggttaaagagacggcaacactttgctgtccgccttgaccgagcagagcttcgtcttggccctcgattttgccctaaagtactctcagtcacaacagacacnnnnnnnnnnnnnnnnnnnnnnaatggcaccgaagcagaccaaggctgagaagaagatcgcttacgatgcgaantgtgcgacctaatggaggagtacggccagatcctcgttgtgaactccgataacgtgggatcgaaccagctccagaacattcgca

SEQ ID NO: 31298 - DNA, 269 bp, Glycine max
  unsure (1)..(269): unsure at all n locations; Clone ID: 701103711H1
gttggggttgtggaggaggatgcaacgccaattaattaatcangcattgcagccaccacttacggtgttggtgtttctctaattcattcagggttgaaattgagaagggacttggaaatggtggtgattgatgancagaaccgtgtgattaggagggatatggtggagctttcacaacatgatcaatctgtaactntggcatattatggggaggagttgcatgggggcgtgcctctaccccgcttctctagaatgtctcctttaaacac

SEQ ID NO: 31299 - DNA, 290 bp, Glycine max
  Clone ID: 701103712H1
cctctgcaattcagcgggctcaagtgctccccactctcatcttcttctctcttctccaaaccttctctttggacccaacaatcccaaaagcgcgtttcaattaccattgcgaactcaatagcaatagccaatgcgcagaacaaagagagagcgaggcttaagaaactcttcgaagaagcctacgagagatgccgcaatgctccaatggaaggtgtttccttcaccatcgaagacttcactgctgctcttgacaagtacgacttcgattctgaagttggcggcaagattaa

SEQ ID NO: 31300 - DNA, 144 bp, Glycine max
  unsure (1)..(144): unsure at all n locations; Clone ID: 701103713H1
gtcggcaanatctttcaccaccnacacacagnncngtgcaggctctcaccttctttctcactcancntcnctngcncaaaacntataactaggtccttaaacnaaaaccctttatcccaaaatcttttttttncacncnncana

SEQ ID NO: 31301 - DNA, 289 bp, Glycine max
  Clone ID: 701103714H1
cgcttgctgggtttgccgtgttcgcgttcgttgttcgatcggagaagacccttttccctctcgtcacttgagatggcatcaagacaccgtgttcacagagaacccttgaatgctcgaagggggtacccgccagaagggccatatgctcgcgtgcctcccatgcctcgcccgccacctcctattcctcctcatccggctgtgttggaagaggaacttgaatttcagcatgccgagatgcggagactcgtggcagacaacaggaggttgattgatgaccgaatggcgttgc

SEQ ID NO: 31302 - DNA, 291 bp, Glycine max
  unsure (1)..(291): unsure at all n locations; Clone ID: 701103715H1
cnagcaggcactaccagcagatctagttagcaggggaatggctgtgaaagatccattttctccacatgggcttaaagctcaccattcaagactatccttttgccaatgatggactccttctgtgggatgctataaagctatgggtcactgactatgtcaaccactactaccctgaaccaagtcttgtggagtcagacgaagagttgcaggcatggtggacagagattagaacacttggtcatgctgacaaaaaagacgagccatggtggccacgtcttaaaaccccaaaag

SEQ ID NO: 31303 - DNA, 289 bp, Glycine max
  Clone ID: 701103716H1
cccatctagaggtgctgttgactttgcttcagctgtcaggaaattggcttctcaggattctggtatatggaagtatgataaaaatggttctggtgatgcttccactggctctagtaggagtttaaatgctctggctagtgcctacaatggtggacaggggagagtcaacaatggtgatagattacagaatcgtggctctgctcgggcagctcctgtttggcttgaaactggtgacgcattggtaaatgtttatgcttatatgcttcaactgtgagatgaattctttcta

SEQ ID NO: 31304 - DNA, 286 bp, Glycine max
  unsure (1)..(286): unsure at all n locations; Clone ID: 701103717H1
gttcnatacattgacattgaaacatgccagtttggggttattaagacttctggtgntgttccagtagctcgtgtgggacagtnctgccacaatggttggttccagagtgatattgtttggtggagaagatatgagcaggaagctgttgaatgatgtccatgttctcgatcttgaaagtatgacttgggaaatgataaagactacgcagacacctccatctcctagatatgatcattcagctgctattcaaggagagcggtaccttctaatattggtggttgctctc

SEQ ID NO: 31305 - DNA, 296 bp, Glycine max
  Clone ID: 701103718H1
cgcaatttaaaaaccgcaacaaactttctctcttgcgttcacacttattctctgggcttcttcttccattttcgttctcgtagcgttttcggaacagttatggcttccattgccggatccaactgcgtcgctctccgaaccgccaacttcggcgcctccggtaaccggaaaatcggccagatccgccaatggtctccgattctcacgaatctccgtcccgtttccggtcttcgtcaccgatcgaatactccgtttagctcctccggtgtgagagcacaggttgctactctggagga

SEQ ID NO: 31306 - DNA, 294 bp, Glycine max
  unsure (1)..(294): unsure at all n locations; Clone ID: 701103719H1
tcttaggcatagcgaaaatgacaaccaccttcgcgaccgtcgcaggactcggtggtgcatcactgtcatccacctcatctcgtctcacctcagggtttgtgaaatcgccagcnagtgctaggaatcccttgaggaaagctgtggcaatgggaaatgggagggttacatgcttcgagaggaattggctgcgggcagattacagtgtcattgggtttggattgattggttggctagcaccctcaagcgtaccggctatcaacggtaaaagtctgactggcctcttctttgagagca

SEQ ID NO: 31307 - DNA, 296 bp, Glycine max
  unsure (1)..(296): unsure at all n locations; Clone ID: 701103721H1
ggaaaataaagaaattagcgtcaaaatgttgggtgtgttcagcagctccatagtgtcgccnccggaacgagctcgtggccgccggcagccgtactccgtcgccgaagatgacggcggcggcgctgcggaagcggttcgaggagaagaacccctccgccgtgtcggtggaggtcggagagcatgtccagctcgcttatacccaccacaacgagtcgccgtttcagcccagatcctttgctgtcaaggatacggtgttctgcttgtttgagggagcccttgacaatttgggaaattga

SEQ ID NO: 31308 - DNA, 295 bp, Glycine max
  unsure (1)..(295): unsure at all n locations; Clone ID: 701103722H1
cttgtatttgagtcttctagacaaggcaaggttgcaattcttgatnggcatatccagctgacagaaaacgatgaatttgcttaccaagagatgctcactcaccttgcactctgttccattccagatccaaagaaggtgctgcttattggagggggagatggtggaattcttagggaaatatcacgccattcttctgttgagcatattgatatatgcgaactagaccaaatggtcattgatgtttattcggagtttttcccggatatagctgttggttacgaggatccccgagtgc

SEQ ID NO: 31309 - DNA, 289 bp, Glycine max
  unsure (1)..(289): unsure at all n locations; Clone ID: 701103723H1
agaggccagggtctcggagtgtttgggtttgtttatcttaaacaccacaaacacagaacagaggtgtagagaacaaagctcaannntatggcggcagagtcatcactgagggtggcgactcccactctttgcaacctcaatgggtctcagagacgaccaaccaccaccactctctctccgcttcgcttcatgggttttcgtcctcgaccctcctctcatctctcacctcctcttccctttcacattcttcgggagcacaagaattcaatccaattcttctcttcttatc

SEQ ID NO: 31310 - DNA, 291 bp, Glycine max
  unsure (1)..(291): unsure at all n locations; Clone ID: 701103725H1
cgaggcgggcagcgcccccgcactggccattaaggcgagcgtggagaagacgaagaggaggttcgacaactacgcgaacaggggttgctgtgcggcggcgatgggttgccgcacctgatcgtgagcggagaccagaggcactggggtgagttcatcacacccggaatactattcctgtacatctcgggatggatcggctgggtgggtcggagctacctgattgcgatcagggacgagaagaaacccaccatgaangngatcatcatcgatgttcctctggcttctcgcttg

SEQ ID NO: 31311 - DNA, 282 bp, Glycine max
  unsure (1)..(282): unsure at all n locations; Clone ID: 701103726H1
ttgaaacaaagctagcatagcatttttcttttacaaagcaagacacccttttnncttttcattccntcatctctttagctttgtccaaagaccatgtctgtggtggctgataattctgcaaacaatggaagccaccaagtggttttaaatgtaaacggtgatgcccccaagaagtgtgatgactcagccaaccaagactgtgtacctcttctgcagaagttggtagcagaggtggtggggacgtacttcttgatatttgcagggtgtgcttcggtggtggtg

SEQ ID NO: 31312 - DNA, 279 bp, Glycine max
  unsure (1)..(279): unsure at all n locations; Clone ID: 701103727H1
gatcctttttcaactggttttacttttctatcaacataggtgcccttgttnccngcacttttattgtttggattcaagaaaatgctggctggggtcttggatttggcattcctgctttatttatggcattagctattggaagtttctttttaggcactcccctttacaggtttcaaaaacctgggggaagccctattacgagaatgtgccaggttgtggtagcatctgtctggaagcgaaatctggttgtccctgaggacagtaatctcctatatgaga

SEQ ID NO: 31313 - DNA, 288 bp, Glycine max
  unsure (1)..(288): unsure at all n locations; Clone ID: 701103729H1
ganatggtcgcattgtatttttaggtgaaggcggtgatgctgagctgcagacactgccaaaagacctgagagctgttggctattactaacgttagatgcttganatgggaacattgcatttagttcataatggagatttttctattttgtaattatactctgattttttaccgcaaatttggaattatttcgcagacatttgtcatgagggaaactctaggtttgagcgatcttgtagtttctacgtgtaattcataatcagggaatatagagctcaaccttcctgat

SEQ ID NO: 31314 - DNA, 288 bp, Glycine max
  unsure (1)..(288): unsure at all n locations; Clone ID: 701103732H1
aatcgtgaggctgccaggaaaagccgactgaggaaaaaggcatatgtgcaacaattagagagcagtaggttgaaactgacccaacttgagcaggagctccagcgatctcgccagcagggaatatttatttcaagtactggagatcaggcacagtcaatgagtggaaatggtacttaancattgtgtacctccgattgtatgttttgagggttaaacatattggagtagttttaggggatgttttgaggctgataataataatccatagtcagtgcaaaaacgattgac

SEQ ID NO: 31315 - DNA, 295 bp, Glycine max
  Clone ID: 701103733H1
tcacagtgaggctggagaaggaagcctcctacgatgaaattaaaaatgctatcaaggaggaatcagaggggcaagttgaagggaattcttggttacactgaagatgatgtggtctccaccgactttgtgggcgatagcagatcaagtatttttgatgcaaaggctggaattgcattgaataagaactttgtgaagcttgtctcttggtatgacaacgagtggggatacagctcacgtgtcattgacctgcttgtattcgttgccaagaagtctttttaaggttgtactgaaaaaa

SEQ ID NO: 31316 - DNA, 290 bp, Glycine max
  Clone ID: 701103734H1
ggtccagttcaatgctgatattgctgatgggatgccatggaagtttgttcccacacagagagaggttagggtcaagcccggtgaaagtgccctcgcattttatactgccgaaaacaaaagttctactccaataacaggtgtttctacgtataatgtcactcctatgaaggctgcagtgtacttcaataaaattcaatgcttctgctttgaggagcagcgacttcttcctggagagcatattgacatgcctgtattcttttatattgacccggaatttgagacggatccta

SEQ ID NO: 31317 - DNA, 291 bp, Glycine max
  unsure (1)..(291): unsure at all n locations; Clone ID: 701103735H1
tgctttcggaggaggaaatcggtcgtctataccgaataaggaagacggtgatgcagatgctgagggacagaaattttctggttggtgacttcgagatcaacatgtcgcngcacgagttcaagtccaagtacggcgaacacatgaagcgcgaggacctcgtcatcaacaaatccaagaaggacaactccggcgaccagatctacgttttcttccccgacgaacccaaggtcggcgtcaagaccatgaagacctacaccaaccgcatgaactccgaaaacgtctacagagcca

SEQ ID NO: 31318 - DNA, 289 bp, Glycine max
  unsure (1)..(289): unsure at all n locations; Clone ID: 701103736H1
cganggtcctttgtcactggacgaggttatagaagngtcagagaacttgactgatttcctgatggactttgaagaagaataatggcatgcctccttgtgaagcattccatgtcaagtggtgtattgcattgtgtagacagaatagaaggtttggttgttagtcttcattgtcaatttcctgaactatcagtaacttcttttaggcattgctacagtggatcgggtggtcaaggcaataaacattggagtgagatctgaatactacttcaagggttctagaaacattatc

SEQ ID NO: 31319 - DNA, 286 bp, Glycine max
  unsure (1)..(286): unsure at all n locations; Clone ID: 701103737H1
gagtttgttgatcgagataactagaaacagtgtgatgaaaatgaaggtccttgttttcttcgttgctacaattttggtcgcatggcaatgccatgcgtacgatatgttccctctccgaatgaacactggctatggtgcccgtactccggaggtgaaatgcgcaagttggaggcttgctgtggaagcacacaacatctttggcttnggaccattcctgaagagtgcgttgaagcnncaaaggaatacatccatggcgaacaatatagatcagactccaaaacagtta

SEQ ID NO: 31320 - DNA, 266 bp, Glycine max
  unsure (1)..(266): unsure at all n locations; Clone ID: 701103738H1
tcttagntcgcttccttnccnctgcgnngnaggcntaacccntgggccggaaaagaanagggtcntgctatcggaatcnatctcggaaccacctantcnngcgtcggtgtgtggcaacangaccgcnttgaaatcatcgccaangaccaagggaacagaaccacgccgtcttacgtcggattcactgacaccgagcgttctcatcggtgatgcggccaanaannagtcgccatnaaccccatcaacancgtcttcgatgccnagag

SEQ ID NO: 31321 - DNA, 270 bp, Glycine max
  unsure (1)..(270): unsure at all n locations; Clone ID: 701103739H1
gttcatgttgccctgaagggaacaactgtcttgaagggctacntcctacgtatttctnntatantattgctttctattgttttaattctagttctaaacatttagctctagttgtaggcatttactatgtattattttaggatttattacttgaaaacagctgatagaatggaggaaaacctttctttatatggctctcccaatatcccgaaagcaataattgtttgtaatataaggggaaattacactgtaataacttgacaagtcttg

SEQ ID NO: 31322 - DNA, 288 bp, Glycine max
  unsure (1)..(288): unsure at all n locations; Clone ID: 701103740H1
ctgtcttgcttctttgttntgttttgttcgttgcttggtttcttcncctgctatgttgtcatgtgttgttgtgtgcaatttctaggacatgcttgganttcnctgaaatttgcaaagaagtcgggcttcctcctggcgtgttgaanttctcactggattaggacctgaagcgggtgctcctttagcagctcatcccgatgtagacaagattgcctttactggaagctctgcaactgggagcaaaattatgacagctgcagctcagctgatcaagcctgtttcactaga

SEQ ID NO: 31323 - DNA, 285 bp, Glycine max
  unsure (1)..(285): unsure at all n locations; Clone ID: 701103741H1
gaganagggagnaagggtgtgagaatggagagcaaagaggaagatgtaagggttggagcaactaagttctcagaaaggcaaccaattggtacagcagctcagggtgacaaggactacaaagaaccacccccagcacctttgtttgagcctggtgagctaaagtcatggtccttctacagagctggaattgctgagtttgtggccactttcttgttcctctacattaccatcttaactgtcatgggtgtcaacagtcaccctccaagtgtgcctctgttggcatca

SEQ ID NO: 31324 - DNA, 230 bp, Glycine max
  Clone ID: 701103742H1
ctatttttgtggactaaacctaattgtgtgggttgaatatatgagtagattttggcacctttgcctattgggttcgcggtgttcttggttcacttggcaaccatccctatcaccggcactggtatcaaccctgctcgtagtcttggtgctgctatcatcttcaacaaggaccttggttgggatgatcactggatcttctgggtgggacctttcattggtgctgcacttgc

SEQ ID NO: 31325 - DNA, 284 bp, Glycine max
  Clone ID: 701103744H1
ccgaagcaatcgcaagtcgtctgttctgtcccgcgggagcagacgacctgtcttcatcgccaaacaacctcaaaaacattcatcaacgttcactattaatccatccatcattaagtaagaaaataaggttcgatttttttatctttgttttgcttctgatccatcatggaggtgccgagttcctgggatgcccttcgcaaacaggcaagaaaacttgaagctcagttggatgagcagatgaattcttatcgtaaattggtttctaataatgtttctacaaaagc

SEQ ID NO: 31326 - DNA, 284 bp, Glycine max
  unsure (1)..(284): unsure at all n locations; Clone ID: 701103747H1
tcgagataactagaaacagtgtgatgaaaatgaaggtccttgttttcntcgttgntaanaattttngtngcatggcaatgccatgcgtacgatatgttccctctccgaatgaacactggctatggtgcccgtactccggaggtgaaatgcgcaagttggaggctgctgtggaagcacacaacatctttggntttgagaccattcctgaagagtgcgttgaagcaacaaaggaatacatccatggcgaacaatatagatcagactccaaaacagttaaccaacaa

SEQ ID NO: 31327 - DNA, 285 bp, Glycine max
  unsure (1)..(285): unsure at all n locations; Clone ID: 701103748H1
gttttctccttctattgattaattttatcaagatatgatgcctctttgtctgttatccaaatgatattaaaaaattcccatactgatagtctagactcttcatttaagctcaacccaacttatgctttttctaaagtgtctgcttgagtctcctccattggaaactgatatttcctttgcagataaggcttggccttctctgggaggatggtagagttgacactacaatgtnggggaagcaccatggttgtgtatacaagcttgctgtggagcctggaagtgccc

SEQ ID NO: 31328 - DNA, 291 bp, Glycine max
  unsure (1)..(291): unsure at all n locations; Clone ID: 701103749H1
gnanagtcaatttcgtagacatgntataatgtagagaanaaggcacgctccttttgagggtgctccgtgctcctatcantttcaatatttattaaatttcaaatttnnncttgctaattagaattttcttgctgcttatataattgtnttaacatcgttggggttgtacaaaaaattggttttggaatttgaagttgtgagtnctgaagatggattcggaaggcgagggtgttaggacaccaaagatgggattggaagcagaaggggctctgattcaaagatgaaaggngc

SEQ ID NO: 31329 - DNA, 292 bp, Glycine max
  unsure (1)..(292): unsure at all n locations; Clone ID: 701103750H1
ggctgccaacacattgatgagttctgccatctcagccttcccatctctcctttcctcctcaaaatccagatttgccgcagcagttcctctttccagctttgttgtcaccaatgcctcttcttctcgcntttccatgagtgctgactggatgcctggccagcctagacccccctaccttgatggttcagcacctggtgactttggattcgaccctcttcgtcttggtgaagtaccagagaatcttgagaggttcaaagagtcagaactcattcactgcagatgggccatgctt

SEQ ID NO: 31330 - DNA, 291 bp, Glycine max
  unsure (1)..(291): unsure at all n locations; Clone ID: 701103751H1
gctccttcatttcctcttactctgtttnntcctgtttctgttggctaagaaacaaagaaagagcccagcgataaancaaaagcgcatttccgctgttgtatgtgtgtgtttgcgatgccaggtggggccaccgtctgctccggtcnccggtttctctgcgttgttctgcattcgactcgtccccgactcagctacccgactcggtcgcgacccgttccggttcaacttggatccgtgtttgtgtcgaatggtaatggcgatagtaagcggttcagctccaagttgagcctc

SEQ ID NO: 31331 - DNA, 290 bp, Glycine max
  unsure (1)..(290): unsure at all n locations; Clone ID: 701103752H1
tnagatattcattctaagggaaaaatgacagaggagcaatccaaaaaggtggctgagactgagagttttccctctaatcctgcacctgaacctgttgttgttccaaaggaggatgtggcagaggagaaatctgtaattccacaaccctctccctctcctgctgatgagtccaaagctcttgtcatagttgagaagactagtgaagttgctgaagagaanccgattgaggggtctgtgaaccgagatgctgtgcttgcaagagttgcaaccgagaagaggctgtcataatc

SEQ ID NO: 31332 - DNA, 291 bp, Glycine max
  unsure (1)..(291): unsure at all n locations; Clone ID: 701103753H1
gttcaagaagganttcaagacttttttagggcaacttgaggatcagttccttctgttttcgggaagaaataattcatctattcaagtacacgctttggcagagggagctcaaggttataaagcttttgctggccttgtcctagtgctggcacaattgtctgttttcattgaacaaactgtcatcccaaaagtcactgaggaaatagctgcttccttttctggtggtagtgttagaggctatgaatctgggcctgcctttgttcctggagaaatatgtcgaaaatttcggtc

SEQ ID NO: 31333 - DNA, 291 bp, Glycine max
  unsure (1)..(291): unsure at all n locations; Clone ID: 701103754H1
gncagcttttacaaagggaacatgcaggacctagaatattcttctatttatatgaagagaagtgggtnaaagcgtgatgggtgtgggctgttttacaagcataaccgtgcagagttggtcttagaggagaaaattgaatacaatgatcttgtaaagtcngttcccgatgggaactcttcaaataatgatgnacacaccaatatccagacagttcagccagataaacaaaaggatgtgccccccaaaaatggatctaaatcgaattcaaaagatcgtggagatcccaatgat

SEQ ID NO: 31334 - DNA, 288 bp, Glycine max
  unsure (1)..(288): unsure at all n locations; Clone ID: 701103757H1
cntaatggcttctatttcttgtatnagtgctattttaagctttcttctcatctctatctttctttctgtttacaatattaaagtgtgtgaggcacaagccaggcctcctacagcgaaggggctatcatacaccttctacgacaaaagctgtcctaagcttaaatctatcgttagatcagagctcaaaaaggtcttcaataaggacattgctcaagctgctggcttgcttcgccttcacttccatgactgctttgttcagggttgtgatggatcagtatcattggatgg

SEQ ID NO: 31335 - DNA, 281 bp, Glycine max
  unsure (1)..(281): unsure at all n locations; Clone ID: 701103759H1
atcgagataactagaaacagtgtgatgaaaatgaaggtccttgttttcttcgttgctacaattttggtagcatggcaatgccatgcgtacgatatgttccctctccgaatgaacactggctatggtgcccgtactccggaggtgaaatgcgcaagttggaggcttgctgtggaagcacacaacatctttggctttgagaccattcctgaagagngcgttgaagcaacaaaggaatacatccatggcgaacaatatagatcagactccaaaacagttaacca

SEQ ID NO: 31336 - DNA, 261 bp, Glycine max
  unsure (1)..(261): unsure at all n locations; Clone ID: 701103760H1
tggcattgcactccgtgtgccaacacnaaacgtctcagtggtggactcgttgttcaggtctccaaagaagacctttgcagaagaagtgaatgcagcattcagagagagtgcagacaatgagctccagggaatcctctctgtgtgtgatgagccacttgtgtctgttgacttcaggtgcactgatgtgtcctcaaccgttgactcatcgttgaccatggtcatgggagatgacatggttaaggtgattgcttggtatgacaa

SEQ ID NO: 31337 - DNA, 281 bp, Glycine max
  unsure (1)..(281): unsure at all n locations; Clone ID: 701103761H1
cctaagangatgtcacaaaacaatcttggtttgtgctttggagggtctgataagttgaccttggactttttgggtgttgggggaatggtgaggaatatgaacaatggtggcnggttttcnnnnnnnnnnnnnnnnnnnnnnnactccatgggaattactatgagccccttggatcctaaattggaatcagcacaagcaaaccaacactatggaacctcaacactctaataataagttgttggataataagaggtaaaaacacacgtgattcatgtctatgc

SEQ ID NO: 31338 - DNA, 279 bp, Glycine max
  unsure (1)..(279): unsure at all n locations; Clone ID: 701103764H1
tgcgagctgacatggtcagtgggaaagattctgtccatccaaaatcaaatgnccgntgccggtgatgcaacacctctccctgccaactatgcagttttgcctcatgaactgagtatgcgtttgcatgaagttatacaatcccaacttgagcaacgcgtgaaagaacttgagattgccctgaaaatagccagaggaaagtacggcttttcgaatcaaagcaagagagttatcttcaaaaggcatcttcctttagtaaagaaaatgatgattgtgcacctt

SEQ ID NO: 31339 - DNA, 289 bp, Glycine max
  unsure (1)..(289): unsure at all n locations; Clone ID: 701103765H1
attgcctgtcttcatatcaaatgcggcgatggtgcacttttgagtggttttatagtgctatcgattacncatggtttncaaagagagngtttgtggagtacttataccatgttggattaggtcatgttcctagattgactcgtattgagtggggtgtcattnncaagttctcttggcagaccacgaagattttctgagcaatttttgatagaaganaaacataaacttaatcaataccgggaatctgttagatcacattatgctganattcttgctggtaccaaggaag

SEQ ID NO: 31340 - DNA, 288 bp, Glycine max
  unsure (1)..(288): unsure at all n locations; Clone ID: 701103766H1
ccacgcctttcactaatctgaattcatggctttagcactttcctccaccgcattgtcaagtcttccaaacagagaaattcgnccaaaagggtttcccagaaagaacacccacatgcttgagcctgaccagaagaacaattgcaaatgctacaaaaggagtctcagctgtctgtgaaccacttcctccanatagaccattgtggttccctggtagctcacctcctgagtggcttgatggcagtcttcctggtgatttcggattcgaccctcttggattagggtctgatc

SEQ ID NO: 31341 - DNA, 287 bp, Glycine max
  unsure (1)..(287): unsure at all n locations; Clone ID: 701103768H1
cngaatttcctgtttacgatctcattacaattttgcaactttcaaagcttattagctanngtaacatcanaagatgtcattgattccaagtattttcggtggcccaaggagcaacgtgttcgatccattctcactcgatatgtgggatcccttcaaggattttcatgttcccacttcttctgtttctgctgaaaattctncatttgtgaacacacctgtggattggaaggagacccaagaggcacacgtgctcaaggctgatattccagggctgaagaaagaggaag

SEQ ID NO: 31342 - DNA, 286 bp, Glycine max
  unsure (1)..(286): unsure at all n locations; Clone ID: 701103769H1
gattctacccgccgctcgangngaattgcgcttcaaggcgtctcgtagggctaatccgcctcacgagggtcancaacggcactnncctttggggggccgaggccccctactgctggtcggcaaacggacggcgggcgcacgcgtcgcttctagcccggattctgacttagaggcgttcagtcataatccaacgcacggtagcttcgcgccactggcttttcaaccaagcgcgatgaccaattgtgcgaatcaacggttcctctcgtactaggttgaattactattg

SEQ ID NO: 31343 - DNA, 282 bp, Glycine max
  unsure (1)..(282): unsure at all n locations; Clone ID: 701103773H1
cgtnaatcaacaggagcaaataatactgaagagaaaganagtattacaacttatgatgatagggcacataccaaagatgagaaaaatgatcacactcttgttgttcatggcttggctgatgcttgtagattcgtttgtaatgatgcaaagtttctctcacgtggcataatgaggttggatgctcgtgcacgtccaagatgttgctttncttgggactgaattncncaaacttnanncncgggcaagagaggatactgagaaattgaccgtnatgtcaaggaa

SEQ ID NO: 31344 - DNA, 278 bp, Glycine max
  unsure (1)..(278): unsure at all n locations; Clone ID: 701103776H1
gctactatcntgccacantgtttccaggnnntttgcctgcggataactntcttcgaattgaggagtataacctggatccatccatggaagacatggataatgctgacaagaaaaacatggataatcttgtaaaggtaggaaaaaacctcttgctccaaaaagctttgaggatgaatgtgaattcttttgtcctgttgaactagaccaaacaaatgctgaagctcttgacaggttgtctgagaaatnatatgcagagaggcagttgcgtctgaaaagga

SEQ ID NO: 31345 - DNA, 290 bp, Glycine max
  unsure (1)..(290): unsure at all n locations; Clone ID: 701103781H1
gcaantccttcttctcccagaatcggtcantaaatccngnaatcatgaagctcgataccaccggtctcgaatcgtttcccacactgcttgcgcctccaaaacgacgtcgttggagaactctccgccgctccatccttcgaccttccgaattccaacgatttcgatgggtttgtgaaagaagctattcagatggtgaagcccgcgaagggtactacgactcttgcttttatatttaaggagggtgttatggtagctgctgattctcgagctagcatgggaggatatatatc

SEQ ID NO: 31346 - DNA, 278 bp, Glycine max
  unsure (1)..(278): unsure at all n locations; Clone ID: 701103791H1
caatcacagttatactctctctctctcannnttgatcactgatntcatctcaattttcagntatgtcgacatctgataagccagaagangtggaaaggggtagcaaggatgaaaagcacaaggaagatgatcaagaggaggggaagggtggattcattgagaaggtgaaggatttcattcatgacattggtgagaagattgaggaagctattgggtttgggaagccgagtgccgatgttactgcgatacacattccatcaattaatcttcacaaagca

SEQ ID NO: 31347 - DNA, 280 bp, Glycine max
  unsure (1)..(280): unsure at all n locations; Clone ID: 701103792H1
tcgcggtcctagttttgttgcctgcancacttatcatggagcctaatgtcgtagatgtcatattgacgcttgcaaaggaccataaatctgtgtggctacttcttttcctaaactcagtcacagcatatgcagctaacttcaacaaacttcttggtgactaaacataccagtgctctcacactccaggtgttaggcaatgcgaaaggtgctgtagctgttgtaatctcaatactcctattcagaaaccctgtcactgttcttggcatgggtggctatacaa

SEQ ID NO: 31348 - DNA, 278 bp, Glycine max
  unsure (1)..(278): unsure at all n locations; Clone ID: 701103793H1
ggaacagctagcagagaaacaaagttacaagtaaagtaaattaagaagatcattaatgggcttctcttgcaaccttagctgctgttcaaccagctgcgctcaatggcctgctggaagttccctctctggaactaagctctctttcaagccctctcgccaaactggtnaantccaaaaantttnngagtngggncgtggtancnaagtatggtgncaagagtgtgtantttgatttggangntcnngggnacactacggggcaattgggctttanngcc

SEQ ID NO: 31349 - DNA, 283 bp, Glycine max
  unsure (1)..(283): unsure at all n locations; Clone ID: 701103794H1
ctttngaaggcnnatgaaggcgcactttngaatttggaccctgagcagcctgccttacgttttttncgttggaggatatgtatttgctgttagtgtccacagagttcagcttcttcttcaggtattaagtgtaaaacgntttcaccaacagcaacagcaacagcagcaaaattcaaatcccgcaccagnggaattaagtcaatctgaaataagtgaaatatgcgactacttcagccgtcgagtggcatcagaaccctatgatgcttctcgtgttgcatcattc

SEQ ID NO: 31350 - DNA, 283 bp, Glycine max
  unsure (1)..(283): unsure at all n locations; Clone ID: 701103795H1
gtttggttggaantttacgttacttgacatgtacaaggccggatatnctctatgttgtagngngtagtaagtcgttacatggaagttccaaccanaactcacttncnaggcggcaaagagaatccttcgatacatcaaaggtacaacaaactttggtttgcacnattactcttctgacaatntggacttgttggctatagtgatagcgantggagtggagactggatgganagaaagagccctatgggttttgtgntcttatgggagatatgctttcacttgg

SEQ ID NO: 31351 - DNA, 258 bp, Glycine max
  unsure (1)..(258): unsure at all n locations; Clone ID: 701103801H1
tgacttgtgggttaccaacatttgccacatgcaatggtggtcctgctgagatcattgtgcatggaaaatctggttaccacattgacccttaccatggtgaccgtgctgctgagatccttgttgagttctttgaaaagagcaaggctgacccatctcactgggacaaaatctcccagggtgncactcaaggcgtattcatgagaagtacacatggcaaatttactctgacaggctcttgacactcactggtgtgtatgg

SEQ ID NO: 31352 - DNA, 253 bp, Glycine max
  unsure (1)..(253): unsure at all n locations; Clone ID: 701103803H1
gtgggacggcatactaggccatgtcatgtgatttccatgaagagttccctccagctgttccataaatgatgcacatcatttagccattctttatgggattggattctcatatgcatgtagtgaggtttccctcgttcagagcatgaaatgaatctactgaaaaaatgtcatgtgatttctgaagggttcactgttagtncgagtaacgatgcttgccctttgccaataaatattcgtgtaggtatccaagttt

SEQ ID NO: 31353 - DNA, 232 bp, Glycine max
  unsure (1)..(232): unsure at all n locations; Clone ID: 701103808H1
gtcgttttgttcgttcagttctgaccaccctaattgaggcaccntgtttggcttgttcttgacacttgtggaggctgcaattgacttcttgttgcaattgatggcaagtactgaatggtatccattgcaattgttggtagctcttcaaataattcantnttggaataattataattgttgctgaagagagttaaataaagaccaggaatttcactgccagaaacgttcaata

SEQ ID NO: 31354 - DNA, 251 bp, Glycine max
  unsure (1)..(251): unsure at all n locations; Clone ID: 701103812H1
cagaggcagaaagtggagagaganaataatataggggaagaagttgggtggtcaaaaaatgtagaagttgcaaagtcaaacccaaagcttgcagccatgaataagaagtttggtatgattcatggattatcctcccttgccaatataatgtcgtttggcagtctagcaatacactcttggtacttggcaggtaaaattgatctctgattcagtttctgcttccaattctatgaaagacaagtgagtttctt

SEQ ID NO: 31355 - DNA, 248 bp, Glycine max
  unsure (1)..(248): unsure at all n locations; Clone ID: 701103815H1
ctaaattctcaaagacaccaatttcattgctcagagttcccaaattccaccccaagagataaaatgtctctaatcccaaacttcttcggtggccggagaaacaatgtgttcgatcctttctcactggacgtgtgggatcccttcaaggattttcctttcccaaatacgctttcttcagcttccttccctgaattttctcgggaaaattcagcatttgtgagcacccgtgtggactggaaggngacccc

SEQ ID NO: 31356 - DNA, 252 bp, Glycine max
  unsure (1)..(252): unsure at all n locations; Clone ID: 701103824H1
ctctttttntctngttccctttgggtagncncctaggaggtaatnntgagtgaaanctgntanncatgggaaaaatatgtttcttccaactcactgctcttagntcacaaggaaatcatatgttgtgtataaatttgttgggtcttaaaacattttccaaacttcaccttgccttaacaaactgtaaaatttggaaaagtttctgatgctaagctacagcctgctaggagcacttctgtgatcagttgcaaa

SEQ ID NO: 31357 - DNA, 244 bp, Glycine max
  unsure (1)..(244): unsure at all n locations; Clone ID: 701103830H1
caagaatgttcttgctgttgcggntgagacagattattctttccctgaggcacncaaggtcaaggagtatctgaaggatccaagtaaatttgctgtcgctgctgttgctgctcctgctgctgagtctggtgctcctgctgcagccaaggaagaggaaaagaaggaagaaccagctgaagaatctgatgatgacatgggtttcagtctgtttgactaatttatgtaatgcttttgttgagtttat

SEQ ID NO: 31358 - DNA, 257 bp, Glycine max
  unsure (1)..(257): unsure at all n locations; Clone ID: 701103832H1
cttccttttcatcattctcatatcctcaatcaccccccctcgcantcgctcttcccttcctctggtggcgacaatgtcgactcctgctaggaagaggctgatgagagncttcaagangctgcaacanganccgcctgcngggatcantngtgcnccccaggataacaacataatgctgtggaatgctgtcatatttngtcntgangatactccatgggatggaggcacgttcaagttgacactccaatttactgagg

SEQ ID NO: 31359 - DNA, 250 bp, Glycine max
  Clone ID: 701103836H1
ggccttcgagcctatcctcctgttgggtaagagccgcttcgccggcgtcgacatgcgcatccgcgaccaagggtggcggccacacctcccagatctacgccatccgccagagcatcgccaaggcgctcgtcgcgttctaccagaagtatgtcgacgaacagagtaagaaggagatcaaggacattctcgtgaggtacgatcgcaccttgctcgttgcggatcccaggcgctgcgagcccaagaagtttgg

SEQ ID NO: 31360 - DNA, 250 bp, Glycine max
  unsure (1)..(250): unsure at all n locations; Clone ID: 701103839H1
caagcctttgaacatcgttttgcagccatggaaacaggcatagcatnncacnctcgcgggcctttcctgcctagtgtttcttnccaagcactctnccaccctcccatctctccatcttttggcttgaggagtctgaaatcgagctctttatttggagaatctctaagagtggcatccaaatcaacactaaaggtttcaaagacaaagaatacttcactcgtgaccagatgtgaaattggtgacagtctgg

SEQ ID NO: 31361 - DNA, 245 bp, Glycine max
  unsure (1)..(245): unsure at all n locations; Clone ID: 701103843H1
cttttttctccttttctaatcctttcacttcacgcatctttnttnccccttttccctattttcatcttcttttgcatttttctccgactccgtttcatgcattttcccgctgcttaaggaccatcctccaataccacgccgcttcttcttcctagggtttctctgaaccaattcctatggccattagaggcgtcgatttcaagtggtacgatggctttttcttgttcatgctcgccaccagtgta

SEQ ID NO: 31362 - DNA, 254 bp, Glycine max
  unsure (1)..(254): unsure at all n locations; Clone ID: 701103844H1
gtcccaaagagctaacaagagattcanccnccggcatcggctaatgaagaggaacagaaaaaccacctncttcggcatcaaagatnctcggtcacaagactctccttcagagtgatnccactctatcagtatatacttgaaaccagtgtctatccaagagagcacgagtgcttgaaagagatacgcaagatgactgcaaaacacccactgtaaaatataatctatgactatttactatttagttacttttcgtg

SEQ ID NO: 31363 - DNA, 240 bp, Glycine max
  unsure (1)..(240): unsure at all n locations; Clone ID: 701103845H1
gggaaactnnccnggtaactttgaaacatgatgataagttacaggatggatcagaangtgctattcagtgtgcccttctttacacaactgtgtanggccaaagnagaatacgtgtcataaccttgtctctgcccgtcactagtatgctcagtaatctgttccgtgcagctgacttggatactcaatnntgctgtttcttgaagcaagctgctagtgagattccgtcaaagccactcccac

SEQ ID NO: 31364 - DNA, 248 bp, Glycine max
  unsure (1)..(248): unsure at all n locations; Clone ID: 701103846H1
accccttcaattttctcaggtataggaanaaacaattccaagcgaattgcaactttcacgaactgaatttgtttctgttaattttttcgcgtatttgtgagaagctacgaattttgataccgtgaaaatggcgacatgttatacaccttcgaatgttagaaattcgccgggggtgctggctgtagttggaggaagaacaatttcagagaatcacgtaggtaacagatcatgcttcctgagaattcaag

SEQ ID NO: 31365 - DNA, 251 bp, Glycine max
  unsure (1)..(251): unsure at all n locations; Clone ID: 701103847H1
cctaaccntacaattatgccccattaacacaantcgcaattaccccaaattcctcaccctagcgtagatgcgatctcttcttccttcgtgaattctggttcagggtggctgccatgtatggcacttagtattttccctttttgaagattaggggtgggtgggttgtgtctcgcttagggttccaaagtttgttgttttgaatggaacctcgcgttgggaataagtttcgcctgggtcggaagatcggaagt

SEQ ID NO: 31366 - DNA, 253 bp, Glycine max
  unsure (1)..(253): unsure at all n locations; Clone ID: 701103849H1
ctctcacaagccaagaaaaaaaaaaaattaagttagtancctatggntgtatgtgttcttagtaatcataaagtgctaagtcaaatacaaatattgtttgtgtgtggnggtttgatcaacaacacacagaaggggtatctcaaaaacacaacaacattggagattatggagctagcgcaaaagaaaggatttctggttcancatgagtacgatgatcttgttggttcttttnattcttcctcgacatcttctt

SEQ ID NO: 31367 - DNA, 250 bp, Glycine max
  unsure (1)..(250): unsure at all n locations; Clone ID: 701103850H1
ggacatattgcttgctctacttggctgtgtgagactcagtaacaagtgtcctatgtgtttaatgcccattggttataaccgttgccgggctattgagaaggtcttggagtgtaataaaatgtcatgcccaaatgcaaactatggntgcaaagagacatttagttacagcaggaaaaacaaccatgagaaggaatgatgaaatctaccangntcatgccctcttactggttgtgattttgttgcctcatcc

SEQ ID NO: 31368 - DNA, 111 bp, Glycine max
  unsure (1)..(111): unsure at all n locations; Clone ID: 701103851H1
ctaaatcaancgagtggttgacacngatngaagtagtagcacacagaaaatgggccctcgagaggtgtacgagnagaaactaaggaccggaaatctccaccacgatcccac

SEQ ID NO: 31369 - DNA, 176 bp, Glycine max
  Clone ID: 701103855H1
gagaagccgctggagttacgatactctcaagaatttccgtgagatctctccgctggttcagaatcacatcaaacgggtttattttacgttatgttgcgctgtggtggctgctgctgttggagctttcttcatgttctgtggaacattgggggttttctcaccacgttggcttccat

SEQ ID NO: 31370 - DNA, 223 bp, Glycine max
  unsure (1)..(223): unsure at all n locations; Clone ID: 701103856H1
caaaaaccttaaaatnnnttgaaagtgacacgacnccgaatgatgnagatgaaacancacccctattgtacagaacaactccttgggggggtatgcctgagccttgttttcgcaaagnaccctctaaggtggtttccatccctgttcacttcgtggggtcagagngcaccagaacaaattctgattctgccanagagatccagagggtgctgagaggntttct

SEQ ID NO: 31371 - DNA, 248 bp, Glycine max
  unsure (1)..(248): unsure at all n locations; Clone ID: 701103857H1
gcggagatagcaatctcatctcattcatttcaatggcaactcaaggtcaagtcattacctgcaaagctgcggtggcctgggaacccaacaagcccttaactgtccaanacgttcaggtggctccgcctcaggccggcgaggtccgtgtccaaatcctcttcaccgctctctgccacaccgatgcttacacttggggcggcaaggatcccgaagtctcttcccctgtattcttgggccatgaagctgca

SEQ ID NO: 31372 - DNA, 247 bp, Glycine max
  unsure (1)..(247): unsure at all n locations; Clone ID: 701103858H1
cggaaacggccccgaagngtggctcaaccgccacgtggatttcgggaaagtgtttttcggtggggacagtgccggnngcgaacatcncacaccacatggccattcgggtcgggtcccacggacttcctggtgcagacccgattcaagggtctgaatttctgttggagcgaccctgtgcgggtgtgaactttaaaggaatggttttggtgcatccttacttttggggcgtggagcgagttggatccga

SEQ ID NO: 31373 - DNA, 245 bp, Glycine max
  unsure (1)..(245): unsure at all n locations; Clone ID: 701103859H1
tcgagataactagaaacagtgtgatgaaaatgaaggtccttgttttcttcgttgctacaattttngtagcatggcaatgccatgcgtacgatatgttccctctccgaatgaacactggctatggtgcccgtactccggaggtgaaatgcgcaagttggaggcttgctgtggaagcacacaacatctttggctttgagaccattcctgaanagtgcgttgaagcaacaaaggaatacatccatggc

SEQ ID NO: 31374 - DNA, 251 bp, Glycine max
  unsure (1)..(251): unsure at all n locations; Clone ID: 701103862H1
aatnaacaagaaagagattgaaaagtggattggaggagatgagagtgcctcggagatgctgagtagagtgagcagcatgcgacctttcttgtttcctccgccgctccacagggttcctctccgcgtcggaaacgtcgtcgagcttgtggggccctctccttccncccaaaacgcacattctcatccacgccgccatcattccgttctccccaaatggctacggaggcctcgaccacttggtcctctttctc

SEQ ID NO: 31375 - DNA, 249 bp, Glycine max
  unsure (1)..(249): unsure at all n locations; Clone ID: 701103863H1
ccaaatcaatcaaattctttgnnttgaacacaggggccaagattccttctcttgggttagggacttggcaagctgaacctggtgttgtagctgaagctctcaccacagccattcaggttggatacaggcatattgactgtgctagtgcgtataagaatcaagcagagattggttctgctcttaagaagctttttgatgatggtgtggtgaagcgtgaggacttatggatcacttccaaactctggtgtt

SEQ ID NO: 31376 - DNA, 251 bp, Glycine max
  Clone ID: 701103864H1
agcttgctggcactaatggagaaaccaccactcagggtctagatggccttggtcagcgttgcgccaagtactatgaagccggtgcacgttttgccaagtggcgtgctgtgctgaagattggtcccaacgagccatctgagctggctatccatgagaatgcctatggcttggccagatacgctgtcatatgccaggagaatggcctggttcccattgttgagcctgagatccttgttgatggatctcatgac

SEQ ID NO: 31377 - DNA, 249 bp, Glycine max
  unsure (1)..(249): unsure at all n locations; Clone ID: 701103865H1
gagnaggtagcaaagnctgtggaggttgagnaacgcaaaangtggaggagagaaatcttctctctgtggcttacaagaacgngattggtgcgaggagggcttcgtggaggatcatatcctccattgagcagaaggaggagagcaggggcaatgaggaccatgtggccattataaaggagtacaggggcaaaattgaggctgaactcagcaagatctgtgacgggattttgaacctccttgagtccaacc

SEQ ID NO: 31378 - DNA, 247 bp, Glycine max
  unsure (1)..(247): unsure at all n locations; Clone ID: 701103867H1
tcagatactcactcacctgtatttagtagtttcttcnctncgttctgttcacaactcagtttgtaactatgactgctgaggttatggctcaagaggagacacaagcagctgaggttgnccgttgctgttgagcccctgaaagaggagaaggttgctgaagaaaatgtgaaaccaagagagtnatcagtggaagcatccaaacccaaaatggtggagaaaagctcttcttacaaggaaganagcaact

SEQ ID NO: 31379 - DNA, 241 bp, Glycine max
  unsure (1)..(241): unsure at all n locations; Clone ID: 701103870H1
tgaaaatgaaggtcctngttttcttcgttgctacaattttngtagcatggcaatgccatgcgtacgatatgttccctctccgaatgaacactggctatggtgcccgtactccggaggtgaaatgcgcaagttggagncttgctgtggaagcacacaacatctttggctttgagaccattcctgaagagtgcgttgaagcaacaaaggaatacatccatggcgaacaatatagatcagactc

SEQ ID NO: 31380 - DNA, 246 bp, Glycine max
  Clone ID: 701103872H1
ccgttgccatccaaccatcttctgtctaccgtcgtcgtcgtcccgccgttcctctgccgtcgtcgcacgaacacccagcagagagcttcgaagccacgcaggcgggaacgaccagccatcccagcgtcgtcgttgcagtcggaaggttgcaccacaccaggccgtcgcgttgtaaggttccaagctttttagacagctgacaagagacaacaagatatggcagagaagagcaaagagctgctccag

SEQ ID NO: 31381 - DNA, 248 bp, Glycine max
  unsure (1)..(248): unsure at all n locations; Clone ID: 701103873H1
anaagagccaaatttcagaagaaaaaagagtcacttgaaggttcaatgggcgaggaagatccaaaanttagaagaaagcaaagaggagaacaaaaaagcagaggaaccaaagaaggaagaagagaaaaaagaggagagaaaaactgaggaatcaaaagatgacaaagaatctaaggagaaagttgcgccgtcagaaatcgtgcttaaagtgttcatgcattgtgaaggttgtgctcgcaaggttcgtc

SEQ ID NO: 31382 - DNA, 171 bp, Glycine max
  unsure (1)..(171): unsure at all n locations; Clone ID: 701103874H1
cttggccgcatagtcacatcagatattgaaaccaaaccaganccgaanaacctcgccgtcgacacgatgcggagnctcaggatgngaaacttgttgtcccgtgtcaaaaagaaaaccatcaaaaacagaaacagaagttgcatttccattacaaaagagttagccacatct

SEQ ID NO: 31383 - DNA, 242 bp, Glycine max
  unsure (1)..(242): unsure at all n locations; Clone ID: 701103875H1
ctctatattccattgccacccagttttgaatatatttttattcctnctttgtttcttcactttcttccatacacataaccatgtcttctcagactgttgtcctcaaagttggtatgtcatgtcaagggtgtgctggagcagtgaacagggttttgggaaaaatggaaggtgttgagtcatttgacattgatctgaaggagcagaaggtgacagtgaaaggaaatgtggagccagatgaagtt

SEQ ID NO: 31384 - DNA, 244 bp, Glycine max
  Clone ID: 701103876H1
caaatctttgtcaagactttgactggcaagaccatcaccctcgaggtcgaatcctcggacaccattgataatgtcaaggccaagatccaggacaaggagggtatccctccagatcagcagaggttgatatttgctggtaaacaacttgaggatggaagaacccttgctgattacaatattcagaaggagtctaccttacacttggttcttcgtttaagaggtggcatgcagattttcgtcaaga

SEQ ID NO: 31385 - DNA, 218 bp, Glycine max
  unsure (1)..(218): unsure at all n locations; Clone ID: 701103877H1
cactgtggcagaagtacnaggagtgtaaaacaaccgacgcaaaatgaagacgaactctatcgtaccgagaccatgaatattcccgacggcgtgagcatcaaggttcacgctaaggttatcgaggttgagggccctcgtggaaaactcgtgcgagacttccaccatctgaacttggacttccaacttattaccgacgatggcggtaaaaggaagctcaa

SEQ ID NO: 31386 - DNA, 250 bp, Glycine max
  unsure (1)..(250): unsure at all n locations; Clone ID: 701103879H1
catgcttttaatttcctagatctcccaaacaaattgtagcataagtcccatggccaaagagactagngttgtttatctatatcccagcaaatcacaagtttggggtgagaattttgatcataaaaaaacttgtaataacaacactagctgctaatggaaagaaggaggagagtaatggagcacctaatgacacatatcctgcgtttcccgggtggtatgctgatgtttcctgggccaggagaagcacaca

SEQ ID NO: 31387 - DNA, 102 bp, Glycine max
  unsure (1)..(102): unsure at all n locations; Clone ID: 701103880H1
gcattggtggctagctaagctaagctaaaactaaactctttccagtttgttttagcttcagcttcttctggctctcttttggctcttttccacnanaaacca

SEQ ID NO: 31388 - DNA, 248 bp, Glycine max
  unsure (1)..(248): unsure at all n locations; Clone ID: 701103881H1
ccttagccttccctacaactccaaacanccaagacatcatcatccatggctgcctccgtctccactgtcggagctgtcaacagagctcttttgaacctgaatggttctggagctggagcttcagctcccagttcagccttctttgggaccagcttgaagaaggttattgcctcaagggtccccaacaccaaggtttccggtggaagcttcaagattgttgctgtagaagagaagaaagagattgaaga

SEQ ID NO: 31389 - DNA, 245 bp, Glycine max
  unsure (1)..(245): unsure at all n locations; Clone ID: 701103883H1
ttttttggtttggggatagatagagtgatacacatcacattttctcaaagtnnnnnnnnnnnnnnnnnnnnnnnnnnnnnnnnnnnnnnnnnnnnnnnnctactcccacctaggattccnaccgccaccaacgttacccgctgctctgctttgccttctctgcctcctcgcgtcaccaacactaaaaccactttgctcttatcttccctcaaccacttctcagtgtcccgaaaatcttctctgct

SEQ ID NO: 31390 - DNA, 244 bp, Glycine max
  unsure (1)..(244): unsure at all n locations; Clone ID: 701103884H1
ggcaaggtcttggcccaagangttcgcgcccccgatcctctccctccctacccggcctccgtcaaggacggttacgccgtcgtctccgccgatggccccggcgagtatcccgtcgttgccgaatcgagagctggagatgacgctctcggcctcactctctcccctggaactgtcgcttacgtcacaaccggaggaccgatacctgatggtgctgatgcagttgttcaggttgagaatactgaaa

SEQ ID NO: 31391 - DNA, 170 bp, Glycine max
  unsure (1)..(170): unsure at all n locations; Clone ID: 701103885H1
atatgatacttgttaggcagcaacaccagcagttacagtaacngttgacggacgatgaagncgaagactaatttgtctaaaatgtaatgtttttatagtcttggagactatttttgtttatggttaaatgcacctttacagcttaataaaccttttgctatgagttgtgt

SEQ ID NO: 31392 - DNA, 248 bp, Glycine max
  unsure (1)..(248): unsure at all n locations; Clone ID: 701103886H1
caaattacaagagccaaagaggacgaggtcgcggccaagatcgtggacgtggacgaggacatggaggagaaggaagangtggttacaacaaccactccaacaaattcncccaatggagaaagaagttggaatccacaagtaacaagaggtccgtggaagaggaaactcatggtcgaggtatgacaaatcacaaattcaagtgcttcaattgcaacaagcttggtcactacgcatccgagtgtagattt

SEQ ID NO: 31393 - DNA, 243 bp, Glycine max
  Clone ID: 701103887H1
cgcttccaataccttcagattttggttgggtttcgtgcttttggaaaatccgttgagtttctgaagctatggaggcttataagagatgggtgaggcagaacaaagagtttgtgcactccatggagtctttggccaatggattgacatggcttcttcctgaacggttttctgaatcagagattggacctgaagcagtaacaaccattctgggaatcatcacagctctcaatgaacatataattg

SEQ ID NO: 31394 - DNA, 245 bp, Glycine max
  Clone ID: 701103888H1
caacaattgacaatccatcaaatgcttttgaatgggcacttgctgaaatgataaaccaaccggagttactccaccgagccgttgaagaattggatagtgtggtaggaaaagagagactggtccaagaatcagatatacctaaactcaactatgtgaaggcttgtgcaagggaagcttttcgccttcatcccatttcaccttttattcctccccatgtctctatgagtgacacaatggtggcaaat

SEQ ID NO: 31395 - DNA, 244 bp, Glycine max
  unsure (1)..(244): unsure at all n locations; Clone ID: 701103889H1
attgatatataattatgcaaccctgtagcagagaaatgcaaggcctcaactcnctcttaaactcttcctcnnaaatctcnctntgagaccttcaaaatnacacnntaaccagatccaaaattcacanatganccaccaacaccaacttgcncactttgattcaacttctcacgacgactttctcgaacaaatgctctcttcctgctcttgganagacctcaacccaaacaagcccttattatgg

SEQ ID NO: 31396 - DNA, 243 bp, Glycine max
  unsure (1)..(243): unsure at all n locations; Clone ID: 701103890H1
tctcttctcactcccacaattcccacattatagtaatcntcatcacctgcttatttcgtcataaattctagatcaaacttncacaccctgatcctcccttttacttcttatggagcatgtatcaactcaaatgaataacatgaccctttagtctaagaatannnnnnnnnnnnnnnnnnnnnnnnnnnnnacacacttcaaagtccaaagtccacaccaacccaccaaaaagtcttgttccca

SEQ ID NO: 31397 - DNA, 245 bp, Glycine max
  Clone ID: 701103892H1
ctgaaactgaaactgaaactgaaacatggtatctctgtgttccttcacttcttttgcatgtgacaacctttctctttctctttctcagtctctcaaaccgtcatcattgcctctcattcactctttcacacttccaagaaactctatcaggaagaagaacggttagtgtgaggcctctgttctgtgccctcaacaacaataacaacaacactgccttgcagtacagaaccctcggcgactccgat

SEQ ID NO: 31398 - DNA, 246 bp, Glycine max
  unsure (1)..(246): unsure at all n locations; Clone ID: 701103893H1
cagagtgcagagccttctctcctctatttncngcttccaacctttttgctccattcattctcaacaacaaaccaatctctatattttgcttagacaatgagggggagcttgtggcaacttgggcaatcgatcactcgccgtcttgcccatggagataagaaggctgttgctcgccgatgttttgcctcagaagctgagctgaaaaagacagtgtttcatgacttccatgttgctcatggtgggaag

SEQ ID NO: 31399 - DNA, 248 bp, Glycine max
  Clone ID: 701103894H1
gcacactctccacactccacagagaggaagaaaagggtcaaatagttacaacctttgcttctttccctccatagtcccatttttttttttccattcaacaacacaacccaacaccgcaacctcagacagacaaacatcatggacgcaggttacaatcctcgtaccgtcgaagaggtctttagggatttcaagggtcgcagagctgctttgattaaagccctcaccactgatgttgaagagttctacca

SEQ ID NO: 31400 - DNA, 249 bp, Glycine max
  unsure (1)..(249): unsure at all n locations; Clone ID: 701103895H1
gcacaagtggctcagttgatcagctttgaaaacgttncttggttgcatcatgtctgccatcactaatcattggaacaaaatgnaaatgctgcagaggcagctaagagctgtattgatactgttttgctgtgttcaatttcatgtccaaagttgtgatgaaattgaagatgtaatcagcagatctcaatttccagaagggttcctttcggaacaggcacttcctcttaccagattgaaggagcgtatttt

SEQ ID NO: 31401 - DNA, 249 bp, Glycine max
  Clone ID: 701103896H1
gcagtctcagtggaatttggaagggtgtaggtgctgtgttttctcccatcacagctgaaatggaaccaatggaaataggtagcaagaatgaacacctatatgactgctatactctttctcgcatagaggcagtaccatcagtttcaggtgagcgtacatctcaaatccagagaaaggttaactgggtgactttgaatcctatggcgaaataccacagcatattgaaggcagcaatgtagctaaagacaa

SEQ ID NO: 31402 - DNA, 275 bp, Glycine max
  unsure (1)..(275): unsure at all n locations; Clone ID: 701103902H1
ctnganccgancgcggctcntatctccnccannttgnanngatccgngannnactctgtnaacatacntggtttaccaggacctcnttacaggtgatgagcttctcnntnactccttccgntacaaggaaattnngaatggaatgctgtgggaagttgaggggaagtgggttgttaaaggagcagttgatgtagacattggtgcaaacccttctgctgagggtggaggagaagatgagggagttgatgatgcagctgttaaggnngttgacattg

SEQ ID NO: 31403 - DNA, 282 bp, Glycine max
  unsure (1)..(282): unsure at all n locations; Clone ID: 701103910H1
gtattttgagtgattatttcaataatgnntgtananctttccctgtngacttgtttatcgtttttccccaaaattttaacgcagcgattggacgttgnaactgncntcactgncttttggctaattctatgcgttgtttgttagctttatcgaattgaatgtgaacgtgagtnttgttcaaggggaagaagaaagtaggaatcttacctcatagnanaanaaaaaaaaaanaannaancnannaanaggggnccncnngtttgntncccngtnancggggtt

SEQ ID NO: 31404 - DNA, 141 bp, Glycine max
  unsure (1)..(141): unsure at all n locations; Clone ID: 701103918H1
caacacnanncnctgttcaatttcaggatntttgtaggtcataaagtgtaaatttggatatggacacatcataaactattaatttaatgttataatgtgtatcaacatcaaatttcactgctgtggtacttcaatgcccaa

SEQ ID NO: 31405 - DNA, 282 bp, Glycine max
  unsure (1)..(282): unsure at all n locations; Clone ID: 701103920H1
ccggtggtttgcaaggatggggaacacgttctgcttcttctgtggttgcnttgctcaatccagcgtcggcntggtcgagcagtggggtcgcttccaccgcctcgcccaaccgggcttccactttttcaaccctctcgccggcgaatgcctctccggtatcctctccaccaggatctcctccctcgacgtccgcatcgaaaccaaaaccaaggacaatgtttttgtgcagttgctgtgttcgattcaataccgagtgattaaggnnaacgctgatgatgcttt

SEQ ID NO: 31406 - DNA, 279 bp, Glycine max
  unsure (1)..(279): unsure at all n locations; Clone ID: 701103922H1
ctcganccngttatgagctcctatgtcatagaggtcaactccannctcagagaggaaagtnnnggaacagcagacattgatgaggcaatagcatgggctaaggagaagtttcaatcacgaaattctgatgaagaatcaagctcgagaaatgaaggcaatgagcaaactactacaagggtggaaggtgattgtcttaaccagactaatanaattttgtgcattctttctgcagcttacctgtaagagaatggttgctttttcttttagaaaatatctcgg

SEQ ID NO: 31407 - DNA, 266 bp, Glycine max
  Clone ID: 701103924H1
ctcttcctctctctctactctgagacacaaaggaaaattataagaaattatggctggttattccaaaagcttcagctcttttgatcctttttcttctctttggcttctctgtagctaaggaaattttggttggaggtaagactgatgcatggaaggtttcagcctctgaatcagattcactcaaccaatgggcagaaaagtctcgtttccaagttggagactatcttgtttggaaatatgatggtggaaaagactcagtgttgcaa

SEQ ID NO: 31408 - DNA, 250 bp, Glycine max
  unsure (1)..(250): unsure at all n locations; Clone ID: 701103925H1
ggcacgtattgttctaatnccacaaaaataatggccttaaattacaacattgccctcgncctctcctacggttctcacgctgcttctccttcccttaccaacccttggggagctcgtgcaggagcagccactagtcctcaagtaccacaacggccaactcctgaaggggcgcatcaccgtcaatctcatctggtacggcaccttcaccccgatccaacggtccataatcgtggacttcataaactcacta

SEQ ID NO: 31409 - DNA, 278 bp, Glycine max
  Clone ID: 701103928H1
cttctctgagttttgacctacaacactctccaatcccctcttgtgtgttgtagccgccccgtgatcatcaatggcggaaactgctgacaaatctcaatctctcgccgaggaatattatgtgaatgacaagcaaacaactgtagttgaaaaagctgttgaggtcaaagaagttgaaaacccaaaggtagctgcttctgaggaaccagttgctgagaaaactgtggaagaaacaactcctgttgcccctgcagttgctcaggaaagcagtgaagtcaccc

SEQ ID NO: 31410 - DNA, 279 bp, Glycine max
  unsure (1)..(279): unsure at all n locations; Clone ID: 701103931H1
tttcaaataggtggtgaacacgtgancagctggattctttcaaggcatcttcgaatgctcgaccccagccccagagtgtgcttcttcgttnacaacacttcactcattaacttttcattncccgatacgccactcgcttcatatgcaagcacagccagaatcctctatagatcgaaactgttaagtttcgacaaactcgacacaaggacaccatcaacatcttgnagagctcgctgtgttgttcgttccttttggccccttcaacgaaattgtactaat

SEQ ID NO: 31411 - DNA, 281 bp, Glycine max
  unsure (1)..(281): unsure at all n locations; Clone ID: 701103933H1
tttgagtgtatattcagagagaaaaacgaagaaaacatcgtgaagcatgtctggnagaggaaagggaggncagggtctaggaaagggaggagcgaaacggcaccgtaaggttctgagggataacattcagggaatcacgaagcccgcgattcggcgtctggcgcgacgtggtggcgtgaagcgtatcagtggtctcatctatgaagaaactcgcggtgttctcaagatcttcctcgagaacgtccattcgcgacgctgtcacctatactgagcacgctcgc

SEQ ID NO: 31412 - DNA, 277 bp, Glycine max
  unsure (1)..(277): unsure at all n locations; Clone ID: 701103938H1
aactccgaagctatggcagagctccaaaccnangttgaacctgttacggtcccggctccggctccggtggatcccgagccaccgctagctgaggctccgccgctcgagaagaaagcngtggcggtgccaccacctgttccggctgcggcagaggaaaccaaagctcttgttgttgtggagaaggagaatgagaagataccagaacctgtaaaaaagaacgcctcaggtggatccttgatagagacattgctnntgcagnnatagagaaagagnnacg

SEQ ID NO: 31413 - DNA, 275 bp, Glycine max
  unsure (1)..(275): unsure at all n locations; Clone ID: 701103939H1
agaggtccganataggctacgtctctacgnaagcctnttcantcttcncactttatccgtttctatcttaatatcccaccccgccatggtggtggcaaccaaacaccacttccngtncctctgnacaatgntcatgngggntgcaaccactttagcgtactatgntgttcttnttcttattgttcctcctnagttatggnnttctcaaggacnatgttctgttcttctnaancgttccctccaagaatcatcagcctggaacntcttnccttggg

SEQ ID NO: 31414 - DNA, 274 bp, Glycine max
  unsure (1)..(274): unsure at all n locations; Clone ID: 701103941H1
aaagatgaagagaacacatattgctgcaaaanctgttgagattgccgagagacgcatattaagagacaggtggccagaatattatgacacaaagagatctcgattcgtcggaaagcaatctcgactatatcagacttggtcaatcgcaggataccttgtggcgaactgctgcttgcagacccaagtaaagcaaacacattgatcactgaagaggattctgagcttgtgaatgccttgataagtgccaaccctagaggaaagcgagggcgcaaaa

SEQ ID NO: 31415 - DNA, 273 bp, Glycine max
  Clone ID: 701103943H1
gaagaggaattggtgattgaagaaatggcagatgcagcgaagggtacctacagagcctcaagatggtcccttaacggaatgactgctcttgtgaccggtggaactcgtggaattgggcatgccatagtggaggacttatgtgggtttggtgccactgtccacacttgttccagaaaccaagctgaattggataagtgtttgacagaatggcgtacaaaggttttttggtttctgggtctgtgtgtgatgtctcatctcaaccccacagagaga

SEQ ID NO: 31416 - DNA, 274 bp, Glycine max
  unsure (1)..(274): unsure at all n locations; Clone ID: 701103945H1
ttgggcagttgctgaaattctcaagaaagcacgtatatatgttccgccctcaatgccagtgccggggagtgtgagctcaagctctgaagcatctgcttcctgatttggctgaaggtattataacatattttggctgtcaatatctacacaagttgtagctgttcgtattgaagtgattctggaaataaagtttagctgaatgagttgtggatagnttgtaaccttattcaagttacttgttttaaggactgttatttaaaaaacaaaatagacc

SEQ ID NO: 31417 - DNA, 274 bp, Glycine max
  unsure (1)..(274): unsure at all n locations; Clone ID: 701103946H1
ctcccattattcttcaaattctctccaangttataaacctcncttcaatcaacgttatatatatatcggttattattaattttattttcacgtaatgggcaactacgtttcatgcactttggcgcctcctttgatgaagaactccaaggccacgagggtcatcattcccaccggtgaagtgacnccaattcagagagatcgtgaaggctgcggagtcatgctcgaacaccccagctatttcctcgttaattctcgttctttgcatataggaaga

SEQ ID NO: 31418 - DNA, 263 bp, Glycine max
  unsure (1)..(263): unsure at all n locations; Clone ID: 701103947H1
ttcggatctagagtcttttttcactcttcagttctcgttgttgttccttcgctntcctgaaactagggttttcaatttcgattcattcgttaataattaaagatgtttnggagggcaccgaagaagagcgataatacgaggtactacgaaatcctcggcgtctcgaagaacgcttcgcaggatgatctgaaganggctacaaganagccgccatcaagaatcaccctgacaagggcggtgatcccgagaagtttaaagagctg

SEQ ID NO: 31419 - DNA, 275 bp, Glycine max
  unsure (1)..(275): unsure at all n locations; Clone ID: 701103949H1
ggcagaagactgtggaagattttgatgattggacaagttggcttctttacaaaggaggagtaggagtaaaaggagaaaatagttgggagtcttggtgggacgaagaacagatgcatatccaaacttggaggggtcgtattttggagacaattttgagtgcaaggntcttcttgtttcaatatggtgttgtgtataagctgcatcttactggaaatgatacatcacttgcgatctatggattctcatgggctgtcttggttggaattgtcttgata

SEQ ID NO: 31420 - DNA, 272 bp, Glycine max
  unsure (1)..(272): unsure at all n locations; Clone ID: 701103950H1
acaaatttcagtaccaaaatccaaccaagtctctactattatccattattgtctgccacatcttcccttagtactagaaatgaggctgccacaactaaacttgttcttagtgtcatttttncngctctttgttgccagagcaaatggttctctgctcccattcatagatcctcccaccactctcttggctgatctctggtccgatcgttcccggacccgtttcgagtgtggaacagattccattggtgttgacaaagatgaaccctccatgg

SEQ ID NO: 31421 - DNA, 275 bp, Glycine max
  unsure (1)..(275): unsure at all n locations; Clone ID: 701103953H1
caagcttcaagtgatcataaccgagatgggtctaagaattcaacaaagaggagaggtcctcaagggtgtgcccttggttcagccaggggatcatttgttctggtntaaccgacctggccttattctttaccttatcaattttgtgctctttcagaatgcttttcagctggctttcttcgcatggtctgcgcttcagtttgggattaaatcctgtttccattcgcacacggaggacgtggtgatcagaatcacaatgggggtcctattcaaatccc

SEQ ID NO: 31422 - DNA, 276 bp, Glycine max
  unsure (1)..(276): unsure at all n locations; Clone ID: 701103954H1
gaaactaaagagaacatcaacaaagtctccacttgcttcnaccattgggaactatcatccggcttgggaatcaatttaaccaaccggtacagattggtagcatcaacaatctgtacgagagtgtgcaaaatttgagtcctgatgttttctggaaatgttgctttctccacgcaacccgttagattanctcttaccagagactaaaagtgaaggtggatgacacagagcccacaaagtatttcatttgtcacagctgttcaaaaggaagtgatttgt

SEQ ID NO: 31423 - DNA, 274 bp, Glycine max
  unsure (1)..(274): unsure at all n locations; Clone ID: 701103955H1
aaaaagatgagaacctggctggggagtggaaccacacctctggccaatggaatggagacgctaacgacaaaggtatnccaaaccagtgaggattacagattctacgctatttcagctcagtaccctgaattcagcaacaaggataagacactagtcttccaattttctgtcaagcatgaacagaagcttgactgcggtggtggctacatgaagttgctcagtggtgatgttgatcagaagaaatttggtggggatactccttacagtattatgt

SEQ ID NO: 31424 - DNA, 270 bp, Glycine max
  unsure (1)..(270): unsure at all n locations; Clone ID: 701103956H1
tttgttgtgagctataagctagtttatcgtgaggagaatatgaagttgtttgttttctttgttgctgcagtagttttggtagcatggccatgccatggcgcaggctaccaaaggttccctctccgaatgaaaactggctatggtgagcgttcttcggaggtaaaatgcgcaagttttaggcttgctgtggaagcacacaacatccgagccttaaaaccatcctgaagagtgcgttgaacanccaaaggactacattaatggcgaacaatt

SEQ ID NO: 31425 - DNA, 277 bp, Glycine max
  unsure (1)..(277): unsure at all n locations; Clone ID: 701103957H1
ctctgtggaaactttggaaagagatcttaagaacacgaggnaatactacgggagtggaaaaacaaaggaagcaccatggagagaatcacagcttaannngttgcacaattttctcgtggaaaaagaggaagaaattgtgacggccctcaagcatgatttggggaagcattacgtggaggcttttagagacgagcttggaacattanntngaagaccttaaacttggcaaccaagtctttgcnaaaattggatggcggggaaagaggcaaagctgcca

SEQ ID NO: 31426 - DNA, 275 bp, Glycine max
  unsure (1)..(275): unsure at all n locations; Clone ID: 701103958H1
gaaggttcaattgtccgaaatnaatttctagtcccgcatatttatcaacatattaaactcataaaaataactncaatttttttgttgataatttatgtaattctattcagtataatatcagtataatagaataaaaaaattatgaaaagatctttggttctgtatagtctttttatactatatttaaagagttacttgtaacgtaatacaaataaactcgagtatggatattgtcaggaagactatttgactttgttttttcaaccccccaataa

SEQ ID NO: 31427 - DNA, 275 bp, Glycine max
  unsure (1)..(275): unsure at all n locations; Clone ID: 701103959H1
cttccttgtcactgcccgtgtgtcgccgccatggccaccgtcaccacccaagcctccgccgcaattttcccggccatgtacctcgaaatcgaggtttttgaccggctcttccggtaaacttaaccgggaagtgactatgcggccaatggggtgccctccttctgcctctttcaaggttgaagccaagaagggagagtggttacctggcttggcctccccaacttanctcaatggcactcttcctggtgacaatggatttgaccctctggggctag

SEQ ID NO: 31428 - DNA, 273 bp, Glycine max
  unsure (1)..(273): unsure at all n locations; Clone ID: 701103961H1
gagtgcgaaagngcacagaacagctncnngnnnaatnttgnacacanttganganttagangcacganatcttggaagnnttctcaaccattttgccacctgtgtattcnatcggccctttaaatnttctcttgaatgaggtcaaggataaggacttgaatgcaatcgggtccaacttatggaaggaggagccagggtgtttggaatggctcgacacaaaagaagtnaacacagtggtttatgtgaatttgnaangcgtcacggttatgacaa

SEQ ID NO: 31429 - DNA, 270 bp, Glycine max
  unsure (1)..(270): unsure at all n locations; Clone ID: 701103962H1
gtggccgtgtcgcancaaaaccaaaccacatattaacttgtttgctctaagttcatggctctgatcttgcacgcaaccaaagcaanccaagaatgctttcaagactctgattgcggcagagtacagtggcgtccaagtggaattggcccctaatttcgagatgggtgtctctaatagaactcctgaattccttaaaatgaatcccataggaaaggttcctgtcttggaaacgcccgatggtccagtctttgagagcaatgccattgctcg

SEQ ID NO: 31430 - DNA, 273 bp, Glycine max
  unsure (1)..(273): unsure at all n locations; Clone ID: 701103963H1
aagaaaaacagaaccacacannaaacaaataccncaattaaatctgtgaatggagtncctaatttctttggtgaacaannatccagagggcttgcaccgctttgggtgaccacggcgaagaagtgccttaccaactctctgggactctctccctgctatcgccgtcgtcggtggccagagctctggaaagtcctcggtgttggaaagtgttgttggcaaggatttcttacctcgtggatcagggattgttactcggagaccccttgttttgca

SEQ ID NO: 31431 - DNA, 274 bp, Glycine max
  unsure (1)..(274): unsure at all n locations; Clone ID: 701103964H1
cnnngcagncngtntnaatgctgcaactttggnccttgacgatgctgggattcctatgcgtgatcttgtaacttcctgtagtgctggataccttaatagcacccctctgcttgatttgaactatgtagaagacagtgctggaggtcnnnntgtaactctaggaattcttccgaagctggataaagtgacacttcttcagatggattctaaactaccaattgacattttggaaaatgttatgcaactggcaattgaaggctgcaaagcaatagct

SEQ ID NO: 31432 - DNA, 273 bp, Glycine max
  unsure (1)..(273): unsure at all n locations; Clone ID: 701103966H1
aagaagttccaaaatgtgtccaaggagggtttgaaacttgggaaagattcaaaagacaangaactgaaggaatcttttaaggatcttaccaagtggtggaaaactgctctttccaaagacaatgttgatgatgtgaagatttccaaccgattagataacactccttgtgtagtggtgacatcaaaatttggttggagtgctaacatggagagaatcatggcagtctcaaactttgtcagatgctagcaagcaagcatacatgcgcggcaagag

SEQ ID NO: 31433 - DNA, 273 bp, Glycine max
  unsure (1)..(273): unsure at all n locations; Clone ID: 701103967H1
gctataagctagtttatcgtgaggagaatatgaagttgtttgntttctttnttgctgcagtagttttggtagcatggccatgccatggcgcaggctaccaaaggttccctctccgaangaaaactggctatggtgagcgttcttcggaggtaaaatgcgcaagttttaggcttgctgtggaagcacacaacatccgagcnatanaaccattcctgaagagtgcgttgaaccaacaaaggactacattaatggcgaacaatttagatcagactc

SEQ ID NO: 31434 - DNA, 106 bp, Glycine max
  unsure (1)..(106): unsure at all n locations; Clone ID: 701103969H1
ctattaaaaccgaaaaaggctaaaaaagaaaatgtcagaaaaccgaagccttttagctctatcattcatcgccatcttcttattcttctgcttcncanncagatnt

SEQ ID NO: 31435 - DNA, 271 bp, Glycine max
  unsure (1)..(271): unsure at all n locations; Clone ID: 701103970H1
cgttggagggtctgatagactcacccgcgattttctgggtgttggtcagatagtgaggggaatgagtgggagtggaggggttgcacagagagaacaacaacagcaacatggcttcaacttgagttctttggaagctgaaagannnnnnnnnnnnnnnnnnnnnnnnnnngctgcgccgtcatcagggcaagcttttggaggtngtggagggaattttcagtgatgagaaaattcatatcctccatgatgccaacaaagtacaagggtttca

SEQ ID NO: 31436 - DNA, 271 bp, Glycine max
  unsure (1)..(271): unsure at all n locations; Clone ID: 701103971H1
tgtggttgaaagttaagaagtagcaaagatgtttccattcgggtcacaagggtcaaaagataaaggggactatggnggttatgcagaagaatntgttggatatcaacagcatcaccagtgttgacgggatcgncggcaccggcttagacttcttaggcagtgcactcgatacagttacttttttagcctcctccatctccatccaacttattagtgctaccaaggctgatggtgggaaaggaaaagttggaaaggctacaaatttgagagg

SEQ ID NO: 31437 - DNA, 272 bp, Glycine max
  unsure (1)..(272): unsure at all n locations; Clone ID: 701103972H1
tcttgttggtaaagaaagagaagaaaagagtggaatcgaagacgaagacgaagatggaggacgcatncagcatcaaagttcatcccacaccaaatcggaggggtccaaaacgacgtgcttcgatttggtctccatggagtcaagagcgacatcgttggttcccaccctcttcaatcttcactccaatctacaaggagaatggatgaagcgatgaagaagcaatgcaaagttaacctgtacggaactgcttttcccctgaaggaggagcttga

SEQ ID NO: 31438 - DNA, 271 bp, Glycine max
  unsure (1)..(271): unsure at all n locations; Clone ID: 701103974H1
anttttaatgaaaatttggtttgnncttagttttccttgttggggtgaaataaaagtttttttagttggttctcgtgacttcttttgtttctttgccttttctaaattgcaaccaaaatattgattttcttttctacagagtgaacttagcaccaaacacatcctaaattaaaaaaaaaatagttataggcatagtatgtacncgatacataatacaaagtattttaaaatttaaatataanattacaaatataaatcaacataaataatt

SEQ ID NO: 31439 - DNA, 270 bp, Glycine max
  unsure (1)..(270): unsure at all n locations; Clone ID: 701103975H1
atctttctaccactctcactccaaaaatctctaattttttcatctgggaagatcggttgacgaatccgaggatccgatcgcttgcgaggaactagggtttcaatcgatcgcatcacacacaaacantcatgtttagccggatgttcggtaaacctaaacaggaaaccaatgctgttgccactttggacaagctaaacgagacacttgaaatgctggagaaaaaggngaaagtgctcctaaaaaggtggcagcggaagttgaaaaggccaa

SEQ ID NO: 31440 - DNA, 273 bp, Glycine max
  unsure (1)..(273): unsure at all n locations; Clone ID: 701103976H1
cctaaacgactcnatctctcttcgttttgntcttccttgcgctcctcctcgttcgttcgttctccctcgcgtagatcggcaatggcggagaccgagacgacntgctttccaggctgagatcaaccagctcctcagtctcatcatcaacaccttctactccaacaaggaaatccttccttcgtgaactcatcagcaacgcctctgatgctttggacaagattagatttgagagtttgacggacaagagcaagctcgatgctcagccagagttgt

SEQ ID NO: 31441 - DNA, 61 bp, Glycine max
  unsure (1)..(61): unsure at all n locations; Clone ID: 701103978H1
gggagaggtgagnnagttcangngcggngnntgtgttgatggcggttagggtttcctgttg

SEQ ID NO: 31442 - DNA, 276 bp, Glycine max
  unsure (1)..(276): unsure at all n locations; Clone ID: 701103980H1
aaacccaaagaacacggagttggcggcgaccctttctctctctgatttcgatcatggcagctgttgctcnntcttcctgacaaaactgcagatttattgcagnatttgacctctggacctctgagtccnaaagccnattggagttgctgagcctgcgaagaaggnacttnactgcttttcnattnnatngctncgngcctttttttngtnggtttgtgaactatataaaacacnggnnnattngnngtngngcaattngggnnnaganggaccnnc

SEQ ID NO: 31443 - DNA, 285 bp, Glycine max
  unsure (1)..(285): unsure at all n locations; Clone ID: 701103981H1
cnnntcgntncgnncnagngtnaagcngctcgaggtcnccaacttgttatcaaccctaancgtttctgagctaatacccccaccangccantgcnnactttcaacacaaccccctttcnanaacccttagggtttattattgaacccaagcatcagtatcgaaactccccgaatacgagatgccatcggtaacatggggcgtaatccagggtcgcaaggagaactcgtttcgcgagtaatcatcttcgattacctcaagtgtttgggaatcatccccgaccaatg

SEQ ID NO: 31444 - DNA, 271 bp, Glycine max
  unsure (1)..(271): unsure at all n locations; Clone ID: 701103982H1
gcacccacaaatgggtaactcccatggacacnggcatcgcaaacacggtaactccgttcctcccaacacggttccncctccccataaatacaatcctcacccaaccanctccaattccaccatgctttctcttccttacacccacgtcgacaccaccctccgctccctcgccgcccaagccgagggcttcggtcgcttcgctatcggcggcctccacggtccccttcaccccgtcacatctctcgcagatgatggaccggggtcatgcgtg

SEQ ID NO: 31445 - DNA, 271 bp, Glycine max
  unsure (1)..(271): unsure at all n locations; Clone ID: 701103983H1
ctcttccctgtccnaaagngttggcctaaggccttcttctaactccttctgtgacactctcctacccctttcctttctttccactttttataaactcnagagagagagtgtgtgagaaagcaacttgttagagaaaaccagaaacacaagctttgtttctctctcttctcacttctgcatttggtgcaagaacctgacttgaacaatattaatatcttatagatatgtctggtcactggggcattcttgtgtcagatccaggcttcagaac

SEQ ID NO: 31446 - DNA, 274 bp, Glycine max
  unsure (1)..(274): unsure at all n locations; Clone ID: 701103985H1
ctcgaatctcaacaatgccttccnntaccctagancaacncngaaacctcaagtggaagaccaacaagacctagctgaagacagccncacagagcaaganntttaattcggagatgaaggagattgatggcaaaggcgaananganaaggaganagaggnagaggtnnaaggcgatgaagaaaatgaggagaaggaggnacgtgacgtgctgnatcaaannagtcnncgnnngnnnncgcttgcctatccaggaagtgagnnaccaattagggt

SEQ ID NO: 31447 - DNA, 266 bp, Glycine max
  unsure (1)..(266): unsure at all n locations; Clone ID: 701103987H1
ttgacgccattggccattgagttaagtaagccgcatcctcagggtnaaggatatggtcctgttagcgaagtctacgtgccttcgagcgagggngntgaagcttacatttggttactggcaaaggcttatgttgttgtgaatgattcgtgctaccatcaactcgtcagccactggctaaacactcatgcggttgttgagccattcgtcatagcaacaaacaggcatctgagcgtggttcaccctatttacaaacttttgtttcctca

SEQ ID NO: 31448 - DNA, 270 bp, Glycine max
  unsure (1)..(270): unsure at all n locations; Clone ID: 701103988H1
tnaaaaattggnacctgnctntcttaaagtttgtatttntttgagcgggtgggttgattgagagtantgtgcaagctttnganactttgtccnaacctgctacttcaatggctactgaagaggttaacaaacctcaatcacttcctccatacccngagatgatagtgaaagcacttgaagcactgaatgagccaaatggatcgaacaagtcagcaatatcaaagtacatagtgaaccacctncggtgagttgccagacgcaaccgttttg

SEQ ID NO: 31449 - DNA, 267 bp, Glycine max
  Clone ID: 701103991H1
gtgaacaaaaaagtgtagtgggaaatggcaggtgcgggtgcaggaggagggtatggggacgcgaaccagaggatagactacgtgttcaaggtggtgctgataggggactcggcggtggggaagtcgcagatactagctcggtttgcgaggaacgagttcagcttggactccaagtccaccatcggtgttgaatttcagacgaggactttggttatcgatcacaagaccgttaaggctcagatctgggacactgccggccaagaacga

SEQ ID NO: 31450 - DNA, 252 bp, Glycine max
  unsure (1)..(252): unsure at all n locations; Clone ID: 701103993H1
ctccctcactctccactccctcaatannacaatcctcacgttncctcgttcacatgaaactcacctcgccctccgtgttctcgctctctctctgaatcactcatccttataataaataaataatttctcgaagaaggagaaagaggttttcattgttgtggttgttnnnnnnnnnnnnnnnnnnnnnnnnnnntggagtccacagaatctttcataggtgtcttctcccgagggaccgagggaagcacgctt

SEQ ID NO: 31451 - DNA, 266 bp, Glycine max
  unsure (1)..(266): unsure at all n locations; Clone ID: 701103995H1
ggnggggtatcatccgaaccccgtcccgttctcactgtctcattcaaagcgttttcgaccctctccgaccatgggaacctgcttttccgccaccaaagtcagcggctcccacggcaacgccgtcaccgtcaacaagaaccgcaagggggccgcgaaccgaaatcagagacggcaacggcgaatcccctacggcacaaggcaagttcgcgccacgtgccgtgcgggaagcgcaccgatttcggttagagaaggatttcgatcagcgt

SEQ ID NO: 31452 - DNA, 219 bp, Glycine max
  Clone ID: 701103996H1
tttcagaatttacgagagagaattttattttgttttttcggttatctttattggtttctcttacatcgtttttgtaggcgctgaggaagaagctttggcagcataactttgttggggagcataaaattcaggcaagcccttgaagttggagagtattagatgggaatcttagaatttctctttagaccaaagaaatggaggtatatggaaattctatgg

SEQ ID NO: 31453 - DNA, 272 bp, Glycine max
  unsure (1)..(272): unsure at all n locations; Clone ID: 701104007H1
gcnatatagcccaagccctatacaaccaaaccctaacacacacccatttgattcagtttccatgggctagcctcaaggttgcatttttngctgcagtgctctgcatggttgtggtgagtgcncccatggcacatgcagctatcacgtgcgggcaggtgacgaatagcctgatcaattgcatcggttanctccagnacggaggaangccgccgtngggatncnnaaacggagtgaagagcctcaatgccgccgcnaaagacnacngcngntcg

SEQ ID NO: 31454 - DNA, 273 bp, Glycine max
  unsure (1)..(273): unsure at all n locations; Clone ID: 701104008H1
anntagcttaagagtgagaagtgagaagngaaaaatggcaatctccatacccagncggacaanttttnatagatggagagtggaaagtccctcttctnaacaatcggtttccgatcatcaacccngcnactgncagacatcatagggcatattccagccgctactaaggangatgttgaccttgcggtggatgctgctaaaagagccttttcccataacaaaggcaanncattggtcttcagctcctggcactgttcgtgctcgctatcttcg

SEQ ID NO: 31455 - DNA, 268 bp, Glycine max
  unsure (1)..(268): unsure at all n locations; Clone ID: 701104015H1
ctttttcccagtccaagcagcctccaattcgtgccactctcttcaaaatggccgttaccttctcaaatctccacacagaatcaggtncgnaagtccctcgacgacttcctctctgggaaggtctacgtttctggggatcagttcacaaaggacgacatcaaagtgtatggtgctgttttggagaagccaggtgactcttttcccaatgctgccaagtggtacgaggttgtctcatctcagcttgctgcaagcttccccggcaatgctc

SEQ ID NO: 31456 - DNA, 273 bp, Glycine max
  unsure (1)..(273): unsure at all n locations; Clone ID: 701104020H1
ttggttnnctttactattcgatggtggnatcctgcaacctttgaagccatgcatccagagggaactgctagaagacctacgtggccatncatcgaagataaatcctatctctggaccatggctgtttctggtacccttggttgcttacactttgtggcaggttctatacttcctcattgtcaatgtattacgcagacaaaggcttttaagagatcccgaagtcatgacttcctacagggaactctcaaaaaaggctcagnaagcaaacaacat

SEQ ID NO: 31457 - DNA, 270 bp, Glycine max
  unsure (1)..(270): unsure at all n locations; Clone ID: 701104021H1
tctcagtcgaggaagagagttgacgccgtcgattctcgcgctgcttccgttctcgttcgcgccaaagatggcagtgcttttgctcgttgcgacgattgcaagaagaatgtgccggttgcactcatcgacatgcacagttgcagccttgaagctaaaattaaaatgaacctagacgctcaagttgtggaacaggctgctgaagctaagaagccagagaggaagaagcccaaatctaaagagcctatggcaaaanaggctaaagttgggaag

SEQ ID NO: 31458 - DNA, 270 bp, Glycine max
  unsure (1)..(270): unsure at all n locations; Clone ID: 701104023H1
acaaagcagnaagcanagctcatccttgngttaaaaaatggncagcagcttcttccatggctctctcatccccatccttggctggcaangccgtgaagctgggcccatcagccccagaagtgggaagggtgagcatgaggnngaccgtcaccaagcaggtctcctcaggaagcccatggtacggtncagaccgagtcaagtacttgggcccattctctggcgagcccccgtcctacctaaccggtgagttcccaggcgactacggctggg

SEQ ID NO: 31459 - DNA, 164 bp, Glycine max
  unsure (1)..(164): unsure at all n locations; Clone ID: 701104024H1
gngcttatgccactaactttgtcccacggacaatgaggatgcactnacatgcaatgcaatcttacgctgcccttttgcagttcccttgtgtttaactccattttcactaatgtaactacacctgtgtagcagaaaaatctgtatgagaaccattatatttttat

SEQ ID NO: 31460 - DNA, 268 bp, Glycine max
  unsure (1)..(268): unsure at all n locations; Clone ID: 701104025H1
gggtttagcggtagcatagagatagcgcggattgaaactctaatggcactctcaacccctctcttctctntctcttctncttttcttcattcatctnctgctctatgtcttnnaaagcncctcttcccttattngacagtgagcaattcaancttcnagaccaccagtnctcggcgttcgctccgaaatgggttcttcccctgagcccatcaatttcaggaagtccgagattccgtccatgtctcacttgagactctcaatgaacgat

SEQ ID NO: 31461 - DNA, 263 bp, Glycine max
  unsure (1)..(263): unsure at all n locations; Clone ID: 701104026H1
ctcaatctcactgtgttgtgagtngtgtgtgagcaccaaccaacaatngtgtctctgactccgttatgtttctttattaccttgttgaccgctggtgcagacgcagcggcgganccccaaacggtgcgttttgacaccggggggttgagcagagacacctttcccaaaggattcttattcggaacggccacgtctgcgtaccaagtggagggtatggcccacaaagacggtcgcggcccaagcatttgggacgtcttcatcaa

SEQ ID NO: 31462 - DNA, 263 bp, Glycine max
  Clone ID: 701104027H1
ctgtcttgtgactggcgaatacggttggaccgcaaacatggaaaggataatgaaggcccaagctctaagggacaacagcatggcagggtacatgtcaagcaagaagaccatggagatcaaccctgagaacccaatcatggaggagctcaggaagcgtgctgatgcagacaagaatgacaaatccgtgaaggaccttgttctgttgctgtttgagactgctcttctcacttctggtttcagccttgacgagcccaacacttttg

SEQ ID NO: 31463 - DNA, 264 bp, Glycine max
  unsure (1)..(264): unsure at all n locations; Clone ID: 701104030H1
ttggttttctttactattcgatggtggaatcctgcaacctttgaagccatgcatccagagggaactgctagaagacctacgtggccatacatcgaagataaatcctatctctggacatggctgnttctggtacccttggttgcttacactttgtggcaggttctatacttcctcattgncaatgtattacgcagacaaaggcttttaagagatcccgaagtcatgacttcctacagggaactctcaaaaaaggctcagaaagca

SEQ ID NO: 31464 - DNA, 276 bp, Glycine max
  unsure (1)..(276): unsure at all n locations; Clone ID: 701104033H1
caatcctgttcttgaaagacgatggatctttaaagccacttgctanccgaattaagcaagcctgcaacagtgagtaaagtggtgttgcctgcaacagaaggtgttganagtacaatttggttgnctggccaaggctcatgtcattgtgnctgactctggttatcatcagctcataagccattggttaaatactcatgcagtgatggagccatttgccatagcaacaaacaggcatctcagtgtgcttcaccccatttataaacttctttatcctcc

SEQ ID NO: 31465 - DNA, 268 bp, Glycine max
  Clone ID: 701104036H1
gcgaagatgtcgggtcgtggaaagggaggcaagggtttgggaaagggaggagccaagaggcacaggaaggtgcttcgtgacaacatccagggtatcaccaaacccgcaattcggcgtttggctcgcagaggtggtgttaagagaatcagtggtctcatctacgaggagacacgtggcgtcctcaagattttcctcgagaacgttattcgcgacgctgttacctacaccgagcacgctagaagaaagaccgtcaccgctatggatgttg

SEQ ID NO: 31466 - DNA, 264 bp, Glycine max
  Clone ID: 701104039H1
cccagctcgagaaaagcaaaagattgtgagaactgctatcagcaagtttcgtgcagccatacagttgcaatttgatttccatcgggcaatttacaatcttggaactgttctgtatggattagcagaggacactttaagaactgggggatcagtgagtgctcaagaagtttcaccaaatgaattatacagccagtctgcaatatacattgctgctgctcatgcattgaaaccaaattattcagtttatagcagtgccttgcggtt

SEQ ID NO: 31467 - DNA, 263 bp, Glycine max
  unsure (1)..(263): unsure at all n locations; Clone ID: 701104041H1
ccaacatctacgttatctcctccaattccatcccgatctctttatngtcttcttctctcntcctggttttcgttggagaatcctgaaagccgtttgattttaatcaaagggtcatcaggattcggacaccaatatctcgaatcactcctctgttgtcttggaagaagaccaagcaaaggaaacgaagaaaaacatcaatttttgcaagcaacaatcttctttcttcttcttctgccccttttcttctcttctcttgtcttaaa

SEQ ID NO: 31468 - DNA, 264 bp, Glycine max
  Clone ID: 701104046H1
caaactatcatggccacggcaacagcagctgccacctcgtcctttatggggacgcgtcttcctggaggctcactccggggcggggcgagtgcacgcccgattcggcttcggcaagaaaaaggctcccgccccaaagaaagcctccaggggatcgggccgagacaccgacagacccctttggtatccgggcgccaaagcgcccgaatacctcgatgggagtcttgtcggagattacgggttcgatccgtttgggctagggaagcc

SEQ ID NO: 31469 - DNA, 260 bp, Glycine max
  unsure (1)..(260): unsure at all n locations; Clone ID: 701104047H1
gagtcgaagaaacgggagcggaagaattcttgtggcttgcttaaggagattcatcagattgagaaatgtgctagagtgatgnatgatttggctgattctgtccacttcccattgacggaggggaaagaacgagaggttagacagatagtgcaggaggtttcacaagtctgtgatgctttgaaaggtggactagaccctttggagcgccaagtgagggatgtcttccatagaattgtgcgcaccgaacagaagggcttgac

SEQ ID NO: 31470 - DNA, 263 bp, Glycine max
  unsure (1)..(263): unsure at all n locations; Clone ID: 701104048H1
gcaccctaaggatggtgtttaccctgagaaggtcaacgccggacgccaaggggtgggtcaaaacttcaggtctattggtaagaatgttagtcctattgaggtcaagttcactggcaagcagccctatgatttgtgagcacacaactcnnnnnnnnnnnnnnnnnnnccccgtgcttcctttatatgctatatattctcatgngatatcatgtacctattgtcaattttattatgccacaaatattgcttaaactctgtacctt

SEQ ID NO: 31471 - DNA, 271 bp, Glycine max
  unsure (1)..(271): unsure at all n locations; Clone ID: 701104049H1
cgataactagaaacagtgtgatgaaaatgaaggtccttgttttcttcgttgctacaattttngtagcatggcaatgccatgcgtacgatatgttccctctccgaatgaacactggctatggtgcccgtactccggaggtgaaatgcgcaagttggaggcttgctgtggaagcacaacacatctttggctttgagaccattcctgncngagtgcgttgaagcaacaaaggaatacatccatgncgaacaatatagatcagactcccaaaaca

SEQ ID NO: 31472 - DNA, 267 bp, Glycine max
  Clone ID: 701104050H1
cacaatctttagttgttgccaacctcctctagggttcctctgtttcttaactttcttcacatcaatggcaaagaagagaaccgcacctcagaagaagacccagatgatgaatcccatgccaaaacattctcaacagccaagaagctcacctcctaaacgccgcactgatttctctttcttcacgcgctctccctcctccttctccaaccctacttctggttcctcaccagattcatcttctggtgaagtgaggttgtccaatgttgc

SEQ ID NO: 31473 - DNA, 222 bp, Glycine max
  Clone ID: 701104051H1
ccagcgtcatgttatagcatttgacccactcttaatcggcctgcatacgtaggactcttacccttcttcagtttttctcatttctggttctgttgttgcagacgctgacatgacaaaacacgcttcttcctaatcaatcctctttgctactttgactcaccaatataaatatcaattataaattgccgtatccattgcttcatttcactctttctcttctca

SEQ ID NO: 31474 - DNA, 261 bp, Glycine max
  Clone ID: 701104053H1
gcggtgtggaacttccgtggagaacttgtaacttcttttgaggatcacctcctgtggcatcctgattgcaatacaaacaacatatatataaccagtgaccaggatcttatcatatcatactgcaaggctgattctgatgattcattgtccgaaggaaatggttctattaatgtcagcaacattttaactggcaagtgtcttgcaaagataagagcgagtaatggcttccccatggtgaaggaatgcagttgcagcgatgac

SEQ ID NO: 31475 - DNA, 259 bp, Glycine max
  Clone ID: 701104056H1
tcaacgacaaccattttctattttctagtcacacaacacaacacaacaaccttcctccttcctctttcctgtgttgttgtgtgctgctatggggcgagggctgggtgttgtgctggtgttgttggccgtgtactgtgggctggacccgttccagcacagcccaatagcccacttcccggacttcgaggtcaagagggtcgacatgcccgcatggtccgaggttcccaccgaccaagacaagcacaatttgttgcagaag

SEQ ID NO: 31476 - DNA, 258 bp, Glycine max
  unsure (1)..(258): unsure at all n locations; Clone ID: 701104057H1
gttaaaattctgaaagatacttcacattatcattctagnaaaacnnacccatcaggntganganctagcatccttacaatatcaatgacaggatgctagttcttcatcctgatggggctgttttacttcacaagcattttgaagcagaaaatgacatactaatggaagtgattaagaaagtcactgtaaatccaacaatccctgcaaatctgttgaccagcaaccgngttgtaactaatctcttcaggaatttgtgct

SEQ ID NO: 31477 - DNA, 256 bp, Glycine max
  Clone ID: 701104058H1
agagactgagcaacctaataaagatattgtgtatgggagccaaaaggtgcatgaaggaaaagaaaatgcacatggggccatggaggaagcataggtacatgcaagctaagtggttaggtccatgtgaaaggaacacttccacaacctcactttcagtgaggtataattctgagaggatattgccaaggccaaaggcatccatgttgactgttgatctgctagagaagccttcccaatatgcattgcactgctgttg

SEQ ID NO: 31478 - DNA, 256 bp, Glycine max
  unsure (1)..(256): unsure at all n locations; Clone ID: 701104059H1
aactagactcacacgcgcacccatcaccgtctgatctcgatcgcacggacaatggcgtaccgcagcgccattcgtgcgcagagcccaagaggccagccaccgcgacacatggcgagccgctctctccgaattcatctccacactcatcttcgtcntcgccggctccggctcctccgtggccgtcaacaagctcaccgtcgacaagccctccgccctcgtcgtcgccgccgtcgcacacgccttcgccctattcgtc

SEQ ID NO: 31479 - DNA, 255 bp, Glycine max
  unsure (1)..(255): unsure at all n locations; Clone ID: 701104060H1
ttctgtgtgtgcgagaaatggcgatgnccaatggcgcttcgcaggctttcatcttcaattgacaagcctctgcgccctctattcaatgccggttccctctactacaagtcgtctttgcctgatgaagctgtttacgacaaggagcgacccggagttacatggccgaagcagttgaatgctccacttgaggtcgtggatcctgagattgctgatattattgagcttgagaaagctaggcaatggaaggggctagaa

SEQ ID NO: 31480 - DNA, 257 bp, Glycine max
  unsure (1)..(257): unsure at all n locations; Clone ID: 701104061H1
ttttcttcgttgctacaattttngtagcatggcaatgccatgcgtacgatatgttccctctccgaatgaacactggctatggtgcccgtactccggaggtncnatgcgcaagttggaggcttgctgtggnagcacacaacatctttggctttgagaccattcctgaagagtgcgttgaagcaacaaaggaatacatccatggcgaacaatatagatcagactccaaaacagttaaccaacaagcttacttttatgcc

SEQ ID NO: 31481 - DNA, 247 bp, Glycine max
  unsure (1)..(247): unsure at all n locations; Clone ID: 701104062H1
aaccaacgaaaaatcattatcaacacaacaaaacaatntnaaaaacaacaacttcttcttccgaacaaactgcagnntnangtttggacaccctcgcagctcacttgcttccctccgacgcngnntccgcnaccgngatcctcngccccnanggctttnggccccgncggatcttctcngcggtgaactgaagggtatgtaacgtcgtcgacgagaggacggcaanagtacagatcgagtcacccag

SEQ ID NO: 31482 - DNA, 259 bp, Glycine max
  Clone ID: 701104063H1
cttcatcatggcttcctcgtgtgctccctctgccattgcagctgttgccatctccacaccaagttcccagaagaatggatcactcttgggaagcacaaaagcttcttttcttagtgggaggaaactgaaggtgaacaactttacagcaccagttggagcacgatccagcactacagtttgcgcagttgctgagcctgataggcctctgtggttcccaggcagcacccctcctccatggctagatggcagtttgccagga

SEQ ID NO: 31483 - DNA, 265 bp, Glycine max
  unsure (1)..(265): unsure at all n locations; Clone ID: 701104066H1
anaccacaacaanaataacannggctgcctcactaacaagctgcagctaccttcatgcaaccnaccaaggttggcatagcctctcgcaanctcaaatctacacaatgcatnncantangcttttggcttggaacctgctgcagctaaactcacttgctcccttnagcctgatctcaaagaatttgctcaaaaatgtgtcgatgctaccaaaattgcaggattcgcccttgcnacctctgctctcgttgtttctggagcaagtgca

SEQ ID NO: 31484 - DNA, 262 bp, Glycine max
  unsure (1)..(262): unsure at all n locations; Clone ID: 701104067H1
ctttctgaaacagagcatgnnctcctctcacattctccttcttcttcatccttatctcttacatttcttcatcatcagaagcgggatcaatcggaataaactatggaagaattgcgaacgacctacctacaccggcgaaagtggtggagcttcttaagagtcaggggctgaaccgtgtgaagctctacgacaccgacgccaccgtcttaaccgcgtttgccaactcaggaatgaaggtggtggttgccatgccaaacgagct

SEQ ID NO: 31485 - DNA, 261 bp, Glycine max
  unsure (1)..(261): unsure at all n locations; Clone ID: 701104068H1
ctgttacagtaaacaagtatgcttcatctaatctgcaagctgttcccagaacacaaggaaaagtagcaaccaaaaaaaccacaccaaccttaagcnccaatgtggaaatgggaagaagaggacttgtcttatccactgtaatcgccaccacgcaagtacctgaacctgactctaggactcagcttcttaaaaaatatcagaagaaatcagaggaaaacaaggagaaaaatgacaaagagaggctggagagttattacaagc

SEQ ID NO: 31486 - DNA, 259 bp, Glycine max
  unsure (1)..(259): unsure at all n locations; Clone ID: 701104069H1
ctttcgatatcaacggtatanaagatangctctccaatcagttccgnccttggcaacgctcncttaccanttctgggttcgagtccattgacatttacaccggatacaaggtgtttcaagtgngagtgaatttcgtcaaagatgcgcagaagcaggaagcnatgtgggagaggnagcacgagcttnccgncgatnagatttctccatgtgcnatgaccttggaggtttcntcctcaagattgctcagattatgggcanc

SEQ ID NO: 31487 - DNA, 256 bp, Glycine max
  unsure (1)..(256): unsure at all n locations; Clone ID: 701104070H1
taatgctatctacgntggctctctctgcgcatatttgccgtttccccgccacgcgcgctgacactgctttgccggagactctcaccagaatccggtgccagaagcctctctctgtccgatgctctggcgattccccttccggctctgtgggttcggagttcgatccgaaggtgtttcgtaagaaccttactcggagtaagaattataaccgcaaaggatttgggtncaaggaagagaccctccaactcatgaatcg

SEQ ID NO: 31488 - DNA, 254 bp, Glycine max
  unsure (1)..(254): unsure at all n locations; Clone ID: 701104074H1
atggaaatcggctcncccgncattccttaccctcgaagactattcttcctncttcttcccttgcatggatcccattcccaattccaatgtcaacaagcgtngtgcaaanaacgaccagttcgacttaaatgactccgcattcagccacctcctcaattccatcatggatcctaancatttccaacaccaatccaaannaatccaattcgactcctccccaaccangaganctngccgtgacntcctcgttctcg

SEQ ID NO: 31489 - DNA, 253 bp, Glycine max
  unsure (1)..(253): unsure at all n locations; Clone ID: 701104075H1
cctcaagcnggcaactatctaccgggaggagcataatgnagttgacttgtacatcattctccttagatttttaagtttggtttctgaaactataccatatcatcgagattatccaagcttcactgcccaatgaaagagcagcatataagangagatcgcgagctgtgttggatgagcttgaatctttgaagcccgaatttaaactccgggtggaaaaaatgaatgactcacatgtaaaagctctattgcctgg

SEQ ID NO: 31490 - DNA, 253 bp, Glycine max
  Clone ID: 701104077H1
agaaaattagggtttgcagtcactgctttgtttagatcagaaccagatcgtgttctcttcttccattggcaaacatggcaactcaaatgagcaagaagagaaagtttgtggcggatggagtgttcttcgccgaactgaacgaggttctgacacgtgagttggcggaggacggttactccggcgtggaggttagggttacgccgatgcgcaccgagattatcatcagagccaccagaacccaagccgttctcgg

SEQ ID NO: 31491 - DNA, 254 bp, Glycine max
  unsure (1)..(254): unsure at all n locations; Clone ID: 701104078H1
cnacgccgcacctgttctccctccaaaagaattaaggtaatggatatnttgttgttattatgtgttctcttggttgcattgccaaacctgnctgtagtagagagtcgcagggctcctgttctggactactttgagtantgtgctatgagctgcagagcttacagtgcctcattggaagaatttggaggggntggtgacggaacaactttgaacacaaaagcttttcaggcagccatagatcatctgagtcagta

SEQ ID NO: 31492 - DNA, 254 bp, Glycine max
  unsure (1)..(254): unsure at all n locations; Clone ID: 701104079H1
accccttctgtgtactgtggcagaggggaccggaaaactgccaagggaaagcgcttcgcccattcatttggaantgcgaggccaaaggacaagaacnagggtagaggacnaccaaggccttatgctccaccggcaccttccaanaaagacaagntcgaagntaatgaggtggtgnagattganatcgacnagtcccttttctcgggttgattttagtggtgaattgtaattttgagcctttccatggtttagtt

SEQ ID NO: 31493 - DNA, 234 bp, Glycine max
  unsure (1)..(234): unsure at all n locations; Clone ID: 701104080H1
atccatcccagctttgccacttccantacatcctggccagcactcaatggattcaggagtaacngttggaggttatcatgatgggacagcttctagattctccttgcaaccacatcctaatcttaattcttccattcagtttgatgataatgcatttccactacaaaaccagttgatgagtgcttcacaccatgcccaattccaagaaatgaaaatgggcagactattggtcct

SEQ ID NO: 31494 - DNA, 260 bp, Glycine max
  unsure (1)..(260): unsure at all n locations; Clone ID: 701104081H1
ggaagggaaggaggagagggncagggagagagaaagaaaggtgaattggattgcatctctcnctgtgtgttggaanaggggaatcgtagatctgannnnnnnnnnnnnnnnnaataattttgtgatcagaattattgagctgaacaaaagacaatgggattgtgggaagcttttctcaattggcttcgcagcctttttttcaagcaggaaatggagttatctctaataggacttcagaatgctgggaagacttcccttgt

SEQ ID NO: 31495 - DNA, 259 bp, Glycine max
  unsure (1)..(259): unsure at all n locations; Clone ID: 701104082H1
cttcacttgatggttngaaacagcatattggttctggaaaccctagnattgagaaatgtggcagcattttggataatcttctgcggtcacttgatctgccaaaggttaaaaagtctgctaaagggaaggttttgatgcaagctatgtatggagtaaaggtgcagacagtatttttatgcagtgtgtttgctgcggctttttcgggctctacaaagaatatgtcagatttggatgtggctgatgtatattcttgggctcc

SEQ ID NO: 31496 - DNA, 258 bp, Glycine max
  unsure (1)..(258): unsure at all n locations; Clone ID: 701104083H1
atatatgggcggacggatggtactatgatttcaagcatacacactttgatcaatattcacctccagacttctacacaagagtggggantgctggagtccctaatgatactataatgaagagaactaaggcaatagaggataattggttacctacatggaatgaggcatttgagttccctctcactgttccggagttggccttgcttcgcatagaagttcacgngtatgacatgtctgagaaagatgactttggtggac

SEQ ID NO: 31497 - DNA, 74 bp, Glycine max
  Clone ID: 701104084H1
cagctgaaaaattgggcctacctacttctccaccttatctctgccctagtatctaaggtccaccacaacatacg

SEQ ID NO: 31498 - DNA, 255 bp, Glycine max
  unsure (1)..(255): unsure at all n locations; Clone ID: 701104085H1
ctnttgnnttgcttagattctgttctgcagagagnganaganagagtttcagantttagagagagaattttattttgtnttttcggttatctttattggtttctcttacatcgtttttgtaggcgctgaggaagaagctttggcagcataactttgttggggagcataaaattcaggcaagcccttgaagttggagagtattagatgggaatcttagaattttctctttagaccaaagaaatggaggtatatgga

SEQ ID NO: 31499 - DNA, 253 bp, Glycine max
  unsure (1)..(253): unsure at all n locations; Clone ID: 701104086H1
tgaatcaagnaacctctgaaatttgaatccgtcnangcctanagatgtctgcgattgcgatcttaccctttctactccacgttctaattgctgcttcagantcagaaccttttcaagacagtattctccagtgcctctctctctattctgacccctctcttccaaatccaatctctgcngtnacctatttccccaacagcccctcataacctcccatcttagactctacatcagaaacctcagattcagttcc

SEQ ID NO: 31500 - DNA, 257 bp, Glycine max
  unsure (1)..(257): unsure at all n locations; Clone ID: 701104087H1
attccttcatttttaaacctagctccatctccctccactcncncataacatgnncatcagaagcaaatgctgccancaccaacttctgtgtaaatgttagnaacaatggctacattagtgctaatgacncccttgaactggggtgcggcggcggaggctatggctgggagccnnntcgacgaggtcaagcgcatgctagaggagtaccggagcccgtcgtcaagctcggtggaganaccctgaacnatctcgcaggt

SEQ ID NO: 31501 - DNA, 203 bp, Glycine max
  unsure (1)..(203): unsure at all n locations; Clone ID: 701104088H1
tttcagaatttanccagagaattttattttgttttttcggttatctttattggtttctcttacatcgtttttgtaggcgctgaggaagaagctttggcagcataactttgttggggagcataaaattcaggcaagcccttgaagttggagagtattagatgggaatcttagaattttctctttagaccaaagaaatggaggta

SEQ ID NO: 31502 - DNA, 244 bp, Glycine max
  unsure (1)..(244): unsure at all n locations; Clone ID: 701104089H1
caccaagccatttcccacagaagcttcatccccataggagcacgtggcatncccanacgcaggaggaatcaaagaatccaatggcaccgatccatccaaagctgccacaatggtatcggagaacgcggtggtaatcattggaaaacggggatgctgcatgtgccacgtggtaaaaagattgttacaaggtctgggagtgaaccctcccgtgtacgaggtggacgaggaccacgaagccgccgtt

SEQ ID NO: 31503 - DNA, 250 bp, Glycine max
  Clone ID: 701104090H1
cttgatccttctttttctccttgaactcaaacatggcagatgaggtggttctgctagatttctggccaagtccatttgggatgagggtcaggattgcacttgctgaaaagggtatcaaatatgagtacaaagaagaggacttgaggaacaagagtcctcttctcctccaaatgaacccggttcacaagaagattccggttctcatccacaatggcaaacccatttgtgaatccctcattgctgttcagta

SEQ ID NO: 31504 - DNA, 250 bp, Glycine max
  unsure (1)..(250): unsure at all n locations; Clone ID: 701104091H1
ganaaaaagttagggttttgcattttggatcagtcagactcagacatgggaggaggcaatgcccagaacncaaagatggctcgcgagaagaatctcgagaagcagaaagcagcggctaaggggagccagttggattcaaacaagaaagctatgtctattcagtgtaaggtgtgcatgcaaacatttatatgcaccacatcagaagtgaagtgtaaggagcatgctgaagccaaacaccccaaatctgatt

SEQ ID NO: 31505 - DNA, 250 bp, Glycine max
  unsure (1)..(250): unsure at all n locations; Clone ID: 701104092H1
tttgttcccaagtagaaacacaacatgatcctgangnaggananngnagacaggaacagttcctgtctgccacttcctgcctcaggatcatgttgtctttgttcccaagtagaaacacacacgagtcncattnnctgatgttggtgaataatttggcagttttaatagcatgaaatgaggttttaaaactgaatgcgtagtatttgcattatgttatcctacgttgtcagcatgtttgcttttacaggtt

SEQ ID NO: 31506 - DNA, 254 bp, Glycine max
  unsure (1)..(254): unsure at all n locations; Clone ID: 701104094H1
gactccttgaatatgaaagctgcagttggtgcacaatacaaagggaagaagcaagattatttctctggaatncacagtttcgacaaggaacgcttactctatctcagctgcgaaaggntgttctatggggaaaaaggagtgtggaatngatccctganagccnagctgcggccanttgaaanagtnccaagcaanacaanactaggacattcacagcagcaccaantgatacnttacttggagcaaaggtttgt

SEQ ID NO: 31507 - DNA, 253 bp, Glycine max
  unsure (1)..(253): unsure at all n locations; Clone ID: 701104095H1
cgctattctagttgctgcttctgtctgtaacacaatacaatcatcattcatcaaatcactgaaaccaaagccacaagctgcgacatcagaagaatggaagacggtgttgaccacttggctttcgagaggnacaaggcgcagttcgatgttgaggacatgaaaatcatttgggccggttctcgtcaagactttgagctttcggatcgaatttctcgccttgttgccagcgatccggcgttcagaaaggatgata

SEQ ID NO: 31508 - DNA, 214 bp, Glycine max
  unsure (1)..(214): unsure at all n locations; Clone ID: 701104096H1
tcattttnttctctgcatctcacantgatcataccnnaaacaacccttttgagatatgtttatggttatggattcagcagaaaggtgcttagattctcaacnatggcatgcctgtgccggtgccatggttcagatggccaccccttcaacacaaaagtcttcnnctttcccccaggggcaaggntgaancaagctccatgggaaggtggatatt

SEQ ID NO: 31509 - DNA, 238 bp, Glycine max
  unsure (1)..(238): unsure at all n locations; Clone ID: 701104101H1
tccccagtcacacacaaacagctcaacctcggaccaagatttacattagatagatacatcattcatacatggncttgttcccgcattcacttcaaccttaatctccctttcccctccgatgcggcaccaattccgtacacatgtcactctccctctcgcctctctctttcccctctcttcacattcacaacaccaaagatcgcttattccagtgctccgcggcgcacgtgtggtgcgg

SEQ ID NO: 31510 - DNA, 233 bp, Glycine max
  Clone ID: 701104103H1
cacgatggagatcattatgccaagtttggagagagacttaaatgacacgagggggtattatgagagtggaaagactaaggaagcgtcctggagagaatcgcagctcaaagggttgcgtcgttttctcattgaaaaacaagaagatatcatgaatgccctcatgcatgatttagggaaacattcaacttgaagctttcagagacgagataggaacgttgattaagaccttaaat

SEQ ID NO: 31511 - DNA, 233 bp, Glycine max
  Clone ID: 701104104H1
aacaacacaggcgcagacgcaaacgcaaacgcagagcgtgatccattgacgaagatggtgcagcgtctcacctaccgcaagcggcacagctatgccaccaagtccaaccaacacagggtcgtcaaaacccctggtggaaagctcgtttatcagactaccaagaagagggccagcggacccaagtgccccgtcactggcaagaggattcaggggattccacacttgaggcctgc

SEQ ID NO: 31512 - DNA, 233 bp, Glycine max
  Clone ID: 701104105H1
gggagaagaggtcgagtttcacagcagcaatggtgtacgtcaaggctcagaaatcaaaagcctacttcaagagatatcaagttcaagttcaagagaagaagagagggaaaaaccgattaccgtgccaggattcggttgattaatcaggacaagaacaaatataacactccgaaataccgatttgttgttcgctttagcaacaaggacattgttgcacaaataatatctgctag

SEQ ID NO: 31513 - DNA, 230 bp, Glycine max
  unsure (1)..(230): unsure at all n locations; Clone ID: 701104107H1
cccctttgaaatcctttctgagttctgcgccaactgaatcaagcagatcgaactccgccatagtcttcatcgagacagagatcggaatctgattcccaaacggcaacagtatgngcgtcatcgacattctaacccgagtcgattccatttgcaagaagtacgacaaatacgacgtcgaaaagcaccgcgatgccaatgtctccggcgacgatgcctttgccagactatac

SEQ ID NO: 31514 - DNA, 228 bp, Glycine max
  unsure (1)..(228): unsure at all n locations; Clone ID: 701104108H1
ctttccttttccttcttgttgctggagattacccttgatctcgaaaccaagggagaagcnctatcaggtattcaagttgaggcttaaaaaaaaaaggcgngtgcatgtaaatgattaaccagatagttccatttgagagtnaaagcttccatttcattgcaaggctgatttgcttgtcgtgaattggataactccaatcaaaacaccgccacctctgtcttcgcgttc

SEQ ID NO: 31515 - DNA, 228 bp, Glycine max
  unsure (1)..(228): unsure at all n locations; Clone ID: 701104109H1
cagtaagtaattctttgattcagaaaccttttttgttaagcctgtggaatggaataaagttgatgctactatttaaccaaggcatcaagatttgatttttgctttgcttttttaggtgtcatactttggtcttgcaattttgtaagtatgtataaganttatttactgtaagttgtgtgtcaatgtggaccgcacctcatgctatttgtaatatggaaaagggaatca

SEQ ID NO: 31516 - DNA, 230 bp, Glycine max
  Clone ID: 701104111H1
ttgcaatcaaattagttcattctctttgcgcagttccctacctctcctttcaagatgcagatcttcgttcaagaccctcaccggaaagaccatcacccttgaggtggaaagctctgacaccatcgacaacgtcaaggccaagatccaggacaaggaaggaattcccccggatcagcaacgtctcatctttcgccggaaagcagctcgaggacggccgtaccctcgccgat

SEQ ID NO: 31517 - DNA, 228 bp, Glycine max
  unsure (1)..(228): unsure at all n locations; Clone ID: 701104113H1
gcactagatcatggtgtcgtggctgttgggtatggtacagctaatggtcatgattattggatcgtaaggnattcatggggtcctagctggggagaagatggctacatcaggttagaaagaaatcttgctaacagcagatcaggcaagtgtggaattgcaattgagccatcttatccccttaagaatggtccaaatccacctaatcctggaccatcaccccctttcacc

SEQ ID NO: 31518 - DNA, 181 bp, Glycine max
  Clone ID: 701104114H1
ccaggctgagatggcagcggcaccagcagctaccttcactattggaaccaccggttccctaggccaaagaggaaactcgcttcctcaattaaagtcttctgggttgaaattcaactcccagaatcatttgaagagcttctgcggcctcaaggccatgtcatccgtgagatgtgagtcagaa

SEQ ID NO: 31519 - DNA, 199 bp, Glycine max
  unsure (1)..(199): unsure at all n locations; Clone ID: 701104115H1
cagctctcctctcaacttcatttctacatccctggcnctgttccgtcgaanacgatggcgtttagggtgcgaaaccctgacctccgctttctcattcttctctctctcttgtccatcacttccgccaaggtcttcttcgaggagcgtttcgatgacggatggggaaatcgttgggttaaatcagattggaaaanagatg

SEQ ID NO: 31520 - DNA, 232 bp, Glycine max
  unsure (1)..(232): unsure at all n locations; Clone ID: 701104118H1
accttaataaaaagtcccccaaaatggctccaacaagaaaccaccttcttacacattgccatgttcccatggtttgcaacaggtcacatgactccattcctccacctttcaaacgngtnagccataaggggtcacaaaatcacgttcttgctacctaaaaaagccaaactacaactccaacacctcaacaaccatcctcacctcatcacattccanncccnccacaattcct

SEQ ID NO: 31521 - DNA, 230 bp, Glycine max
  unsure (1)..(230): unsure at all n locations; Clone ID: 701104120H1
gggagggccaagccattcaatccaaattcatgctttgttccaaatggatacccntntcccgtattattatggaggttatgatgggcaaggtgattggaatgcttattccagatatatgaaccttgatggagggatggctcaaggngtttatggggataactgctcttatatgtaccatcaaggttatggttatgcaccnccatggaacatatgcatctcccaattcctct

SEQ ID NO: 31522 - DNA, 228 bp, Glycine max
  Clone ID: 701104121H1
agacatacagattcaggatatcaaatgtaggactcaccacttccatcaactttagaatccaagggcataaaatgacaattgttgaggtggaagggacccacactctccaaaacgtttatgactcacttgatgttcatctggggcagacttactctgtgttggttactgctgatcaaccaccccaagactacctcattgtcgtcacgacacgattcacctcccaagtgt

SEQ ID NO: 31523 - DNA, 232 bp, Glycine max
  unsure (1)..(232): unsure at all n locations; Clone ID: 701104122H1
ctttctcctttcttccatcttcttcccttttcacgtcattatccnaaaaacttgcagattttcacatcccaaacaacatgaaggntcnngttcatgtntctgtcggtgctcctttgtgnccacttttcatgtctccttctctattatcgaacggtttagttgccaacggcaactttgagttgggtccaaagccctccggccctaaaaggaacagtggtggtggggcgggngc

SEQ ID NO: 31524 - DNA, 217 bp, Glycine max
  unsure (1)..(217): unsure at all n locations; Clone ID: 701104123H1
ggtccacatcctggaaacttgaagccgtttgacattacgacataccaatccgcagagactccaatttccggttgccacctcaccggtgatggctataggcgtagagtttccggtatgtacacgctcactccaactctctcttcattcaagcaccccacgcgcctcttctcacgcgctgctttcactgcaaagcttccacacaacatacgntnnnacc

SEQ ID NO: 31525 - DNA, 229 bp, Glycine max
  Clone ID: 701104124H1
cagcacaacaactcactcactaagctaaacaatttcatcaagcctgccatggcttcctcgtgtgcttcctctgccattgcagctgttgccatctccacaccaagttcccagaagaatggatcactcttgggaagcacaaaagcttcttttcttagtgggaggaaactgaaggtgaacagttttacagcaccagttggagcacgatccagcactacagtgtgtgcagttg

SEQ ID NO: 31526 - DNA, 225 bp, Glycine max
  Clone ID: 701104126H1
gtttgcagatgaaaattgcacttcagattggccccaaatgcaactagctgaagttgaggttctgatttttaatattcgaactaaacagtatttctttccggatttcatagaagaaatgaacaaactcaaagttcttatagtcacaaattacagtttctatccttctgtaatgaacaactttgagctgattggctctttatctaataacctgaaaagaatcagatt

SEQ ID NO: 31527 - DNA, 223 bp, Glycine max
  Clone ID: 701104127H1
attttctgtgttccaattttgctttggacacaacaaaacggtagcttgagctttgaaacatagcagcattcacttttcacgagagaacaaacaaggccttcttcttcaccttttcacattgtgttgcatcatcaccatccatttccattgttagctcctcttaatggttatggcaactgtggggtctgaacctgcttgtgcaagaacggttcatgatgttgca

SEQ ID NO: 31528 - DNA, 226 bp, Glycine max
  unsure (1)..(226): unsure at all n locations; Clone ID: 701104128H1
gaggatnctaagcaacaagnttgcattgttggtttgcaagagtaccgagtatcggatgtagagaccatcaaggaactgattgagcaaggaaatgcaacaagaagtactggcaccacaggtgcaaatgaggagtcttcacggtcacatgcaatacttcagcttgctatccaagagatcagttgatggaaatgtatccaagcctcctacgtgttgttgggaagctctc

SEQ ID NO: 31529 - DNA, 227 bp, Glycine max
  unsure (1)..(227): unsure at all n locations; Clone ID: 701104129H1
cgtcgtggtcgtgtcgcagcaaaaccaagccacccactaacttgttnggtccaagacatggctctgatcctgcatgctaccaaaacaaacaagaatgccttcaagactctgattgcggcagagtacagtggcgtccaagtggaattggcccctaatttcgagatgggtgtctctaacaaaactcctgaatttctcaagatgaatcctattggaaaggttcctgtttt

SEQ ID NO: 31530 - DNA, 228 bp, Glycine max
  unsure (1)..(228): unsure at all n locations; Clone ID: 701104130H1
cacaatttccactttccgggttttcnattcgatattcgttgttccaatgagcgatcacttggtggtgttcgttgaccgtctcgcgcgccctgtccccgttgatccggtggcgcagacggcgcaggtgccttccgaaccatctccacctccggccgccgtggatgccgacgccgccgggagctccggcacctcaccgtcggaggattgcnacggcgagggcggcgacga

SEQ ID NO: 31531 - DNA, 202 bp, Glycine max
  Clone ID: 701104131H1
gagttcaaccgaaccaaactccgaagctatggcagagctccaaaccaaggttgaacctgttccagtcccggctctggctccggtggagcccgagccaccgctggctgaggcgccgccgcttcgagcagaaagcggtggtggtgcctccacctgttccggcagcagcagaggaaaccaaagctcttgttgttgtggagaagga

SEQ ID NO: 31532 - DNA, 232 bp, Glycine max
  unsure (1)..(232): unsure at all n locations; Clone ID: 701104133H1
gaaagatggtgaactatgcctgagcggggcgaacaganngaaactctggtggaggcccgcagcgatactgacgtgcaaatcgttcgtctgacttgggtataggggcgaaagactaatcgaaccgtctagtagctggttccctccgaagtttccctcaggatagctggagcccgcgggcgagttctatcgggtaaagccaatgattagaggcatcgggggcgcaacgccctcg

SEQ ID NO: 31533 - DNA, 230 bp, Glycine max
  unsure (1)..(230): unsure at all n locations; Clone ID: 701104134H1
caacaacacacagccatggcaggctcaaacattctttctcactctccttcccttcccaaaacctacagccagnccttaaaccaaaacgcgttatcccaaaagcttttttttctgcccctcaaattcaaagccaccacaaaaccacgtgctctcagagcggttctctcgcagaacgctgtcaaaacctcggtggaggacacaaagaacgctcattttcagcactgtttcac

SEQ ID NO: 31534 - DNA, 227 bp, Glycine max
  Clone ID: 701104135H1
catgtatgaagaatgaagacggatcagaagaatggggatatgtgcaagttagaccaaaagcccacttgttctggtggctttacagaagtccatacagagtggagaatccctccaagccttggccaatcattctctggcttcagggaggaccaggctcttcaggagttgggtttggaaattttggagaggttggtcctttggatgctaatttgaagccacgaaatttc

SEQ ID NO: 31535 - DNA, 228 bp, Glycine max
  Clone ID: 701104136H1
gtgaaacactagctagggtactgggagctctcgttgtttcggagttagggaccttacgcagccatggccactgctacgaatgccgccgccgccccaccacgccagctctcccagaaggaagctgacatccagatgatgttggccgccgacgtccacctcggcaccaagaactgcgacttccaaatggaacgttacatcttcaagcgccgcaacgacgggatttacatt

SEQ ID NO: 31536 - DNA, 227 bp, Glycine max
  Clone ID: 701104137H1
gcactatagaaaaaaaaggacattcattcatctatggctacccttattgctcccagcaaccactctccccaagaagatgctgaagctctcagaaaggcttttgaaggatggggaactgatgagaacactgtcatagtaattttgggtcatagaactgtgtatcagaggcagcaaatcagaagagtttatgaggaaatttaccaggaggatcttgtgaagcgcctaga

SEQ ID NO: 31537 - DNA, 224 bp, Glycine max
  unsure (1)..(224): unsure at all n locations; Clone ID: 701104139H1
gtttttagtagtttcttccctattttctgttcataactcagtttgtaactatgactgctgaggttatggctcaagaggagacacaagcagctgaggttgttgttgctgttgagcccctgaaagaggagaaggttgctgaagaaaatgtgaaaccaagagagtcatcagtggaagcatccaaacccaaaatggtggagaaaagctcttcttacaaggnaganagc

SEQ ID NO: 31538 - DNA, 224 bp, Glycine max
  unsure (1)..(224): unsure at all n locations; Clone ID: 701104141H1
caaatgctcaactatttcacatacnaggctgtgaggactgttcttcatcagttgtatgagatgaatccacctaaatacacgtggttctataattttgttgcttcaaacaaaccagcagatgggaaacgttttattcgatcccttgggaaggtagtctttttgtcctagttagttatttcatttgttgaaaattttcagtaaacacataaagcatgttattctgg

SEQ ID NO: 31539 - DNA, 224 bp, Glycine max
  unsure (1)..(224): unsure at all n locations; Clone ID: 701104142H1
acacaagaacactctcttgaacattcatggatccagtgagcgtgtggggtaacacgcccttggcgacggtggatcccgagatccatgacctcatcgagaaggagaagcaccgccaatgccgcggcatcgagctcatcgcctccgagaacttcacctccttcgcagtcatcgaggccctcggcagcgccctncaccaacaaatactnccgagggcatgcccggna

SEQ ID NO: 31540 - DNA, 214 bp, Glycine max
  Clone ID: 701104143H1
ctttaaagttacatagtttttcattgttttacttaatctacaatggctgcttcaacaatgactctctcttcatcatcattggctggccaagctatcaagcttgccccctccacccctgagcttggtgttggaagggttagcatgaggaaaacagcctccaagactgtttcctcaggaagcccatggtacggcccagaccgtgtcaagtacttgg

SEQ ID NO: 31541 - DNA, 222 bp, Glycine max
  Clone ID: 701104145H1
ctccaaagcttgaaagacagagagagagttaccttgtttcagttggttgatgtccatacgatgggacaagtctttgacaagttagagggccagaatgtgtgaagtttagagtttaattgttttgatatgcgaaatgggaggacaaggctcaagagagatcacagtgggggaagaccaattaatgtttggatttggttatgtgagtcaacttgagatgtagaa

SEQ ID NO: 31542 - DNA, 225 bp, Glycine max
  unsure (1)..(225): unsure at all n locations; Clone ID: 701104146H1
aanatcattttcctttaaacttcaattttagagttctctctctgattcatgccccagcaatggcttgtgcattgcaagcaaccttagcagccaacgcctatgtctttncttccaggagattctccttgaagctccaaaagaacagtaagagaaggttttctttgttcactgttagagttgattctgatgaatctgattgcnatgaggaagaatgtgccccggata

SEQ ID NO: 31543 - DNA, 201 bp, Glycine max
  unsure (1)..(201): unsure at all n locations; Clone ID: 701104147H1
cgaaactcgagtggtnnatggagacaattttannnacaacgtannaaaggctcataattgatttggtcacactttgaaggaagagagtgtgaaagagtgaggtcagagttgccagtagatgaagacaatcgtcatcagttgcagctgcaaaggaatgaggtaattgcattgacgaaccttcttcaatcgactctcggaatt

SEQ ID NO: 31544 - DNA, 229 bp, Glycine max
  Clone ID: 701104148H1
gcgtcttcttgttcctctcgcccagaatccgagatcaaccctgacccctaaggccaggggtttttctcggcttcttcagattcctgaaatggcgtctgtttcagctttagccaagtacaagctcgtcttcttgggtgaccaatccgtgggcaaaaccagcatcatcactcgcttcatgtacgataaattcgataacacctatcaggctacaattggtattgattttcta

SEQ ID NO: 31545 - DNA, 225 bp, Glycine max
  Clone ID: 701104149H1
tatgctgcaatcttatgatgctgatgcactttttctgaagaagttggaagattctcatcggagggcatttttgggcgcagaccttgccttggctgatgagcaaagtgttagtagttcctgtggaacaacggcgttgaccgcgcttgtacttggaaggcatttgatggttgctaatgctggtgactgtcgagctgttctttgtaggcgaggagttgccgttgatat

SEQ ID NO: 31546 - DNA, 225 bp, Glycine max
  Clone ID: 701104150H1
tttagcttcatccctagctactagctagcactttcacttccgttaatttaacagtagaccattaacttgaaaatttcaaaacaccgcatcaaaattttcttctgaaggcactaccgaagaatggctgtttttgcatcttcatcatctttacaaacccatttgcattcctcgctcttggcaccttcttttgaaggtgcacatgatcacaactcgtggtgggtgcga

SEQ ID NO: 31547 - DNA, 226 bp, Glycine max
  unsure (1)..(226): unsure at all n locations; Clone ID: 701104151H1
cacgcgcacatcagcacaacacancaattcactaagctaaaatcacttcatcatggcttcctcgtgtgcttcctctgccattgcagctgttgccatctccacaccaagttcccagaagaatggatcactcttgggaagcacaaaagcttcttttcttagtgggaggaaactgaaggtgaacaactttacagcaccagttggagcacgatccagcactacagtttgc

SEQ ID NO: 31548 - DNA, 225 bp, Glycine max
  unsure (1)..(225): unsure at all n locations; Clone ID: 701104152H1
cttagctacaagctaaggaaggatcaaagagaatggctcaagcaanggcatcaatgactagcttacgtggttcctctcaggctgtgttggaaggtagccttggctccacacgcttgaatgtggggagtggaagcagggtggcctcagtcacacgtgcagggttcacagttagagcacagcaacaacaagtgaatggtggtgaggtacaaagtagccgtagggcag

SEQ ID NO: 31549 - DNA, 223 bp, Glycine max
  unsure (1)..(223): unsure at all n locations; Clone ID: 701104154H1
ctgtggtgaaggagcttcttagaaagcaccctccaacacactttgngctaacacatgctgtgactgaacccaccactttgggtggttatgacataccaattgatgcaagtgttgaggtgtacacaccagccattgctggtgacccgaaaaattggtcaaaccctgagaagtttgaccccgagaggttcatctctgggggtgaggaagcagacataaccggggt

SEQ ID NO: 31550 - DNA, 224 bp, Glycine max
  unsure (1)..(224): unsure at all n locations; Clone ID: 701104155H1
catttccanttcctctctctcagtttccaagaatcttaagctntgggaaagtcttacccaaccgtgagcgctgattaccagaaggccgttgagaaggcgaagaagaagctcagaggcttcatcgctgagaagagatgcgctcctctaatgctccgtttggcatggcactctgctggaacttacgacgtgagctcgaagaccggtggtcccttcggaactctaaa

SEQ ID NO: 31551 - DNA, 224 bp, Glycine max
  Clone ID: 701104156H1
actgtcccatcccacccaagcttgatatctaaccaattaccatcatcagagccatccactgaatggtgacctgcgtagaagtgtgagttgattgagaggcaatcatttattcaacttcgcatttctctcgcatccactgaaccaagattcctattccaaaatgaccgctcctacttcttccagcctgtggctggctccaaaccccagcaaaagatggggcgaac

SEQ ID NO: 31552 - DNA, 221 bp, Glycine max
  Clone ID: 701104158H1
gtttcaagaatgttctatttccaaatccatcaatagtgaaaaggagctgaaaggtgatgaatgttctggaggctgttaaagagaaacatgatcaaacttatcctagtgctaacaagccacatgataatgagaatcaagagatggaggaaaaattgcaaacctcagtgcttcaagaagaggggacatcaatcccaggaagtgaactagtttctgtgatcaga

SEQ ID NO: 31553 - DNA, 221 bp, Glycine max
  unsure (1)..(221): unsure at all n locations; Clone ID: 701104159H1
gatgctttccatgtgccagantttgccagangcttttgccctccaatatatcctttgcaagaacaggagtggcaattgatcgagggaacccctctaatatgcctccatgctcttaagatcatgccttctccacttccaccatcctttgcttctgaaactgttattgactgtccagcctcttgtgattcatctccaggaagaatcatgcctgaggatatcct

SEQ ID NO: 31554 - DNA, 221 bp, Glycine max
  unsure (1)..(221): unsure at all n locations; Clone ID: 701104160H1
tcttcttcttcactctacaaccactaaactaagtggttggntttggtttagtttcatttttttgaagctcttaaacttaaggcttaagccatggcatcctcatcctctctgcatctatctcaggcccttctggcacgtgctgtgtaccttcatggctcttcttcttctgaccgngtctcactctccttcccatcattctctggcctcaagtcacattctat

SEQ ID NO: 31555 - DNA, 223 bp, Glycine max
  unsure (1)..(223): unsure at all n locations; Clone ID: 701104161H1
caacgggatcggaggctaatctattaggcgctgttctctcgtcttctacaaaattttctgttcgatctcaaccaaggttgttccttccaccgccatgagtttcatcttcggaaagcgaaaaacacccgcagagcttctgcgggaaaataagaggatgctggacaaatcaatcagagaaattgagcgcgagcgncaaggcttgcaaacgcaagagaagaaattg

SEQ ID NO: 31556 - DNA, 114 bp, Glycine max
  Clone ID: 701104163H1
tttatttgagtttgcgatttgtgatttctgatttgttggcccaacttggcaaagcaatggctctttctgtatcccttatgcaactcagttgcgtctctcttcttcacaataatc

SEQ ID NO: 31557 - DNA, 230 bp, Glycine max
  Clone ID: 701104164H1
ctcactcgcaagcaaaaagaaagaatcccaggcgaggagaaagatggaggggaaggagcaggatgtgtcgttgggagcgaacaagttccccgagagacagccgattgggacggcggcgcagagccaagacgacggcaaggactaccaggagccggcgccggcgccgctggttgacccgacggagtttacgtcatggtcgttttacagagcagggatagcagagtttgtgg

SEQ ID NO: 31558 - DNA, 224 bp, Glycine max
  unsure (1)..(224): unsure at all n locations; Clone ID: 701104166H1
gngagttgttgctccttcgccacaactctctgccaacatgggtatctccagagattctatgcacaagaggcgtgccactggtggcaagaagnaggcctggaggaaaaagagaaagtatgagcttggtcgccagcctgctaacactaagctgtcaagcaacaagacagtcaggaggatccgtgttagaggtggaaatgtgaaatggagggcattgagattggata

SEQ ID NO: 31559 - DNA, 223 bp, Glycine max
  unsure (1)..(223): unsure at all n locations; Clone ID: 701104167H1
gnattcacaaccgacaatggcgacanaacctcgtttggncttatctctcttccacttttccttcttctnnttgttgtaactgtctttacttcggtgtcggcacaagccccagaatccccatcactctacaacaccttccttcaatgcctcaccaaatacacaantaacccctccaacatagtcttcgccaacaccaaccccaagttccccactatcctccaaa

SEQ ID NO: 31560 - DNA, 223 bp, Glycine max
  unsure (1)..(223): unsure at all n locations; Clone ID: 701104168H1
gtttcgatgatgggtggtcgatgttacagttcatatcgtagtaatgctgtggcagctgtgatgagggacaggaaatggaaatccaattcaaagtcagaagaagctgatgttgttgtgattggtagtggcattggcggactgtgctgtggagcactgttggcaanatacgaggnagatgtgttggttctggaaagccacgaccaaccaggtggtgctgcccatt

SEQ ID NO: 31561 - DNA, 201 bp, Glycine max
  unsure (1)..(201): unsure at all n locations; Clone ID: 701104169H1
antttatttncnanaancttctcnnttctcanttgggtttccnnctttganttgatttcantgccatggctccaaaggntcccaagcaagttgctgangctgcntcttctgntggtgggggtggctttttngctnctnttgcttccagcttgtccaatttcggtagtgcnatgtccnaatccgttaanggtntggtgggcc

SEQ ID NO: 31562 - DNA, 222 bp, Glycine max
  Clone ID: 701104170H1
cattattattgatccaatcaagaatacaataacatagcatagagtgagaagtgagaagagaaaaatggcaatctccatacccagtagacaacttttcatagatggagagtggaaagtccctcttctcaacaatcggtttccgatcatcaaccccgctactgaagacatcatagggcatattccagccgctactaaggaagatgttgaccttgcggtggatgc

SEQ ID NO: 31563 - DNA, 221 bp, Glycine max
  Clone ID: 701104172H1
cattgtcaagttctccacgttttgttttgataacaacaatctcgttgtggttttccaatgctgcgagcgcagtcgaagatctagctagaggcagagaacgttctcttctccctgatcctctggaaagttcttagccgatggcgatcttctacgctttggtggccagaggcacggtggtgctggcggagttcagcgccgtcaccggcaacaccggcgccgtc

SEQ ID NO: 31564 - DNA, 219 bp, Glycine max
  Clone ID: 701104174H1
ccgttttctaaatctcattcttcacctgcaactatttggattgctgatttttgttaataccatatttactgatattggcgcatttctttgagaaagttactaattcctagatagaggcaaaaatgttgggaattttcaaggagaagttggttaaagcacccaaagagctgaacagtccagcttcgttgaattcatgcactaagcctaagctaagtcacg

SEQ ID NO: 31565 - DNA, 219 bp, Glycine max
  Clone ID: 701104175H1
caaagacaccaatttcattgctcagagttcccaaattccccccaagagataaaatgtctctaatcccaaacttcttcggtggccggagaaacaatgtgttcgatcctttctcactggacgtgtgggatcccttcaaggattttcctttcccaaatacgctttcttcagcttccttccctgaattttctcgggaaaattcagcatttgtgagcacccgtg

SEQ ID NO: 31566 - DNA, 218 bp, Glycine max
  unsure (1)..(218): unsure at all n locations; Clone ID: 701104176H1
gtcaagactcattnattnataaccaccaccagctcaggtggcgcanaaaccaaacccacaagaggttnagaacaagtagaataacaaaacccattcttcacctctctcccatngnaataatgggtcagagcctgagttgcagtggcaaccatgaccacggcctcttcaccgccgtgctgcacggcgaccttcaaattgtcacaactctcttggatncc

SEQ ID NO: 31567 - DNA, 202 bp, Glycine max
  unsure (1)..(202): unsure at all n locations; Clone ID: 701104178H1
gaaatggaacgcgactctctgcttncacatggagctgcatantcttctgcatgataggttgcncacctgttctgattatcacattgctgatgtttgttcactttgtggaagcatgcttacaacaacattcacccaacctcaaaagcggccagttcgggagattggtggtctacccccgggaagagctccgaaaaaggtcact

SEQ ID NO: 31568 - DNA, 223 bp, Glycine max
  Clone ID: 701104179H1
gaaacttgaaaagcggcgtttgctaattgcttcgaccgagtgattcagaggaggagaagtaatggctgcgatcgcgggagcgcacgtgtttggtgttgtgagttttcagctcaagcaagctgaaattccctttgcatgttccagcttaatccgcaagcatattggagattctcctcagcgcaatgtggctctaagacgcagagcaaatggaacaattcttccc

SEQ ID NO: 31569 - DNA, 226 bp, Glycine max
  unsure (1)..(226): unsure at all n locations; Clone ID: 701104180H1
cgaaatccgagatcgtcgacatgctgcgtaagatacgtacaatgacgagctggaacaaagcaagcgcanccgcggcttcgtacgtcggcgcggctccgccgccggcgccggaaacggaaactcaatctccggcgcgtgtgttatgaaggcgcgtgagcngctattccagaaggccgttacgccgagcgacgttgggaaactgaaccgtttggtgataccgnagcag

SEQ ID NO: 31570 - DNA, 238 bp, Glycine max
  unsure (1)..(238): unsure at all n locations; Clone ID: 701104181H1
ctttcggngcnacngcaattgctgatggngnnctcnnaanngganncaatttgcgantngttgatggnaacactatcactgttgcttttgatgaaacaaccacattagaggatgttgataatcttttcaaagtttttgctggtggaaagcccgtctccttcacagctgcatctcttggcaccagaagttcagagtgcgattccttctggattagttaggaagagcccttatctgacgc

SEQ ID NO: 31571 - DNA, 220 bp, Glycine max
  Clone ID: 701104182H1
aatctttcaaggaaacatggacgaacaaaaaagaaagatggacctataaaagaaggggctgctgaggatgcttcaaaggtgtccggaggagctagtgattcagatgccaaacctgtcaggcagtcagtgaaaaaggcacttggtctgaagtctgatgtgaaaaaagctagtgtggtggattctgttaaaaaaggaagtggggcagttaatgatgcagatg

SEQ ID NO: 31572 - DNA, 222 bp, Glycine max
  Clone ID: 701104183H1
gcgtcactacaagcagcagctactttcatgcaacccaccaagttgagcaggagcaacactttgcagcaaaagtctactcagtccatttccaaggcttttggtttggaacctgttggagctaaaaaggtcacatgctcccttcaggctgatcttaaggacttggctcacaagtgtgttgatgctaccaaaattgcaggattcgcccttgccacctctgccctc

SEQ ID NO: 31573 - DNA, 223 bp, Glycine max
  unsure (1)..(223): unsure at all n locations; Clone ID: 701104184H1
caactccttcnccaccctcaggtggtggtggaagttacaatccaactccatcaactcccccaggtggtggaagctatgatccaaccccatcaccacccncnggtggtggaagtnacaatccaaccccatcaccaccctcaggcagcaactgtggcacaccaccacatgacccctctactccaacaccctcagttcccaacaacaccatcaaccccaacaacac

SEQ ID NO: 31574 - DNA, 221 bp, Glycine max
  Clone ID: 701104185H1
caagtagttgagaactaagaaggagaagcaaatggcttcctcaatgatctcttccccagctgttaccactgtccaaccgtgccggtgccggcatggttgctccattcactggcctcaagtccatggctggcttccccaccaggaagaccaacaatgacattacctccattgctagcaacggtggaagagtgcaatgcatgcaggtgtggccaccagttggc

SEQ ID NO: 31575 - DNA, 220 bp, Glycine max
  Clone ID: 701104187H1
gcaatggtgaagtactcaagggagcctgacaatccaactaagtcttgcaaggctagaggcgccgaccttagggttcattttaagaacacaagggaaactgcctttgcaatcaggaagttgcccttggtcaaggctaaaaggtacttggaagatgttcttgcccacaagcaggcaattccattcagacgtttttgtcgaggtgttggaaggacagcccagg

SEQ ID NO: 31576 - DNA, 211 bp, Glycine max
  Clone ID: 701104188H1
atataatgatgtttttactgccaaaatattagatgctgagcagtgtaaagaattgaaaatggggtcctatcttggtgttgctgcagcctcagcaaatcctcctcattttatccatctgtgttataaaccaccaactggacctgtcaatgtcaagttagcattagtcggaaaaggtttgacttttgatagtggtggctacaacatcaagaca

SEQ ID NO: 31577 - DNA, 215 bp, Glycine max
  unsure (1)..(215): unsure at all n locations; Clone ID: 701104189H1
tcgcacgggagttgcccggggtctctctctcgtgtggtgtgtggtgtttgctgtgctctccttttcgttatgcctttnattattacctatctgtcgctccactccgtattacgactctggatcagagggatacatcagaggattcgctccaactcctatcgaataaggtattatctgtcaatttacattggaaagggttaggatattgaatttta

SEQ ID NO: 31578 - DNA, 219 bp, Glycine max
  unsure (1)..(219): unsure at all n locations; Clone ID: 701104190H1
ggtggcatttttgttggttcgagtgancgagnngaagatgtactctngagattcatngggtggtccgttggagataaancgcgacggacnntgcaacggangacgagcggagncggaacctgcaggatcntgganatggcnnngctgtcgcgtcccttggacganacncagcaganctggactcctangccccggcgancagaanaanaanaagtacgt

SEQ ID NO: 31579 - DNA, 216 bp, Glycine max
  Clone ID: 701104191H1
ggtagttgcatatttggcatcaacaatcaacaatcacaaatagaaactcactctttcgaaaaaaccagaatttgaatatgacgttagggtttgagggttatagttataccacaacacttggaaggaagagggtcgtgttattacacaatgaagcttcttctctcaactctaattcggcggtgaatccattgaagagaatgtgcagcggaaaattca

SEQ ID NO: 31580 - DNA, 218 bp, Glycine max
  unsure (1)..(218): unsure at all n locations; Clone ID: 701104192H1
aacactatagcaatananaccgttgcctttganaaacccctcactcttcatcactacactagctagccacntncaatgtccgaccaaatttaaggtgtttcgtgaattcacaagcgatgactcattcctaaaccaagttatccctgaaaacatcaccgaattccaagtgactctgtccctcgctagngactacgatggcaacaacttcaaccaacgga

SEQ ID NO: 31581 - DNA, 218 bp, Glycine max
  unsure (1)..(218): unsure at all n locations; Clone ID: 701104193H1
tctctctctatggtgttgttgtgttttttcctttcctttcttttcctttctctcttctatgtcctgtgantttttctatactctagttcgcgtcgtaagggctcaacaacatgacaaagaattggcaactcggcaaggtacatattacatagtgctgaacgtacgctttaatttattttaatttcgttgtttacaatttaattcaatttttcaatata

SEQ ID NO: 31582 - DNA, 222 bp, Glycine max
  unsure (1)..(222): unsure at all n locations; Clone ID: 701104195H1
ttcagagggcacccggcaacaccaaaaccaccaccgcctctcctacctcccggagccatggccgccaccgactcctccgctgcttcgtcacgccagctttcgcagagggagacggacatccagatgatgctcgcngccgacgttnacctcggcnccannnnnngcnactntnagatggnncgctacgtcttcnngcgccgcaccgatggtatttacataatt

SEQ ID NO: 31583 - DNA, 226 bp, Glycine max
  unsure (1)..(226): unsure at all n locations; Clone ID: 701104196H1
cagcagtgagtctaagaatacaagtcccaaaaccgaatcaccagaagtcccgcaggttttggtagagcagatggctacttccttgaccaaggatcctaatttcagagcagcactagttgctgccatctcaggaaaaatgttgcacaataattangtagaaaatgagtgaagtgtatttaactcattctataagtggatcttgtttagagcataggatctctatgta

SEQ ID NO: 31584 - DNA, 298 bp, Glycine max
  Clone ID: 701104201H1
ctgagtgttgaacagagaagaagggagaagccaatcatgggttgcacttcactgccatcttttattcagatgtcatctgctacacactccagcttcagtgaaaaactccgcaaccctcaaaagaagtctcaaattgtgatacctacaactacaagagagacacacacaacaattcttggtctttttcttctcaatgcaaagctcttcacaaatcagttcctttggctgcttcacttgcaattcttctctggtcaacccctggcacatgctggtttcagtcaggaatttctggaataga

SEQ ID NO: 31585 - DNA, 289 bp, Glycine max
  unsure (1)..(289): unsure at all n locations; Clone ID: 701104204H1
gggttgtgaagcatctaagtgagatacacagtagttaggtagcaagcataagtgtctaaccttagaaacatatttgctacatatcgtgtgcattttggaattgtgccactaaaattctattcatctatggctgcctcatcttatgctatgcaatcaatccttgcaaaccctatgatccgcatttccagcgggtctagggagaaccattttggtgttcctgcttatcacatgagaangaatgttggcctgagagttaggtccatggctgaggaagagcaaccaagtcanc

SEQ ID NO: 31586 - DNA, 280 bp, Glycine max
  Clone ID: 701104205H1
ctaatgacaaagaaaatacaaggattgttcttctccggtcagataaatggaactacaggctatgaagaagctgcagcacagggtatcatttctggtatcaatgctgctagacatgcagacagtaagccagttattgttcttgagagggagagcagttatataggaacattaattgatgatctagtaactaaggacctgcgagagccttaccgcatgttaaccagccgctcagagcatcggttacttttgagatctgacaatgctgatagccgtctcacac

SEQ ID NO: 31587 - DNA, 288 bp, Glycine max
  Clone ID: 701104206H1
gtttcatttgaattatccgctcaaaaagtgttgaaatctctggaaaacaagccagcagcatgcagcgtggactaatgtcctgccaaaattgaaaaatgatgctccaacaacagacaaagaagaaaaatcagaagaaagtgcgcttgatgacaaacaagtagtttctgaagctcacaatgatcaaccactggaaaccactttgggtggagataaggcaacaacagttcatgagaaggatcagtccttaactctttcttccgctaaagattcattttgataatgcagatg

SEQ ID NO: 31588 - DNA, 286 bp, Glycine max
  unsure (1)..(286): unsure at all n locations; Clone ID: 701104207H1
ggaangaggaagaacttactatctggggaatgtttttgggtggggcttacgaggaggcgctcggtggagtccacaacttgttcggcggccccagcgtggtcagggtgtcgcagagcgatggccctcacagctttgcggtcacgcgtgccgtgccggggccatcctgtggagatgttcttcgagtgatgcagcaccagcccgagctcatgttcgagacactcaagcaccgcgcgcaggagtatgtcagccacgacaacgcagcagcgcttctggctgctggccttgc

SEQ ID NO: 31589 - DNA, 287 bp, Glycine max
  unsure (1)..(287): unsure at all n locations; Clone ID: 701104208H1
gagagtactaaagaaaatatggagaggaagaataggattcttgtatttgggggaactggttacattgggaagtatttggncgagggcaagtgtctctttaggccatccaactttggtatacactcgccctcttaatgcacaagctcctccctctaaggcacaagtttgcaaggagtttaactccataggggtcacacttgtccatggtgaacttgagcatgagcagatcttggctgtgattaaacaagtagacattgtgatatgcgctctggcatcccctcaagtga

SEQ ID NO: 31590 - DNA, 288 bp, Glycine max
  unsure (1)..(288): unsure at all n locations; Clone ID: 701104209H1
attcacaaagcgtctcaaattcacattaaattttcccaaaactcaaactcaaacttcaaactctagtaattctaattttccctccccgaaaacgatgtcgttcnnnnnnnnnnnnnnnnnnnnnttcgagcacacgctcctggtggtgcgcgaggtgtcggtgtacaagatcccgccgcgaagcacctccggcggctacaagtgcggcgagtggctccagtccgacaagatctggtcggggcggatccgcgtcgtgtcccggcgcgaccgctgcgagattcgcctcga

SEQ ID NO: 31591 - DNA, 284 bp, Glycine max
  unsure (1)..(284): unsure at all n locations; Clone ID: 701104211H1
cagcttgctcatcaagtccaagaaccaacctaccttttgcaatctcaattcaatggcgtcctctctcattgcgaangctttcctctcctcttccctcctctccaggtccctccttcgccccgccgcttccgcttcccaccgctctttcaacaccaacgccatgcgccagtatgacaaccgcgccgacgaccacagcaccgacatcgatcgtcactccgaacgctctttccctagcactgcgcgccgcgacgatatcttctcagatgtgttggatccattttncc

SEQ ID NO: 31592 - DNA, 282 bp, Glycine max
  unsure (1)..(282): unsure at all n locations; Clone ID: 701104212H1
ctgcactcgatcaaacacaaaatggaaaanaatgtggggattctcgccattgacatctacttccctcccgcttgcnttcagcaggaagcattggagactcatgatggtgccagtaaagggaagtataccattggacttggccaagactgcatgtcattctgtaccgaagtagaagatgtcatctcaatgagtttgacagtggttacttctcttcttgagaagtatgggattgatcctaaacaaatcgntcgtctggaagttggaagcgagaccgtgatagac

SEQ ID NO: 31593 - DNA, 293 bp, Glycine max
  unsure (1)..(293): unsure at all n locations; Clone ID: 701104215H1
tacgattgcngntannagactnagccttattatacagacacgngcgttacacaaatacngtacactggctcnaancncagagaccgaancacggagccgaanatgantantanttgncanataattcncatttttttctgcngaaantgcaaaacttttnatttgaagagttatcatgggatcagnttgttgtgttggtgcaaaggatcatantnttcccagcactagcagaactggaggtgaaagtttanatagaaatggctggtgaaattgaggatcnttcctttcacaca

SEQ ID NO: 31594 - DNA, 290 bp, Glycine max
  unsure (1)..(290): unsure at all n locations; Clone ID: 701104218H1
ctcttgttccaccaaccccaaaattntgaacctttcaaagagacgnagccttcgaatctctctgaaacttttctcttctctttgattcttctctatcagttaaacattagaatgagccgttcacaggatccacacccttcccgatctttcttcccttttggaaatccttttcggatgatatcacctaaaggctctcgcatgtctccacaacttcttgcagtgttgcaagcttttgaggcaacattggcagagaggctgaaaaatcttatgcctaaaagcaaggatgaaat

SEQ ID NO: 31595 - DNA, 288 bp, Glycine max
  unsure (1)..(288): unsure at all n locations; Clone ID: 701104219H1
gtgtttgtntagtagtgactttnggttgggtttcgtctcaactcaacaaacgtcgtcgttctgcatttcccaaccttcctccaatggcttctgcttccttaatcaactcgttgacttgttcttcgcgtgctcccactcagcactgttccactttcacccgcaccaccgccgccacgtcactgagacaatttaacagccactgtcggagaccactcgcgacgaggatctcgccgccttccaccgttgtctgcaaagctgtctccgttaagccccaaaccgaaatcgaag

SEQ ID NO: 31596 - DNA, 291 bp, Glycine max
  Clone ID: 701104220H1
ggaacaactgctggttcagggtgaaaacaaatgtagccaagccccacaagggtgagattggcatagtgtttgaacaccctacccaaccagcaaaccaaccaggtggttggatggtaaaggaaaaacatttggagaaatcactagagaaattaccaagcctcaaaaagagtggttccacgccatccatgaacacggcctcaaaaatgttcaccatctctgaagttcaaaaagcactgcacctgccgactctacttggatcatcatccatggccacgtctatgactgcacccg

SEQ ID NO: 31597 - DNA, 99 bp, Glycine max
  unsure (1)..(99): unsure at all n locations; Clone ID: 701104221H1
cgcagnnagccacgntgagtggcagagccatgatctgcntgtttgtactncctccttgaacaantccatgtntctgccnccattnccactctggcgccg

SEQ ID NO: 31598 - DNA, 286 bp, Glycine max
  unsure (1)..(286): unsure at all n locations; Clone ID: 701104222H1
gctagctcgcacattaagttatataacacatatttgcntgcttaganatactattattgaagatatgggtcgtgtagattatgagtaccctttgggcatgaacaactttganagagtgcaccaagtggaggttccaccgccacagccgtnacntcaagtctctaaagtactctttgaaggagactttcttccctgatgaccctttgaggcagttcaagaacaagccagcttccaagaagttcatggcttngccttcagttcttcttccccattttcgaatgggctc

SEQ ID NO: 31599 - DNA, 186 bp, Glycine max
  Clone ID: 701104223H1
catagcattttctaccatttaccaaagcaaagagaaaaacaagagatggagtggtgtgtgtcaatgccaaagattgaactgcatgctcaccttaatggatccatccgagactccacacttctgtaacttcctcttcttcaatttctatttctttttcctctgtcttcctcatctttattattatca

SEQ ID NO: 31600 - DNA, 286 bp, Glycine max
  unsure (1)..(286): unsure at all n locations; Clone ID: 701104224H1
gggatttaaatttnntcattatgtctgtntcttcaatcggaatcacgaacaacatggaagtnagaattgggcaaagggtttctcgcggaatgctccctatcctcgctctccacaccttcagcgagtnttaccgctccgaccacaaacctccggtcaccgccgccctcatcgccgccaacaccctcatctacntccgcccctccttcctcgacccccttcattccccccatcgaacaagtctggttcaaccctcacctcatcctcaagaacaaggacttgaaacgtt

SEQ ID NO: 31601 - DNA, 283 bp, Glycine max
  unsure (1)..(283): unsure at all n locations; Clone ID: 701104225H1
gtggatgaataaggaaagctggctcaagccttcctaggctcccttccttgggctcaaaagattttcccttgattttgccaatttggtgcatatctgcttcgttttgctttctgtgtcttcaagtcttacttggaagggtcagatttgctgcaaatctctccatttccccatcatcagaaggtttaatttcttggtttactctatagctacttgaaagaagtcanaaaagagataatggtgaggggaaagactcagatgaagcgtatagagaatgccacaagca

SEQ ID NO: 31602 - DNA, 278 bp, Glycine max
  unsure (1)..(278): unsure at all n locations; Clone ID: 701104226H1
ctccggtagccgctgtgttggtgagtgagttgtggtgcttttgaaagatgaggccgattctgatgaaaggtcatgagaggccattgacgttcctgaaatacaacagggacggcgatctcctcttctcctgcgccaaggaccacaaccctaccgtctggtttgccgacaacggcgaacgttgggcacttatcgcggccacaacggcgccgtttggacctgcgacgtctcaagagattcggctcgactcatcacgggantgccttcagaccgcaaatntt

SEQ ID NO: 31603 - DNA, 258 bp, Glycine max
  unsure (1)..(258): unsure at all n locations; Clone ID: 701104227H1
gtttgcantcagtccctacttccactttgagtcaccaggacngcctcgaaacctcgtccacttcttgtgcggtttatcatgggggatagtcagtattcgttttctctcaccacatttagcccttctggaaagcttgttcagattgagcatgctttgacagccgttggctctggacaaacgtctttgggaataaaagctgcaaatggagttgtcattgctaccgagaagaaattgccatctatattggttgatgaaaca

SEQ ID NO: 31604 - DNA, 277 bp, Glycine max
  unsure (1)..(277): unsure at all n locations; Clone ID: 701104228H1
gttanttcttctctggttgattcggatctagagtcttcagtttctcctcgttgttcttcgctttcctgttttcaatttcgattctttcgttaatttaataagatgtttgggagggcaccgaagaagagcgataatacgaggtactacgaaatcctcggcgtctccaagaacgcttcgcaggatgatctgaagaaggcttacaagaaagccgccattaagatcaccccgacaaggcggtgatcccgagaagtttaaaagagctggcgcaagttatgag

SEQ ID NO: 31605 - DNA, 278 bp, Glycine max
  unsure (1)..(278): unsure at all n locations; Clone ID: 701104229H1
caaacacaantggctcatanaatttgcattagtcattttggttatgctgctattgtttctggnttgattttgggaaactcaatggcgtcgtcgnattacaccgtggttgtggattgtggaggcactngaacacgtgtgaatgtgtatgagtggatggtaggggtaaagggaataagcaaagggaatttgccagtgttgcttcactcctatcctgataatgcaaccaggagtagttcactttggaaaagttattgtgaatatcactgtatgcaaacgga

SEQ ID NO: 31606 - DNA, 283 bp, Glycine max
  unsure (1)..(283): unsure at all n locations; Clone ID: 701104231H1
ctatttttcgcgtcacataaacaaaaaaaataaactggggagaagcatgttgttgatgttgggactatgcttcctattgttctctgcatttccacttgcgttctctcagagatgccacccacaagacaagancncgttgctccaactccagaaggacctcggcaacccttatcacatcatatcctggaacgcaaaggaggattgctgcgagtggttctgctgcgttaagtgtgacgagaaaacaaaccgcgtcattagcgttgccttatccatccccttttcc

SEQ ID NO: 31607 - DNA, 291 bp, Glycine max
  Clone ID: 701104233H1
aggttttacatccaattgacctggacaggcttaaatttgttggagattcactaaagatactgcgccaagaggttggtggtcatgcagctgttttgggttttgtgggagcaccttggacaatagcaacatatatagtggaagggggtacaacacgcacatatacaaccattaagagcatgtgccacactgccccacatgtattgaggactttgctttctcatttgacgcaggcaatagctgattacgttattttccaagtggagtctggggctcattgcatacaaatatttg

SEQ ID NO: 31608 - DNA, 289 bp, Glycine max
  Clone ID: 701104234H1
gctttctaatagggagtcagccagacgctcaagaagaagaaagcaggctcatttaactgagctggagacacaggtctcccaattaagaagcgaaaattcttcattgttaaagcgcttcacggatgtgagccagaaatacagtaatgctgcagttgacaacagagtactgaaagctgatgttgaaacattaagagcaaaggtaaatccttgccttagtatataggccttaagtaaaacctgttacataggagacctactggactcttgctaagcagttccctaggtttgg

SEQ ID NO: 31609 - DNA, 271 bp, Glycine max
  unsure (1)..(271): unsure at all n locations; Clone ID: 701104235H1
antctacaaccactaaactaagtggttggttttggtttagtttcattttnttgaagctcttaanacttaagncttaagccatggcatcctcatcctctctgcatctatctcaggnccttctgggcacgtgctgtgtaccttcatgggctcttgcttcttctgaccgtgtctcactctcctttcccatcattnctctggcctcaagtcacattctacatgcaaagcagcagcagccacgtcctcgcgtagaaggggtgcttgtccatccacc

SEQ ID NO: 31610 - DNA, 271 bp, Glycine max
  Clone ID: 701104236H1
atttgctcatcaggttagcccttggccatgttctcagctgagcagccaagagcctggatcatgtgctatttagatattttcactctcttcaagtattgtagtaattgagtgcttctttcattgatttcttatacttaaagccattgaatcaccactttagaattgtatgatatcatgtgaaattaaatttagtcaaacatgttgaggatcatgtgtcaaacatacattgtgagagccaatttatataaacaatttaattaagtacttattt

SEQ ID NO: 31611 - DNA, 284 bp, Glycine max
  unsure (1)..(284): unsure at all n locations; Clone ID: 701104237H1
aagcaatgggtagccttgaagcggaaagaacaacagtaggattggcagcaaganacccttcagggattctctccccatacacctacaatctaagaaacacaggccctgatgatgtttacataaaagttcactactgtggaatttgccattctgatctccaccagattaaaaatgatcttggcatgtccaactatcccatggtcccaggacatgaagtggttggtgaggtactggaggtggggtcagacgttagcaggttcagagtgggagagttggtgggagtt

SEQ ID NO: 31612 - DNA, 278 bp, Glycine max
  unsure (1)..(278): unsure at all n locations; Clone ID: 701104239H1
gaacaaagcacttagtgctattcaataattacgaaaaaccaacagcgagtgttgtttttgtttggtccaggctggaccagggaatgaatagagatgagaggctttcggttgaagagaactgagttaagcggcgaaccaaacgcagaatcggcggcagaaattgccaccggaagcacgtcgaaganggtgaaccaaacacaaaattccatccaccacttctcttttcaatccccaattcaaatctgtgaagaaaatctcatttctaaattgtaattctt

SEQ ID NO: 31613 - DNA, 271 bp, Glycine max
  unsure (1)..(271): unsure at all n locations; Clone ID: 701104240H1
ctcggcgtcgccatggacgaagaagaggtgcgcaagntcttcagcaagttcgaccaagaacggcgacggcaagatctcgtgcgcggagtgaaggagatgatggcggcgctgggatccaaaacgacgtcggacgaggtgaagcgcatgatggcggantggaccggaacggcgacggctacattgattngaaggagttcggcgagttccactgcggcggcggtggcgacgggagggagctccgggaggcgttcgagctgtacgatctggacaa

SEQ ID NO: 31614 - DNA, 279 bp, Glycine max
  unsure (1)..(279): unsure at all n locations; Clone ID: 701104241H1
ggataggtaggttctagcctttctgttatcattttcgaaacaaaccaaattgaaactgtttgagttttgtttagaaggctgttatgaatgaaactttgaagcttagaaaagcggttaggtagctaggtttcagtttcagatctggtagagagcttcatcatgaagccattaccggcggacaaaccggtgaatcagcgccgacggattgcagagatcnattccgacgccttttctgaccaagacgtaccagctcgtcgatgatccctccgcgggatgact

SEQ ID NO: 31615 - DNA, 279 bp, Glycine max
  unsure (1)..(279): unsure at all n locations; Clone ID: 701104242H1
agggatggcctccantcttctctatntcctcttcatccacccttgttgatgccaagccttccaactccaagacaatgcgtcacccttcccactcttccccctccancttttcactctcagactcgtccttggaagaccactgctttctgtcgtaggcttgctcgcaattttatggcaatggccaccacaagagaggcagccgcagcagaagttgccgccacaatgactctctattgccgagacgccagagattgtgaagactattcaagaagcttggga

SEQ ID NO: 31616 - DNA, 276 bp, Glycine max
  unsure (1)..(276): unsure at all n locations; Clone ID: 701104243H1
ctgaggcagaatatgaggaggtgaagaagtaagtcggggatcaggctcctgaggcagaatatgaggaggtgaagaagtaagtcggggaggagtttgtatccactttttactgatttntttgtctagatcacaagttagagatgaatcatcttttttcaaanagcatataatataaggttttttgtactaaaagatggagttcattttttaccttaaggcctttaaacttgtagtacttctggagaaccaaattatgcctgtttgaataacgatatt

SEQ ID NO: 31617 - DNA, 277 bp, Glycine max
  Clone ID: 701104245H1
caccaacactttcatattcaaaccccccatctctcatcacccaaagcagcttctttattcccaccgctcttctctacgctttctcaccaaatttaaaaccccctccggagcgaattctcggcggctggttccgaaagccacggcggctcccggggccaagaagacagaaaagccgcacgagagagtccagcgagtccacagcgtggaggagttcgagtcggcgctcgaatccgccaaagacaggcttgtggtggtggaatacgctgccagcgacagg

SEQ ID NO: 31618 - DNA, 278 bp, Glycine max
  unsure (1)..(278): unsure at all n locations; Clone ID: 701104246H1
ggcatcgttagcagttttgtagattcaacctcaatttgnagagttacgttctantatatttacacaagactgataagagaagatgtctctgattccaagtttcttcggtggccgaaggagcagtgttttcgaccctttctccctcgatgtgtgggaccccttcaaggattttccatttcccagttctctttctggctgaaaattcagcgtttgtgagcacacgagtggattggaaggagacaccagaagcacacgtgttcaaggctgatattccaggg

SEQ ID NO: 31619 - DNA, 276 bp, Glycine max
  unsure (1)..(276): unsure at all n locations; Clone ID: 701104247H1
gttaggtaagaattgagtgcatctggaacgtttggntttggcggtgctctggtatttggnatcctattattaagctttctggttcctttgtgaacttgttgtcagttttctgtattttcggaggtcttcctctgtgttcaggagctaggataatttgttccgtagatagtagctgtttacttaacacacttttcctggaatgggtgcatgcttgacacggcagacatctttatagctgctagactagagaattctgttataaaattgccaaatttt

SEQ ID NO: 31620 - DNA, 282 bp, Glycine max
  unsure (1)..(282): unsure at all n locations; Clone ID: 701104248H1
ctgtgcactncctctgntcccgccaagcgcannttttcccaccgttcaggccaccngctgagttaggtttcnggctaggatgggtgctgctctnntgtncggagctttgnnacggagatagtcgtgccagtgtggcgctcgtcatcgggntcgtgttctcgctggncgcagtggttcctcgtgtcgcgcgtcaagctcactcccgaccgcaacggaacnacgtcgtcgccgcgcaacaacaaaaacggctanggcgatttcctcattgaagatgangaaggc

SEQ ID NO: 31621 - DNA, 287 bp, Glycine max
  unsure (1)..(287): unsure at all n locations; Clone ID: 701104249H1
gtcaacttgaactggtgtatagtgctaganagtaaagnttganacctatcttgttactttcatcgtcagaagcttacaggttgcatccatattttctnctccttggaaaatgatgatgatgtttgataagatggggctttgtaataatttggatatgatatctgctccccttggggaggaggatattaccacccggcaaactgatccagaggtaattgttgaggatgattttactgatgaagaaattggggtagatgaactcgagcagaggatgtggaaggacaaaa

SEQ ID NO: 31622 - DNA, 276 bp, Glycine max
  unsure (1)..(276): unsure at all n locations; Clone ID: 701104251H1
ttcactganagcactcagtagggtttgcngtttcagcgttngtgacgcacgcatccatngnnnnnnnnnnnnnnnnnnnnnnagccccgncgcgccagntgctcccagaaggaagccgacatccagatgatgttagccgccgacgtccanctcggcaccanaaactgcgacttccaaatggnacgttacatcttcaagcgccgcaangncgggatttggnttgttaaccttgggnagacatgggngaancttcagttagcagctagggttattgtt

SEQ ID NO: 31623 - DNA, 283 bp, Glycine max
  unsure (1)..(283): unsure at all n locations; Clone ID: 701104252H1
atttgatcaaggcttggaggttgagtccttctgtaagtgcaattccctcaccattctgtgctgctgcccatttgtgtaagaactttctcttttcagttttcaacttctccctacactcgtccaaagcctctagttcctattccacgtggcaaaagtagncnactctgattctgagccgcttctagaatctccatcgtgcaagangtttcattnnnnnnnnnnnnnnnnnnnnnattccttgacgaatttgaatacgatgaagcagcggatggcgatgaatact

SEQ ID NO: 31624 - DNA, 287 bp, Glycine max
  unsure (1)..(287): unsure at all n locations; Clone ID: 701104253H1
accaaacacaccacatggaaatcagccaaatcccgtttttcacccaagaggactactctcacttctacaacctctacgaagaccacagactctaacaacagtctcaacaataacaacagcaacaacaagangaaagcgtaacaacagaaaagaagaaggtagtggtggaggtggcagaacaaaaagggcataatggtaatantantaacgagaacagtgaaagtaacttgaaggacttacttgcttcgctggattatgttagacgaggaaganattcaagaggaacg

SEQ ID NO: 31625 - DNA, 279 bp, Glycine max
  Clone ID: 701104254H1
gcaaaaagaaagaatcccaggcgaggagaaagatggaggggaaggagcaggatgtgtcgttgggagcgaacaagttccccgagagacagccgattgggacggcggcgcagagccaagacgacggcaaggactaccaggagccggcgccggcgccgctggttgacccgacggagtttacgtcatggtcgttttacagagcagggatagcagagtttgtggccacttttctgtttctctacatcaccgtcttaaccgttatgggagtcgccggggctaagt

SEQ ID NO: 31626 - DNA, 280 bp, Glycine max
  unsure (1)..(280): unsure at all n locations; Clone ID: 701104256H1
ctcacttgctagtaacaattcaaggccatccatttatcaaccatggaacttatgcgttgcaatcatcaaaaataggaatggtgccaaataaattatccatcaagtccgttgcttttagtgacaaggtgcctagtcaaacttatcttggtacgaaagatttggatcaagttataaganaaggccaagaggcattgttaaactcaagtgatccattgagaacattgaagataattgacaccatccaaaagttaggaattgagcaccatttcgaaaaggaaat

SEQ ID NO: 31627 - DNA, 278 bp, Glycine max
  unsure (1)..(278): unsure at all n locations; Clone ID: 701104257H1
ggaattatggtggcgtctcagagtcaaaaccccattgagcaaatccaagcgcgcttcaaggacttggaaactggattccgcctctggctctccaagcagtccctccccgtcgaggccgccgtcgtcaccaccaccagcgccgcccagggcgccgccatcggnccttcatgggcaccctcaccgccgacgcctcctgccaccttccccacccctcctcccaacgcctctctcaatccccaagccatggcgtctcttaaacaagcgcaggctctagctgg

SEQ ID NO: 31628 - DNA, 264 bp, Glycine max
  unsure (1)..(264): unsure at all n locations; Clone ID: 701104258H1
tttgggttgagaagactaccgagaaggagatttctgacgatgaggatgaggaaganaagaaggatgaggagggtaaggtggaggatgttgatgaggagaaggagaaggaagaaaaaaaganaaagaagatcaaggaagtgtcacatgaatggtccttggtgaacaagcagaagcctatttggatgaggaagcctgaggagatcacaaaagaggagtattctgctttctacaagagtctaccaatgactgggaagagctttggcg

SEQ ID NO: 31629 - DNA, 273 bp, Glycine max
  unsure (1)..(273): unsure at all n locations; Clone ID: 701104259H1
tcgtgaacaatctccttttcaaactaggcttggttagctgtgctgataccaatgttggtgatgcaaaanttcgtggaattagtggtggtgaaaagaaacgcttatccatggcatgtgaactgcttgcaagcccatctgttatatttgctgatgaacccacaacaggacttgatgccttccaggctgagaaagtcatggaaactctccaacaacttgcacaagatggtcatactgtaatttgttctatacatcagccaagagggtcagtgtata

SEQ ID NO: 31630 - DNA, 273 bp, Glycine max
  unsure (1)..(273): unsure at all n locations; Clone ID: 701104260H1
cgcgacgggtttatcaccgttccaaagtgtcataatgctttcaggtttctcattntactcatttcatgttaaatggtactctctgttcagtgtttgtaacctggcatcccacatgtttgatgaatttcctacctgaattgattttgtgataaatctctctttgtcaaatctcaattcttaaattaggaaagttattttgtaccattagatatattaatatttaacggtcataaatctctcactgtgggctgtggaagggattcatggagttgc

SEQ ID NO: 31631 - DNA, 103 bp, Glycine max
  unsure (1)..(103): unsure at all n locations; Clone ID: 701104263H1
aaattgggataatggtgtctctaacttcatctttcaacattcaattgctgcacgagactccgcttccttctcccctttgcttcctgcccaccaaggcatancg

SEQ ID NO: 31632 - DNA, 275 bp, Glycine max
  unsure (1)..(275): unsure at all n locations; Clone ID: 701104264H1
aaaaaagttaccagtttgcgatctcattacaatctcccaagtttctaatctgcagctaagaaaaaccaaaagatgtctctgattccaggtttcttcggtggccgaaggagcaacgtgttcgatccattctcactcgacatgtgggatcccttcaaggattttcatgttcccacttcttntgtttctgctgaaaattctgcattcgtgagcactcgtgtggattggaaggagaccccagaggcacacgtgttcaangctgatattccagggctgaa

SEQ ID NO: 31633 - DNA, 285 bp, Glycine max
  unsure (1)..(285): unsure at all n locations; Clone ID: 701104265H1
cttcttctcttgcggctagggttttagcgcanttcttctagattcaaggaagatgggtaaggaaaaggttcacatcagtattgtggttattggccatgttgactctgggaagtccactaccactgggccacctgatctacaagcttggaggcattgacaagcgtgttattgagagatttgagaaggaagctgctgagatgaacaagaggtctttcaagtatgcctgggtgcttgataagcttaaggctgagcgtgaaagaggaatcacaattgatattgcctgtg

SEQ ID NO: 31634 - DNA, 284 bp, Glycine max
  unsure (1)..(284): unsure at all n locations; Clone ID: 701104266H1
acaaaaccataaaaacctttctttttgcactctgcattttctccattttccgctacctcaattgtttttaattgttcacncctttctcgtttcgcgagaaagggaaagttgaacgagcaatgaatgccagagcacgcaccactcttcactcaatgaaacctcctttaaatgaaaccaaagggaagatggaaactggaggagggaagagagcaatgggtggtggccacaagaacgggcgtcnatccaatcgagaaaggaaaatggctttgatccaagatgtagat

SEQ ID NO: 31635 - DNA, 281 bp, Glycine max
  Clone ID: 701104267H1
aataccatcaccatcccttcccttagttgtctcctttttattgtaatctatctccaaaaaagccctttttaatttcctaagatcatcatcacttcacttggcacttgctcctaacattcacttgagttaaatctatcctcgcagtataatggacgaacaattgaggatactaaaagtcattgttgtgcaaggcaaaaaattagtgatccgggattcaagagcagtgacccttatgttgttgtcaagctggggaatcagaccgcaaagaccagggtcattca

SEQ ID NO: 31636 - DNA, 259 bp, Glycine max
  unsure (1)..(259): unsure at all n locations; Clone ID: 701104268H1
ttcttagagtgaggaagagcctctactgagagagaagaaaaanagcttgggaagtctctatactcaagcttgagtgagccactatagagtaagtcaattttgtaaacacatccttataaccctactatcactttgtatagtggaagaatctccatattagagaattataatcgtgttcccaatactatctttaattactaagtgtctatcttaacttcacgaaacgggaaagtccgagttttcccaacacatccaaacg

SEQ ID NO: 31637 - DNA, 282 bp, Glycine max
  unsure (1)..(282): unsure at all n locations; Clone ID: 701104269H1
gttttcataattcctgaaacaggggaaggaaatggcctcacaacaacacatcncagaagatgcagctccgccagaacttccgcaatctctgggcactnctgatcttttgagtacaattcaagctgacaccccttattgntgcttttctctgtggtgtgcaccgtgtgtatcatatctactccgcaaacgagctctttacgatgatatgtcaagatacacatgttgtgctggttacatgccctgcagtggtcggtgtggagaaagtaaatgtcctgaactctg

SEQ ID NO: 31638 - DNA, 260 bp, Glycine max
  unsure (1)..(260): unsure at all n locations; Clone ID: 701104270H1
gcgccgcagcacatggatcacaggccgaaatccaaggactcantctnttantccanttctcttnanctctcncagcctntgatgaactttcaacttccaaaacaagatgatgaactntgattattacgggaatagtagtcaggatgagagcagagacagcgaaggtggggggattacaaatcacggtaatgggaatgtgcatgaaaaggaagtgantttgttcaagaagaggagatggtctctaaacagtgacaacgagg

SEQ ID NO: 31639 - DNA, 275 bp, Glycine max
  Clone ID: 701104272H1
tcagacgcgtgctttctcccctgaatctcaccactctccgatctttcattctcccctcttttctagctcccgtggagtctggaagcgttctcgagccttctcgctttccacgtgttttgcttttttccatttctctctctcccgtggagtttagaagtgtgcgttccggagccttttcgctttccatttctctctctcccgtgctttctagagttggtgctctgggaggagtaacgattcagcggttgaattgcgagaatggaaagcgttttaga

SEQ ID NO: 31640 - DNA, 281 bp, Glycine max
  unsure (1)..(281): unsure at all n locations; Clone ID: 701104273H1
acttcactcacttcactcatggggctgcgtctcctcaaaacacattcaagaaagacctgcaagcaagaagaagaagtcactgtcaccaatggcggcggttacgtgaaccacgtggtatccctgacttcctccacctatggagcactaatgctggacaaggagaaggagcaacttcaacttcaacccaccgtcgaagaagaatccaaaacatcccctcctncggattcgcgaagaacccgaagttcatcaacgcttgggaatcatggagggtctcgaagagg

SEQ ID NO: 31641 - DNA, 236 bp, Glycine max
  unsure (1)..(236): unsure at all n locations; Clone ID: 701104274H1
ttgctactggtggcatgccctgataatgagtggttgtgntgttgggcttgtgcgtgggcataggaggttgtgtatgtgtggtggagaacgagaatggaagaatcatcattgatattagtcacaggtaccagcctgatatgcctgcctgggaatccaaggatagccttgggcagtttttgtggcttacaagaagcatggccaatggttctctggctaacttctcccaattcaagctc

SEQ ID NO: 31642 - DNA, 274 bp, Glycine max
  unsure (1)..(274): unsure at all n locations; Clone ID: 701104278H1
gcacctttgttcactnttnttctcttncggctagggttttagcgcagttgnttnntagagttaaggangatncggtaaggaaaaggttcacatcagtattgnggtcattggccatgtcgantactgggaaatccactaccacnggtcacctgatttacaagctnngaggcattganaagcgngttattgagaggtttgagaaggaagctgctgagatgaacaagaggtntttcangnatgcctnggtgctggacaaattaaggctgagcgtgaa

SEQ ID NO: 31643 - DNA, 272 bp, Glycine max
  unsure (1)..(272): unsure at all n locations; Clone ID: 701104280H1
ggacgggaganagagccaacncgccggttttnacggcgtcgggagtgggattccgtggcacaaactgcttcttctcttgcacgttcagttgcgcgaacagcgtcaggctctgcaaatgtncaatggtggatttggagggcaaagaaggttacaggccttccacggagtacgtggaagacagcaacgaaacactcattaacttgactgactcaaccgagcttttgtttctaagttgccttcttccaatgattttttatctgacatacatgggc

SEQ ID NO: 31644 - DNA, 281 bp, Glycine max
  unsure (1)..(281): unsure at all n locations; Clone ID: 701104281H1
attgttgtaactttttgattcctaaattctctaaaattcgaaattctaatttcgttaggggaaagagattgtttgtgtgtgagagcagtatggctggaaaangcgagggtctgctatcggaatcnatttgggaacgacgtactcttgcgtcggcgtgtggcaacacgatcgtgttgaaatcatagccaacgatcagggtaacagaactaccccatcctacgtggctttcaccgacacagaacggttgatcggcgatgcggcgaagaaccaggtcgctatga

SEQ ID NO: 31645 - DNA, 278 bp, Glycine max
  Clone ID: 701104283H1
gatcatcgccgtgcaacaaatgtcagtgccagactggattctcaacaaaagaagctcaaccttccaatcctgccaaccaccactattggatccttccctcagactgtagaactgaggagggtacgccgtgaattcaaggctaacaagatctccgaggaagagtatgtaaagtcaattaaggaggaaattcgcaaagttgttgagcttcaagaagagcttgatattgatgttcttgttcatggagaaccagagagaaatgatatggttgagtacttcgg

SEQ ID NO: 31646 - DNA, 255 bp, Glycine max
  unsure (1)..(255): unsure at all n locations; Clone ID: 701104284H1
cttggttggttttgggtttaaggaggggaaattgattcttgttctttgggaaggataaggaatcaatctgatcgctggaagagaggaagtagtaatggaaatggggatttccaagacaacaacaagcactgaggttaccgacgacaattccaatagcagcagcaccactccatactcaaactcgcnaccatatctcctttgctgctccctacgccgtaggagaaaaggtcttaaccaatcatctgattgtcttta

SEQ ID NO: 31647 - DNA, 285 bp, Glycine max
  unsure (1)..(285): unsure at all n locations; Clone ID: 701104285H1
gaaagtagcanagatgacaggtgggttctttgnagggaaggggcagaacataaaggngacagtggtgttgatgccaaagaatntanttgggacttcaangnccataacctgccgttcngaaaaggcagtgctaaggacaccgcccaccnatttcttgggcaaaggcttgggcgcattaggtggtgcagttgatgctctgcatgnccttcntggccatagcatctnccttgcngcttatcagtgctactgcagactgnatggtagtnggaaaaggaaaagttggga

SEQ ID NO: 31648 - DNA, 253 bp, Glycine max
  Clone ID: 701104286H1
gggagattctttgtttgctaccttacctcggaaaaatggttaccgttcaggtttcaccagtaccaggtggttgggagggctcttcccacggaagcagatcagcaccccaagatctaccgaatgaagctctgggccaccaacgaggttcgcgccaagtccaagttctggtattttctgaggaaactgaaaaaggtgaagaagagcaatggccaagtgcttgccatcaacgagatttttgagaagaacccaacca

SEQ ID NO: 31649 - DNA, 253 bp, Glycine max
  unsure (1)..(253): unsure at all n locations; Clone ID: 701104287H1
gtgagatacactaagttatcctcatacaatacactctaattangtggcaagataagtgtctaaccttagtaacattgccacatattgtgttcattttggaattgtgccactaaaattctattcaattcatctatggctgcctcttcttatgctatgcaatcaatcctggcaaaccctttgatccgcatttccagcgggtctagggtgaaccaatttggcgttcctgctttgcacatgagaaggaatgttggcc

SEQ ID NO: 31650 - DNA, 257 bp, Glycine max
  unsure (1)..(257): unsure at all n locations; Clone ID: 701104288H1
gtcgagtcaagcaacaaagtcaagtacgttgctgaagaaacaacatttgtggcttttgtggtnnanccttccggaactaaanttcccaattcttctcattcaatcttccacttcaaggatttagncgttccgtcttcttcgcggcaggaactgaaggttcataatattcataaatcgaatcatttgcgcgcgaaaatagttgaagatggttgaacggaagcagttcaagacgaagctatgcgttctgtatcagagag

SEQ ID NO: 31651 - DNA, 274 bp, Glycine max
  unsure (1)..(274): unsure at all n locations; Clone ID: 701104289H1
atccaattcaatgcgatgctgagaaagaaaactcaccactngcttcgtcaacaaccaccaacaatgaggtattattcccaattcaaacacttatcccatttcctcaaaaccttaacccgaccccaaaaccctacctttgtttccccgcggatctcacagaaccctcgacctcttccgttccacgcgcgcgagtgcancagcagcagcgcgttcgcagtcgcagggttcagagaaggtggcggcgatcgtggacgagttgatggggctgacgctg

SEQ ID NO: 31652 - DNA, 270 bp, Glycine max
  unsure (1)..(270): unsure at all n locations; Clone ID: 701104290H1
gaaacactcacgcacttcatcaaaactctcctcanttatccctccaacagaagataaaacatggttctagttgcaagtcatggcgaggaggaaaagggggcagaaggcattgctgctgttgattttcgaggtcaccctgtggacaagacaaaaactggaggatggctagcagcagggctcatcttaggtactgaactggcagaaagaatatgtgtaatgggcataagcatgaacttagtgacctacttggttggagttttgaatctccct

SEQ ID NO: 31653 - DNA, 252 bp, Glycine max
  unsure (1)..(252): unsure at all n locations; Clone ID: 701104293H1
gtctgctggaaaacactttggcagagctggttatcaatgcggtccccagcattgnnatggttgcgctttgtcaattcaggcaccgaagcttgcatgggtgcactacgtctcgcccgagcttataccggaagagagaagatcatcaagtttgagggctgttaccatggccatgctgatccttttcttgttaaggcaggtagtggagttgccaccttgggacttcctgattctcccggtgtccccaaagctgcc

SEQ ID NO: 31654 - DNA, 204 bp, Glycine max
  unsure (1)..(204): unsure at all n locations; Clone ID: 701104295H1
gagaaagaaaagaatggcaaagttaatannattctttgagttgaacacaggggcnaagattccttctgttgggttaggcacttggcaagctgagcctggtgttgtagccaaagctgtcaccacagccattctggttggatacaggcatattgattgtgctcaagcgtatacccaatcaagcagagattggttctgctcttaaga

SEQ ID NO: 31655 - DNA, 269 bp, Glycine max
  unsure (1)..(269): unsure at all n locations; Clone ID: 701104296H1
tttagaaccaacctccgatactattgccagacatgaggaagacctagagctggaaaatgnagaagcagaaaatgttatacctgggaatcaagaaatagacacagtgggatcaattaatgaagatgctgcactagatccagagaaaataaggctggaggaagctgctaccaaggcacaagctgctttcaggggttatttggctcggagagcatttagggccctaaaaggcattataaggttgcaagcactcatccgtgggcacttggtta

SEQ ID NO: 31656 - DNA, 273 bp, Glycine max
  Clone ID: 701104301H1
ataatgtaaagcattctttctttattccgttcttgttctttctacatctgaaattaacagtatcccgttacagttaaagttaccgggggagggaacgatcggtgactggctgtgttagggcttttgaatcctcttctgctaaacccatgagttggtgtgatagcgttcaggaaccacggattctcgtcgcacccgatcctggtactgatggaaatggtctgggacagatgatatcgctccgccatcccaaatctggaaatgcaacacaatatc

SEQ ID NO: 31657 - DNA, 279 bp, Glycine max
  unsure (1)..(279): unsure at all n locations; Clone ID: 701104302H1
agagaatggctcccaagggtttaacctttctggctgtgttaatatgcgtttcagcactgtcactgagtccttctgttgcggggaccnggcaaaataatggccttgttatgaacttctacaaggaatcatgccctcaggctgaagacatcatcacagaacaagtcaagcttctctacaagcgccacaagaacactgctttctcctggctcaggaacatcttccatgactgtgctgttcagagttgtgatgcttcactgttgctggactccacaagaagga

SEQ ID NO: 31658 - DNA, 276 bp, Glycine max
  Clone ID: 701104303H1
tgctttctatgagttgcaaaaccctcaggagcagatccaggcttatgtttttgatgtgactcgtgctattgttccgagaatgaacttggacgagctgtttgagcagaagggtgaggttgccaaagctgtcttggaggaacttgaaaaggtgatgggagaatatggatatagtatagagcacatactcatggttgatattatacctgatcctgctgtgcgtaaggcaatgaatgagatcaatgcagctcaaaggatgcaacttgctagtcagtacaa

SEQ ID NO: 31659 - DNA, 135 bp, Glycine max
  unsure (1)..(135): unsure at all n locations; Clone ID: 701104304H1
agccagganatantgngncgaaaccgancaccganatttacgangaggggaaccaannnatttaaccaatccaccggatttggccccaacatntgngncncaccgttgtgaattnctcctcgntaaattggtttt

SEQ ID NO: 31660 - DNA, 158 bp, Glycine max
  unsure (1)..(158): unsure at all n locations; Clone ID: 701104306H1
gtgtgcagcaggnngctctgccgcctccaacanaacagagttcagancncaaaccctcgnancgnncgtttttnngggttgatagaggatgatggttcagtagaantntaagaagatnaccgtggtggcaaatgggtaggatgtggtggacattatcc

SEQ ID NO: 31661 - DNA, 275 bp, Glycine max
  unsure (1)..(275): unsure at all n locations; Clone ID: 701104307H1
tgtatattgctggaagcagcaaatactgtgctcgcttaaattctatacaagcatacagtgacattaaccgtgatgtgataggagaggctagtcgcttatcagggtattccttctctactctaaacaacattatccatccttctgcagagcttggggcaaaaacaacagtnggaccacattgtatactgggggaaggttcacagatgggtgacaaatgcagtgtgaaacggtctgtcattggccgncattgtcggattggtgctaatgttaaggtt

SEQ ID NO: 31662 - DNA, 279 bp, Glycine max
  unsure (1)..(279): unsure at all n locations; Clone ID: 701104308H1
cacgnccacttgtgtgactcttcaattcccacaagaatcaccttnnctgtacttntagccactgctaaaactggtacttttccctttcgccccctcagaaaacaacacatttaacagatttcacgccaccaaccgtgncttgtacagcataccttttgatcattcggtatgcaatnccaatctccaaactccggatccatctttnacattcttcagattcatagaatctaatatggtatgcagttttgaaanagaaaaaaaaggagaaaaatttgatct

SEQ ID NO: 31663 - DNA, 275 bp, Glycine max
  unsure (1)..(275): unsure at all n locations; Clone ID: 701104309H1
tgaaggtccttgttttcttcgttgctacaattttggtagcatggcaatgccatgcgtaacgatatgttccctctccgaatgaacactggctatggtgcccgtactccggaggtgaaatgcgcaaactggaggcttgctgtggaagcacacaanntctttggctttgagaccattcctgaagagtgcgttgaagcaacaaaggaatacatccatggcgaacaatatagatcagactccaaaacagttaaccaacaagcttacttttatgccagaga

SEQ ID NO: 31664 - DNA, 273 bp, Glycine max
  unsure (1)..(273): unsure at all n locations; Clone ID: 701104311H1
ctaattctcatttcttcatcgttcgattcttctcctcctaaaggnacgtctctggtttcctctgctctcttgttcattcttttcgtaatagcaaccttattagccttcgtttattgatttttctcctaattacacttcaattttntcgatttgtgtttgttacgtcaatctgtatatcttttttgttgtcgtcgaatccgaaacttttcattcgcctttctgattccgtaaatcgtttgttaagtgcaacatctttccctgttcttaggtatc

SEQ ID NO: 31665 - DNA, 270 bp, Glycine max
  unsure (1)..(270): unsure at all n locations; Clone ID: 701104312H1
aaagatgaaatcaatttattccttggaaatgctggtactgcaatgcgtcctttgacagcagctgtggttgctgcaggtggaaatgcaagccacatacttgatggggtgccccgaatgagagagaggccaattggggatttggttgctggtcttaagcaacttggtgcagatgttgattgctttctnggcacaaactgtccacctgttcgtgtaaatgggaagggaggacttcctggcggaaaggtgaaactgtctggatcagttagcagt

SEQ ID NO: 31666 - DNA, 272 bp, Glycine max
  Clone ID: 701104313H1
ttgtgctatggcgcctgatgctgccgccgccaacggcaaaaagagaagacgctatcttcctcataacaaggcagtgaagaagaagggttcgtaccctctgcggccaggcgtgcaaggttttttcatcacttgcgatggcggcagagaacaccaagcctctcgtgaagctctcaatattctcgattccttttatgaagagctagttgatggggaacattcaagtgtaaaggagttacccagcaaacctttaaataaaaaaatcacgtttgcag

SEQ ID NO: 31667 - DNA, 270 bp, Glycine max
  unsure (1)..(270): unsure at all n locations; Clone ID: 701104314H1
gctgatctaagatgtttgtctcagatgctaggcattggaagtgatgcactggatagacttacacatacggaaagccctctgtcacaaagttnnatctctagagcaagagagagaagcattgtaaatcaaactgattccaaggagatatcctcaatggatgacatggttggtcaacatctggatgttagtattttgtgccaacaaatggattcagaaggaaacaaacttgtgcctttgtatcaaagagtattgacagctctgatcatgatg

SEQ ID NO: 31668 - DNA, 262 bp, Glycine max
  unsure (1)..(262): unsure at all n locations; Clone ID: 701104315H1
tctgtttctgtctctgtgtttgcggctgaggattccgaacgagcgaccttcaccgtttctcgcaaagtttaagtcatcatgggtaaggnaaagactcacatcaacattgtcgtcattggacatgtcgactctgggaagtcaactaccactggtcatttgatctacaagcttggaggtattgacaagcgtgtgattgagaggttcgagaaggaggctgctgagatgaacaagaggtcattcaagtatgcctgggtgcttgaca

SEQ ID NO: 31669 - DNA, 269 bp, Glycine max
  unsure (1)..(269): unsure at all n locations; Clone ID: 701104316H1
aaaagcaaaatggtgaagatttgctgcattggtgctggatatgtggggggtcctactatggcagtcattgcactcaagtgcccatccatngaagttgctgttgttgatatctctaaatcccgcattgcagcctggaacagtgaccagcttcctatctatgaacctggccttgatggtgttgtgaagcaatgccgtggcaagaacctcttcttcagcactgatgttgaaaagcatgtctttgaggctgacatagtgtttgtctctgtcaa

SEQ ID NO: 31670 - DNA, 107 bp, Glycine max
  unsure (1)..(107): unsure at all n locations; Clone ID: 701104317H1
gcaaaaacggaaatttcttcctcaaatgccttctgggncgctncntctttggcantccagantaacgaagtttttggnccgccagtacaggntacttattcacntga

SEQ ID NO: 31671 - DNA, 160 bp, Glycine max
  unsure (1)..(160): unsure at all n locations; Clone ID: 701104318H1
accaaactcaaaaccctaacaaaccaaaaacagttgctgccatattcaccaatggctttctccaaggcaatgtttctcgccgccgtaatgtcggtgctcgtcgccgtcatctccgccgccgaagctccagctccgagccctacgtctcccgcngccgccg

SEQ ID NO: 31672 - DNA, 260 bp, Glycine max
  unsure (1)..(260): unsure at all n locations; Clone ID: 701104319H1
gtcagatgagtattctcatatatacntgtttaaaatttattanccctacatttagcctggaacagaaagaatccccatgaccaatcttataaagcggaaattatgagggactgcgaaactcttactcgcatcgcttctgttcatccaaagaaaaggaaacaagttagctcatttagtttttaactttcatgagatgtactgggttcaggatgctcccacccagattttgactcttattgagttcaacgtaattgtcttgt

SEQ ID NO: 31673 - DNA, 277 bp, Glycine max
  unsure (1)..(277): unsure at all n locations; Clone ID: 701104320H1
anagangtgaggnatagcagatgttgttgttgatacaatacaactccatctgtcacaatccattctggcgccctcaaaacaccctcctaactgaacaaccaaagaaaaagaaacagaaaaaaacttgagcactcttcctcttgccagtttcagatctctctgagaaatgataataacaataatgggggtgtgagatgtgatgtgatgtgaaggtgtgtaaggtgtacacaaaagatggagtgttggaattcggtggacggggtggtggaggagatat

SEQ ID NO: 31674 - DNA, 105 bp, Glycine max
  unsure (1)..(105): unsure at all n locations; Clone ID: 701104321H1
ctcgacgcnatcaccggccggtaacgtcacacaaacccaaaatcacnatggcgntctcatacgtccctntggtcttaccctcttcgttgcaaacnccaaacagaa

SEQ ID NO: 31675 - DNA, 275 bp, Glycine max
  unsure (1)..(275): unsure at all n locations; Clone ID: 701104322H1
attattgctgaggatattgaacaagaagctttagcaactcttgtggtgaacaaacttagaggatcactgaaaattgcagcactcaaggcccctgggtttggagatcgcaagagccagtaccttgatgatattgccatcttgactggaggtactgtaatcagagaagaggttggccttactttggacaaagctgggaaagaggttctcggatatgcncccaaggtggttctcaccaaggatacaaccacaattgttggtgatggaagtacccagga

SEQ ID NO: 31676 - DNA, 273 bp, Glycine max
  Clone ID: 701104325H1
attttgcccccgaaaaaggagtggttatcgaacaaaacgaagcctccaaaacgctttggtttcttcaccaccaccacccctctcctctttctctctctttctaaaaaccagaaacaacaaacacaaaccgaaaaggcgaaaggggttttccgagtgagatctagggtttccatcgattcggagagaggatattgatagaacgacctcaacgagcaaggtcaggaggtggagtactagaacatggattcggtgccttcgaattcgcatggaaac

SEQ ID NO: 31677 - DNA, 231 bp, Glycine max
  Clone ID: 701104326H1
tcttagatctcttctttctctacgccgcacgccgaaaccatggccggaaaaggagagggtcctgctatcggaatcgatctcggaaccacctactcttgcgtcggtgtgtggcaacatgaccgcgttgaaatcatcgccaacgaccaagggaacagaaccacgccgtcttacgtcggattcactgacaccgagcgtctcatcggtgatgcggccaagaatcaagtcgccatg

SEQ ID NO: 31678 - DNA, 150 bp, Glycine max
  unsure (1)..(150): unsure at all n locations; Clone ID: 701104327H1
cctttggaagaagaagaaaatggaggaggaacaaaacggcggnccgtttcgaccnncataatcctgggcgcctcaggcttcanaggcaaatacgtcntccgngaagccctcaaattcctcaacacccntcntgcnnncctcnaatccaca

SEQ ID NO: 31679 - DNA, 272 bp, Glycine max
  Clone ID: 701104328H1
ctgttatttacaaggattgggttttcaccgatcaagcattgcctaatgatcttgtcaagagaggagttgctgttaaggatccatctgctccccatggagttcgacttttgatcgaggactatccttatgcttctgatgggctagagatatgggatgctatcaagtcttgggtggaagaatatgtctcattctactacaagtcagatgaggaacttcaaaaagaccccgagctccaagcttggtggaaagaacttgtagaggtgggtcatggg

SEQ ID NO: 31680 - DNA, 271 bp, Glycine max
  unsure (1)..(271): unsure at all n locations; Clone ID: 701104330H1
cgttggtgcaaagcatccttcgtttcaatttctctctctcagcgctttctgcaatcgaacctttcatctccaaagggatccacaggccgaaggagaaatggggcncgacattcacaaagcttttcagtcggcttttcgcgaagaaggaaatgcgaattctgatggttggtctgatgctgctggtaagaccactatcctgtacaagctcaagctcggagagatcgttaccacaattcctaccatcgggttcaatgttgagactgtggaatac

SEQ ID NO: 31681 - DNA, 273 bp, Glycine max
  Clone ID: 701104331H1
cactcacaaacgcacactgaattcaaaaacatcgaaagagagaggcatggccgagcaaaccttccatccatgatcaagccagatggcgttcaaagaggccttattggcgagattattagcagatttgagaggaagggtttttacttgaaagggttgaaactcgttactgtggaccgtccttttgctgagaagcactatgctgatttgtctgcaaagcctttctttagtggtttggtggatacattgtctctggccctgttgttgccatgatct

SEQ ID NO: 31682 - DNA, 278 bp, Glycine max
  Clone ID: 701104334H1
gcattgacgaaaaaaaaccaaatgtaaagaattactacctaacaacattgtcaaccaacatggtttggttatgattagcatatatattcctgtctttaaaatatgttgttgatactcatgtttgtgtaaatgaaaagtatttgtagaaaaaataaaactcttaaatgggtcttatccggtcaaaggacaccctcgtgagctcaccaattaatgtaatcaagcaaataaattaccattaacgtaagcttacaagtcgtaagctcagtgttattatctac

SEQ ID NO: 31683 - DNA, 277 bp, Glycine max
  Clone ID: 701104335H1
aaaccaaatagtttcccacaagcaacacacattacttcattttctttatttcttttgtttatacggttttttccttggaagagaattattcgaacctttaaaacataaacatgggaataagcacacgtacgctggagatcacagttatctcctgcgaaaacctccacggcgtaaaggacgacgcgtacgtggttgttcgggcggagtccttaaactgctgcaccaccagaagggtcaaagtcgacgacggcaccaaaaaacttctctcgtggaacca

SEQ ID NO: 31684 - DNA, 276 bp, Glycine max
  Clone ID: 701104336H1
aaatataaaagtttatttcctctgatcgtgtggtttctgagttctaagcactcacctctttcatacacgtttgttccgcttgttgagaagccatgggcgaggattacgagttcccaagtgctggcaacatggaaatgcctgaggaggaagagtttgagagtccgatcctgaaggttggggaggagaaggagattgggaaaatggggctgaagaagaaattgctcaaggaaggtgaaggttgggacacccctgacagtggagaccaagttgaagtgc

SEQ ID NO: 31685 - DNA, 276 bp, Glycine max
  unsure (1)..(276): unsure at all n locations; Clone ID: 701104337H1
ttttcgtntcgccaattcgtgaaatcgaaagattcccacagaattgtacgaattattgtnnanttttttgtctctactgtccgtgctccaacttggtaaactagaagttcatttattgttttcattcttcaatgggggatgctgagaatgcccttccacctacaaagaaaagngctgctggaagggagctcactcgagacactcccattgatgatgaggaagatgcccccgagcttgagactggcactttcaagagagccagtgaagaggttctgg

SEQ ID NO: 31686 - DNA, 273 bp, Glycine max
  Clone ID: 701104338H1
tatctctgtctaccttaccttacctcacctcacaagggacaaagataaaaaatgaagatcattgagaaaattcacgcagcctcggctgatccaaacagggtggtgttctcatttgagttcttcccgcccaagactgaggatggggtggacaatctgtttgagaggatggaccgcatggtggtgcacaacccctcgttttgcgacatcacttggggtgctggagggacaacggctgatcttacattggaaattgccaacaagatgcagaacatt

SEQ ID NO: 31687 - DNA, 275 bp, Glycine max
  Clone ID: 701104340H1
ctccgatacgccactcgcttcatatgcaagcacagccagaatcctctatagatccgaaactgttaagtttcgacaaactcgacacaaggacaccatcaacatcttgaagagctcgctgtgttgttcgttccttttggccccttcaacgaaattgtactaatctaagatttgcgattttttgtccaaattaaaatgtccatggaagctcaacagattctttccagattctgtccaaaaccatcttcagtgccatctattccaattgtgaaacaaca

SEQ ID NO: 31688 - DNA, 254 bp, Glycine max
  unsure (1)..(254): unsure at all n locations; Clone ID: 701104341H1
ctgttttcatgagagacacaggctcggntgatttggtaaacatacgcaaaataacctgaagaatacaggaacgataaggagatttccatcaatgtgctatttcatgggtatggtcactacgacatactagagaccttatgatatgaccataattacacctgaaaattgaaaataagcacttagtacagcacaaaacctacttgccttgatggtgcagtttaagacttctcaagtaaagagctttttgaggggtc

SEQ ID NO: 31689 - DNA, 271 bp, Glycine max
  unsure (1)..(271): unsure at all n locations; Clone ID: 701104342H1
cagtcgcagaggaaaaccctagctagtagtctcagttcgtttgagagaganaaaatggcagagggtctcgttctccgcggaaccatgcgcgcccacaccgacgtcgtgacggcgattgccactcccatcgacaactccgacatgatcgtgacggcgtcgcgcgacaaatccatcattctctggcacctcaccaaggaggacaagacctacggtgtcccccgccgccgcctcaccggacattctcacttcgtccaggacgtcgtctctcatc

SEQ ID NO: 31690 - DNA, 163 bp, Glycine max
  unsure (1)..(163): unsure at all n locations; Clone ID: 701104343H1
cttccaactaaggcaaaaccaaaactcatctgcatctcatactcattntctcggctgcctctntctgctctcctcctctctntcnnnnnnnnnnnnnnnnnnncaaacactctcaagttttctctnagntttggtactttagggtattgtgganggagagagt

SEQ ID NO: 31691 - DNA, 270 bp, Glycine max
  Clone ID: 701104344H1
accattgggaaaaaccgatttggaaagcggttctcgcccgctgtatccgatgatgcttgagagccccgaactgcgctggtctttcatcagaaaagtatactccataatcgccatacagttgctcgtaaccatcgtcgtcggcgccgtcgtcgtcaccgtccgcccaatcagcgtcttcttcgccaccaccggcgccggattggctctctacatcgtcctcatctttgtccccttcatcacattgtgtccactttactactactcccagaa

SEQ ID NO: 31692 - DNA, 154 bp, Glycine max
  Clone ID: 701104345H1
catctttctctctccgaacagatcaaactatggccacctcaagcgccaaatcagtccatgatttcaccgttaaagatgccaagggaaatgatattaatcttggtgactacaaaggaaaggtccttatcattgtcaatgttgcctcacaatgtgg

SEQ ID NO: 31693 - DNA, 266 bp, Glycine max
  unsure (1)..(266): unsure at all n locations; Clone ID: 701104346H1
cgagggaaggacgaagttggcggcaagtttagaacttgcggcgccggcggcaagtttagaacttgcggcgccggcggnggtggcaccggccaggagtgtcgtggttgtgcagcggagttanngagatcagcaaaagcttctggaangagagaacaaagaatctctagtttgtnaacaatggaagacgggaacaacagtggcggttccaccgcaaagaaaatgataaggagttgctattgttcttggatgagcacaggggaaattca

SEQ ID NO: 31694 - DNA, 269 bp, Glycine max
  unsure (1)..(269): unsure at all n locations; Clone ID: 701104348H1
aacaaactgaaggcactgattcgacaatggttatgaaggaaattctttcttttacactaacagaaaagggtgaatttgtaagggaaataattgttcaagaatttgctaaaggtttagatgcacttggtctagcaaccatggagacagctgctgccagagttcctttcagtagtttcttttattcccctttaatgactaaagaagatataatcaacttgagaaacttccgacgccttatgctattgctgttgggggccagaagnnncnag

SEQ ID NO: 31695 - DNA, 260 bp, Glycine max
  Clone ID: 701104349H1
ctgttttcatgagagacacaggctcggttgatttggtaaacatagcaaaataacctgaagaatacgcggaacgataaggagatttccatcaatgtgctatttcatgggtatggtcactacgacatactagagaccttatgatatgaccataattacacctgaaaattgaaaataagcacttagtacagcacaaaacctacttgcctgatggtgcagtttaagacttctcaagtaaagagcttttttgaggggtcatttta

SEQ ID NO: 31696 - DNA, 277 bp, Glycine max
  Clone ID: 701104350H1
cagtcgcagaggaaaaccctagctagtagtctcagttcgtttgagagagaaaaaatggcagagggtctcgttctccgcggaaccatgcgcgcccacaccgacgtcgtgacgcgattgccactcccatcgacaactccgacatgatcgtgacggcgtcgcgcgacaaatccatcattctctggcacctcaccaaggaggacaagacctacggtgtcccccgccgccgcctcaccggacattctcacttcgtccaggacgtcgtcctctcatccgacgg

SEQ ID NO: 31697 - DNA, 279 bp, Glycine max
  unsure (1)..(279): unsure at all n locations; Clone ID: 701104351H1
cttccaactaaggcaaaaccaaaactcatctcatctcatctcattttctcgctcctctctctctcctcctctctnnnnnnnnnnnnnnnnnnnnnnnncaaacactcncaagttttctctcagatttggtactttagggtattgtggaaggagagagtgtaaatgaataaaccaacaagcgacgcaattaatatggggaaaaggagcctggagggtggagaagatgatcagcncgaacgaaagaggcctgctcttgccagtgtaattgtggaagctctc

SEQ ID NO: 31698 - DNA, 274 bp, Glycine max
  unsure (1)..(274): unsure at all n locations; Clone ID: 701104352H1
accattgggaaaaaccgatttggaaagcggttctcgcccgctgtatccgatgatgcttgagagccccgaactgcgctggtctttcatcagaaaantatactccataatcgccatacagttgctcgtaaccatcgtcgtcggcgccgtcgtcgtcaccgtccgcccaatcagcgtcttcttcgccaccaccggcgccggattggctctctacatcgtcctcatctttgtccccttcatcacattgtgtccactttactactactcccagaagcat

SEQ ID NO: 31699 - DNA, 275 bp, Glycine max
  unsure (1)..(275): unsure at all n locations; Clone ID: 701104353H1
catctttctctctccgaacagatcaaactatggccacctcaagcgccaaatcagtccatgatttcaccgttaaagatgccaagggaaatgatattaatcttggtgactacaaaggaaaggtccttntcattgtcaatgttgcctcacaatgtggcttgactaattcaaattacactgagctcagtcagttgtatgagaaatacaaacagaaaggtctggaaattctggcatttccatgcaatcagtttggggcacaggagcctggatctaatgaa

SEQ ID NO: 31700 - DNA, 273 bp, Glycine max
  unsure (1)..(273): unsure at all n locations; Clone ID: 701104354H1
gcgagggaaggacgaagttggcggcaagtttagaacttgcggcgccggcggcaagtttagaacttgcggcgccggcggcgggtggcaccggccaggagtgtcgtggttgtgcagcggagttacngagatcagcaaaagcttctggagnnagagaacaaagaatctctagtttgtnancaatggaagacgggaacaacagtggcggttccaccgcaaagaaaatgataaggagttgctattgttcttggatgagcacaggggaaattcatttgg

SEQ ID NO: 31701 - DNA, 272 bp, Glycine max
  unsure (1)..(272): unsure at all n locations; Clone ID: 701104356H1
acaaactgaaggcactgattcgacantggttatgaaggaaattctttcttttacactaacagaaaagggtgaatttgtaagggaaataattgttcaagaatttgctaaaggtttagatgcacttggtctagcaaccatggagacagctgctgccagagttcctttcagtagtttcttttattcccctttaatgactaaagaagatataatcaacttgagaaacttccgacgccttatgctattgctgttgggggccagaagaaaagaagaat

SEQ ID NO: 31702 - DNA, 245 bp, Glycine max
  unsure (1)..(245): unsure at all n locations; Clone ID: 701104357H1
gaagaaggccttcacaccagtactcaaagcagactgaaactgaggagggaaaacaaaaacattnaggcacagctggagaaactgaagaagtatgctactgtggttcgtgttttggctcacacccagatcaggaaaatgaaagggttgaagcagaagaaagcccatattcatggaaattcaggttaatggtggtactattgcacagaaggtggactttgcatacagtttctttgagaaacaggttc

SEQ ID NO: 31703 - DNA, 269 bp, Glycine max
  unsure (1)..(269): unsure at all n locations; Clone ID: 701104358H1
aatggattatgaaatcgctgagagcactgacaaggccgatatcactgttgatgcaaggngttttagttgggcagtggacagtgcgataaagagtgagactgcgtcaattttgggagaatcccgaatccatagtttttgttccgtagtggacaatgccataaggagtaggactgcatcagatttgggaacatctccttcccctgtccatagtcttgcttcggcagtggccaatgcaatgagcagcagtagtgctgcaccattttcacaac

SEQ ID NO: 31704 - DNA, 270 bp, Glycine max
  Clone ID: 701104359H1
tgtgctctctcttcagtctctcccacacacccttcttcttccagctgagttgtttgtaatacagcaagatgaatccatggaacatgagaacttccaagttactctctcaacaagtttcttatcctccttatctctttgtagaagagattccaaacatgggaaattccagtgttgtgaccaaggatgctagaggttcacagctgacaatcttctatggtggccaagttctgtcttcgatgatattcaagctaaaaaagccaaggacatctt

SEQ ID NO: 31705 - DNA, 268 bp, Glycine max
  unsure (1)..(268): unsure at all n locations; Clone ID: 701104360H1
agataactagaaacagtgtgatgaaaatgaaggtccttgttttcttcgttgctacaattttngtagcatggcaatgccatgcgtacgatatgttccctctccgaatgaacactggctatggtgcccgtactccggaggtgaaatgcgcaagttggaggcttgctgtggaagcacacaacatctttggctttgagaccattcctgaagagtgcgttgaagcaacaaaggaatacatccatggcgaacaatatagatcagactccaaaac

SEQ ID NO: 31706 - DNA, 269 bp, Glycine max
  Clone ID: 701104361H1
tctgagtgtggtgcttcactcttcacttcgcagcttcagatacttctccatcctctgaatcaagttttgactttatttgaagagtttctcaactgcactttccttccaaaatgagccggccaatggaggaagatgctgcgggtaaaaatgaggaagaggagttcaacaccggaccactatctgtactcatgatgagtgttaaaaataatactcaggtactgataaattgtcggaacaacaaaaagctctgggtcgtgtaagggcttttg

SEQ ID NO: 31707 - DNA, 269 bp, Glycine max
  Clone ID: 701104364H1
gtgaattagctatgaacaatgatgagctacatgtggttatgttcccattccttgcatttggccacattagtccatttgttcagctctccaacaagttgttctctcatggtgttcatgtcactttcttgtcagctgcatccaacattcccagaatcagatcaactcttaatctcaatccagccatcaatgttatctcactaaagttcccaaatggtataaccaacactgctgaattgccacctcacttagctggaaatctcatacacgcc

SEQ ID NO: 31708 - DNA, 276 bp, Glycine max
  unsure (1)..(276): unsure at all n locations; Clone ID: 701104365H1
ctcgtcttcaatcctttcgttattctcttattcatccttctcttcngaataatccagatctctttctgcccttttctccgtcacgcttttcgtgaccggatctgtatggatttgatccagatctacacgccgatggtggttttggccgggtctttcatagatctggtgcgtagaggctcagatctacggtaccgaggtacaacagagaatcgatgacaagaacgcagatccgacngtagatccagccgattccgcttgttcgatcgctacagaccc

SEQ ID NO: 31709 - DNA, 275 bp, Glycine max
  Clone ID: 701104366H1
aactttgaaagctcaatttgttaccaaggttgctctgtgaatccgaggttccaaactctgccactaactttaatggcaactggggtattcattaataaacccccttcacttcctccgtaccccgagatgattttggaggcaattgaagcactgaatgaagacaatggttctaataaatcatcaatttcgaagtacatagaatctacctacggtggattacctcagggccacaaggttttgctcaatgtgcacctcgcgaaaatgagggacagtgg

SEQ ID NO: 31710 - DNA, 270 bp, Glycine max
  unsure (1)..(270): unsure at all n locations; Clone ID: 701104367H1
ctagctagtttcatctgggttatgcttatgtctggcacagaacaggtgaccatgggaggattaggactcaatttgactccaattactacatttgctatcattactgtgattgctacggtgctaatatggtggttttggaatgcactcaactgggtgtggctgagacccaagaggatagagaggcgtctcaaggagcagggtatccaaggnaattcctaccgcccttgattggagacatcagagatatggttaagatgattaaggaagcca

SEQ ID NO: 31711 - DNA, 271 bp, Glycine max
  Clone ID: 701104368H1
agatatttcagtggaaaggggaggttccaaagggtcttccagattggaaagaagaggaaaaggttcatcttggtgaagagctttcagatgtgttgctttaccttgtgaggctctcagacatttgtggtgttgatcttggcaaagctgctctaagaaaggtccaactcaatgccataaaatacccaaaaaaggttaatgatgatgcaattactcaagatgctaattgatgataatccattggtgcctatggttgttgtagttgctattttag

SEQ ID NO: 31712 - DNA, 275 bp, Glycine max
  unsure (1)..(275): unsure at all n locations; Clone ID: 701104369H1
cgntgcttnccattctatttgctacaatcgaaacccccaatttttatantacgggtgatgtacattctatgattcagagttttggttgaaggtncacttgtattgtttgccatcatggatcccantgatgataggggtnaaagtagactctatattggtaaccttgatctncagaattacagaagctgcttngcttaaaatgttttctccctatggaaagataatttctgaggacttcttatggcacacgcgtggcccaaaacgcggggagccac

SEQ ID NO: 31713 - DNA, 269 bp, Glycine max
  Clone ID: 701104371H1
ggtgatagtggtgatccaatggacatgtttttcacggcaacttcctcctcggcctctggtggaggtgctgctgcggcctctgatggatttggaacacaggatgattggggtttggattcggagtttggtgggggaggccatgatgtaggtggcaccactactgagcttgaggggctgcctcctcctccttccggggtgtcaggttccactgccaaaggcaaagggatggacaattacaagcaggggcagtttgccgatgctattaagtg

SEQ ID NO: 31714 - DNA, 269 bp, Glycine max
  Clone ID: 701104372H1
gaatttccaactgaagttccaggtcaaaatgcctatgcatacttttatccaccatctaatcctgatttccaagctagcaaagaagaaaagcctccattattattgaagagccacggtggaccaactcaagaaactcgtggaattttaaatttgagcgttcagtactggactagtcgaggttgggccgtcgttgatgttaattatggtggaagtactggttatggcagggtgtacagagaacggcttttgcgccagtggggaatagttga

SEQ ID NO: 31715 - DNA, 268 bp, Glycine max
  Clone ID: 701104373H1
tgctgcaccactgcctcctcaacgtcgccgaccaccgttcagctctagtgatcagcagcaatggcggggaaagtggcaaaggcagcttatgatgcaaagatgctgaagcttctgaaagagtacagtcaggtgctggtggtttcatcagacaatgtgggttccaaccagcttcagggcatacggaggggacttaatgctgattcggtggtggtgatgggaaagaactccatgatgaaacgctctatcatcttggatgctcagaagactg

SEQ ID NO: 31716 - DNA, 249 bp, Glycine max
  unsure (1)..(249): unsure at all n locations; Clone ID: 701104375H1
tcaaagtagatttaatgtacagtttggaactttttatgttcaacgganaagcaaganatcaggagtaactttgaactcaatctcaccttagatgaaagtcacattcaactcaaatgtaacaacgatttgccgagcatgcagttacnactttttgagggtgaacatcaatttagatggccaaacgtgaaaccaaacaccccttagttttcattcaaacatttttnttttttatgngttttagtcttaaat

SEQ ID NO: 31717 - DNA, 240 bp, Glycine max
  Clone ID: 701104376H1
cgttctttcggagagttcgaagatgtcgggcgttaccaacaacaacgaggaagacaagaagccaaccgaacagggagcacacatcaaccttaaggttaaggggcaggatgggaatgaagtttttttcaggatcaagagaagcactcaattgaagaagcttatgaatgcttactgtgaccgacagtcggtggatttcaactccattgcttttctgtttgatggacgccgcctccgagctga

SEQ ID NO: 31718 - DNA, 265 bp, Glycine max
  Clone ID: 701104377H1
tggcatttgaggactatgggcttgagttgtatttgtaccgcacagcatatttagtggaccttgatcgtgagaaagttggaagagttttgaagcttgactctatcaagaacggtgactcttggatggggatggacgtgttggtcttcaacacgtggcactggtggacccacaccggaagttctcaaccgtgggactatgttcaggtgaataataagttgttcaaagacatgaaccgttttcttgcgtactataaagggctaacaac

SEQ ID NO: 31719 - DNA, 266 bp, Glycine max
  unsure (1)..(266): unsure at all n locations; Clone ID: 701104378H1
atccgaggcccctcttttatatggtcgttgataaaatggcttcgacccttttaacaaagatgcttttgggtcaccgattgatacacccttcttcgttcctcactcaccagccacagatnctctcttctctattcagtaaacggctgttttgtatacgagctgtcccggtctcagcctctacatcccaaaacatcaaaacaactggttgggctccttgtatggcttcttcctcagttggtagaagagctacatattcaacacaatct

SEQ ID NO: 31720 - DNA, 267 bp, Glycine max
  Clone ID: 701104379H1
ctttagccgaggtcaggaggagcactagctaagttcacaatttcaaaatggctaggggactaaagaagcatttgaaaaggctcaatgctcctaagcattggatgcttgacaaactgggtggtgcatttgcgcctaaaccctcatctggaccacacaaatcgagggagtgcctccccctcattcttattctgcgaaaccggctgaagtatgctctgacataccgtgaagtcattgctattctgatgcagcgccatgttcttgttgatg

SEQ ID NO: 31721 - DNA, 90 bp, Glycine max
  unsure (1)..(90): unsure at all n locations; Clone ID: 701104380H1
gtctagatcgcgagcggcgccctttttntnttnctttnaacanaatngttnaatngtatntaaaaaaaaataccgacaacaagantcacc

SEQ ID NO: 31722 - DNA, 151 bp, Glycine max
  unsure (1)..(151): unsure at all n locations; Clone ID: 701104381H1
gctaatttaaaacccttcaaattctccacagccaaactgtttcataccatgccaccaccgtttccacacananatcnatagnganntcgaaatttctatcctntccttcggggaactgntccgtncnngaaaccatcatntgggtcgcaca

SEQ ID NO: 31723 - DNA, 273 bp, Glycine max
  unsure (1)..(273): unsure at all n locations; Clone ID: 701104382H1
gtgagtgagtgagggancaatggagaagattgcagcactccgctgctaatactatccanacccctctcttacccaacaacaccantcttccaaagacttcatctttncaancctttcttncnaaccagntanttggcctcccctnatcttcttcttnatcttctgcttcntctttaaccgccgncaaacgggtctcttgcaggcctancaagtgttccgtttccgaagccacagagcccaaaacagagaagaagaggcaattgctganaagag

SEQ ID NO: 31724 - DNA, 96 bp, Glycine max
  Clone ID: 701104383H1
ttatgttatgtgggtaagtcacctaagacactccacgtacctacgttgttgtctcttaccggctttaataaatcttctgcccttgttccatattta

SEQ ID NO: 31725 - DNA, 270 bp, Glycine max
  unsure (1)..(270): unsure at all n locations; Clone ID: 701104384H1
ctttcttcctcttcctcagtagtgcgattttcgattctcttctctgcaactatgcctcaccctaaggtcttcttcgacatgaccatcggcggtcaacctgccggccgcatcgtgatggagctctatgccgacgtgactcccagcaccgccgagaacttccgcgcgctctgcaccggcgagaagggcgccgggcggagggnaagcccctccantacaaaggctcgtccttccaccgcgtgatcccgaacttcatgtgccagggcggcgact

SEQ ID NO: 31726 - DNA, 271 bp, Glycine max
  unsure (1)..(271): unsure at all n locations; Clone ID: 701104385H1
tcaaagtttcttcctttctctgctctttgtcttctctgacacatttggggccttgttgagtgtgtttttgcaagagggtatggcgaaggacgttgaggttgctgagcgtggctccttctctgggaaggactaccaggaccctccaccagcaccactcattgatgctgaggagctcacaaagtggtccttttacagggctcttattgctgagttcattgccactttgctcttcctctacattactgtgcnccacagttatagggtacaagca

SEQ ID NO: 31727 - DNA, 270 bp, Glycine max
  Clone ID: 701104386H1
gcaacaaacaagaggggtttgccttgtgccgtttgtgttgttttcgggacgaagaagaagatggtgtcaggttctggaatctgcgcaaagcgggtggtggtggacgcgcgccaccacatgctgggtcgtctagcctccatcgtggcgaaggagcttctgaacggccagaaagtggtggtcgttcgctgtgaagagatttgcatctcgggcgggctggtgaggcagaagatgaaatacttgaggttccttcgcaaacgcatgaacaccaaa

SEQ ID NO: 31728 - DNA, 272 bp, Glycine max
  unsure (1)..(272): unsure at all n locations; Clone ID: 701104387H1
gnngtctcttattttcctttgtaatggncagttagaaacccnccatcgtcaaagcacgcgttttttttaatctctctctctcaacaaatatttgtgggtagattcaattcaccatgtcgagctcatgngagtactctgaattttccggccagaaaccggcgnggtcgccggagaaatcgagcttctctcagacttgcagtctgttgagtcaatacatcaaggagaanggtagcnttcggagatcttaccctcggaatgacatcatgtgggtc

SEQ ID NO: 31729 - DNA, 269 bp, Glycine max
  unsure (1)..(269): unsure at all n locations; Clone ID: 701104389H1
cttgaagctcccattcacgtcctcatggtgtcctatccagcacaaggacacataanccctttgctcagactaggtaagtgccttgctgcaaagggcttatttgtaaccttcaccacctcagagaccgctggtaaaaacatgcgaaccgccaataacatcactgacaaatcagtgattcctgtcggcgatggttttctcaagttcgatttctttgaagatggcatggcagatgatgatgatggtcccaagaagataaatctcggtgattt

SEQ ID NO: 31730 - DNA, 267 bp, Glycine max
  unsure (1)..(267): unsure at all n locations; Clone ID: 701104390H1
gcgtttgtgagcacacgagtggattggaaggagacaccagaagcacacgtgttcaaggctgatattccagggctgangaaggaggaagtgaagctggagattcaagatggcagagttcttcagataagcggagngaggaatgttgaaaaagaagacaagaatgatacgtggcatcgcgtggagcgaanagtggcaagttggtgaggaggtttagattgccggagaatgctaaagtggaccaagtgaaggcttccatggaaaatgggg

SEQ ID NO: 31731 - DNA, 247 bp, Glycine max
  unsure (1)..(247): unsure at all n locations; Clone ID: 701104391H1
caaccagcacggagaaaccggaaaacngaccatcaacttgtaccctactgagccagggaagactgttcaagttagtcgtaggccatattccaggaaacagtattctaacaacaatcacattgaggctcctgcaaaacctcctggttatatagatgagaatgcccctgctgaacttgttatgaactttgctgagttgggttctgttccctcagaaacaaaccttaataaaatgtttaggcgttttgga

SEQ ID NO: 31732 - DNA, 248 bp, Glycine max
  unsure (1)..(248): unsure at all n locations; Clone ID: 701104392H1
gtctgctggaaaacactttggcagagctggttatcaatgcggtacccagcattacnaatggttcgctttgtcaattcaggcaccgaagcttgcatgggtgcactacgtctcgcccgagcttataccggaagagagaagatcatcaagtttgagggctgttaccatggccatgctgatccttttcttgttaaggcaggtagtggagttgccaccttgggattcctgattctcccggtgtccccaaactg

SEQ ID NO: 31733 - DNA, 267 bp, Glycine max
  Clone ID: 701104394H1
aacttccaaccatgaactgaagcaccacacatacccacttcctccaaagacatcatttttattaccaatcttccaatttcagagaaaattctttgtgggcatctcttaattaaaaaaatgtcaagcttccccaacacggtggcggaaggccgcaggtccagcaaggcaccggaaaaatccactttttctcagacttgcagcctcttgagccagttcttgaaggagaaacgtgcttctgctgattccacctttcgaattggtgggaaa

SEQ ID NO: 31734 - DNA, 266 bp, Glycine max
  Clone ID: 701104395H1
ccccaatatacttagccatatctttacttcccaaaacttgctctacaatgagtttccttcgttcttttgcaagaaacaaggatatatcaaaagtaggacgcagaggtatccattgcatgcagaaactatgtgcagaaaaaatatctcctgattcactagagaaggcccaaaatcgtgtgatagatgctgcactcacacttgttcgagaaaatacaaggcttaagaaagaactcgtgcatagtttgggaggtgctgtggcaattcaa

SEQ ID NO: 31735 - DNA, 267 bp, Glycine max
  Clone ID: 701104396H1
ctcacaccaggcgcacgttagcacaaactatcatggccacggcaacagcagctgccacctcgtcctttatggggacgcgtctcctggaggctcactccggggcggggcgagtgcacgcccgattcggcttcggcaagaaaaaggctcccgccccaaagaaagcctccaggggatcgggccgagacaccgacagacccctttggtatccgggcgccaaagcgcccgaatacctcgatgggagtcttgtcggagattacgggttcgatc

SEQ ID NO: 31736 - DNA, 252 bp, Glycine max
  unsure (1)..(252): unsure at all n locations; Clone ID: 701104402H1
ttactacctgcgacngaagatcaacggtaatggtcgcgaggttnnggttatccgananattgatgtctgcaaatnggagccttgggacatgcccggtatttttctttcnntctcttcgtccttttacaatcatataatctctagttcgaggtagntatgtnatntcaattggnagtnatttgcttggaatntgtgtntgtgctagactcanctgaaaaagttagtttatgagaggngcnttatcgntactta

SEQ ID NO: 31737 - DNA, 255 bp, Glycine max
  unsure (1)..(255): unsure at all n locations; Clone ID: 701104403H1
cctcatccgaggttcaaacagcacaacagttgattcaggatgttataagcagtcacnaagaacctatcactagcagttatggcaggctagatgcaggtccaaggtcttcatactctcagttgggcactacatcgcgcctccccccatcttcattgtcctcacaaccatacacaggttatggagcttctggtttaggagactacagtactttcaggctttaaattggttcccctgtattcaggggtactccattgg

SEQ ID NO: 31738 - DNA, 187 bp, Glycine max
  unsure (1)..(187): unsure at all n locations; Clone ID: 701104404H1
ttaaattaaattcattgatccctcgcctagagaggggaaatccagaaatactcgattgactatatacggatctatgtntcntattattnattaaacgaattagtgctgacgcgtngtgtttcggttcttccgcgnagtgngaggtgatgcatgcccgncgacgatgatctctcnntgagaatgacca

SEQ ID NO: 31739 - DNA, 258 bp, Glycine max
  unsure (1)..(258): unsure at all n locations; Clone ID: 701104405H1
aaactacatagaaaaataaaaccaaacctttcttcctactactcccattcccacatttcgacancatggacgaggacttcgacatgccgacggcggaggcaatgggcgaggacttcgacttcgccggcgccaccggcgcgacctcgacggcagcagcagcaaccccatcttgaaggtcggcgaggagaaggagattggaaaagagggtttgaagaagaaactacttaaagaaggtgaaggatgggacactcctgaagt

SEQ ID NO: 31740 - DNA, 259 bp, Glycine max
  unsure (1)..(259): unsure at all n locations; Clone ID: 701104406H1
caaccatgggtcattactcaattcatcatcagcttgtggccatagtctcattatttatccttttgcttccaaatntccatgggnngggagacgatgggcatgtcattgtttgcaagattgcncncgctcncctcagtgaagcagctgcanaggctgtgaagnanctgctgccaatatccgcnagcaatgatntgtccacaaagtgtncttgggcngatcatgntcatcanatcnntccttgggcctctgctttgcatac

SEQ ID NO: 31741 - DNA, 257 bp, Glycine max
  unsure (1)..(257): unsure at all n locations; Clone ID: 701104407H1
ctaatccctctttcttcctcttcctcagtagtgcgattttcgattctcttctctgcaactatgcctaaccctaaggtcnccttcgacatgaccatcggcggtcaacctgccggccgcatcgtgatggagctctatgccgacgtgactcccagcancgccgagaacttccgngcgctctgnaccggcgagaagggcgccgggcggagggcaagcccctccactacaaaggtcgtccttccaccgcgtgatcccgaatt

SEQ ID NO: 31742 - DNA, 258 bp, Glycine max
  unsure (1)..(258): unsure at all n locations; Clone ID: 701104408H1
caacttcagcctcaacctcaacccacttaccagtttttccaaattttcattctttttccctttccatgagttgatgcatctttttcaagctaattaagcttgaattagctggtggggttttttaaattcgtcgatanaaattacagtgttctgctatnnnnnnnttcttctcctngtgtttntgtttgcagattcaggaacggtgtgtncngatttcttcaagtcggggtctcatggacntaaatccnaacantcttc

SEQ ID NO: 31743 - DNA, 256 bp, Glycine max
  Clone ID: 701104409H1
cgcagtcctttttctatttgtatgtttgtatgagactgagaaagatagagagatagtgtgtgcagaagatgtggctattcggcagaaaaggggcttctgggttttcatcatcatccactgcagagcaagtcactgaaggaattgatggaactggtttcactgccattgtcacaggggcatccagtggtattggcactgagactacgcgtgttcttgctttgcgtggtgtccatgtgattatgggtgtgagaaatat

SEQ ID NO: 31744 - DNA, 238 bp, Glycine max
  unsure (1)..(238): unsure at all n locations; Clone ID: 701104410H1
gtgacactgacgagccttatctcacggctactctgcctccacgctcgagtgcacatccatcacaaggnctaaaaaaactcaaagtacttcttttgcnaacactattccaagttccaaactctccacctctcataatggttttaaatttnatgtttattgcttcttctctgcattcaccatcaccttgcaccctcttcagttcccacaagctttgttggtcttcgttcaaaaccatttc

SEQ ID NO: 31745 - DNA, 254 bp, Glycine max
  unsure (1)..(254): unsure at all n locations; Clone ID: 701104411H1
aagggtgcaaaccatagcttccaaatccaaagatgctgccatcccagccatgtttgttagggcagagacagagcaaccaggcatcacaaccgttcaaggggtgaaccttgaggtgccaattattgattttagtgacccagatgaagggaaagtggtgcatgagattttggaggcaagtagggactggggcatgttccaaattgtgaaccatgacatacctagtgatgttatnaganagttgcaaagtgttggga

SEQ ID NO: 31746 - DNA, 255 bp, Glycine max
  Clone ID: 701104412H1
gttgcagccatggccacccacgcggctctagcttctacaaggatccccactaacaccaagttcccatccaaggcttcacactctttcccaacccaatgcgcctcaaagagacttgaggtgacagaattctctgggctaagatccacttcatgtgtgacatatgctaacgatgctagagaatcttccttttttgatcttgtagcttcccaactcactcccaagaccaatggatcatcaactcctgtgaggggagag

SEQ ID NO: 31747 - DNA, 255 bp, Glycine max
  Clone ID: 701104413H1
ctctctcctctctccactctccaccaacacaaaagcacttgcaaactagttttgttttgggaacatcatcacattacattagattggtggtaatggcagcgtcactacaagcagcagctactttcatgcaacccaccaagttgagcaggagcaacactttgcagcaaaagtctactcagtccatttccaaggcttttggtttggaacctgttggagctaaaaaggtcacatgctcccttcaggctgatcttaagg

SEQ ID NO: 31748 - DNA, 176 bp, Glycine max
  unsure (1)..(176): unsure at all n locations; Clone ID: 701104416H1
cgtgactganatggctggaggtgttattcagcagatattgaggaggaaactccaccctcggttactaactctcctgtgtcaccatcgacaaaaaaatgtgtgttatgagcatctaagatgatatgantgtgcgctngttnacatgangtggantaagctgancanacngnaagant

SEQ ID NO: 31749 - DNA, 256 bp, Glycine max
  unsure (1)..(256): unsure at all n locations; Clone ID: 701104418H1
gcagagaaccttcaaaaaccctaatttctcaaaatcttcagaggacacacagcacaaccancacctccacagcctnctcctacctcccggagccatggccgccgccgactcctccgccgctccatcgcaccagttgtcgcagagggagacggacatccagatgatgctcgccgccgacgttcacctcggcaccaaaaactgcgactttcagatggaacgctacgtcttcaagcgcagaaccgatggtattacatat

SEQ ID NO: 31750 - DNA, 254 bp, Glycine max
  unsure (1)..(254): unsure at all n locations; Clone ID: 701104419H1
ctggagcntacggtcaanncggcggcggttccnccccaccgtcctatgnatccagcggcggatacagttccgtcggtggttacnnnnnnnnnnnnnnnnnnnnnnnnnnnnnnnnnnnnnnnnnnnnnnnnnnnnnnnnnnnnnnnnnnnnnnnnnnnnnnnnntacggtggtagtgatggcggtggaggttntggaaccaaaggcagcggnaacggcggtggatatggcggtaacgatagtngaggttatngc

SEQ ID NO: 31751 - DNA, 257 bp, Glycine max
  unsure (1)..(257): unsure at all n locations; Clone ID: 701104421H1
ccgaggttgcnctatgatgntaaggacttgctcttnaagcanttagggntctgcctttnctntaacaggcgntatgaactcaggnttctcgangaagagccgaataagangtatttctcgccatggtgtgtgatacccatgntgttcaaccntgttnnggaactantnaggagctttaccatagcgtacaanaatgganctcactatagagnagganggtntctctnnagnctcaggttggttggnctgctgactcc

SEQ ID NO: 31752 - DNA, 258 bp, Glycine max
  unsure (1)..(258): unsure at all n locations; Clone ID: 701104422H1
ggagaacgagctagaacaaaggacaacaatcttcttgggaagtttgagcttactgggatccctccagcaccaagaggagtgcctcagatcantgtctgcttcgacatcgacgctaacgggattctgaatgtctccgcagaggacaagactgctggtgtgaagaacaagatcacgatcaccaacgacaagggtaggctgagcaaggaggagattgagaagatgttgaaggatgcagagaggtacaaggcggaggatgaa

SEQ ID NO: 31753 - DNA, 257 bp, Glycine max
  unsure (1)..(257): unsure at all n locations; Clone ID: 701104423H1
ccgaggttgccctatgatgataaggacttgctcttcaagcacttacgggatctgccttttctttaacaggcgctatgaactcaggnttctcgaagaagagccgaataagaactatttctcgccatggtgtgtgatacccatgntgttcaatgctgttttggaactaataaggagcttaccatagcgtacaaaantggacctcactatagagaaggatggttnctctntagtttcaggttggttggtctgctgattcc

SEQ ID NO: 31754 - DNA, 259 bp, Glycine max
  unsure (1)..(259): unsure at all n locations; Clone ID: 701104424H1
ctttatttttatttaagcaccttggtttctccgtctttcttgganacacacacacgctctnctcatgactctaaccaacttacccaccaactaataatctttttaattccaaaaaaccaaacaatgcctctttttctcacttcacaacttttatttctgtttgagttctccaatggcagctcctgcaccattctctctttcttctgatcccttcgcttccaaatctgccacatcaacgatctttggtcctgccgcgctg

SEQ ID NO: 31755 - DNA, 258 bp, Glycine max
  unsure (1)..(258): unsure at all n locations; Clone ID: 701104425H1
gaagattacaacangttctccgcaatttcattgaacatctcaatgcaattgcggagaacaaggaagattacaacaagttctatgatgctttttcgaagaatttgaagttgggtatcctcgaggatagtcagatcaggtccaagttggctgatttgctcagataccactcgacaaagagcggagatgaaatgacaagcttgaaggactacgttacacggatgaaggagggtcagaaggacatttactacatcacaggag

SEQ ID NO: 31756 - DNA, 247 bp, Glycine max
  unsure (1)..(247): unsure at all n locations; Clone ID: 701104426H1
caacaggtcacctggatactatganngacgctactggnccatgtggaagctgcctatgtttgggctgcactgatgcttctcaggtgttgaaggagcttcaagaggctaagactgcataccccantggcttcatccgtatcattggatttgacaacgttcgccaagtgcagtgcatcagcttcatcgcctacaagcccccaggcttctaagtcattgaaaaatttgcaaagcatctgtagccacccca

SEQ ID NO: 31757 - DNA, 254 bp, Glycine max
  unsure (1)..(254): unsure at all n locations; Clone ID: 701104427H1
cttcttctcttgcggctagggttttagcgcagttncttctagattnnaggaagatgggtaaggnaaaggttcacatcagtattgtggtcattggccatgtcgactctgggaaatccactaccactggtcacctgatttacaagcttggaggcattgacaagcgtgttattgagaggtttgagaaggaagctgctgagatgaacaagaggtctttcaagtatgcctgggtgctggacaaacttaaggctgagcgt

SEQ ID NO: 31758 - DNA, 247 bp, Glycine max
  unsure (1)..(247): unsure at all n locations; Clone ID: 701104428H1
ctctctcttccgctttctcttgagtangtctgtcttnnttcactaaatactgctatcattcattcttcctttttcttcttagcttctctctcttgtacaatcgtcttcaattctcttataataattactattattctntagttttntggttcattcaaaagcacaaagtttcttctctgatagcttagagtttagtttccagattctgtcccggggaaagcctaaaaagagcaaaggaaaantagag

SEQ ID NO: 31759 - DNA, 255 bp, Glycine max
  unsure (1)..(255): unsure at all n locations; Clone ID: 701104429H1
gcagaggtgaaaaatcattttgcagtttgagttgccgcgaaatagngntcatgatggatgagcaagagaaatccaattcatcaccagaaaactctccaaagtgtggatttggaggggaagtttttgaaacaggcactcccatagctacatagagggattcctgccattggcctgagtccatgaagcgagtagacgtgtctgatcatctgttctaaaagagctgtttttgtttgcatctattggcagccatggatg

SEQ ID NO: 31760 - DNA, 267 bp, Glycine max
  unsure (1)..(267): unsure at all n locations; Clone ID: 701104432H1
cagaantataaaagtttatttcctctgatcgtgtggtttctgagttctaagcactcacctctttcatacacgtttgttcgcttgttgagaagccatgggcgaggatttcgagttcccaagtgctggcaacatggaaatgcctgaggaggaagagtttgagagtccgatcctgaaggttggggaggagaaggagattgggaaaatggggctgaagaagaaatgctcaaggaaggtgaagttgggacacccctgcacagtggagaccaa

SEQ ID NO: 31761 - DNA, 254 bp, Glycine max
  unsure (1)..(254): unsure at all n locations; Clone ID: 701104433H1
atcgtttattcagcatatgtctcaaaggcccacgattcctcnctcttcttccatngcctgcggccttcactctcatctcctggtctccagtgagatgaaccctagctccaattggtcccattagttacctctttcctgcatctcatatatcccattctttctcattcacacagcatcatgggcgtcaaangttttgttgaaggaggcatcgcttccatcatcgcaggntgttccacacaacatacgngnnnncc

SEQ ID NO: 31762 - DNA, 245 bp, Glycine max
  unsure (1)..(245): unsure at all n locations; Clone ID: 701104434H1
ctggtatagcattttgtgtgttccctcatcactccctcacaccttatcctatacgcattatcactttctccaaatggcgaacgaccaagaccagcaagactctccccaacaaaatgcccctttctncgatttcnactncgactccnactccgactacgactccgactactcctacgacgaggcggaggacgaggccttccgccgcgcctttggccaacgcgacgatggtgacgactcgtcatcgc

SEQ ID NO: 31763 - DNA, 258 bp, Glycine max
  unsure (1)..(258): unsure at all n locations; Clone ID: 701104437H1
tgagaattgagatcgagtcttttgagacatggcatcctcgttggcaccagctaccanagccgccnntaatttgngcctcananactctctccgcttctctcctaaacccaacaacctacgctttgccaccaagcctggtattacgctgccatgcacgagggttaaggcccaactaaatgaggttgcccttgatagttcctccantgctacttntcctcctatgaaagccaantccaaaggaggaaccacccgcaaagc

SEQ ID NO: 31764 - DNA, 256 bp, Glycine max
  unsure (1)..(256): unsure at all n locations; Clone ID: 701104438H1
aactattcaacctgttctctatttatgggaatattgtgaganttaaacttctccgaaatnaaccagatcatgcacttattcngntgggagatggttttcaagcagaattggctgtacactttctgaagggagccatgttgtttgagaaacgattagaggtcaacttctccaagcatccgaacntaacccaaggtgctgacacacatgantacatcanttcaantctcaatcgtttcaaccgtaacgcagccaaaaa

SEQ ID NO: 31765 - DNA, 260 bp, Glycine max
  unsure (1)..(260): unsure at all n locations; Clone ID: 701104439H1
gtttagttattaaacatctaagaatggctacttttcctactcttcatggcctggcacaatcctcttcctccgatcncnattcctaggccaagatcancctctcactcaccanttccctctcaaacaacaagtgcatcacaanacagcaccaactcatgaagttctaatgccacgtgctgcaaagttcaacatattggaaatgatgggagggagaggactatgcaacggggaaaagggtcttcagcaagagctgaaaaagc

SEQ ID NO: 31766 - DNA, 199 bp, Glycine max
  unsure (1)..(199): unsure at all n locations; Clone ID: 701104440H1
attgtagcctctacccaattnnnaggcgntgatctctctggntccaaaaatctnattnnaatgcnttattaantgcctttctgagagtctaatctcnaggtgataaatcgagagatcggctgtcatgtcttcacnagttctcttgattggaattgaaagctatcagtgcacgttgaangcaatctaaacatgcngagtg

SEQ ID NO: 31767 - DNA, 256 bp, Glycine max
  unsure (1)..(256): unsure at all n locations; Clone ID: 701104442H1
cttcctcaagantatgttganccagttgtccgttgcttcaggatcaanttcctccntttccctcagagacctgctgtagctattgttgaagnagagctgggagctcctttaggtgatatctttgatcagtttgactatgaaccaatagctgctgcaagtcttggtcaggttcatcgtgcgacattaaagggacaggnggttgttgttaaagtacaaaggcctggtctcaaggatctttgtgatnttgatcttaaaa

SEQ ID NO: 31768 - DNA, 254 bp, Glycine max
  Clone ID: 701104443H1
tgattatcttggagtgcagaaaaacccaccagcattagctctgtgtccggcaactaagaactgcgtgtcaacctctgagaatatcagcgatcgcacacattatgctcctccatggaactataatcctgaaggtaggaaaaaacctgtgagcagagaggaagcaatggaggaactgatagacgtgatcgaatcaacaacaccagacaaattttcaccacggatagttgaaaggaaagaagactatattcgtgtgg

SEQ ID NO: 31769 - DNA, 252 bp, Glycine max
  unsure (1)..(252): unsure at all n locations; Clone ID: 701104444H1
ggagtttcaagggttaccggaaggttgcattgctagtntactctctcgcnctacgccggcggacgtgtgtnggttttccgtcgtatcanagattttccgttcngccgctnaatcggacgctgtgtggaaacgttttctcccttccgattaccattccntcntttcccagtctccttcgcctctcaactatccttccaaganggagctctatctcgctctctcggatcgccctatcntcatcgatcagggtaa

SEQ ID NO: 31770 - DNA, 91 bp, Glycine max
  unsure (1)..(91): unsure at all n locations; Clone ID: 701104446H1
cgaatgggcttgactgaccgagatattgttgcactatctggaggacatacactggggagaagcancntnccngaganatccagggtttgat

SEQ ID NO: 31771 - DNA, 255 bp, Glycine max
  unsure (1)..(255): unsure at all n locations; Clone ID: 701104447H1
tgtctacccanccaagacgccctaagtttgagaattagatgatgtcttcatctgacaattgctgtgtggtgttgatggtgtgcatgntttgttgggaaggggttcgatctccatttgtttgtttttcttccttttagttcatgttaccttgatttgtggttgtttgtntgtaaactgatgagtccatttcgttctgtttgtctgattttcttggagtttcaattaagactaggccctggcctgagttatgcttat

SEQ ID NO: 31772 - DNA, 121 bp, Glycine max
  unsure (1)..(121): unsure at all n locations; Clone ID: 701104448H1
ctccacttctgggtccaatttcgataaatgtcganaggtagctctnaaagctctgaaagtgaatgannccatgcctccntcngaatggcacttttggcgggnttggaacgttgnagggggg

SEQ ID NO: 31773 - DNA, 246 bp, Glycine max
  unsure (1)..(246): unsure at all n locations; Clone ID: 701104449H1
attcagtgnaccactagctagggtattgggagctctncgttgtttcggagttanggaccttacgcagccatggccactgctacgaatgccgccgccgccccancacgcnagntntcccagaaggaagccganatccagatgatgttggccgccgacgtccacctcggcaccaagaactgcgacttccaaatggaacgttacatnttcaagngccgcaacgacgggatttacattattaaccttggg

SEQ ID NO: 31774 - DNA, 114 bp, Glycine max
  unsure (1)..(114): unsure at all n locations; Clone ID: 701104450H1
tcttatcattattcaattttnttgtctgaatganagggaagaaggggtgaatccgtaggggatgggggcctcgctgtcgaacctgggaagcaacggttcggccgccgctccngg

SEQ ID NO: 31775 - DNA, 254 bp, Glycine max
  unsure (1)..(254): unsure at all n locations; Clone ID: 701104451H1
gaaacagtgtgatgaaaatgaaggtccttgttttcttcgttgctacaattttggtagcatggcaatgccatgcgtacgatatgttccctctccgaatgaacactggctatggtgcccgtactccggaggtgaaatgcgcaagttggaggcttgctgtgnaagcacacaacatctttggctttgagaccattcctgaagagtgcgttgaagcaacaaaggaatacatccatggcgaacaatatagatcagactcc

SEQ ID NO: 31776 - DNA, 255 bp, Glycine max
  unsure (1)..(255): unsure at all n locations; Clone ID: 701104453H1
gtttcagantccttcctagttgagaacaagaatggttcctccattgctggaaggagacttgagatcaaagcaagaactgctggggcctcaaagacaattgaggtggaggttgacaagccacttggcctcaccttaggccaaaagtctggtggtggtgttgtcatcactgctgttgatggtggtgggaatgcagcaagagcagggttaaaggcaggggaccaagtcctttacactagcagtttctttggggatgaa

SEQ ID NO: 31777 - DNA, 257 bp, Glycine max
  Clone ID: 701104455H1
ttctctcttatcatctttgttattacctctttccaaagtccaaattttctagttccaccaaaccaaaccaaaccaaaatggcagcagcctcagcctcatccatgatatcaacaccagccttatctccaaccatccaaaagcaccatcatttgaagccatccaacgtgtgcttccaaggtcttagacccctcgcaaggttcaccaaagcctcatcaaccaaagtgagcaccaccaccaaaagggttattccaaagggt

SEQ ID NO: 31778 - DNA, 256 bp, Glycine max
  Clone ID: 701104456H1
atctgacagcaaatgctgctaggcctaatccacaagggtcattccattatgggaagattactcctacaaaagtaattaagttggccaattcagcacctttgatcaatggaaagctccgttatgctgttaacagtgtctcatatgttaaccctgacacccctctcaagcttgctgattacttcaacattcccggagtcttcagtgtgaatttactccaaaactctccctcaaacggtccaggatacataggcacctc

SEQ ID NO: 31779 - DNA, 255 bp, Glycine max
  unsure (1)..(255): unsure at all n locations; Clone ID: 701104457H1
gtgagatagccagccatgtcgatcttttctattccctcaccaacgtaccgttgttcaatttcaatttcaatttctcggcagccattgccatgttctttcacggctcaagtgagaagaagagggaaagggaaagtggtaatgagcatggaggcnggcattggagtgatgggcaccaagttgggtatgatgagctatttcgaatccgacggagaggttgttcctgtcactgtcgtgggtttcaaagaaggcaacatc

SEQ ID NO: 31780 - DNA, 237 bp, Glycine max
  unsure (1)..(237): unsure at all n locations; Clone ID: 701104458H1
ctgctcttcactacnnccttggcttcccatagataacatctgcaacngacnatacncaancatgtattccttaacatgcacaccactnnnnnnnnnnnnnnnnnnncatcacaccactctaaagccnaacctcaaccctcttctgggtgcagatgcaacttctaggccatgttctctacccttgaaaagaagaacatgctttactaccaaagccattctctcntccaccagagaaga

SEQ ID NO: 31781 - DNA, 253 bp, Glycine max
  unsure (1)..(253): unsure at all n locations; Clone ID: 701104459H1
tgctttcaagaaggctaatggaaaggntttggccctgcatgcatgcgccggggagcctcccctcacattcctcgnnctcacttcttcttggagagtgggaagatcgcatgcagagaggactttttcgctatgatgttaccgcctgtgaaaccaaggtgattcctggtgaatatggtttcgttgcccagcttaatgagggtcgtcacctcaagaagagaccaactgagttccgagttgacaaggtccttcaacc

SEQ ID NO: 31782 - DNA, 253 bp, Glycine max
  Clone ID: 701104460H1
cacaaagccagcaagcagcaagaagggcaatatcaaggagaccctcttgactccaagattctacaccactgactttgatgagatggagacactcttcaacactgagatcaacaaaaacctcaaccaggatgagtttgaggcactgctccaggagttcaagactgactacaaccagacacactttgtcaggaacaaggagttcaaggaagccgctgacaaacttgagggtcccctcagacagatctttgtggag

SEQ ID NO: 31783 - DNA, 265 bp, Glycine max
  unsure (1)..(265): unsure at all n locations; Clone ID: 701104464H1
gtcgttgttcctcctggcaacacagggctcgatccctctcagacctctttcttccaggtgcttaacattcctaccangattaacaagggtactgtggaaatcattacacctgtggaactcattaggaagggagacaaggttggatcttctgaagctgcattgcttgccaagctaggcataaggcccttctcatatgggcttgtggttctctctgtttatgataatggttcagtgttcagccccgaggttcttgatcttatgagga

SEQ ID NO: 31784 - DNA, 250 bp, Glycine max
  unsure (1)..(250): unsure at all n locations; Clone ID: 701104466H1
ggaaccgaaacccttcgccgcaaaaaaatgcctcccaaatctgccaaatccaaggaagctccagctgagcgacccatcctcggtcgattctcttctcacctcaaaattggcattgttggcttgccaaatgttggaaaatctactctctttaatactctcaccaagttggcaatacctgctgagaacttccccttttgcaccattgagcctaatgaggcgcgggtcaatgtacccgatgaacggtttgant

SEQ ID NO: 31785 - DNA, 253 bp, Glycine max
  unsure (1)..(253): unsure at all n locations; Clone ID: 701104467H1
caatttcgttgatggcgtcacaagcaagcctcctccttcagaagcagctcaaagatctttgcaagaaccccgtcgatggcttttccgccggtttggtcgacgaaaccaacattttngaatggagtgtgactataattggacctcccgatactctttatgaggggggatttttcaatgccattatgagctttccacccaactacccanaggcctccaccatcagtgaaatttacctcagagttatggcatcnca

SEQ ID NO: 31786 - DNA, 115 bp, Glycine max
  unsure (1)..(115): unsure at all n locations; Clone ID: 701104469H1
cttctgtccgctgcgactctctttccttccctctttttccgaatctgnatcgaaatggcttcggagactgagacgtttgcttttcaggccgagatcaaccagctcctcagtntaa

SEQ ID NO: 31787 - DNA, 114 bp, Glycine max
  unsure (1)..(114): unsure at all n locations; Clone ID: 701104470H1
ttgaactttgactatatttttcagagttcagattattcttctcttttgnnttttgattttgggggtttaagtttctgagngannaananaantnnccnaangccgttctttttt

SEQ ID NO: 31788 - DNA, 115 bp, Glycine max
  unsure (1)..(115): unsure at all n locations; Clone ID: 701104473H1
gnntccncttcttagagtgagaaagagcctctttnagagagaagatnantagcttgggaagtctctatcctcaagcttgagtgagccaccatagagtgagtcaattttgtaaacc

SEQ ID NO: 31789 - DNA, 222 bp, Glycine max
  unsure (1)..(222): unsure at all n locations; Clone ID: 701104475H1
gcacttggaatccaaaaatgagaganatcatcagcattcacataggtcaggccgggatccaggttggcaactcctgctgggaactctactgcctggaacatggcatccagcccgatggcatgatgccaagtgactcctccttcggtgtagcccacgacgccttcaacaccttcttcagcgaaaccggatccggcaagcacgtccctcgcgccgtcttcgtcg

SEQ ID NO: 31790 - DNA, 250 bp, Glycine max
  Clone ID: 701104476H1
ttgcaaacacgatcatttaccttcattgatgagtgtgttgaaggtgtgcttagattgactaaatctgacttccgagagccagtaaatattggaagcgatgagatggttagcatgaatgagatggctgagattattcttggctttgagaacaagaatattcctattcaccacattcctggccctgagggtgttcgaggtcgtaattcagacaatacactgataaaagaaaaacttggttgggctccaacta

SEQ ID NO: 31791 - DNA, 248 bp, Glycine max
  unsure (1)..(248): unsure at all n locations; Clone ID: 701104477H1
cttctctctgcacttgcactattgcaggcctcagctttgtttggntttggattgagaaagttgatatngttagaganagagaaagtgtacatctttctatcatatagtgtatatatatatatagcgngtgtgngagatgcagcngcacctgatgcagatgcagcncatgatngcngcctactaccccaacaacgtcaccnntgntcnnnttcagcagtatctggatgagaacnagtccttnattctga

SEQ ID NO: 31792 - DNA, 253 bp, Glycine max
  unsure (1)..(253): unsure at all n locations; Clone ID: 701104479H1
gctgccggagccttttagtttcattttcacttggtttgctgctgttcccctcattgtgtggatagctctgtcactaacaaatgccattgtaaaagactttgtgattttaaagggtccttgtccgaactgcggtactgaaaatacctctttctttgggactatactctcaatttcanatggtggttccaccaacactgtcaaatgctccaactgtggaactgcaatggaatatgattcaactacaagattgatt

SEQ ID NO: 31793 - DNA, 252 bp, Glycine max
  Clone ID: 701104481H1
cattgattccgaagagaaaagaaaagatgtttgagccacagcagctatacactcgcgcgaagaccgaggaattcgaccttcgaatcaggagaaaccctctacccagggctgagcgtcggcgaaaaccagctccgatggggtttcatccgcaaggtctacggcatcctctccgcgcagatcgtcctcaccaccctcgtctccgtcaccaccgttttctatactccaatcaatgacctcctcaagggcaattcc

SEQ ID NO: 31794 - DNA, 240 bp, Glycine max
  unsure (1)..(240): unsure at all n locations; Clone ID: 701104482H1
caattttggcgctctctctgtatttctcttccttctctttcatttcccctctnntgttggttcaaaattatactctctctaagttttaaccttatgaacatggatatgtgccaaaatgtatcagtttccggtgagtgccaacaagtgcaggtttttgccccttcttgctcaagcagccttgatgacctcttctctgctcagaacacggaagtggatgttgagttggagtggcttcagagt

SEQ ID NO: 31795 - DNA, 248 bp, Glycine max
  unsure (1)..(248): unsure at all n locations; Clone ID: 701104483H1
ttttctgcgtcaattttgctgaaaaccttaagtgggtatcctgaaaacactagattttcgattcgtttggtaagcggatttttaggtttnattattacgtttttctgttcttgttggatatggaggtttcggtgattggnagctctcaagcgaatctgggagcgtcggaattggcatctagggaagttggnttttgcaatcttaagnacaatttaagggcttgaatgatagagttagttttggtagga

SEQ ID NO: 31796 - DNA, 252 bp, Glycine max
  unsure (1)..(252): unsure at all n locations; Clone ID: 701104487H1
aagagtnngctgatataaaanatcaatttgatgctatagatgtggacaaaaatggttctattagcctggaagannatgagacaggctcttgccaaanntcttccttggaaattgaaagaatcacgtgtactagagatattgcnagcgatagacagcaacactgatggcctagtggatttccgggagtttgtagcggctacattacacgtgcatcaactggaggnagactctgacaagtggcagcaactgtca

SEQ ID NO: 31797 - DNA, 244 bp, Glycine max
  unsure (1)..(244): unsure at all n locations; Clone ID: 701104488H1
atccagcagtcaagactgccggtgtttganttcctgnctctgcttgaggaactncgcttaaggagtctggctgaactctgattgaaagtgtatttcaatttgctgtgaatcaagcagttggagaattaaggggcgagcctttttttggaagagctactctcaagtttcataaggtcttttttaaaaaatcattttttgatattggtggtcttgtttaaggtagttttacantttctgttcatta

SEQ ID NO: 31798 - DNA, 250 bp, Glycine max
  Clone ID: 701104489H1
gcaaaagcaagaagaactagtctaagcagaaatggcctcttcagtgatggcatctgtggccctcaaacctgcccctttcactgttgagaagtcctcagttagaggccttccctccctctcaaggaactcctcttcattcagagttgtggccagtggtggcaagaagatcaagactgacaagccttatggaattaatggtggcatggctttgagggaaggagttgatgcatctggcaggaaaggaaaggga

SEQ ID NO: 31799 - DNA, 262 bp, Glycine max
  unsure (1)..(262): unsure at all n locations; Clone ID: 701104490H1
ctgattttgtaattgagttcgatcaaatagntcccagtactttaattgatttctgaatatcntcacttaanttgaaggaaagatggtgagcgtagtgagnatccgccangcacaaagggncgaaggcccagcaancatnccttgnccattggaactngcaaacccaccaaactgtgttgatcanagcgaccttatnccggantactaacttccagantccaccannagtgagcacatgnaccgagttcaaagggaaatttcc

SEQ ID NO: 31800 - DNA, 253 bp, Glycine max
  unsure (1)..(253): unsure at all n locations; Clone ID: 701104493H1
tttcnggttctgnttctcctccntcaaaaccccctcctgcgtagactgtctacgntgcccatgattgngtcatagcnttttgcagaggaacaatggcgggnagggnttcgacgtgcttcttcttcgtgtttgctctttctctccttnttccttttcagatctccgctgaggaatcatcggagaaagagttcgtactcacattggatcactctaactttcangncactgtcagcnngcacgntttcatcgtcgt

SEQ ID NO: 31801 - DNA, 253 bp, Glycine max
  unsure (1)..(253): unsure at all n locations; Clone ID: 701104494H1
gggttcacaaaattgtatggataggaagcactatgttctggtgcatggggcatgccatggagcttggtgttggtataagctcaagccacgcttggaatctgcaggccataaggtcacagtacttgaccttgcagcttctggaaccaacatgaagaaaattgaagatgttgatactttctcagagtattctgcgcctttgttgcagctaatggccacaattccctcaaatgagnagttagttctagttggtcac

SEQ ID NO: 31802 - DNA, 256 bp, Glycine max
  unsure (1)..(256): unsure at all n locations; Clone ID: 701104495H1
tttcactcttcagttctcgttgttgttcttcgctttcctgaaactagggttttcaatnnccgattcnttcgttaatanttanagatgtttgggagggcaccgaagaagagcgataatacgaggtactacgaaatcctcggcgtctcgaagaacgcttcgcaggatgatctgaagaaggcttacaagaaagccgccatcaagaatcaccctgacaagggcggtgatcccgagaagtttaaagagctggcacaagcat

SEQ ID NO: 31803 - DNA, 278 bp, Glycine max
  unsure (1)..(278): unsure at all n locations; Clone ID: 701104501H1
attttttgaggctatctcttcagtatcaccctgacaagaacaaagccaagggtgcacaaganaagttttctcagatcaataatgcatatgaacttttatccgatgaagagaagagaaagaattatgacttgtatggagatgagaaaggaaaccctggatttcaaggtggccatcctggaggtcaggatggatatacttattttacagggggtggtcctggacaaagccattttaacttcaaaccaggggggggctggcaggtatggggtggtcangga

SEQ ID NO: 31804 - DNA, 268 bp, Glycine max
  Clone ID: 701104502H1
ggctagagaacactgaagctaaccgccaggcgtaccgtaccctccttgtgacagttccaggacttggtcagtacatctctggtgccattctctttgaggaaactctctaccaatccacaactgatggcaggaagattgttgacgtgctcctcgagcaaaacattgttcccggtattaaagtcgacaagggtttggtaccccttgctggttccaacgatgagtcatggtgccaaggtcttgatggtcttgctctcgtcgggtgcatata

SEQ ID NO: 31805 - DNA, 269 bp, Glycine max
  Clone ID: 701104503H1
aaaacactcataacacaaagcacaaagcaaagctcatccttgagttaaaaaatggcagcagcttcttccatggctctctcatccccatccttggctggcaaggccgtgaagctgggcccatcagccccagaagtgggaagggtgagcatgaggaagaccgtcaccaagcaggtctcctcaggaagcccatggtacggcccagaccgagtcaagtacttgggcccattctctggcgagcccccgtcctacctaaccggtgagttcccagg

SEQ ID NO: 31806 - DNA, 266 bp, Glycine max
  Clone ID: 701104504H1
agttgctcctatagccggcgctcaacaacatggcggacaaggcagtcaccatccgaaccagaaagttcatgacaaacaggcttctctccagaaagcaattcatcgttgatgtccttcatccagggagggctaatgtttccaaggctgaactgaaggagaaattgggcagaatgtatgacgtgaaagacactaacactgtatttgtcttcaagtttcgaactcattttggtggtggcaagtccactgggtttggtttgatctatgat

SEQ ID NO: 31807 - DNA, 262 bp, Glycine max
  unsure (1)..(262): unsure at all n locations; Clone ID: 701104505H1
ggaaatcagcagtagtaagtaagaaagcttttgtacctacaaacaataattcaacttggatcattagtncattacacagtcgaattctgtttncgctttgaagttcgaaccttgttgtacccttattctnggttccgcaccccggcaaaggatcnccgancctgcnatgtgctcgtcgcattccccgaaccaccgttcgaaatgcagagtccagcacctgccaatgccatcatcttcctcctgtaccattccttgtcctctc

SEQ ID NO: 31808 - DNA, 263 bp, Glycine max
  Clone ID: 701104506H1
tttttctctctctacactctattcaacccttcacattttctctcttctttatcttaaattacttttccatggaggaaagcaagaaacgagtccgggacgagtccagctactcacccgagtcccaaactcagctggtcgactctcccgagtctgaaagtcagcgggtcgactcacctgagtctaagattcgtcgagttgactcgtccgagtctcaactcgactcggtccttgactcggaggtgcgtctacaagacgacattttt

SEQ ID NO: 31809 - DNA, 262 bp, Glycine max
  unsure (1)..(262): unsure at all n locations; Clone ID: 701104507H1
ctatgctattgcaatatctttgattttcaatttcatacatagcttcactccaaaactgaactctcattgttcataaaccgnnnnnnnnnnnnnnnnnnntcatttgttcattctctctagctatcagctacaagggtttttcttgttctgtgccacacgatgaaggaagnaaacccatcagagaacaggtccaaagcttcaaaattttcagaccaaaaccaagccccaaagcctcaaaacaccaaggagccaacctcaacaa

SEQ ID NO: 31810 - DNA, 262 bp, Glycine max
  unsure (1)..(262): unsure at all n locations; Clone ID: 701104508H1
gcagnacttgcttcaatatgccaanatgtatctgatgacctggagaaaaatgatacatgtgttactagtgagcatgtggaagataagagtgagtcagcgaaacaatcactggaggagtcaacacattttgatcaggtggttaaaaaggattcaagggaagttacatcctctcagcaagaaaatcctgatgatgtgaataaatctccaaagtcagtcatgagcaatgttgttgcatgtgttgaagataatgctttagctcatt

SEQ ID NO: 31811 - DNA, 266 bp, Glycine max
  unsure (1)..(266): unsure at all n locations; Clone ID: 701104509H1
gaaggcgtcgacctcggcggcggagaaggagaaccggaataagcataagaannnnnnnnnnnnnnnnnnnnnnnncgaagggtggtggcggtattgaggttagggcttcgcacatattgataaagcacgaaggttctagaaggaaggcctcgtggaaggatcctgaaggtcgcatcatcaagagcacaaccagagaaaacgcggtttctcagctcaaggccctccgcgacgacatcgtttcgggcaaggcttcctntcnaggacat

SEQ ID NO: 31812 - DNA, 259 bp, Glycine max
  Clone ID: 701104511H1
gtgaccacaaacaaggttggttcaacttgtgagggggatcaaaacattcctagattggaatatggcaaaacttggttgttctagtcgtaggaaagcaattgaggagctccttagagggcgtgattgtgccaaacaacttaggagtgtcatcaatgggagttgtgaagatggatcatcaacaaccccatcatttgctgaacaacttgtgaaggaggtgctcatgtcctcaccaactccctctcgttctgaagaacaaccc

SEQ ID NO: 31813 - DNA, 317 bp, Glycine max
  unsure (1)..(317): unsure at all n locations; Clone ID: 701104512H1
gtccgaatcctgaaacgctgaacagttgattgttggtagccatggctgcagcagccaccgcgaaaccgctttctgtcactgtggtttatgcttctggctaaccgtcgtttcttncggatcgccgtcgcttaaccgaacccgggcgaacatcgtttcccatggagctcgcatggggtcaataaccaactnccttcgncgaaaccgttgtgggcagggaccctncatttgggcccggcccaactnggcccccattctttncgnccgttgaaattcgccgaagggttgtttgaatggccccattanccccaaaggccccc

SEQ ID NO: 31814 - DNA, 267 bp, Glycine max
  unsure (1)..(267): unsure at all n locations; Clone ID: 701104513H1
tgctccatcatccgtccaacccataatgttggcgntcaagcctctgccccttcagatctctcccttccgcccatctccggcgaccctcgccatcaacngccgccggaggatccagttcccagcctccgtgnggcgaaggtggatgttaaanncggcggtcagcggcggagacaagagccannnnnnnnnnnnnnnnnnnnnnnntccttcgttggacagcaaagagaggaaagggaagagttcagtggctcatctggctctggcatt

SEQ ID NO: 31815 - DNA, 300 bp, Glycine max
  unsure (1)..(300): unsure at all n locations; Clone ID: 701104514H1
ttgagaagttggttgcacaacttccagaaggtggtgttttgcttctagagaatgtgaggttctataaggaggaagagaagaatgaccctgagtttgccaaagaagttgggcttctcttggctgatctctaacgtgaatgnatggctttcgggcactggcccaacagaggctncatggctttctaacagaaagggagtgggcccaaatnactttgaaaggccctctggttggcagggatttcctttatggcagnaagggaaactttgnactnatnctaagtttggggaggctcgttgttca

SEQ ID NO: 31816 - DNA, 267 bp, Glycine max
  Clone ID: 701104515H1
ggcagactagtatccgatcctctgtcctctcgaagctttcatcgttcaacatattctcaccatctcagtcatgggcctgctatcttgttttaggtctaccgtcctgagaaaatgttccaaaggaagctctggcatgtcaagattcctgtatacgaacaattttcaacgaaacttgatttcgtctggtggcaatgaatcgtattatgggtattttaacaggagatcatacacttcactttatatgggaactggaactgtgggtgggat

SEQ ID NO: 31817 - DNA, 271 bp, Glycine max
  unsure (1)..(271): unsure at all n locations; Clone ID: 701104516H1
cgcacgcaaacacaactcttctctagatccatatccctcgttgcggccagcgaanaaagagagaaactggagcgagnnnnnnnnnnnnnnnnnnnnnnnncatcgcaccgttgtcgtcgtngccgagaggttcgtcgcaatggtggacctgtangtgctcggatggatcatatgcgccgtgctcagcctcgctgcgcttcgtaatttcgctttcacgcggaagaattgttgcgcttcgtcggagaccggtgccactcgccgcgcggtaaat

SEQ ID NO: 31818 - DNA, 265 bp, Glycine max
  unsure (1)..(265): unsure at all n locations; Clone ID: 701104517H1
ctttngntnngnancttcatgcntattttctgtttagccactcatcaaggttgacttannttaatanagttggtnaagcgtcctgatnagcncatccctctgcataccttgggnaaagccnncttcangcacccctgcgctcggctttttgtggtaggnttaaccaaaacatgagactcaaactgcctttcggagnccattgancatactgctgggtcagatctgtncacaggtcntttaggntnctttgtcgtaantggntggg

SEQ ID NO: 31819 - DNA, 268 bp, Glycine max
  unsure (1)..(268): unsure at all n locations; Clone ID: 701104518H1
ttctctcgcattccgtggagatctagtgcttctgctgcaagacctcgctgaaaattagggtttcgattncggaggtagacgaagatgttcggaagggcaccgaagaaaagcgacagcaccaggtactacgaaatcctcggcgtttccaagaacgcttcgccggatgacttaaagaaggcttacaagaaagccgccattaagaaccatcctgacaaaggcggtgatcccgagaagtttaaagagcttgctcaagcctatgaggttctga

SEQ ID NO: 31820 - DNA, 265 bp, Glycine max
  unsure (1)..(265): unsure at all n locations; Clone ID: 701104519H1
agtgggcatccggtgtgtcgaaaacgataccatttcataataagggctgcgagtnatgccgtcgaagcatatgcaaagaccaagaccatgttcaagatgtggaaatcttctccaattatctgaaacaaggtgtagatcgtgtaactttgccatcaccgttgatgaccttgaggattgggtgtatcttcagattgaagataacacccatcttctgcatggtgtcgtgcatgccaatggttatgggcacctgctcactctcaatgga

SEQ ID NO: 31821 - DNA, 264 bp, Glycine max
  unsure (1)..(264): unsure at all n locations; Clone ID: 701104520H1
gaactttgcaactttgagcagaaaatctcacagtcgaaggaagaaataatcaccaatggcaattgaacacgaagacgatctcaaagacgagaagaaccctcgacccctcgacgaggatgacatcgccctcctcaaaacctacggtttgggaccttattccacaagcataaaaaaangcggagaaggaaatcaaagatatggccaagaaagtgaatgacttatgtggtatcaaggagtctgatactggattagcagcaccaagcc

SEQ ID NO: 31822 - DNA, 259 bp, Glycine max
  Clone ID: 701104521H1
tgaggctggagaaggaagcctcctacgatgaaattaaaaatgctatcaaggaggaatcagagggcaagttgaagggaattcttggttacactgaagatgatgtggtctccaccgactttgtgggcgatagcagatcaagtatttttgatgcaaaggctggaattgcattgaataagaactttgtgaagctgtctcttggtatgacaacgagtggggatacagctcacgtgtcatgacctgcttgtattcgttgccaaga

SEQ ID NO: 31823 - DNA, 196 bp, Glycine max
  Clone ID: 701104522H1
gcttgcaaattagaagaatcttcagttaaaagggaagaagaacacacaagaagaaagagaagaagaaacgcgcgcgaatgaagggagaattagagttgccacctgggttcagatttcaccccactgatgaagaattggtgaatcactacttgtgtaggaagtgcgctggtcaaccaatcgcggttcccgtcatcaa

SEQ ID NO: 31824 - DNA, 259 bp, Glycine max
  Clone ID: 701104525H1
gcaagtttgacaacttgtatgggtgccgtcactctctccctgatggtctcatgagggctaccgatgttatgattgctggaaaggtggctgttgtggctggatatggtgatgttggcaagggttgtgctgctgcaatgaagcaggctggtgctcgtgtcatcgtgaccgagattgatcccatctgtgcccttcaggctctcatggaaggccttcaggttctgaccttggaggatgttgtttctgaggctgatatctttgt

SEQ ID NO: 31825 - DNA, 298 bp, Glycine max
  unsure (1)..(298): unsure at all n locations; Clone ID: 701104526H1
anaattgggtgtatgaagaagccaacacaactttcattcaggatgagcaaatgctgaacaagctcatgaacactaattccaaactcctttcaggaaactagtgcagacatttcttggaagccaatggaacgtggttattggggaaactttcagaagataaatatntgaaaagcttcagggcagttgtatttcagaaagtgggaaagaccaaaatttgaaagggcatttgaatccgctngaattttaaatangctatttcttngaaaaaagaaacattaccaaaccaggtggaaaggag

SEQ ID NO: 31826 - DNA, 262 bp, Glycine max
  unsure (1)..(262): unsure at all n locations; Clone ID: 701104527H1
gctcaaaacacgatacacttacatgtcaggatcatggcatanaatccagaacaaaggcctaattgccctccaagactttgggaagatagatatccttactcttctgccacactatctcctgttacaaatttttcaaatgatgaagagatatcaaacctgctactattatgattgaaaaataacaaaccatgcaagcttgaacatttcttttgcttgacaattcccaacataggtgttaagctgctacccatgtgtgggacaa

SEQ ID NO: 31827 - DNA, 260 bp, Glycine max
  Clone ID: 701104528H1
atcagtccctcagggctatccctgttctcgtaaatgccaactaattcaacatcatctgtatgttggcatgccatcccatgtacctttttctcagaaacagcaaacagaagcttgattctttggtttgaatgtttctcgtatgtgctagctttgatccagcttgtttcttccagcctgggtttaggataaataaataaccaggctttgagtaacatgatgatcattattatgtttattaattgttgcagaagataggagtc

SEQ ID NO: 31828 - DNA, 129 bp, Glycine max
  unsure (1)..(129): unsure at all n locations; Clone ID: 701104529H1
tgcaattcactctgtacaattcttcgttcgttctctgcagttatatcctttttgagcttcaatggcggacgctgaaaccttcgctttccaggctgagatcaaccngcttctaagtctcatcatcaacac

SEQ ID NO: 31829 - DNA, 264 bp, Glycine max
  unsure (1)..(264): unsure at all n locations; Clone ID: 701104530H1
ggatgtggctcccctcactctcggaattgaaactgttggtggagtcatnanaaagttgattcccagaaacactgttatcccaaccaagaaatctcaggtgttcaccacctatcaggaccagcagactacagtctccattcaggttttcgaaggcgagaggagtctcacaaaggattgccgccttcttgggaaatttgatctgtctggaattcctccagccccaaggggtacgcctcaaattgaagtgaccttcgaagttgatgc

SEQ ID NO: 31830 - DNA, 266 bp, Glycine max
  unsure (1)..(266): unsure at all n locations; Clone ID: 701104531H1
gagaaatcatatcaggttaagtagtgtttgtactcttaattcatatgatttcttttgctgcagacttgcagttaaaaggtgatattaacctgcctttttaatgcagccaaactgaaganaatgctttgtctgatgttgaagttctaaggttagcagctgcagtggaatcaaattcagtacatccagttggtcaagcgattgtcaatgctgctcaggctgctaattgtcatgatgctaaggtaaaagatggaacattcctggaagaa

SEQ ID NO: 31831 - DNA, 263 bp, Glycine max
  unsure (1)..(263): unsure at all n locations; Clone ID: 701104532H1
agaggcaaagggcaaaaaccatcgatgatgtttctctgagtctgaggattcacgcgttactgttactgttactcaactcttattcccttccttgattccaattctccgcacttcatttcatttgaattctgaaaaattaggattagggttttctttctttcagtgannnnnnnnnnnnnnnnnnnnagtggttttggagaaatggttgagcaatcggtgctggtgctcgaaaagcaagggccaaatccagtgttatcagaagg

SEQ ID NO: 31832 - DNA, 185 bp, Glycine max
  unsure (1)..(185): unsure at all n locations; Clone ID: 701104533H1
agcagagataagtgatatgcaaaacatgtctctaatagctnccactctcctccacaacttcacaactcacttcccttccttccctcccttcttccagctctccactttctcgnnaatttcccctcactttccgggaaaaaaacagaactccaatcacacctcacaagctccctttttcagcaagg

SEQ ID NO: 31833 - DNA, 265 bp, Glycine max
  Clone ID: 701104534H1
ggagcaaagatttatgactacctcttctgcagtagacattccttttgagcaactcgaaacaaattgtagaaagctagataatacagagattacaagaaatgatctgtgttgtgcaggtgatgtttctgatttaagcttagacacagtaagagacggtcatttaaagatttcacaattctcactagacagaaattttgccgacaaacaaaagaataagcttctcatccttgatttgaatggactgcttgctgattttgtcagtatc

SEQ ID NO: 31834 - DNA, 264 bp, Glycine max
  Clone ID: 701104535H1
caagattctcacaaacaactcttgagaaagaaagaatggctgccaacacattgatgagttctgccatctcagccttcccatctctcctttcctcctcaaaatccagatttgccgcagcagttcctctttccagctttgttgtcaccaatgcctcttcttctcgcttttccatgagtgctgactggatgcctggccagcctagacccccctaccttgatggttcagcacctggtgactttggattcgaccctcttcgtcttggtg

SEQ ID NO: 31835 - DNA, 259 bp, Glycine max
  Clone ID: 701104537H1
gcttctaagtttttgaacgataaggttaccaaggccgttgttacggtgcctgcttacttcaatgactcccaaaggactgccaccaaggatgctggtcggattgctggtctagaggttcttcgtattatcaatgaaccaaccgctgcatccttagcctatggctttgaaaagaaaaacaacgaaactatccttgtttttgaccttggaggcggtacctttgatgtctccgtgctcgaggttggcgatggagtctttgagg

SEQ ID NO: 31836 - DNA, 261 bp, Glycine max
  Clone ID: 701104538H1
ggatttggtattttaccagaagacgcaaacccggaaccctaaccttggggacaggcaaccaacaatggcgtcgtcgtcggcggcaaagcgatgccactacgaagtcctcggcctcccccgtgattgcgcccccgatgagatccgttcagcctaccgccgcctcgccctccagcgccacccggacaagctcgtgaaatcgggtctctcccaagaagaagccaccgcgcagttccaggaactccaacacgcctacgaagtcct

SEQ ID NO: 31837 - DNA, 257 bp, Glycine max
  unsure (1)..(257): unsure at all n locations; Clone ID: 701104539H1
gtagctcagagctcgctctcctcgccgtttctctcatcgctagtttcaagtctccttgtgacaatggtgagggttagtgtgtncaatgatgctctgaagagcatgtacaacgccgagaaacgggngaagcgccaagtcatgattaggccgtcctcgaaggtcataataaaattcctcttggtgatgcagaagcatgggtacattggtgagttcgagtatgttgatgaccacagggctgggaaaatcgnngttgaatt

SEQ ID NO: 31838 - DNA, 237 bp, Glycine max
  unsure (1)..(237): unsure at all n locations; Clone ID: 701104542H1
gttgtttggagcgatccgagaaaacactctgtaaacatgtangtttaccaggacctccttacaggtgatgagcttctctctgactccttccgttacaaggaaattgagaatggaatgctgtgggaagttgaggggaagtgggttgttaaaggancagttgatgtagacattggtgcaaacccttctgctgagggtggaggagaagatgagggagttgatgatgcagctgttaaggtt

SEQ ID NO: 31839 - DNA, 259 bp, Glycine max
  unsure (1)..(259): unsure at all n locations; Clone ID: 701104543H1
ttccaaacttcttcttggaatgtcccttcctaaataaccctcaaacaaaagccaccttaacatctcttctctgaaaattctctttagagnnnnnnnnnnnnnnnnnnnnnnnnnnnnnnnttaagaaaaaatggcagcctgcactgtctactcaacacaatctctgagcacaaattgctccatctcaaccccatcaaagacacagctgagtttcttccaccaaaagcaggtagttttctggaggaacagcaacaggggc

SEQ ID NO: 31840 - DNA, 165 bp, Glycine max
  unsure (1)..(165): unsure at all n locations; Clone ID: 701104544H1
ctggtataaagtatcatatacacaactaatccaggtgaataaattagaaatgtaacaaaattatgtcatatagaagtaattttgttacatttctaatttattcacctggtataaagtagaaatgtaacaaaattacttctatatgacatannaaannaagnanag

SEQ ID NO: 31841 - DNA, 261 bp, Glycine max
  unsure (1)..(261): unsure at all n locations; Clone ID: 701104546H1
aaaggattctacccgccgctcgatgggaattgcgcttcaaggcgtcncntagggctaatccgcctcacgagggtcaccaacggcacgtgcctttggggggccgaggccccctactgctggtcggcaaacggacggcgggcgcacgcgtcgcttctagcccggattctgacttanaggcgttcagtcataatccaacgcacggtagcttcgcgccactggcttttcacccaagcgcgatgaccaattgtgcgaatcaacggt

SEQ ID NO: 31842 - DNA, 264 bp, Glycine max
  unsure (1)..(264): unsure at all n locations; Clone ID: 701104547H1
ggagctaagaggaagaggatgatagcgggttatgtttgattgatgtgttacagtgatcatcaatatgagaatgttgcctgtttgctcagccaccccaagttattccacatcttcccagattncccttgtttgggggattgcacccaattcgaaaggatcttggagagcagatgtgtggctgaagaaggtgtgcatttggcttcacaatatggagctcattcatgagaaattcatttgcagtgcaagctacaaagacagtattgg

SEQ ID NO: 31843 - DNA, 267 bp, Glycine max
  Clone ID: 701104548H1
gcttcacatgagttgtttccctttcaatatccgtgcttcttaagagcaatatccgattgttcatatattaataaggaaactgtagtgcaatgttataatgtgatacaagatatagccagggaggagtacgaatcggtgttgaatataaactcaacttctaacacattaaccggtgtgtctgacgaacattttctgagcttggaaagtgaaaaaaccaacggaaccaacgttgttgtgacacaagagcaggacttcaaaagaaggaaa

SEQ ID NO: 31844 - DNA, 114 bp, Glycine max
  unsure (1)..(114): unsure at all n locations; Clone ID: 701104549H1
aaatnnggggnaanactaaaacccannngcgacnacaataatcataatcataanaancagaaccaccttgaccgaccgggcttaagaacatgcaaattnacaaccatcccanaa

SEQ ID NO: 31845 - DNA, 262 bp, Glycine max
  Clone ID: 701104550H1
gtactttgtagtagcaagcgagcatggctccgaagaaggttcttctcctttgcggggacttcatggaagactatgaagccatggttccatttcaggcattgcaagccttcggtctcgccgtcgacgccgtctgtcccggaaagaaatccggcgatgtctgccgcaccgctgtccatgtacttgccggcgcccagacttatagtgagacggttggtcacaatttttcactcaatgcaacgtttgatgaagttgatgctgcaac

SEQ ID NO: 31846 - DNA, 221 bp, Glycine max
  unsure (1)..(221): unsure at all n locations; Clone ID: 701104552H1
cgcgatcnangcttccaaagagaacaagttgaagagcgcacactcgtcgcatanctcttaataattgcagaatgaagaaggnagacacaangagattaaggtagctggcagactaaagggtttcatggcaggcagtggcctgccatctttgggtcgtgtgaagcttantgatttagtccctnagacgggttgccatntgattcntataaaatatcagtctc

SEQ ID NO: 31847 - DNA, 257 bp, Glycine max
  Clone ID: 701104554H1
caaaggttgctgtaggagataagattgcagtagtgctaagtgctaacacctgcagtgaacaatggcctctgcatcagcatctctgctcaagtcttcacttgttcttgacaagtctgagtgggtgaagggacaaacccttcgccaaccttctgcatcagttgtgagatgcaaccccaccaccccatcaggcctcaccatcagagctggttcctatgctgatgagctcgttaagaccgcgaaaacagtggcttcaccag

SEQ ID NO: 31848 - DNA, 236 bp, Glycine max
  unsure (1)..(236): unsure at all n locations; Clone ID: 701104555H1
aatttattctgtttgtggtctcacacnctagaaacaacatcactacacacaaatggcacatactttatccactaatctggctcttaaccttcccacatcgaggtatgttcgtccctcgagaccaacccaggtgaagcccatgaaggtcatgatgggtgatgcaagagaaaagctagaacatgtccatgtgcctaaacacaacaagcaccaccagcccctccccaaaaacaaagttg

SEQ ID NO: 31849 - DNA, 187 bp, Glycine max
  unsure (1)..(187): unsure at all n locations; Clone ID: 701104556H1
ggagatttcgactatgatgatgaannagaaagacgtctcgtctcgctgcaacgccggatccacngcaaggcggacggcgacggcgacgttctgggccccgtgctgtaccgcgaccggctcgccaggacgttcaacaccagcggcttcgtgaagttccgccacctncgctaagatttcgcggccgaac

SEQ ID NO: 31850 - DNA, 258 bp, Glycine max
  Clone ID: 701104557H1
aacttgctatcttcactaacatgtcctctttaacgttcacaacggaggtagcatccagcttcctcggcctcgcttatcacaatcccaaacccttcactctctcactccaaaccactcttctccctcttctacgcagaacaaccactcattcccgatcgctaacatttcctctccgaccctctcgccgcttcttcgttacctccgccaccactgcacctcctcaatccgaggattccgacgtttccaccgtcattcctc

SEQ ID NO: 31851 - DNA, 254 bp, Glycine max
  unsure (1)..(254): unsure at all n locations; Clone ID: 701104559H1
ctggtgctttgactctcctcttcagtgtggcactgcgttggactcgtttggcaccgtcacgcgttccttgttcgaatttgaacttctgtntggtgccnnnnnnnnnnnnnnnnnnnnnnnnagagaggggaccatggtttgctaaaagggataagatgatgaagcttgcaggatattccctggccgtttcatttgctcccataagttctaatgtcgttaaaagcaataaaagattcacggtagtatatctcata

SEQ ID NO: 31852 - DNA, 238 bp, Glycine max
  unsure (1)..(238): unsure at all n locations; Clone ID: 701104560H1
cttgcggagcagaatgaaagtaatactatgtcgtgaaaagattgtggaaatattggaagagnntcaggcccgagctgaagtagccttgtgttttgtaggtgtaaaacattgagtataataattgttacaaaatgaactgntgttaatttngttagcatgtagtgagtacccacaatttgatcgtgaacgttataaatgtaaatattgtggtagaggtcagtagttatacatgtgtgcc

SEQ ID NO: 31853 - DNA, 260 bp, Glycine max
  unsure (1)..(260): unsure at all n locations; Clone ID: 701104562H1
gtgccggctgtgatgcaggcgacgcagngggaacagagcaacaatccctccgctgttcattgggagcgctttctgcctcggatggtgcttcgggtcttgcttgtcgaagctgatgattctactcgacagatcattncctgcacttctccgtaaatgcggttacaaagttgttgcattttgtgatggcttaaaggcatgggagacattgaagaacaaagcattngacttagatctcatattaacagaagtggatttgcnat

SEQ ID NO: 31854 - DNA, 264 bp, Glycine max
  unsure (1)..(264): unsure at all n locations; Clone ID: 701104563H1
gtgataataacatgaacaaacaactcangctgctctgtctctttatcctcttctccttattncctctgtgtgggtttcgccggcgccggagacacggcggagaaaaacccgttcaccccaaaagccttcgcgattcggtattgggacaaagagatccgcagcgggttaccgaagccaccgtttcttgtatcaaaggcgtcgccgctgagcgcggcggaggcggcggcgttcttaaagctcgtctccgggaactcgctctccacg

SEQ ID NO: 31855 - DNA, 257 bp, Glycine max
  unsure (1)..(257): unsure at all n locations; Clone ID: 701104564H1
ttcgcatctgaattctcagtcgcttctcgaaccctacttcttccgcggtgatncgcatttgaattcctgtaatggcgattgataatatttttaaacatgaagccagtgaagaaaaaggagagcgggccagaatggcttcttttgttggagccatggctattgctgacttggtgaagacaaccttggggccaaagggaatggataaaattttgcagtcaacaggtagaggacgtgaagttactgtcactaatgatggt

SEQ ID NO: 31856 - DNA, 270 bp, Glycine max
  unsure (1)..(270): unsure at all n locations; Clone ID: 701104565H1
tttgcttgtgaagttggcttcgntttctgcaattcccattccacaaagccacaccannccatcaccnccaaaaaacnaacacaaaagcaaaaaagaaaagaaaannaaagaaaacattataagaacatcccattattaatattgttgtaattattgttacagttttcatttgtcttgcccctttatttttcgattggatctgaggctctcagagttgcagaaaggcacaccaaagttgcttcactttcttggagtgtggtttctnttgct

SEQ ID NO: 31857 - DNA, 269 bp, Glycine max
  unsure (1)..(269): unsure at all n locations; Clone ID: 701104566H1
anaataggaagcaaatcataactcaacatttagctatagatctctcttctctttctttcccgtttctccaaatccttcttcaaacactttccctcattcaatctttcgcagtgttttcngtggatcgatcttnntnccattctntngcgcctctactctttctcatgtagtggctctnttcaatcagttaccgccatagtttttggttnttctnntttccattttncttaaagtaatggcctcttttcgaggactctgtcgcggcgtat

SEQ ID NO: 31858 - DNA, 258 bp, Glycine max
  unsure (1)..(258): unsure at all n locations; Clone ID: 701104568H1
taacgttttcgggttcgagaaggcacttgtgttgtntttcgtacgaaatggagactaaacagagttcggtgacggttacgctcagttacggcgcgttgacgtgcgccgcggaatttctcgcgactttgctagcttctgctgtcgtcaaagcctcgcttttggccccggatctctaccggctgctattgatcaacacgcctactgccaaaggagagagcaaaattcagagtgaagacaagcaacgtgatgcagagggag

SEQ ID NO: 31859 - DNA, 264 bp, Glycine max
  Clone ID: 701104569H1
aacgaaccaaacgcgtcaacgaaggcggcttctctctctcgtctcagcttttctcctttcgttcgctttcgcttttcgtgtcgccggtaaggcaattcgatacctctgaaccctaatcagacgcagccaccgtttagggtttccatcctcctctcatactttgcctgattgctttcgtgtttcgtttctctcttttcatttcaatatttgatacggtccgctgttgattgtatatatcctggaaaaagtaaagaacatcataat

SEQ ID NO: 31860 - DNA, 255 bp, Glycine max
  unsure (1)..(255): unsure at all n locations; Clone ID: 701104570H1
ctagtttatcgtgaggagaatatgaagttgtttgtnttctttgttgctgcantagttttggtagcatggccatgccatggcgcaggctaccaaaggttccctctccgaatgaaaactggctatggtgagcgttcttcggaggtaaaatgcgcaagttttaggcttgctgtggaagcacacaacatccgagccttaaaaccattcctgaagantgcgttgaaccaacaaaggactacattaatggcgaacaattta

SEQ ID NO: 31861 - DNA, 83 bp, Glycine max
  unsure (1)..(83): unsure at all n locations; Clone ID: 701104571H1
ccttctgccggccaccgtaatggatttcactgccggccgccgatcgaggaacggttttcaccggcncgagaanctccttcacg

SEQ ID NO: 31862 - DNA, 265 bp, Glycine max
  unsure (1)..(265): unsure at all n locations; Clone ID: 701104572H1
gcattttatgcatttgctggtcgatctngtgttgaacgatggagcagaaaaaatgagaacattgaagtgcattcttcagatgcatcacagttacttccgcaacataactacaanccttgatgttcatgctctgaatacccgccaacctggagagtatgaatgcagggaattcagagaatcaatcctgggagttatgcctcaccaatgggctaggagagaagatactttattgaagcttgcccacttcaggcggcacaagaggaaa

SEQ ID NO: 31863 - DNA, 256 bp, Glycine max
  Clone ID: 701104573H1
tacgatcaggatccaacggtccaaaatgttcggggcttgtgctgtttgttttcccaggttttagagctccaaaccttcagatccacctcattcgtctccagatcttccttcctggataacgttttcgggttcgagaaggcacttgtgttgtttttcgtacgaaatggagactaaacagagttcggtgacggttacgctcagttacggcgcgttgacgtgcgccgcggaatttctcgcgactttgctagcttctgct

SEQ ID NO: 31864 - DNA, 254 bp, Glycine max
  unsure (1)..(254): unsure at all n locations; Clone ID: 701104574H1
gtcagtgngaacacgcacacccgtgacagtatggacacaagaacattgctcctgaaactactcatacactcttgtggctctttcaggatgctcttcttcggcttcagatcatttggttaatgtatccaagttggagaagttcgtggatgagcttcctcacatgcccaaaattccttggctatcatctttcagatggcgtcccaaaatctaaatctttgaagattggcatgttcaagaagaaatggaattccaca

SEQ ID NO: 31865 - DNA, 254 bp, Glycine max
  Clone ID: 701104575H1
attccattgtggaacagattgctgggaggctttctatgatttctttcttggatgtgagctactgtattaaaatcggtccctatgcacttgagatgattggcaagaactgcaaactgctagaagggttgtgtcgaaacatgcacccgttggatactgcaagcaagccgtttcaagatgatgaagcatatgcaattgcctccacaatgcctaagctcaagcatcttgaaatggcttatcatcttatcagcacttcg

SEQ ID NO: 31866 - DNA, 262 bp, Glycine max
  unsure (1)..(262): unsure at all n locations; Clone ID: 701104576H1
agcaaagatgacaggtgggttctttggagggaaggggcaaaagataaaggggacagtggtgttgatgccaaagaatgtgttggacttcaacgccataacctccgtcggaaaaggcagtgctaaggacaccggccaccgatttcttgggcaaaggcttggggcgcattaggtggtgcagttgatgctnctcactggccttcgctgggccatagcatctccttggcagcttatcagtgctactcagactgnatggtagtggaaa

SEQ ID NO: 31867 - DNA, 93 bp, Glycine max
  Clone ID: 701104577H1
agtgagtgagatgagtaatcccagcgaggaaccgttatccaaagttgcaagagcagcagaagatctttaccatcttcgagacacttatttccc

SEQ ID NO: 31868 - DNA, 259 bp, Glycine max
  unsure (1)..(259): unsure at all n locations; Clone ID: 701104578H1
ggaagaatcactcccttatccatttccacacnacatnanagtagnaancaacgcnctctcttcagcctccattctangctctnccaacngccagtctcngngccgaagagcgaaccataatggaagagtaaattaccggaaaccgaataaccgtttctccgtgaaagcctccgccaaagagattgcctttgaccagcattcccgctctgctatgcaggccggcattgacaagctcgccgacgctgttgggctcactctt

SEQ ID NO: 31869 - DNA, 260 bp, Glycine max
  unsure (1)..(260): unsure at all n locations; Clone ID: 701104579H1
aaacccaaagtgnttctctcctctgtntttttctctctcttgctatccttttggctagtngcactgctgcaantgcaactccaagaagcgcagtgccaagccaccatgtttcaacattcaacagaagcctttttccttccacttttctctntggtantggttcttctgcttaccaggcagaaggagcagcaagtgtagatgggagangaccaagcatatgggacacctacactagacagcatactgaaaagattgggatc

SEQ ID NO: 31870 - DNA, 264 bp, Glycine max
  Clone ID: 701104580H1
ttgagtagttcttcatcatagtcttaaacattaaaccttagcaaaactcaacaatgctagacatcaaaggctacctcgtactcttcttcctatggttcatatcaaccattctgatacgttccatcttcaagaaaccacagcgtctaagactcccaccgggtcctccaatttcaatacccttgctgggacacgcgccatatctccgttcactgctccaccaagccttgtacaagctatcactgcgctatggacccttgatccacg

SEQ ID NO: 31871 - DNA, 265 bp, Glycine max
  unsure (1)..(265): unsure at all n locations; Clone ID: 701104581H1
ctcgttagtcgtttgtaacgcctttgtttgcgttttttgcacagaagaattaacacgtatatagcaagcatggcagtcacactctacgaccttagctctgcctctgggttgaagaagcttgatgagtaccttctcccacgcagctacatcaccgggtaccaagctacaaaggatgatcttactgtttatgcagctttgccaactgctccattngatgaatatggaaatgtttccaggtggtacaagcacattgatgctttgttga

SEQ ID NO: 31872 - DNA, 270 bp, Glycine max
  Clone ID: 701104582H1
gtggaagtggcactattgagattgataaagatctgaatgagggagagacttctaaggaaaccagtgatatccattgggaagactgcaaggatcaaattgatgtagttgcacttgcatccaaggagcccatacttttctatgatgaggtggtgttatatgaggatgaactcgctgataatggagtatcacttcttactataaaagtgagagttatgcctagctctggtttcttctgttgcgtttctggctagagttgatggagtgttgatt

SEQ ID NO: 31873 - DNA, 270 bp, Glycine max
  Clone ID: 701104584H1
ttgggactatgagattacatatgtgcggaatttcactgatgttgatgacaagataataaagcgagcaaatgagaccggggaggatccattgatgttgagcaaccgtttttgtgatgaatacaatgctgatatggctgatcttcagtgcaagacaccatctaaggaacctcgtgtttctgaacaccttaacgagataaaggacatgataacccagattatcagcaatggctatgcgtacgaagttgatggcgatgttttctatgctgttga

SEQ ID NO: 31874 - DNA, 268 bp, Glycine max
  Clone ID: 701104585H1
agaaaccgacgtgcccttcctccatcttcacctttgattattggatcttcttcatcttgatgcccaaactcttaatttttatttagttcaatgtcaccggaagaacacaattgcacataaatccaattcgagcaagacgattgacccaacttggaataggatttccggtgacattgaactcaacaaaagttaggcatcacaagatggaagaaaagcaatgtgaaggagagaaacaagcattagcgactaaggcaaagaaacttagtgc

SEQ ID NO: 31875 - DNA, 203 bp, Glycine max
  Clone ID: 701104587H1
aaggagagattagtaggctgaccgaccgactcgagctcaggcttctctacagtaatttagtttgtggagaatacataattagctgtttagatgatgttggtcccttgtgtagttagttagctatgtgtttgctgtaatggtaaatgtcaggatttcttttaaacatcttcatatgtatttgccaatatcataatgtgtcgtat

SEQ ID NO: 31876 - DNA, 253 bp, Glycine max
  Clone ID: 701104589H1
caagcattctcataccgcttctcagtttctcattttcccaatgcgcagctaaaaaatcctttgagccctttaacctattctcaataagcagaaattagggaacgcaacaatggctcaagcggttgaagaatggtataagcagatgcctgtcatcacgcgctcttatctcaccgctgctgttgtcaccaccatcggatgttccctgatataatttctccgtatcatttgtacttgaaccctagattggtggtga

SEQ ID NO: 31877 - DNA, 250 bp, Glycine max
  unsure (1)..(250): unsure at all n locations; Clone ID: 701104590H1
cgattctagatagccatgagagcacagttgacagttgacagcgttgcattctgggcgagtcttagaaattgaggcaattgaacatcttccacacttggctttagattgaaggagtatgtccctactccagaagggcctgtgctgtgtctttnacatccgtaaccataataatgtaagctcactgaacctctcaatcacaaattaccatgccgcaaaaccgctatccaaaacagccacatattctcctctc

SEQ ID NO: 31878 - DNA, 255 bp, Glycine max
  unsure (1)..(255): unsure at all n locations; Clone ID: 701104592H1
tgtggctcagagggtctgtgacacacagactcacttccaagttccaagctttggccatttattcccactgtttattgaacatggcacanattttggctccctctacgcaatggcagatgagaatctcaaaatcctctcccaatgcaagtcccattacatcaaacatgtggagttctttattgtggaaacaaaataagaaagtttcacccacaagttctgctaaatttagagtgatggcaattaagtctgacaata

SEQ ID NO: 31879 - DNA, 181 bp, Glycine max
  Clone ID: 701104593H1
gtttatgaatagtcattggaaggcatctctattgtatccatgccattgagttgttcatgttgccctgaagggaacaactgtcttgaagggctataataatattcgggcgggcgtgcatgtgtgtaaaaaacaaattagttacaaattattaacttttttttattataaattatcttgcgat

SEQ ID NO: 31880 - DNA, 323 bp, Glycine max
  unsure (1)..(323): unsure at all n locations; Clone ID: 701104594H1
caaccatgggtcattactcaattcatcatcagcttgtggccatagtctcattatttatccttttgcttccaaatatccatgggtggggagacgatgggcatgtcattgtttgcaagattggcacagggcttcgccttcagtgnaaggcaggctggcagagggctgtgaaagaaaactggctggcccaataatcccggcaggaanaatggattttngttcccaccaaaagttgtttnctttgggggccaggattccatngtttncaattccattattcctnaatcccctttngnggggcccttccttggncttttttggncaac

SEQ ID NO: 31881 - DNA, 260 bp, Glycine max
  Clone ID: 701104595H1
ccgtggatggaaaggaaatcaaagttgtttctgaccgcaaccctgccaaccttccttggaaggacttggggatagacttggtgattgaaggaaccggggtgtttgtagacagagaaggtgcagggaaacacattcaagcaggagctaagaaggtgctcatcactgctcctggtaaaggagatatccccacctacgtggttggtgtcaatgagtatgactacagccctgatgaacccatcatcagcaatgcctcttgcacc

SEQ ID NO: 31882 - DNA, 260 bp, Glycine max
  unsure (1)..(260): unsure at all n locations; Clone ID: 701104596H1
ttctaacagaaaaatgagaagaagcatgttgatgttactactatgcttcctattgggcaaatttacgtaaggnggctcattttacaaagtatttatgggatggggtctgtttcaaaagaaataacggagggggttngtnttgtggaggaaaccgccattacnactggcggcctggntcaacccgccattgcnagtggcggcaaaggtggagagaagggtgtattgtcactagcagtggcgatatggccacgtaggatgga

SEQ ID NO: 31883 - DNA, 247 bp, Glycine max
  unsure (1)..(247): unsure at all n locations; Clone ID: 701104601H1
tcagatgctggtcaaggattcctctcagcgtctaccattgcacaaactccttgaacacccttggattgttcagaatgccgagccctccggtgtatataggagctagtgcacctcattcttttattgtatcnncttaatcgtggaaatcatcaaaaatagcagctgcttctaagtatttgacaacatttggtatagagatgatgcaaactatttgnagaagttagttgcttgctgggttaagagaaga

SEQ ID NO: 31884 - DNA, 290 bp, Glycine max
  unsure (1)..(290): unsure at all n locations; Clone ID: 701104603H1
aaatatcntncaatggacagaaaaatggaaattacagcaactgttttaagatctttctnctganatnttnnatataatccanataanttnccaatttcgtactggattcattgctccctcttctcgagtatttggaagaggtgttttggttgaagatgcttgggcaatagcaatgcggtatctatcatcatacttcttgattgacattcttgccgttcttcccctcccacaggtggcaattctaattatcattccaaagttgagtggctctgaatcactgaatacaaaga

SEQ ID NO: 31885 - DNA, 282 bp, Glycine max
  unsure (1)..(282): unsure at all n locations; Clone ID: 701104604H1
tgatatttctcnnctctctctctttctctgccgaatatngcgccgcctgnnccagcagtgtgaaggcggccaggngccgcaagggcggnagcaanaaccgnaaggagggtttggcctctccggaatcatacgcatggcagttttctggtanttcgcctccaaantctnntcccccaaaaaanctaccgaancttccgctctcanctncaatctcnancagaaggcacagcctctggatatgtggctttatctnnccgagnacgagaagttcaatgactntgg

SEQ ID NO: 31886 - DNA, 271 bp, Glycine max
  unsure (1)..(271): unsure at all n locations; Clone ID: 701104605H1
atgaacggcacgtgtagcggagngactaggccgccgttanacgctactgcngtccgtcgncaccgtttgaattacccaccgctactttgtcgtcantattcttcttcttcccttnncattgaccttttccttccttcgtcctccaatggcgactgttccgcacccattanncccgcgnaagngtaggttttgcnaancgaacctcctccatctccaganncactctcaaatgctgcgctcaatctccttctccttcactagttgaaagggc

SEQ ID NO: 31887 - DNA, 291 bp, Glycine max
  unsure (1)..(291): unsure at all n locations; Clone ID: 701104606H1
tctagaatgcctctatnctcctctgtcggtcacanacagcgatagatagataatagagaagagaagcattgcataggcgccaattgtgagtgagagngaagtttctgttttttctacttttccanttttttnnnnnnnnnnnnnnnnnnnnnntctgattcttcaccataactgtcattgctttgcttctctcactcagcacaagttgacaagaagggcattgccatttcaatcccatacaaaaagcacanaccccaatncaccaccatttncctaaagcttcactctntt

SEQ ID NO: 31888 - DNA, 291 bp, Glycine max
  Clone ID: 701104607H1
ggaaagaggtgtgaagtgtgtgagtctgagagaagagaacttagagaaatggaactacgtgagcttggaagaaccggactgaaacttcagcactgtaggattcggagcttctccactgggcaatgtcttcggcgatgtttccgaggaacaagccaacgcttccgttcgcctcgctttccaatccggcatcaatttcttcgacacttctccgtactacggagggacactgtcggaaaaagttctgggaaaggcatgaaggctctgggagctccgaggaatcgtacgttgtgg

SEQ ID NO: 31889 - DNA, 294 bp, Glycine max
  unsure (1)..(294): unsure at all n locations; Clone ID: 701104608H1
ggaatttaaagaaaagtcattcttctgtgcttgacactacaggaaccagtccaaaacttggcgacaagacaatttattccattggcacaagactgaaagcattctctgattggcttctgaaaactatggtttcgggcaagcttnatgctatctttccagccgctactcgtgaatatgctcctttgattgaggagttatgggacgatgcagccattaaggccgcctatgaaagaagaaatgaaatagaattgctacctagtgttgccagttatttcttagagcgggctgttgaga

SEQ ID NO: 31890 - DNA, 298 bp, Glycine max
  unsure (1)..(298): unsure at all n locations; Clone ID: 701104609H1
gngcaagcgcttctcctctttgtgtnctggctatgcntcttggcaagagttagatcggacgaggattgcgngtannacggtgtacgttcggacgggttcgatcatcaanggaggcaccgattcagtaattggtctgangctatacgacaagtccggctacggcatatacatcaccaacctcgaggcatggggcgggttaatggatccgggtcacaactactacgagcggggcaacctcgacatattcagtggtagaggcccttgcttggaagcacccgtttgcgaggccaacctaatt

SEQ ID NO: 31891 - DNA, 299 bp, Glycine max
  unsure (1)..(299): unsure at all n locations; Clone ID: 701104610H1
agtgaatccacttcttagngtgagaaagnacctctntgagagagaagataaatagcttgggnagttctctatcctgcaagcttgagtgaaccaccatagagtgagtcaantttgtaaacacatccttgtaaccctactatcactttgtatagtggaagaatctccatattggagaattataatcgtgtgctcccattactaccttnaattactaagtgcctatcttaacttcacgaagcgggnnagtccgtgttttcccaacattgccaacataaaaatccnctgcngagcnangaact

SEQ ID NO: 31892 - DNA, 295 bp, Glycine max
  unsure (1)..(295): unsure at all n locations; Clone ID: 701104611H1
antcttaggccggtggctgaatgagcacatccaagatgcacagaacacccttcacaagccacttctatttgcggagtttggtatttccacaaagagttatggtggcaactcaacaccaagggatcggttattcaacacggtatattcagcaatatactcatcagcaagcagtggcggggctgctgttggtggcctgttttggcaacttatggctcaaggaatggattcttatcgagacggttacgaggtggtcttagatgagagcccttcaacggctaatttgattgctcaagag

SEQ ID NO: 31893 - DNA, 297 bp, Glycine max
  unsure (1)..(297): unsure at all n locations; Clone ID: 701104613H1
gtcggttcttccttctcaaatattcttgagatccccantttctccgaagcaaagccatgggctaagggtnctggtcctctactctgacatcggcaagaaagctagggatctgctgttcaaggactaccacagtgaccagaagttcaccatcaccacctactcaccgactggagttgctattacagcatcaggaaccaggaaaagtgaactgtttctggctgangtcaacacccagttgaagaacaaaaacatcactactgatatcaaagttgatacagattctaatctcttcacaac

SEQ ID NO: 31894 - DNA, 291 bp, Glycine max
  unsure (1)..(291): unsure at all n locations; Clone ID: 701104614H1
ttctgaacaaagtnggggctgaaaaacagagtctccgacccagtaaggagaaatggactggtgggtgtcaatgccaaagatagaactgcatgctcacctcaatggatccattagagactctacacttctagaactcgctagagctttgggtgacaaaggtgtcatagatttctcccaagtcgaacatgtnatcntaaaaatgatcgttcattaagtgaggtattcaagttgtttgacttaatccacgtngttactactgntcactcaagtntnaggnntnnaccaaggngt

SEQ ID NO: 31895 - DNA, 294 bp, Glycine max
  unsure (1)..(294): unsure at all n locations; Clone ID: 701104615H1
tttcactcaaatcatggatttcttgcaagcacaagaaaatcagatacttgtgggtgtncgccgtggccgttgtagccattgggcttggtgcagtctatctctattcatccaagaagaccaaaggttgcttggacccagagaactttaaggcattcaaacttgttaagcgtgcacagctgagccataatgttgcaaagttcanatntgnactcccaacaccttacatctgttttgggtcttccaattgggcnacacataagttgcnngggtaangatgctcnaggtgaagagttt

SEQ ID NO: 31896 - DNA, 290 bp, Glycine max
  Clone ID: 701104617H1
atacacagtagttaggtagcaagcataagtgtctaaccttagaaacatatctgctacatatcgtgtgcattttggaattgtgccactaaaattctattcatctatggctgcctcatcttatgctatgcaatcaatccttgcaaaccctatgatccgcatttccagcgggtctagggagaaccattttggtgttcctgcttatcacatgagaaggaatgttggcctgagagttaggtccatggctgaggaagagcaaccaagtcagcctgcgaccccagttacaccaccac

SEQ ID NO: 31897 - DNA, 268 bp, Glycine max
  unsure (1)..(268): unsure at all n locations; Clone ID: 701104619H1
gttgattcggatctagagtcttcactttctcctcgttgtacttcgctttcctgttttcaatttcgattctttcgtnaatttaataagatgtttgggagggcaccgnagaagagcgataatacgaggtactacgaaatcctcggcgtctccaagaacgcttcgcaggatgatctgaagaaggcttacaagaaagccgccattaagaatcaccccgacaagggcggtgatcccgagaagtttaaagagctggcgcaacttatgaggttct

SEQ ID NO: 31898 - DNA, 288 bp, Glycine max
  Clone ID: 701104620H1
ggaagttgaggggaagtgggttgttaagggagcagttgatgttgacattggtgcaaacccttctgctgagggtggagaagatgagggagtcgatgacgcagctgttaaggttgttgacattgttgatacattcagacttcaggagcaacccgcttttgataagaaacagtttgttaccttcatgaagaggtttatcaagaatttgactcccaagctcgatgcagagaaacaagagttgtttaagaagcacattgagggagcaactaaatacctgctctctaagattaa

SEQ ID NO: 31899 - DNA, 84 bp, Glycine max
  unsure (1)..(84): unsure at all n locations; Clone ID: 701104621H1
cacnaanaaagaaagaanaggaaaaagaaatagcaggaacncggnnagcanccnctgccttcctctgcctcnccctttctntgg

SEQ ID NO: 31900 - DNA, 292 bp, Glycine max
  unsure (1)..(292): unsure at all n locations; Clone ID: 701104622H1
atcaaatactcagaactgttcggtttttctggaaatttttnttctctcagccatctctcncctctgctctgcgtccatggagttttggggtgttgaggtgaaaagtggagaatctctcaaggttgatccgggagatgacaagattatccacctttcaaatgcatgcctgggggatgtcactaaggataaagaaggtctaccagtagccctgtatgtcaagtttggtaactaaaagcttgtacttggaacgctttcttctgaagcttttcctcagatatcttatgattggtat

SEQ ID NO: 31901 - DNA, 295 bp, Glycine max
  unsure (1)..(295): unsure at all n locations; Clone ID: 701104623H1
cctaattcgctctcttctaccacaaaccactcaatcctaagaaatccatttgaaattncaagtnctcgttctggctaagtccatgttcattgtttactatacctcaccactccaaggttctcgtaattttcttcagcagaaaacgaaactattgcttccagagaagagcatcatctacgaccattttggcaatattataaaacaagacaaaaatggagagtgacttgagctgggagcggaacacactcatcaatgagctaattcaggggatggaggtagcaaggaagttgaaggc

SEQ ID NO: 31902 - DNA, 296 bp, Glycine max
  unsure (1)..(296): unsure at all n locations; Clone ID: 701104624H1
cgattgtnaaggntgtnccacatcgtgtttcanctcgnanncgacacttttcagtcaaaatnccatctggggttttcgtggnnccgacccagatcctgtctctctctganccaactatattgttaagatttgtcataanaagaagcaccatggatgttgataaggagttttttgctgaatcctctggctgcctacaattagtgttttttgttcataaatatagcatagatgatactatcttatgatggctaagacagaagtgatgttgaagagaggttattgtttcattggatgtt

SEQ ID NO: 31903 - DNA, 297 bp, Glycine max
  unsure (1)..(297): unsure at all n locations; Clone ID: 701104625H1
ctcaacttccttctttctttgccttctattcttctccgtaacattntctcatgtttttggggataaagtatttacgggaacatatggagtaaactacggtagggtagcagacaatctaccttctcctgagagtgtggttacccttctgaaagctgcaaagattaggaacgtgagaatatatgatgctgatcgtcaagtcctgagtgccttcaaagggtcaggaattgcaattagtgtttgtgtaccaaatgagcttctgaaggagataagtgtgggtgaggatcgtgccatgaattg

SEQ ID NO: 31904 - DNA, 297 bp, Glycine max
  unsure (1)..(297): unsure at all n locations; Clone ID: 701104626H1
atcacttactggaagccttgttgtgagtaagagaaaaggcttcctgcaccgagcacaccaacttgatacctctgattctttctttgcttagaattccacagaatatggagacncgttcttttcaatcactccccacctttggaattcaagggtttgagcaaggaggaggaagactcattgctagggcaagtggaaatatggaggtacatgacatgcttcacggactccgtggccttgaaagctgtcatagagcttcgtatagcggacatactagaccgttatggtaaaccactatcc

SEQ ID NO: 31905 - DNA, 295 bp, Glycine max
  unsure (1)..(295): unsure at all n locations; Clone ID: 701104627H1
cagcacagcactcggaaatttctggcgatctctgcgttttcccctattttttctgaatctaacaacaaactttcctctggcaacaatcatcactattaataagagttccttccttcactctcacccaagccaaagaaaggaacaagaacaagaccaacaaagtaacgtgaaagagaaagagatggaggaaattgttccagtggtggatttccagaggctttcagaggaagaggagcgcaagaagctgagnaaacatgtgagaaaccagggtgtttcagaatcatcaaccatcaat

SEQ ID NO: 31906 - DNA, 270 bp, Glycine max
  unsure (1)..(270): unsure at all n locations; Clone ID: 701104628H1
atagagtgaggtgaagaaagatgtcgaatttgcagttacagcttcactctcctccaccancatccctcttatcatcttcatcancancancatcactanactcttcttcttctcttaagctattcccaaaccaccctttttccanaaagtcccttcctttcaacaatcanaaanattcctccctangnggcgggcaaaanggacttcttngacaagaacaccanaagcttcagaccaaggcnaaggaagncctgggntncagggggngnt

SEQ ID NO: 31907 - DNA, 294 bp, Glycine max
  unsure (1)..(294): unsure at all n locations; Clone ID: 701104629H1
aacaagaacaagaacaacaaagtaacgtgaaagagagagagatggaggcgattgttccagtggtggatttccagaggctttcagaggaagaggagcgcaagaagctgagaaaaacatgtgagaaaccagggtgtttcagaatcatcaacnactcaattccactaacactcatggctgacatgaagtcagtggttaaatacttgcatgaccttcccacggaaatcaaaatgcgcaacaaaccctcngtccctgagatggctatagggcggcaatgccaacaagtcctctatacga

SEQ ID NO: 31908 - DNA, 293 bp, Glycine max
  unsure (1)..(293): unsure at all n locations; Clone ID: 701104630H1
gtganattagtggagtttcttcnacaatttgtgtccatggagaaaaattctcttgagtataggcctnnngcantctcctcgtgctcgatgnaaatggaagtgagacaanagcatctcctctngtgtcagcnangaaatggactctcaagactttgatcttgangatctgtnttctatgggcagctttcagctttngtctccctgcaaagcctgngaatgagttgttctnaaaatggaatgatcncaaccgtgacactccttttggagtcacaggaagcattttctggtcttca

SEQ ID NO: 31909 - DNA, 294 bp, Glycine max
  unsure (1)..(294): unsure at all n locations; Clone ID: 701104631H1
tgaaaacccaaagtgcttctctcctctgtctttntctctctcttgctatcctntngctagtacgcactggttgcaaagtgcaantccaagaagcggcaagtgccaagccnaccatgttnnaanattccacnngaagcnttttnccttcnactttncccctttggaattggtnctnctgnttaccaggcaganggagcagcaagtgtagatgggngaggaccaagcatatgggacacntacactagacngcntntgaaaaaatttgggntcatagcccggtnnnngggccngttt

SEQ ID NO: 31910 - DNA, 282 bp, Glycine max
  unsure (1)..(282): unsure at all n locations; Clone ID: 701104632H1
ggagaaatacattgaagaaacttatggaagttgggcagtgttccggccacagnacatgattgggtctggcaacaacaaagactgtgcnnangtggttttttgacaggattgttnnggacagacctgtgccaattcctggctcgggactgcaactcagtaacatagctcatgttagggacttatcttcaatgcttactcttgctgttgagaatccagaagctgcaaatcagaccattttcaactgtgtgagtgaccgtgcagtgactctagacggaatagcca

SEQ ID NO: 31911 - DNA, 291 bp, Glycine max
  unsure (1)..(291): unsure at all n locations; Clone ID: 701104633H1
aacgaaccactctgaagccgctcacgttatccacaacactctcaacnctccttaaaccctaaccaatnccaaccatggcttcttcttccaccttcactgcaatgncccgcctgcaagctctcctcctccgccgccatctcctccttcccctcccgccgccgctccaacgccgtcgttctgtcgaggcgcagcgcgccgccagggtctccgccatggccaaggagttgcacttcaacaaagacggcaccgcaattaagaagctccagagcggtgtgaacaagctcgcggatc

SEQ ID NO: 31912 - DNA, 287 bp, Glycine max
  unsure (1)..(287): unsure at all n locations; Clone ID: 701104634H1
ggcgccaccanagttggtgtagctagcgagggagggatataggggganccgttnattcattcatnaaganggcatcggagcttcaattgcccccaggcttcagattccatccaacggaccaggagctggtgttgcactatctctgccgtaaatgcgcgtcgcagcctatcgccgttcccatcatcgccgaaatcgacctctacaaatacgacccctgggacctacccggattggcttcctacggagagaaagagtggtattcttttcaccacgggaccggaaatacc

SEQ ID NO: 31913 - DNA, 284 bp, Glycine max
  unsure (1)..(284): unsure at all n locations; Clone ID: 701104635H1
tctttcttcctttgtaatagaaagcacgcgtttctctctctccctctctcaacgaatatttgtntacttcctcttttgtgggtagattcaatttaccatgtcgagttcatcggaatactctcaattttccggccagaaaccggcgaggtcgccggagaaatcgagcttctctcagacttgtagcctgttgagtcaatacatcaaggagaagggtagcttcggagatcttaccctcggaatgacatcatgtgggtcacctgagacatcttgtcaatctgctacaa

SEQ ID NO: 31914 - DNA, 287 bp, Glycine max
  Clone ID: 701104636H1
tctaaatgaatggcatggatcaggcaaggtcaagatcggaatcaacggatttggaagaattggccgtttggttgccagaatcgctctgcaaagagacgatgttgaactcgttgccgttaacgaccctttcattaccaccgattacatgacatacatgtttaaataccacagtgttcacggacactggaagcatcacgatgtcaccgttaaggacgagaagacccttctcttcggtgacaaggcagtcactgtttttggacacagaaaccctgaagagatcccatggg

SEQ ID NO: 31915 - DNA, 286 bp, Glycine max
  unsure (1)..(286): unsure at all n locations; Clone ID: 701104637H1
ggatgttgtaacaacaatgcttgatccaactattcctctcactacctcagaatgggaggaatggggtgatcctagaaaggaggaattctacttctacatgaaatcatattcccccgttgataacgtgaaggcacagaattatccacacattcttnttacagcaggattaaatgacccacgggttttgtatnccagaacctgcgaagtttgtggcaaaactgagggatatgaagactgatgataacatactgctgtttaaatgcgagctcggtgctggacattttcc

SEQ ID NO: 31916 - DNA, 287 bp, Glycine max
  unsure (1)..(287): unsure at all n locations; Clone ID: 701104638H1
gtttttttcccgcatccagatttagctgttggtttgtaaaggaagtattctcaagncccacctatgatcctactgatgcagtatggtggggtccttttctcgcaactgttgaactactgctataaggccttatttgtgataacaaactaatgtaaaatatttggtagaatgtgatgatagattcaagattcttgctgttatacaaagataatctgtaattcaagttcttgacgccattattggttcacatgaaatatcattacatatggaaatggtagcatgagttt

SEQ ID NO: 31917 - DNA, 293 bp, Glycine max
  unsure (1)..(293): unsure at all n locations; Clone ID: 701104639H1
cancttttagtgttccctaatngtntaacctcatcattagttaccancttcaccatgctctatactactatggccaantgccaaaaacctcacatatattntcaccatcgtnctnaccctcctcttctcattcgccacagcaaaatcccatagtttccatcgaagcatatctccaacagcttngggtctccaganggagangctcagccaccttcacttcttcttccangacatagtgngcggtccaaagcacaccgctgtgngagtggnccangcccanntgacnnncactt

SEQ ID NO: 31918 - DNA, 292 bp, Glycine max
  Clone ID: 701104640H1
gcaattccaaatctctcttctttctcagccaagcatttccccctttttcgtttccgaatctccccttagacaacaccgatttcgccttcttctttctctttaaactttaggctcgctagggttagggttagggttagggttaggttttcggtgaggcgagagagtatgaggttgagggaggacttgccgtgtaaaaacgatgacgtttgtgagaaagaggaagtgatgatagagaatgatgtaaccgtggcccaaaatcattggtgtcccgtcgtgaatgcgggcttttctt

SEQ ID NO: 31919 - DNA, 291 bp, Glycine max
  Clone ID: 701104643H1
gtcttggcacatccacgatgagagatccctacttgctctgcagggtcctcttgctgcccccgttcttcaacacctgacaaaagaggatttgagcaagctctactttggggagttccgtgtgttggacatcaatggctcagagtgttttcttaccaggacagggtatactggggaagatggatttgagatctcagttccttcagagcatggagtagatcttgccaaagcaatactggaaaaatctgaagggaaggtaagattgacaggattgggagctagagatagtctgcg

SEQ ID NO: 31920 - DNA, 291 bp, Glycine max
  Clone ID: 701104644H1
gtggtgttagatctgtacctgcctagccattgatttggaaaagtccaagcttcaaagatgagtaagcttcagagtgatgctcttagagaagctatctcaggaatcatgactgattccaaggaaaagaacaggaaatttgtggagaccattgaactccaaattgggctgaaaaactatgatccccagaaggacaagcgttttagtggctctgttaagttgcctcacattcctcgccccaagatgaagatttgtatgcttggagatgcccaacacgttgaagaggctgagaag

SEQ ID NO: 31921 - DNA, 290 bp, Glycine max
  Clone ID: 701104645H1
caaaaatggaacttcatgtaaaataaactatggaactggatcaatatctggtttcttcagtcaagataatgttaaagttggcagtgctgttgtcaagcatcaggatttcattgaggctacccacgaaggaagtcttacctttctgtcagcaaagttcgatggaatactgggacttggatttcaggagatctcagttgaaaatgctgtgcccgtatggttcaaaatggtggagcaaaaacttatcggtgagaaggtgttctctttttggcttaatggggatccgaatgcga

SEQ ID NO: 31922 - DNA, 285 bp, Glycine max
  unsure (1)..(285): unsure at all n locations; Clone ID: 701104646H1
ctttgcagttcctagttcctactaccgtgaccttaattctcgggtttcttctgagcgagcagaaggatttcagcatcggagaccgaatcgttcgggtgaggggagtaaataaacagagtgaaccaactcaagcccccaagtagaactgataattagttgcaattttaaaanattgngattgttgggattgcagagagaagggtggttagtgttagaataggctgagtgtggttggggaaaaggggtnnacntnagggtgaatttnggaccncctttttntnaaaa

SEQ ID NO: 31923 - DNA, 294 bp, Glycine max
  unsure (1)..(294): unsure at all n locations; Clone ID: 701104647H1
aggaagtaggagtaagaaacgcgttgctttgtgccaccattgatgaccttaccaagctcttgatacncatagaagagttccaanagatncanaatagaggatctnttgagagagaaaaactctagaaagaggaagtaaaatttattattggcccccaaactgagttacaactccagtatatataggcttatatagttagttatgactaactaactcagaacataaactaaatccgaactaactggcttaactgagggtgcnagtngaatactggcaactcctctggacattagt

SEQ ID NO: 31924 - DNA, 288 bp, Glycine max
  unsure (1)..(288): unsure at all n locations; Clone ID: 701104648H1
gtgagctataagctagtttatcgtgaggagaatatgaagttgtttgttttctttgttgctgcagtagttttggtagcatggccatgccatggnccaggctaccaaaggttccctctccgaatgaaaactggctatggtgagcgttcttcggaggtaaaatgcgcaagttttaggcttgctgtggaagcacacaacatccgagcctttaaaaccattcctgaagagtgcgttgaaccaacaaaggactacattaatggcgaacaatttagatcagactctaaaacagtt

SEQ ID NO: 31925 - DNA, 284 bp, Glycine max
  unsure (1)..(284): unsure at all n locations; Clone ID: 701104649H1
gaattgttgtaactttttgattcctaaattctctaaaattcgaaattctaatttcgttaggggaaagagattgtttgtntgtgagagagtatggctggaaaaggcgagggtcctgctatcggaatcgatttgggaacgacgtactcttgcgtcggcgtgtggcaacacgatcgtnttgaaatcatagccaacgatcagggtaacagaactaccccatcctacgtggctttcaccgacacagaacggttgatcggcgatgcggcgaagaaccaggtcgctatgaa

SEQ ID NO: 31926 - DNA, 286 bp, Glycine max
  unsure (1)..(286): unsure at all n locations; Clone ID: 701104650H1
gcttccacaacccnatcgcacatctttctcagttctacganggagttttggngtnccgaggttaaggttgganantctgtnaaggtagacccanccgaatcntnngcatgcatacncctnttttaggctgctcttggtgaggcaaagatagannngcctganccggtggttctctacatgaaagttggtgaacagaaatttgtcttgggaaccctttccagggagaaaatccctcaaatatctctggaattggttttggaaaaggagtttgagctttcccacagtt

SEQ ID NO: 31927 - DNA, 286 bp, Glycine max
  unsure (1)..(286): unsure at all n locations; Clone ID: 701104651H1
caactacatngataaaatctgttccaacaactccaacatttatggcacctcctcaggcagacctatggaagattggcgcagaaggctttgctctgatagacaagttctatggtccatcaagggggaacagtgccaatgatgcattccatgggccaaggggagaacattgttgggtggtttataatgtgtccaatgatgtgatggaagaatctgctgtagacccatgaaattctaagctttttggcttatgcatgttaattattaggtatcttcaaatgggtctttg

SEQ ID NO: 31928 - DNA, 284 bp, Glycine max
  unsure (1)..(284): unsure at all n locations; Clone ID: 701104653H1
gtgaatgatcatccgaagagngctcaggaaaaggacaacttcgcaactgcgtgaatcgattactgnagaaatcgtcgantctatctnaaaacgtattgggcactggccgccattttgaattctggttganggattgaagtgcgantataggtggaggaggatggcttgtaggggatgctgggaatgccttttgaagcttttgaacttcanattgacccttgctggtctggccatggtcggcnatgggatttatctggttgntgaatacaanaaaactccggata

SEQ ID NO: 31929 - DNA, 288 bp, Glycine max
  unsure (1)..(288): unsure at all n locations; Clone ID: 701104654H1
actaactgcaccatcaccagataaaacttgggtggtgcctttntncttnttctttctctctatcgattctccgtaacaaaccctacccttttgagtcttccaagttttcaccatcgtaatgggttccgaaggatccagcgtcgtggttcctaggaatttcagattattggaagagcttgagagaggtgagaagggaattggggatggaactgttagctatggaatggatgatgctgatgacatatacatgcaatcttggactgggactatcatcggtccccctagtat

SEQ ID NO: 31930 - DNA, 291 bp, Glycine max
  Clone ID: 701104655H1
cagaaacagaggcgagtgagggtatcagaattggagaagagaggggtagaagcaaaaattatataagcttttgtgctatcaaatagcaacaactacagcgcatagagggttttgcagttttgtgtcatgatgatggattctgaaggattggagaatgggattgaagagttgaaattgaaggaagagaagggtaatgcacatgcacagccacagggtcaattgcagatcactaccttttctgaactcgtcaatgatgttaacctccattttcaaatcattcgctttcccaaa

SEQ ID NO: 31931 - DNA, 292 bp, Glycine max
  Clone ID: 701104658H1
gaagaaggatgaggagggtaaggtggaggatgttgatgaggagaaggagaaggaagaaaaaaagaaaaagaagatcaaggaagtgtcacatgaatggtccttggtgaacaagcagaagcctatttggatgaggaagcctgaggagatcacaaaagaggagtattctgctttctacaagagtcttaccaatgactgggaagagcatttggctgtcaagcacttctctgttgagggtcagttggagtttaaggctatactctttgttcccaagagggcaccttttgacctcttt

SEQ ID NO: 31932 - DNA, 290 bp, Glycine max
  unsure (1)..(290): unsure at all n locations; Clone ID: 701104659H1
ggactgacaccatggtgaggctcttgataatggcggtttattacattggtgatgaggctggctctgaagggactgataagaagaagtcatctggtttgatgcagaagaaagggaagtggaaatcggtttcaagggctatgatggagaaggggttctatgtttctcctcagcagtgtgaggacaagttcaatgacttgaacaagaggnccaagagggtgaatgacattcttggcaaaaggaattccctgcagggttggngaacnnnanttttggggcnncggngntntncc

SEQ ID NO: 31933 - DNA, 293 bp, Glycine max
  unsure (1)..(293): unsure at all n locations; Clone ID: 701104660H1
atcnanctggtncattaangcgaangtncgtttgtngaaacccatggtggtaagnnatggaccanccaagaantgcanngaggccgnaggggcagnngangaganggnggggaaccanagcagnngcaacaacagtggncaccaattggcacaaactccaanaccctcaaccaccgnatcgacggnaacagcgccaccaccacnaacaacgacancaccaacnggnaaaagatccgattctgaaagcgacncttcacttgcaccattaatgaacacnnngangacggtggtca

SEQ ID NO: 31934 - DNA, 292 bp, Glycine max
  unsure (1)..(292): unsure at all n locations; Clone ID: 701104661H1
accacattcacctgaggctcncaaagcaatggcttccnttgcagcatccactgctgctgcttcccttggcatgtcagaaatgcttggaaaccccatcaacttcagtggtgccacaaggccagctccatctgcttctagtcctgcctccttcaagactgtggctcttttctccaaaaagaaggctacaccaacacctgccaaaaaaagctgctgngntgnttcctgccaatgatgagcttgccaagtnntatggtcctgacagaaggatcttcttgcctgagggtctcttgga

SEQ ID NO: 31935 - DNA, 287 bp, Glycine max
  unsure (1)..(287): unsure at all n locations; Clone ID: 701104663H1
cttcccttctccaacatgccaaacgacagcgttctgagtcttttcntcttcgttaccctcttcacatgccttctctctgctacttcccacgatgaccatattttcctaccgagtcaactccatgacgatgactcagtgagttgcactgcaaccgacccaagccttaactacaagccggtgatcggaatcctgacccaccccggcgaggtgcctctggccggctcagcaacgncaccggggtttcttacatcgccgcctcctacgttaaattcgtggagtccggtggt

SEQ ID NO: 31936 - DNA, 290 bp, Glycine max
  unsure (1)..(290): unsure at all n locations; Clone ID: 701104664H1
ggcatttctctctcttttctcacactttttctctgntaaactcgcaaacacgaacactgtttctctctnctctgaagtgaagtaatgaagcttcatcttcagatctcgagctgaatcaccgatctctgtgtgtgaganaggagttggattattgattcatggaaacgcggagatgaagttctacatatcaacgaaggngataaagagagtgacgatatcgaacggcgagggaaagggatcggcgaagacgacggcggtggcggccggcgccggtcgccggatatcggctc

SEQ ID NO: 31937 - DNA, 283 bp, Glycine max
  unsure (1)..(283): unsure at all n locations; Clone ID: 701104665H1
agctcccatgcctttgttagagataacaaatgcgcaactatccttccggtattcactgacaatcccaatgccacaccancatgctaaaggaggagggtcttggatttccttccgcagccttagaattagaaacttgaatgtcattaaggctgttgccaccttggatgctaaacctcgcttggatttggatgcacctgcanccgcctggctttttgctcgaattctccgacccacctgatgatagggagaagttgagaagattgagaattccaaagctaataaa

SEQ ID NO: 31938 - DNA, 284 bp, Glycine max
  unsure (1)..(284): unsure at all n locations; Clone ID: 701104666H1
cttggatctgatctgctgaaacacgccacactcttcttaccatgggcctcctcgatcacttgtgggatgacaccgtcgccggtcctcgcccggagaacggccttggcaagctccgaaagcaccacaccttcgctttccgatctgcctccggcaaggaatcagacagcggaagcgtggaaatcgtacggtgaagatttgccggaggatgcggtgagagtgacgcgaagtatcatnatcgtgaaaccacctggtggtaaccagagtccgagcggatccgctccggc

SEQ ID NO: 31939 - DNA, 283 bp, Glycine max
  Clone ID: 701104668H1
attgctacatagcacacactccctcttctcttctacggttatggcgtccacgttgggcacttcttcaattgcggttcttccttcgcgctgcatctcttctttttcttccaagccttccattcacacactctctctaacttcagggcagagctatgggcggaaattttatggaggaattggaattcatggcatcaagggaaggtctcagctctcagttgccaatgttgccactgaagttaactctgtagaacaggcccaaagtattgcttctaaagaaagccag

SEQ ID NO: 31940 - DNA, 285 bp, Glycine max
  unsure (1)..(285): unsure at all n locations; Clone ID: 701104671H1
tcagtttctcctcgttgttcttcgctttcctgtttgcaanttcgattctttcgtnaattnaataagatgtttgggagggcaccgnagaagagcgataatacgaggtactacgaaatcctcggcgtctccaagaacgcttcgcaggatgatctgaagaaggcttacaagaaagccgccattaagaatcaccccgacaagggcggtgatcccgagaagtttaaagagctggcgcaacttatgaggttctgagtgaccctgagaagcgtgagatatatgatcagtatg

SEQ ID NO: 31941 - DNA, 287 bp, Glycine max
  unsure (1)..(287): unsure at all n locations; Clone ID: 701104672H1
ctcccgggacaagagccccctntaccaggaaatcttcattttttgctccagaatatggaggaggcaggagtagatggcgttctcattgtgcagccaatatttcanaaatttgatcatagttatgtcacaaggtttgtttcacattttgccccagtttatgcaagaaatactgaaatggcagttggtgtctatggaagatgtagtggtaatatatgatctcagcatttgacctgttttccatgctggacttgctagggatataagagaataaggtacagattgaactg

SEQ ID NO: 31942 - DNA, 291 bp, Glycine max
  unsure (1)..(291): unsure at all n locations; Clone ID: 701104673H1
atttgggggagcatttggttgattagggtttcttcggctgcgtgctgatgctcttgtnttctcacnaaccacacaacagcaatggaagcaatcacagagggagtgaacaacatcaacatctctgattcttacaagaagaatcgcattcaggtctccaacaccaaaaagcctctcttcttctacgtcaatctcgccaagaggtatatgcaacagcataatgaggttgagctctcagcactaggaatggctattgctacagtggttactgttgctgaaatcttgaaaaacatt

SEQ ID NO: 31943 - DNA, 287 bp, Glycine max
  unsure (1)..(287): unsure at all n locations; Clone ID: 701104674H1
ggtggagcaaggattctccttgggagacttgcggattggcgactgattttgaatgganaatgantgcagaacctgtgatgtcgcttnatacagaagcaactgatggttccttcantgaacataaggaaagcgcaatggtttggcaccatcaagaagcggatccttattttggatcatgccaagctaaagagcttcttgatcatctggagagtgtgcttgccaatgagccagtagtggttataagaggacaacanatagttgaagttaaacctcaggtatacttaaat

SEQ ID NO: 31944 - DNA, 288 bp, Glycine max
  Clone ID: 701104676H1
ctctctcacactcactttctctctctataactctttctcacccgctagggtttccttttcatcgcatcttgagtttgcaacctcgtcttgtgatttccatggagggtgctgggatggaagagaataatattataatggatgatgataagaataaccaagtctgaggcgcatttgacttctgccgctgcttttgtggagggtggaattcaggacgcttgtgatgatgcttgcagtatatgccttgaagctttctgtgatagtgatccttccacggtgacgagctgcaac

SEQ ID NO: 31945 - DNA, 288 bp, Glycine max
  unsure (1)..(288): unsure at all n locations; Clone ID: 701104677H1
cttttngccgtgccatggcctcaaactccatggctggcttgatcaacagttcgaattctcatttctccgcgtgactccaatnagcatcaggctcctcctacccggcaagcttcgtncgaaaactacgtgtcgagtttgtggcgatgagattggatacatggaaaatggggagctgtttgtggcttgtcatgtgtgtagatttcctgtttgtcgaccgtgttatgaatatgagaggagtgaagggaaccagagctgtccacaatgcaacactcgctataagcgccacaa

SEQ ID NO: 31946 - DNA, 287 bp, Glycine max
  unsure (1)..(287): unsure at all n locations; Clone ID: 701104678H1
ctcagctcanagcattcttcttcttccaacgagaatcagtctttgtgttccaaatggctcgtaacgaagcaaacagcaagaaagtcnaccggaggaaaagctccaaggaagcagctcgccaccaaggcagcacgcaagttccgctccggcgangggcggcgtgaagaagccccaccgtttcagggccggggacagtggctctnagggagnttcnnaagtaccagaagntcanggagtttctcanaagnaanttctttccagaggctcgtaaggnaaatcgtcaagac

SEQ ID NO: 31947 - DNA, 275 bp, Glycine max
  unsure (1)..(275): unsure at all n locations; Clone ID: 701104679H1
gaagagagaaacaatggccaatgtttcaattccactcccacgaaacggtttcttccaaacccaattactcgacaaaacgcccatgtttcaccccntcagcttcaacacncagaatttcttgctctggagtggctgagtttgatggatctcatcagaaaaaaggnggtttgtttaatntcaatggaatcaagggcgtggcttgtggtatncttgcagcttgtgctgtgaactctgctgnnttncnggtactgngtgatcagngggtcccccttttt

SEQ ID NO: 31948 - DNA, 82 bp, Glycine max
  unsure (1)..(82): unsure at all n locations; Clone ID: 701104680H1
aagagcttccgtggcagtggtagttgccaaactagtagcaagannctaagtcacgtttttgctcccgttttcattccacaca

SEQ ID NO: 31949 - DNA, 281 bp, Glycine max
  unsure (1)..(281): unsure at all n locations; Clone ID: 701104681H1
cgcagtcgcagtgagtgaaaaggaaaaccctaattgcggtnttctcagtgcctcgagagaaagaaaaaatgggcagataatcttgtnctccgtggcaccatgcgcgcccacaccgacgttgtgacggcgattgccactcccatcgacaactccgacatgatcgtcaccgcctcacgcgacaaatccatcatcctctggcatcttaccaaggaggacaagacttacggtgtcccccgccgccgcctcaccggccattctcattttgtccaggacgtcgtcct

SEQ ID NO: 31950 - DNA, 281 bp, Glycine max
  Clone ID: 701104682H1
gcggaaaacgttgttgagttcacagacttacccgtcaagaggccaagagaagaagaagaaggaaccaatggcgtctccaacgacgccgtttcagcgctccccaatgaccctcaataccctggcatctctgcggttattcccggttggttctccgaaatcagcccaatgtggcccggggaggcacattccttgaagatggaaaagattttgtttcaagggaagtctgactatcagaatgtcatggtcttccagtcatcaacatatggcaaagttcttgtttt

SEQ ID NO: 31951 - DNA, 281 bp, Glycine max
  unsure (1)..(281): unsure at all n locations; Clone ID: 701104683H1
tttgcactttgcaaaaattnngttgcagaggcagagaggaggcaacaccacaccacaccgcaccnctctctacactctcactctgcaacactcaaatctcgtttccacctaaacgacttcgntttgcgttcttttcccttcttctgatttaggtttcagagggaaaaggagcagcgatggactcacgcacgtataatcctcgcaccgtcgaagaggtttttagggatttcaagggccgaagagctggtctcatcaaagccctaaccactgatgttgaagat

SEQ ID NO: 31952 - DNA, 220 bp, Glycine max
  unsure (1)..(220): unsure at all n locations; Clone ID: 701104685H1
gcttcttctcccctttcttcctcccaccaaggcatagganngtccaattccaccacacacgacgcnaantcgttaactacaaacggaaaacggcacggtgcggcgtcaccagcgccgacgcgtctactccgctgtcaacgtcgttggcgaaggaacctcacaaatacttcgaccacgtcatcatcaccgttcgttccggcgacggaggccacggcgcggt

SEQ ID NO: 31953 - DNA, 284 bp, Glycine max
  unsure (1)..(284): unsure at all n locations; Clone ID: 701104687H1
aaaacgcgcaacacgttgtaattaaaacgacaccgaaactaatgggcgtcttcagcgaaaacccgaatccggacccggttgtgatccgccaggtttgggcttcaaatctcgaatccgaattccaactcatccgcgaactcatcgaccantatccttttatctcgatggacacagaattccccggtgttgttttccgaccacacctggaccccacaaaaccctanaaccaccgcaacaacaatcgcaaccgcnnagtccgaccantaccgcctcctcaagtccaa

SEQ ID NO: 31954 - DNA, 266 bp, Glycine max
  unsure (1)..(266): unsure at all n locations; Clone ID: 701104688H1
ttcttctctggttgattcggatctnacagtcttcagtttctcctcgttgttcttcgctttcntnttttcaatttcgattctttcgttaatttaataagatgtttgggagggcaccgaagaagagcgataatacgaggtactacgaaatcctcggcgtctccaagaacgcttcgcaggatgatctgaagaaggcttacaagaaagccgccattaagaatcaccccgacaagggcggtgatcccgagaagtttaaagagctggcgcaa

SEQ ID NO: 31955 - DNA, 201 bp, Glycine max
  unsure (1)..(201): unsure at all n locations; Clone ID: 701104689H1
gttggacttctaattttnnttttttncacnaccccccagatccngcctcantcttcttccttcctaggatgctgctcatggcctctaccctccctttcccaacactttccatncttcctcacaaggcacanngaaaancancaccaaaantncanccagtncctnananctctnnaagatngaangtngtcnaaaagatcc

SEQ ID NO: 31956 - DNA, 288 bp, Glycine max
  unsure (1)..(288): unsure at all n locations; Clone ID: 701104690H1
gaagaagagaatttggaaagggaaagattcaggattgnngacacgacctccgttggtagtncgcaattcggaacacagcctaaacacaaattcantggtcacagtgttcatctctctcctnccgcccttnnntnngacttanngngggaancgaacaaacacaacttgnatnnatggctgtggcctaanttccttccttttccccaatcaaaattcaaaaccctaactatatccttcgattgantttttgttcantaanttgctgctagctattaaattgtgagagtc

SEQ ID NO: 31957 - DNA, 77 bp, Glycine max
  unsure (1)..(77): unsure at all n locations; Clone ID: 701104691H1
cacgncccttccgacagtggttccggtgctgcattgctacncagttatcagctgagagannaaatnnanactanaat

SEQ ID NO: 31958 - DNA, 284 bp, Glycine max
  unsure (1)..(284): unsure at all n locations; Clone ID: 701104692H1
ttttgctgtgccagggaaagcaaggagcaagagaaagagaaagaggctttcagcccctagaacaacaaaacacaccctaagcacatggtcgcaacatttcagcacacagaatgatggggtgagttctgaccctcctcttttgaaacaagcttattggttggctgatagtgaactcattgtgcctaagaagaaggatgttgagcaagaagaggaggaaggggttgttgtggttgtgaagaaggagaaattgggggattantgtgatcatgatgagggtgatgaaa

SEQ ID NO: 31959 - DNA, 284 bp, Glycine max
  Clone ID: 701104693H1
gaaatcgatccttgctgatcaaaatcacatttcctttcatttcttcgttatttcctaatcccaatggctcaagcactatcaacttcatcactactactatcacaaaaaacagggtcctacgtcaaaccacagaacaatgtaattgtaccctgcatggcctcttttccatcaaggaaggaatttccaaggctaggaagggtgagagctcaggcttctggtgataacaaagacaactctgtggaagtacaacatgttaacaagggtgaccaaggaaccgcggttga

SEQ ID NO: 31960 - DNA, 272 bp, Glycine max
  unsure (1)..(272): unsure at all n locations; Clone ID: 701104694H1
tgatattggttttgattggacgataggcaaaggaaaacctnttagatatttcacttatggggctgcgtttgctgaggttgaaattgacactctgactggagattttcacaccagagtggcaaacatatttttggatctaggttattcgctgaatccagcgatagatgttggacagatcgagggagcttttatccaaggtttgggttgggtagctttagaagaacttaaatggggagatgaagcacataaatggatcccgtctgggtgccttt

SEQ ID NO: 31961 - DNA, 283 bp, Glycine max
  unsure (1)..(283): unsure at all n locations; Clone ID: 701104695H1
gtagaaatttgtnatggcatccgctatggtgaatcgaggtggttctaggatcatcaaatccagtgtctgcagctccttggtacgaggttttacgccaaggttgcaacagggactgacatagtctctgccgcacctaatgtttctctccagaaagctcgtacctgggacgagggcctggcttccaagttctccaccactactctcaaagacatcttcaaggacaagaaagtngtccatctttgggctcccgggtgcatacacgggagtttgttcaaacaaacac

SEQ ID NO: 31962 - DNA, 282 bp, Glycine max
  unsure (1)..(282): unsure at all n locations; Clone ID: 701104696H1
taccaacaccaanaccatcaccancaccatctatggcttgctcaagcgcccaaatacacggctgcggaaccccttccttttcccgaaccctatttttaggtcagaggctaaataccaaggccgcctttatcaaggtcaagtccgcacccactcccaggaggctccgccctctcagagtcgttaatgagaaagtcgtcggtatcgatttgggaaccaccaactccgccgtngccgccatggaaggcggcaagcccaccatcatcaccaacgccgagggccaga

SEQ ID NO: 31963 - DNA, 278 bp, Glycine max
  unsure (1)..(278): unsure at all n locations; Clone ID: 701104701H1
ctcaactctctccaacaaccacaatgggctctcttgggcgccgcctcctcctccgctcgcatcattccctccgtctcactctcttcctcttctcgctccttcttctcactctcatcctcttcttccaaactccaatgcttgcgctcctctcctcgtatttcgcacctctttctcaatcagcgagagcggaggttcgcgtttcgagtggaggatacggaatgtgtcggcaccgaagtcagttgcgtctgatctgatnattaaagggcanaaaaattagg

SEQ ID NO: 31964 - DNA, 273 bp, Glycine max
  Clone ID: 701104702H1
aattgtcaattgtcagtgaagcaggtcaatcctcgatcagtatgttgctgaaattcctcagctatccaacctcgacgtttggtttcagaggcccaaagacatagtaagaaaattgttatctggagatcttgaccttggtattgtgggactcgatactttcagtgaacatggccagggtaatgatgatctatcattgtccacgaggctctggagtatggtgattgccgtttatcccttgcgatccccaatatggaatatttgaaaatgtaaatc

SEQ ID NO: 31965 - DNA, 287 bp, Glycine max
  unsure (1)..(287): unsure at all n locations; Clone ID: 701104703H1
gtgagtgtgttgatcgagataactagaaacagtgtgntgaaaatnaaggtccangttttcttcgttgctacaattttggtagcatggcaatgccatgcgtagcganatgttcnctctccgaatgaacactggctatggtgcccgtactccggaggtgaaatgcgcaagttggaggctgctgtggaagcacacaacatctttggctttgagaccattcctgaagagtgcgttgaagcaacaaaggaatacatccatggcgaacaatatagatcagactccaagacagt

SEQ ID NO: 31966 - DNA, 284 bp, Glycine max
  unsure (1)..(284): unsure at all n locations; Clone ID: 701104704H1
ctcgcacgntcatcntttaccgacaaacactttcccttttctcggaactttttattttgtaaagtccaattttcgcctttacctttcccatttcaaccacacgcactcaaatcccttgtaatgtgtctgtctgggtggtaattttggctgaaattgggatctctctctctctcgttngcgttgtcggatctctaatcaaatcctccaatccaaatgcatggttacagtcgcctgggcggagagcgcgtcgccaccgtcgtcgccgcggttccggcacgtcggag

SEQ ID NO: 31967 - DNA, 287 bp, Glycine max
  unsure (1)..(287): unsure at all n locations; Clone ID: 701104705H1
ggaagaaccaccactaccttatccntttccactcctcaccaagccncaccatggcctcaaccaacgccctctcttcagcttccattctacgctctcccaaccgccagtctctgaccagaagagcgaaccacaacggaagagtaaattaccgtcaaccgaatagccgtttctccgtcaaagcctccgccaaagagattgcctttgaccagcattcccgctctgctatgcaggccggcattgacaagctcgccgacgccgtcgggctcattcttgggcccagggggagg

SEQ ID NO: 31968 - DNA, 286 bp, Glycine max
  unsure (1)..(286): unsure at all n locations; Clone ID: 701104706H1
gctcctcctcagtctttcagttgcaatcttcacatcagcgtgccaatatggtctcccattcctagcaaaatgtaccccttgtgatccatccctctcagatgtgtgccccaccaacgggcgttctggaaacttcaaacaattcaactgcccaaaaggctactacaatgatcttgctactcttcttctgaccaccaatgatgatgctgttagaaacatattctcaaccaacacccctcttgaataccaaccctcctccatcataattntctttgcactgtattgcata

SEQ ID NO: 31969 - DNA, 285 bp, Glycine max
  unsure (1)..(285): unsure at all n locations; Clone ID: 701104707H1
tgaccctaccaaggcacctcctccgtgctgatgtagtgaaaggcttgaaaaatggtatagtattgaacctgttggggatnggtgctgctattcttgggatgcaagccacggttggattgttagttgctaaggctctcacttcctcggcaaacccgtactatcagggaatttctcctggtagcaccccagtgctcgcattggatgtatttttggtgcaggcttcagcgaacactantctttctcattcctngggcttgttttctcactggagttgtngcgatcagt

SEQ ID NO: 31970 - DNA, 285 bp, Glycine max
  unsure (1)..(285): unsure at all n locations; Clone ID: 701104708H1
agattgttaattgaagcagaggaagacctaacatgtccgttacggagctgaaggagcgtcacttggcggcgacggaaaccgttcaacagtctcagggagcgcttgaaggagaggcgtctttcattgctgcgatacagatattnctggctacgccangncctcaaggtagatcccctgtcacctttggtcccaccgatctcgtgtgttgtagaactctccagggtcatgcgggaaagtgtactcatggattggattcagaaaagaatcgaatgttagtgcatccca

SEQ ID NO: 31971 - DNA, 275 bp, Glycine max
  unsure (1)..(275): unsure at all n locations; Clone ID: 701104709H1
gcaaaaaccaccttcacatctaacaaaccacacctccgccataaataaaagtaacctccctcatggaagagtctcancggggcctctcgtccccgccgtcgtcaaacctgaaccgtccaaaggcgcctccgccgctgcctccggcggcacgttcccggcctccacgtcggagccggacaaggattcctctgtccgatttgcatgcagatcatcaaggaccgttcctcaccgcgtgcggncncagttctgctacatgtgcatcatcacgcacctcg

SEQ ID NO: 31972 - DNA, 282 bp, Glycine max
  Clone ID: 701104711H1
cgagataactagaaacagtgtgatgaaaatgaaggtccttgttttcttcgttgctacaattttggtagcatggcaatgccatgcgtacgatatgttccctctccgaatgaacactggctatggtgcccgtactccggaggtgaaatgcgcaagttggaggcttgctgtggaagcacacaacatctttggctttgagaccattcctgaagagtgcgttgaagcaacaaaggaatacatccatggcgaacaatatagatcagactccaaaacagttaaccaaca

SEQ ID NO: 31973 - DNA, 218 bp, Glycine max
  unsure (1)..(218): unsure at all n locations; Clone ID: 701104712H1
cagtttcagacacagagagaggggtttgggattggagggattgacgctgcgtctcttcctcttctctttcgatccatccctcattcctnatcctccaatccaaccacctcagcctcacactcacatatacacatgtctctctctatttcccttttcactttcactttcattctagggttccgttctgatcgctctttccctttcagatctgaagcgta

SEQ ID NO: 31974 - DNA, 284 bp, Glycine max
  unsure (1)..(284): unsure at all n locations; Clone ID: 701104713H1
tgaaaacccaaagtgcttctctcctctgtctttttctctctcttgctatccttttggctagtncgcactgctgcaagtgcaacttccaagaagcgcagtgccaagccaccatgtttcaacattcaacagaagccttttccttccacttttctctttggaattggttcttctgcttaccaggcagaaggagcagcaagtgtagatgggagaggaccaagcatatgggacacctacactagacagcatactgaaaagattgggatcatagcaccggtgacatggga

SEQ ID NO: 31975 - DNA, 281 bp, Glycine max
  unsure (1)..(281): unsure at all n locations; Clone ID: 701104714H1
gcttttngctgttctctaatttccctttggtttttacggttcctcactttcgatttttncantcttattctttaaatnatcaacttttggtttgattgattcgatgcagattcatccgtaccgctagttatattactggattcggggcagattgctgttaccgtgtttctccgctttcatttataagatgcacttctggtcatcattttaccaacatgcaggttttgagttgttggtttttgaatataaatggacgccaaacggttcatccagctggttga

SEQ ID NO: 31976 - DNA, 280 bp, Glycine max
  Clone ID: 701104715H1
aaaatggggtaaggtgttcagtgttctgtttctaccacatcttcatacgaggttctccactcccattgccagattccatgtttttggggtgtgagggatgtgaaatggattaaagttcggtgctttttgtagttttctgggtgcccatttgcatagttttgtgttttcgtctcatttgtgtggtcggtggagttggggtagttcatcaagttcgtttcacttggcaagttctgatctcttgacgtgatttgaattgtgggcgttgctggagcaagaaatt

SEQ ID NO: 31977 - DNA, 277 bp, Glycine max
  unsure (1)..(277): unsure at all n locations; Clone ID: 701104716H1
aanggnnanccacgcgggctctagcttctacaaggatccccactaacaccaagttcccatccaaggcttcacactctttcccaacccaatgcgcctcaaagagacttgaggtgacagaantctctgggctaagatccacttcatgtgtgantatgctaacgatgctagagaatcttccttttttgatcttgtagcttcccaactcactcccaagaccaatggatcatcaactcctgtgaggggagagacagtggccagttgaagtggcaatcaatng

SEQ ID NO: 31978 - DNA, 283 bp, Glycine max
  Clone ID: 701104719H1
cgggtttattttacgttatgttgcgctgtggtggctgctgctgttggagcttttcttcatgttctgtggaacattgggggttttctcaccacgttggcttccattggaagcatggtttggttgctatctacaccccctgttgaagagcaaaagaggttgtctctgttgatggcttcggccttgtttcagggcgcttccattggacctctgattgatttggctattgccattgatcctagccttattgttagtgcatttgtggcaacttctttggcttttgctt

SEQ ID NO: 31979 - DNA, 279 bp, Glycine max
  Clone ID: 701104720H1
cttaggtggggactgcaaacaggtcatagtgtgctgcctaagagcactaatgagtccagaatcaagggaaactttgatgtgtttgactggtctattccagaagaagtgatggataagttctctgaaattaagcaggatagactaattaagggcacttttttgttgacgagacctatggtgccttaagaccgttgaagagcttgggatggtgaactctgagcaatatgcttcatagagatgttgacaaatgcatgctcctcaagcagattgattccgcct

SEQ ID NO: 31980 - DNA, 287 bp, Glycine max
  unsure (1)..(287): unsure at all n locations; Clone ID: 701104721H1
aaagactttctctgtccacaaccatcataccattataccttaccaccccttccttccaccaccctttctttctcncctntatacacacacaagacacacacattcacaagaaagagggagaaaaataaaaacaaaaacaaaaacaaaaggtggtagangcatgagccacaacacaacacacattatctcataccacactcaccaccttgtattccccaaaattcacataattccccttctcttgccttttccctcagatttctcaccccttctctcttctgtgttgg

SEQ ID NO: 31981 - DNA, 280 bp, Glycine max
  Clone ID: 701104722H1
ttcacgttattgattggtttacgagtttcgtttaatatttgttcctcacagatcttaacactttaaagttcaatctccccattttccatatcatacgctaacaaactaagaatatataaaagaagatgaggtcttcaatcatatttcttgcattctggtgtatctgaacgtggtagctgcggaattgtcagcatacgacgttcttgagaaatacgatctcccagttgggcttcttccaaaaggtgccacagggtatgaattaaacgaaaaaaagggcatt

SEQ ID NO: 31982 - DNA, 283 bp, Glycine max
  unsure (1)..(283): unsure at all n locations; Clone ID: 701104723H1
gtggttcnttcaaataaggnggttctgcccgtaatttgacaccaacgaatacgncagagtnagaactaagnactaagaagagaagaggttggtcgtgaatntcaatattaagcagtgtgaggcatttgttgatgtanngagcggagccatgggcgagtcaagcgactctgtctccattgacattgatttgattcctttgggaggaaaggaatgcacggttaaaactagtaaaggttccgtgtctgtgcttgtttgtggggatcaagaaaaacccgctctaata

SEQ ID NO: 31983 - DNA, 282 bp, Glycine max
  Clone ID: 701104724H1
ggcgtgcagaccactgtctccccttttgctctcttcattttccattcgtagacgccaagaaccctaacaggagaatgcagtggacctggataatttgtgaggatatttaacatcgtgtacattgtgctcctttaattattttcatcagttggtgttgtgatggatggtgataatggtctaacatacgtaattggggttactatgaacccgctacgtcgtttaagagccacctggggctgcagctgatgtcatcctgccggaaaaacctttaattggagggcg

SEQ ID NO: 31984 - DNA, 263 bp, Glycine max
  unsure (1)..(263): unsure at all n locations; Clone ID: 701104725H1
ttcaccaaagcgtatcagaagacgaagaggtttcagtncaagatactcttatgcaagacnggtatagaaccccctctcggtctcctgtgaggtcataccgctacaatggaagaaatgaccgggacagatattctacttacagaaggttttcccctaggcgtttcaggagcccaccaccacgtggaagaactcccccaaggtatcgaagcaggaggagcaggacgccatctgtttcacgcagtccacgatatcgagcccgacga

SEQ ID NO: 31985 - DNA, 281 bp, Glycine max
  unsure (1)..(281): unsure at all n locations; Clone ID: 701104726H1
cgggnngctgctcnanctgtgcnngngganntgtncttangcannaaacatcctgatgctgtcacatatacggcattgtttgatgcattgggaaagaaaggtagattggatgaagcngctgagttgattgtaaagatgctcagcaaaggtttggatccaactcctgtaacattcaggtcagttatccaccgttattgtcaatggggtagagttgatgatatgttgaacttattggatagaatggtcaaaaggaagccattagaaccatatacaatcatgtt

SEQ ID NO: 31986 - DNA, 278 bp, Glycine max
  Clone ID: 701104727H1
ttttcttctttcaccttcgaatcgttgatgcagcgtccgatttattctttttctgtgtagtttttgattttcggtttctgactattatttcttaaaaaattacagattctttgcttttggttttggttgattgaaggccttcacggcattcgttgcggcattttaatcgatttatccaagcagatcttggcatgttataaagggtagactgcaaaatggaggcatgaaagcatcttatggggatggatctctgattcagattctgaatctgcccattc

SEQ ID NO: 31987 - DNA, 279 bp, Glycine max
  unsure (1)..(279): unsure at all n locations; Clone ID: 701104728H1
gaaaattcagtgctgaaacatggcttcggctactctctctggaagccaaaccagcccttcaggcaaatgggaaaggcttctctgaattctctggcctccgaagctcatcaggcttccttcccttttctanaaaatcttcagaggatttccattctgtcattgccttccagacctatgcagttggaagcagtggaggatacaagaagggtgtgacagaagcaaaactgaaggttgccataaacgggtttggaagatggaaggaattcttgaggtgctggc

SEQ ID NO: 31988 - DNA, 280 bp, Glycine max
  Clone ID: 701104729H1
tgagtatatctgcttgaaggagcagaaagtgatgttggatcaggaacgggctgttgtagaacaagagaagaaccgggttcagatgctgttgcaaggcatgcataatgtaatgactgcttacaatgctagtggaaatctccctgcaccagcacctgctgtaaaatctgcagttgtagcagttcctaaaccaacacttggttacaaatctcaaccaggcaatcctacttctgtgcaaaataaatcaaatgcaccgccattgcctcaatctagcaattcaaag

SEQ ID NO: 31989 - DNA, 259 bp, Glycine max
  unsure (1)..(259): unsure at all n locations; Clone ID: 701104731H1
cactgttgttctcaagggattcgattctctctgcactcacttctagggttttctccgcgctataagcaatcatggcggatgaaacaccaaatgagatgaaggaggaggttccagaaattgttccttttgatcctaccnnnnnnnnnnnnnnnnnnnnnnttacaattgtagatcctgctgatgaacctgtggagaaattggctgagaagacagaaaacctctcagtttccgagggggttgagactgcatttactggttt

SEQ ID NO: 31990 - DNA, 282 bp, Glycine max
  unsure (1)..(282): unsure at all n locations; Clone ID: 701104733H1
ctctgctattcagcaatcagcattcactggtcaaactgctctgaagcagctcaatgagttcgtccgcaagaccggtggcgccggcaaaggtcgcactaacatgcgccgcaccgtcaagagtgctcctcagagcatttggtatggcctgaccgtcccaagtacttgggtccattctcggagcagattccatcatacctgaccggagaattccctggtgactacggatgggacactnctggatatcagctgacccggaaacttcgccaggaaccggagttggag

SEQ ID NO: 31991 - DNA, 283 bp, Glycine max
  unsure (1)..(283): unsure at all n locations; Clone ID: 701104734H1
agaattcacaaccgacaatggcgacaaaaccttcgtttggcttatctctctnccacnnnnnnnnnnnnnnnnnnnnnaactgtctttacttcggtgtcggcacaagccccagaatccccatcactctacaacaccttccttcaatgcctcaccaaatacacaantaacccctccaacatagtcttcgccaacaccaaccccaagttccccactatcctccaaaactacatccgaaacgcgcgtttcaacacctcctcgacgcgaaaaccatactcatcgtcat

SEQ ID NO: 31992 - DNA, 282 bp, Glycine max
  Clone ID: 701104735H1
gcgactacggctgggacactgctgggctttccgcagacccagaaaccttcgccaagaaccgtgaactcgaagtgatccactccaggtgggccatgctcggagccttgggctgcgtcttcccggagttgctgtcccgcaacggggtgaagttcggagaagccgtgtggttcaaggccgggtcccagatcttcagcgagggtgggctcgactacttgggcaacccaagcctgatccacgcccagagcatcctcgccatctgggccacacaagttatcctaatgg

SEQ ID NO: 31993 - DNA, 280 bp, Glycine max
  unsure (1)..(280): unsure at all n locations; Clone ID: 701104736H1
aaaactttcgaaagattttatccaattganattttaaaaatgactgggataaacttaagaattcaattattgaaattgaataagtaaacaatttaattggattggtcgaatggtatcaaaaaaatggagtactaactcccatttcttatttattattgaattaaccgatcaacttgctttgttatcgaacatttctttttgatttcaaaaattttccggaaaanatttgaatctatttnnatatgcgaatcaatcctactacttctggtcctgaggttct

SEQ ID NO: 31994 - DNA, 273 bp, Glycine max
  unsure (1)..(273): unsure at all n locations; Clone ID: 701104737H1
agagaaaggaaacaaagggttcaaacctcacttacagtatctgaatcaggacaaaggatatatatacttctatgtggcttctctttctcaccttatatttgtgattggccagatatttcagaacttatggatggcttctaatgttgacaatccttatgtcagcacattgcaattgatttttgtgtacttgttgatagggttatttctgcatgtntctgttcatcagaantctgttgtagttctatgagtattcgatcatcaanatcttanttt

SEQ ID NO: 31995 - DNA, 279 bp, Glycine max
  unsure (1)..(279): unsure at all n locations; Clone ID: 701104739H1
cccaaaactcatttctcatctcaatcaatccaatggactctcccaangctttgtctancgctccggcngcgggtagtaggaagaacgngacgctaatttgcntcccaataatgggagaatcagttgaaaagatggagattgacgtggacaaagcganagncggnggntcggaccttgttgaaattcgattggattctttganaacctttgacccctatcgagatctcaacgctttcattcaacaccgttctttacccttgtngttcattacaggcncaa

SEQ ID NO: 31996 - DNA, 282 bp, Glycine max
  unsure (1)..(282): unsure at all n locations; Clone ID: 701104740H1
tgaaaatgaaagtgcttgtnttgtttgttgctacagttttggtagcatatgaatgccatggctcagactaccagaagttccctctccaaatgaaaactgggtttggtgggcaatacagcaatgaggtggcatgtgccagttggaggcttggcgtggaagcaaacaacgtagtcaagtggcaaactgttcctgcagcttgcggagagtacatagctgactacgttctaggagaccaatatagatcagattccaaaacagttaaccaacaagcttatttctatg

SEQ ID NO: 31997 - DNA, 282 bp, Glycine max
  unsure (1)..(282): unsure at all n locations; Clone ID: 701104741H1
ccgcatggccaccgtcacttctgcagccgttgctattccctcattcactggcctcaaggcaagcgcaggcaaagtgagtgccgcagttaaagncctcagctccccaagccacaaggttgggcatcaaggcttcgctgaaagacgttggagtcgctgttgtggccactgccgcgagtgcagtgctggctagcaacgccatggccattgaagtgttgctgggtggagatgacgggtctctggctttcgttcccaacaatttctccgtggcctctggggagaaga

SEQ ID NO: 31998 - DNA, 277 bp, Glycine max
  Clone ID: 701104742H1
taacacaaagcacaaagcaaagctcatccttgagttaaaaaatggcagcagcttcttccatggctctctcatccccatccttggctggcaaggccgtgaagctgggcccatcagccccagaagtgggaagggtgagcatgaggaagaccgtcaccaagcaggtctcctcaggaagcccatggtacggcccagaccgagtcaagtacttgggcccattctctggcgagcccccgtcctacctaaccggtgagttcccaggcgattacggtgggacatg

SEQ ID NO: 31999 - DNA, 259 bp, Glycine max
  unsure (1)..(259): unsure at all n locations; Clone ID: 701104743H1
gaaatacatagataaggctgcaacctctggagggactatctcctcangtaccactatacccaagtaacagaagggaatgaaccttgctttttcacaacatacttttcttgggatcatacaaaagctatggttccaggaaactcattccagaaaaaggtgacattactctttggaattggccatcctgtagaggaaaagtctaatgggtcaagtcaaggagggggaccaagacaaagagcagaagctttggctgccttaa

SEQ ID NO: 32000 - DNA, 248 bp, Glycine max
  Clone ID: 701104744H1
ctgtttaaggcaatacaacatttactactcatactcaaagtagcttagtgttttgtttagcatatcatggagaataataatcagtcgttttggcaattcagtgaccagctgaggttacaggcatccaatttggcgaacctttctctaaacgattcgatttggagcaacaattacatctccaagaggcgtgatgaaaggattaattttgacatcaaagtggggggtgagatcaactctttcaagtcaag

SEQ ID NO: 32001 - DNA, 280 bp, Glycine max
  unsure (1)..(280): unsure at all n locations; Clone ID: 701104745H1
cacatatcacaacctttaaccatcacattgtcaacaaattcggcaagaattcatttttttgggaaggtaccaaaccaaaagtggtaatcactgaccctgagcaaatcaaagaagtcttcaacaagatccaagactttgagaaacccaagttgagtcctattgtcaagttgttgggctctggacttgcaaatttagaaggcgaganatggcgtacacatcgaaagattattaaccctgctttccatttagaaaaattgaaggttatgttaccaatatttct

SEQ ID NO: 32002 - DNA, 274 bp, Glycine max
  unsure (1)..(274): unsure at all n locations; Clone ID: 701104746H1
gcagttaacaaaatttcgataaganaagttcccaacttcagctaagagaaaatgtctctgattccaaactttttcggtggccgtaggagcaatgtgtttgatcctttctcccttgaagtgtgggatccctcaaggattttcattttccctcttctgtttctgctgaaaatttagcatttgtaagcactcgtgtggattggaaggagactccagaagcgcagtgttgaaggcagatattccagggctgaagaaggaggaagtgaaggtgcagatg

SEQ ID NO: 32003 - DNA, 281 bp, Glycine max
  unsure (1)..(281): unsure at all n locations; Clone ID: 701104747H1
aactgaattgagttcactgtccacaagtttcgccccaacactcaactcggctcncngctattgttgttgttcttcttctccatatcaaacaaagtatagataaaatatcattgcagcttcattttcatcctccaattaattagcaatggggcacacatcccttttcactccctcttcctctcttaggttcaactctcttcttgtttcctccaccccctcttcttcttcacgctccaacagcgtttctttccccgccctctccaggaacataaggaaatcgg

SEQ ID NO: 32004 - DNA, 283 bp, Glycine max
  unsure (1)..(283): unsure at all n locations; Clone ID: 701104748H1
ttagaacagcannnatagcaaagtatgattacggtgaccaaagacaaaatatgcaacactatggacaacgggttcctcctctttatgacatgaccaaaatttcaaatgaatttcctcttttcctcacctatggaagacaagatgcgctatccaatgtaaaggatgtgcaacttttgctcaatgaccttagagatcatgatggaaacaagttagtagtattgtttacggaagattattctcactatgattttattatgggtgtcaatgttaaccaaattatcta

SEQ ID NO: 32005 - DNA, 277 bp, Glycine max
  unsure (1)..(277): unsure at all n locations; Clone ID: 701104749H1
ctgttctatagcaaaaaanncagtaatcataacttgatttagatctcaaaaatcttgatcatcaccatcattacctttagatctttctccctttgctcactatcactctcagtctctcacctatccacccaacatgccttcnagggtttccattctctgtgtcactgggacaatacnanggtcccatnctcactttnaacaccannattctntgattcanctccaccctcatatccaccaaaaaagcatgcatctttggtgcatgctcaaacccatt

SEQ ID NO: 32006 - DNA, 282 bp, Glycine max
  Clone ID: 701104750H1
tgccaatgctatcatcacccatcaccgatacaacaaactcatcagagcctccaatatctctcaacaacaacttcaggtggttgcctcttaacaatgggggtgcaggttctcgcgagcacaatcccttctgcaaagctcaacctctcgagcgtcaccgccatcaacaaccacctttgcaacaccttgcaccagattgaagctgctctttcttctactaactcccatgagaaggcttcttcctttgcactgaacccaccaagcagtgaaagaaaaaagtagtca

SEQ ID NO: 32007 - DNA, 254 bp, Glycine max
  unsure (1)..(254): unsure at all n locations; Clone ID: 701104751H1
caagattaagaattggggtttgaagaagccggtggtgtctccttgcttgttctcgatcgatcttgttattgtaaaatataataactttttnatatcgtgatcaagatgcgccgagggagagccaccgccgccgtcgtggatccgacggcggagcaggcgaaggagacgcggttccgcggcgtcaggaagcggccgtgggggcgattcgcggcggagattcgagatccgtggaagaagcagcgcgtgnngctggg

SEQ ID NO: 32008 - DNA, 277 bp, Glycine max
  unsure (1)..(277): unsure at all n locations; Clone ID: 701104753H1
gcctgtacaggttgttgatgaaaatagtgttaataagagtgttaaaccgagcaaacggaccaaacgattgcccgggagacatccttgttaggcattatggaagctatacatactcatatgctgatcctattaaatgtcgtgatgagtttaagaggatacttgagcgtaatgatggttctctcaaganagtacttctacagactcttgaacaggatcttcctagcacaaaatcccgtagatcaaaggggtctcatcgaagcctaaaggaacatcaagc

SEQ ID NO: 32009 - DNA, 281 bp, Glycine max
  Clone ID: 701104754H1
aaggaaatggcttcctcaatgatctcctccccagctgttaccaccgtccaaccgtgccggtgccggcatggttgctccattcaccggcctcaaatccatggctggcttccccacgaggaagaccaacaatgacattacctccattgctagcaacggtggacagagtacaatgcatgacggtgtggccaccaattggcaagaagaagttcgagactctttcctacttgccagacctcgatgatgcccaattggcaaaggaagtcgaataccttctaaggaaa

SEQ ID NO: 32010 - DNA, 278 bp, Glycine max
  Clone ID: 701104755H1
gtacgtggtgggaatccaccatgttccgtgccaggaagattttccaataatgcccttgttgagcaccggatttgaattgaggccaactaatttctttgagagaaatccagtccttaagaccctttctcctggcattgttaaatttccaggttgtgagaaaccctagatttgcttttgagctttgtcactttaagtacaatattgttgatcgatagatccggagaaacattatctttttactaatatcggtcatatgtgctaaggtgagaaaataataa

SEQ ID NO: 32011 - DNA, 172 bp, Glycine max
  unsure (1)..(172): unsure at all n locations; Clone ID: 701104756H1
ctgtcgttgaatgatatcacatgaatgcattttggtttgcaacctgctgcgcttgcaaggggttgtgaagccaattttataatgaataanatcaaatatatgctttgtatatttattgaaaaattctacaatatgtattgtatcttcaataataaaaatttgatttaaagat

SEQ ID NO: 32012 - DNA, 277 bp, Glycine max
  Clone ID: 701104757H1
atagccagggagtgtgggattttaactgatgatggcatagctattgaaggtccagagtttagagagaagagtcagaaagagttgcttgaactgattcccaaaattcaggttatggctcgatcctcacctttagacaaacacacattggtgaaacacttgcgtactacttttggggaagtggtagctgtaacaggtgatggaactaatgatgccccagccctcatgaagctgacattggacttgcaatgggaattgctggaactgaggttgcaaaaga

SEQ ID NO: 32013 - DNA, 245 bp, Glycine max
  unsure (1)..(245): unsure at all n locations; Clone ID: 701104758H1
aggatctacttgtccacattatccttttatacatgtaagagtgggactgtaacatctaaacaagtatananaggatctacttgtccacattatccttcaattttgggtttgggcagtgtgtttctagtgaataaaaagagagaatgatagttatgntagttacgataaanaaaaannncaaaacnanacnanaacgaaannnaanngnananngnaaaaaaaanngggggnngncgcccnancat

SEQ ID NO: 32014 - DNA, 272 bp, Glycine max
  Clone ID: 701104759H1
ctgaggctcaccaaaagctttctgagcttgggtttgctgaagcctaagcaacgttttggggattgttggagaggcacggtgcccataatatttctctcataaattctatggtcatggtttctaatgcgccactgtgggttcctcaaatttttagatagcttttgaatgtattttgctggacgtggtgatgatgattggagttgggttgtttttatttgtggtcgatcctttgttaaataacattgttcagcgattgcgatattatacccttg

SEQ ID NO: 32015 - DNA, 53 bp, Glycine max
  unsure (1)..(53): unsure at all n locations; Clone ID: 701104760H1
ttgccttgaggaangttnnagacaacatanaaaatttaaaaatatagtaatng

SEQ ID NO: 32016 - DNA, 276 bp, Glycine max
  unsure (1)..(276): unsure at all n locations; Clone ID: 701104761H1
aaaacaagtagttgagaactaagaagaaggaaatggcttcctcaatgatctcctccccagctgttaccaccgtcaaccgtgccggtgccggcatggttgctccattcaccggcctcaaatccatggctggcttccccacgaggaagaccaacaatgacattacctccattgctagcaacggtggaagagtacaatgcatgcaggtgtngccaccaattggcaagaagaagttcgagactctttcctacttgccagacctcgatgatgcccattggc

SEQ ID NO: 32017 - DNA, 275 bp, Glycine max
  unsure (1)..(275): unsure at all n locations; Clone ID: 701104762H1
atttaagttcatttcctcctctcctctctcttcattttatttttcttccatctgctaggaaaatgtctgtcagcgttgagggctctgcctttggggnactatttgaagaaaaaaatgtccattctgaagacagcaacgagcttgtgttgcatggtgcatttccattacgtaaacatgagagacagaatggatttaatgccacagacatgaatgcatctggaaactccttcaggaactatgatgcagaaagtgaaaggcaaagaatggtggaggat

SEQ ID NO: 32018 - DNA, 280 bp, Glycine max
  unsure (1)..(280): unsure at all n locations; Clone ID: 701104763H1
gagagacaaagagtgattcanagggagaaagctccctcgcacaaagcaatngcctgccatcacctganctctatgctcctttctccctttatccgcattgctctcttctctttcaccgtttnttgtctctgaatatccaagatcttcaaggacaatgttatctctgagaaacatttttctgaatagcgcttgatccggcgtgaaacattcaattgttgataatttactgcttcactttgggctgtgcgagtggagcagcctattttactattaaaggcta

SEQ ID NO: 32019 - DNA, 282 bp, Glycine max
  unsure (1)..(282): unsure at all n locations; Clone ID: 701104764H1
cncgntgaaaanttngnnatgactntggataccngatagcaataaccnattctatactatngctcantcaantnaccnaatacacggtcgcggaaatcttcctaccgaaccctatttntaggtcagaggctaaataccaaggccgcctttatnangctcaagtccacacctagaagactccgccctctcagagtggttaatgagaaagtcgtcggtatcgatttgggaaccaccaatccgccgtggctgccatggaagcggcaagcccactatcatcaccaa

SEQ ID NO: 32020 - DNA, 279 bp, Glycine max
  Clone ID: 701104765H1
gccgcagcttgaaacagagcagagcgaccttgaagagctacccgctgtcggaaagaataagaggatttccaagggaaagaagggtggcaagaagaaagcgttagtgcccattcccttcttcactcttttattctctcctttaaactctgatttctttcttcttcttccgtgattccacagcgctgatcctttgccaagaaagactggtacgatatcaaggccccttccctcttccagtcaagaatattggcaaaaccctcgtctctcgtacccagggaa

SEQ ID NO: 32021 - DNA, 273 bp, Glycine max
  unsure (1)..(273): unsure at all n locations; Clone ID: 701104767H1
gaaaccagctgntgctagtntatcantacatggagaacaatagncttgctcgngcacnttttggtanagancatgagaggatgcaattggactggcccagaagaatgcaaanttgtctgggtatagcaangggcttagctnatcttcatgaggaatcaaggttgaaaatagtgcacanggatattnnggcaaccaatgtctacttgataaacatctgcatgccaagatctctgacttggtttngccaaacttgatgaagaagagatnctcata

SEQ ID NO: 32022 - DNA, 274 bp, Glycine max
  unsure (1)..(274): unsure at all n locations; Clone ID: 701104768H1
ggttcctctccctcacggataaggaggtgttgggaganggtgataacaccaagcttgatattcagattaagttggacaaggaaaagaaaattctctcaattcgagacagaggtatcggtatgacgaaggaggatttgataaagaatttggggacaatagcgaaatctggaacttctgcatttgttgagaagatgcaaacaagtggagatctcaatctgattgggcatttggngtcggcttctatctgtttatctgtggccgactatgtcgaagt

SEQ ID NO: 32023 - DNA, 276 bp, Glycine max
  unsure (1)..(276): unsure at all n locations; Clone ID: 701104770H1
aaacattataatttctattacatacattttgtagctaggatgagcaagttantactcattcgtgtncctgggttcgtggcaacctttgtcaccatggtgatgatgatggtgcccaaaaacgtgagtgcccaaaacataggtgatgacatcgtcacacaagacttcttcaacagcataatcagtcaggctgatgatggttgtgcagggaagaacttctactcacgagatgctttccttaatgctcacaattcctacaatgagtttggtnggcttggt

SEQ ID NO: 32024 - DNA, 278 bp, Glycine max
  unsure (1)..(278): unsure at all n locations; Clone ID: 701104772H1
taacaaggtcactgatttgtgcaaatnatgtctttgcagaggaccaagttgtttccttttttcattgtccttgtttccttcacatgtagtctctcccttgctatgtccagtaaccagttggagcagtttgcttcggaggaagaagtgtttcaactattccaagcgtggcagaaggngcataagcgtgaatatggcaaccaagaggagaaggcaaagaggttccagatattccaaagtaatttgaggtacatcaacgagatgantgcgaagaggaagtc

SEQ ID NO: 32025 - DNA, 273 bp, Glycine max
  unsure (1)..(273): unsure at all n locations; Clone ID: 701104773H1
ctaacaccaacttcacaaaaaaaaaaagacttaaccanggattttanacttgaaaaccctcttggaaacttcnangacttnnnaaaagngaaaantcccttncctcttcntnatggaatccgannncatcnctnntcnganctactgtnagagtctcaaagccagcgacttcganatctctgttagaagagatgttgtctctttgatctcgnagttgtctgcaccttcgatccggttctcccttattagctatcaatattggatcgttcctcg

SEQ ID NO: 32026 - DNA, 268 bp, Glycine max
  unsure (1)..(268): unsure at all n locations; Clone ID: 701104774H1
ctgnccttctgcagnggggtatctctgtttgggcaaactgttacattcttttaaatcctcctcctgatttttaactcttccattgagcctactcttcttccttgccacaatgaccaaaattcaagccattcaaacctcaatatcaaaactcctaatccaccctttgctgtggagactaacaggctttgtctcaagcatagttggattcagctgttatgccctcagtccctctttccacaacatgttcggacatggaagcgctgtanat

SEQ ID NO: 32027 - DNA, 244 bp, Glycine max
  unsure (1)..(244): unsure at all n locations; Clone ID: 701104775H1
ttgaaggtctcagctacgtagaacggaaaacttaaatganccataagaatattataatttatanataacgaaataggattacatatgcctatctgatgagagaatgaaaggtgggtaagtgaaaattgaaaaagaaattggttcgacatttcattcctttacaaagcaaaccctctagataaaattagatgaactagccgttaaaatttattataaattataaatgtttcacttgttcatgttg

SEQ ID NO: 32028 - DNA, 255 bp, Glycine max
  unsure (1)..(255): unsure at all n locations; Clone ID: 701104776H1
atggaatttcgangctcagtcatactcttttaccattctcanctcccttgctcttgcaggacgagagccatgtccatgcatcgctacctgaggaagattattgggaagctgtttggccaaacactcccattcccactgcactgcgagagcttctaaagcctctccctgcaggtgttgaaatcgatgaactccctaagcaaattgatgatacacagtacccaaaaacatcttctataaagaagaccttcatccagg

SEQ ID NO: 32029 - DNA, 272 bp, Glycine max
  unsure (1)..(272): unsure at all n locations; Clone ID: 701104777H1
gtgagggtgtttccctctgacccgtttgggttagaaccaaatgtagcattgacagaacaggggcttgtatccgtgtctgaaagctgcnaccaagctccagtcagttctatattttgtcgtcaaatgactaattctgcctggatacaattgccaggaacaggcctaatatgacacgttttagactatgtattatcgagcctcaagctcctgaccatcttacccatcaacctctggatgctggttttggagtattgtagagcatgcaaggatct

SEQ ID NO: 32030 - DNA, 285 bp, Glycine max
  unsure (1)..(285): unsure at all n locations; Clone ID: 701104778H1
ggtgntttnagaacnnaacnagancaaaacacagcaccaattnccagattgtttccttacgcggtctnaaattttatctttcgagggttgcatttgaactttggcgnaaacctcattattattaaaataaattncattgatccctcgcctagagaggggaaatccagaaatactctgattcgacttatatacggatcttatntntngtattatttaattaaacgnaanttagttgtctgtagcgccgatgagttgctttcgtgcttgtttctcgccggnaagatg

SEQ ID NO: 32031 - DNA, 266 bp, Glycine max
  unsure (1)..(266): unsure at all n locations; Clone ID: 701104780H1
anaaaatagaaaatngggataggggtatatttgttggggnttcactngctatcttgtggtgtgtgtgtgaagggtgtggtcccanaagcctcacccantgtacattttccggcagtttacaacttttggggatcnaaactcagaacactggaggcatatcagcttcatttgtgcncaattctgcacttatggcgagggttctttcacaagccttctggnagggangtgatggccgtctcatgtagatttcatagctgagaagtaaa

SEQ ID NO: 32032 - DNA, 275 bp, Glycine max
  unsure (1)..(275): unsure at all n locations; Clone ID: 701104781H1
tntggnntttataggaaccctcctattcatccatttatcgatccacgtccatccccatctttcttctcctattctctctgttttcttttcttcttctaaaaagtgagagangaaaaaagggaattgaaggaagaagattgagaaaaaagggggaatgcccagataattaattcggtgaaatttcggattttcgtaagtnggtgtttctcttttcgtgtttttaccttcagtggtggaaggaagggggctggtttggtgactgatngacttgatga

SEQ ID NO: 32033 - DNA, 277 bp, Glycine max
  unsure (1)..(277): unsure at all n locations; Clone ID: 701104782H1
ttatcatccgcagctgcttttattcgcaccgcaaacagtgagccatggccgtcggaaagaacaagcgcatctccaaggggaagaagttggcaagaagaaggcagctgatccctttgccaagaaggattggtatgacattaaggctccttctgtttttcaagtgaaaaatgttggcaaaaccctcgtctctcgtacttcagggtancaagattgcttctgaaggactcaagcatagagtgtttgaggtctccttggctgatcttcaaggggatgagga

SEQ ID NO: 32034 - DNA, 275 bp, Glycine max
  unsure (1)..(275): unsure at all n locations; Clone ID: 701104786H1
ccaaatttcaattccaccaaaaaccctaatttcctttctctctaactcttagatcttcacgttttagggctttctccaccttccgcaatgcacaaattgggaagangtcatcgtgacaaactccagcagtncataacaataactggnnccagnnagannctngccctgcnggctctgatggctagtnattggnatcttganggagcatttnatttcttttacagccaaccccagcttaaaacatttactgattctaggcacttggaggagctata

SEQ ID NO: 32035 - DNA, 276 bp, Glycine max
  unsure (1)..(276): unsure at all n locations; Clone ID: 701104787H1
gtccgcttttccacttttctcttctctntctgctctccttcctatttctcaatcgaacaacacagcacaatcctncnnannnnnnnnnnnnnnnnnnnnnnnntcaatttcgttgatggcgtcacaagcaagcctcctccttcagaagcagctcaaagatctttgcaagaaccccgtcgatggcttttccgccggtttggtcgacgaaaccaacatttttgaatggagtgtgactataattggacctcccgatactctttatgaggggggattttt

SEQ ID NO: 32036 - DNA, 275 bp, Glycine max
  Clone ID: 701104788H1
ttaatggcttctcttgcaaccttagctgctgttcaaccagctgcgctcaatggccttgctggaagttccctctctggaactaagctctctttcaagccctctcgccacactgtcaaatccaagaacttcaggagtggtgccgtggtagcaaagtatggtgacaagagtgtgtactttgatttggaggatctgggcaacactacggggcagtgggacttgtatggctcagatgcaccttcaccctacaaccctcttcagagcaagttcttcgagac

SEQ ID NO: 32037 - DNA, 272 bp, Glycine max
  unsure (1)..(272): unsure at all n locations; Clone ID: 701104789H1
gtccatccatccttcagattctgtgaagaacaatgttaatgggcaactcttgggcttgcaagcagttcgtccttcctccattaacgtccactttcganccaacaaccttctttttgatggcaccaccaggttgtacatcagttattcctgtccctatgcacaacgagtatggataactaggactacaagggntcaagacaagatcaattggtccctattgatcttcaagacaggccagctggtataaggagaaagtctaccctgaaaataag

SEQ ID NO: 32038 - DNA, 260 bp, Glycine max
  Clone ID: 701104791H1
gttctctaatcttgtaattttctgtgtcgcttcgtggttcattcttctcgttctgtgatccgttctattttggagtacttacaacactcctttgcaagtttaattaattaaagaggctaatcaattttcaattggactgcagcagatggctgaggagggttgcagggttactctaaatgtttatgacttgagccaaggactagcaggcagctttcaatgtcctttttggggaaagctattgaaggcatatggcacacagg

SEQ ID NO: 32039 - DNA, 268 bp, Glycine max
  unsure (1)..(268): unsure at all n locations; Clone ID: 701104792H1
aagaaccgataatagttgtncctatcaaactgggcnntctctgccactgagccaagaagatggcctcacaggtttgcaaatctgcttccagagccgcgaggtcccttctatcctctcgttttcactctcacggacgtgcgcttggggctgctgcggctgcttcattgagcagcaaagtgcctcttttttacggaaagaacggttctggaaatggatccgcttcttcatcancatcancatcaggattcaagagtctgctcttctgccg

SEQ ID NO: 32040 - DNA, 267 bp, Glycine max
  unsure (1)..(267): unsure at all n locations; Clone ID: 701104794H1
ccattttatccaaatgacngnaaaactttncaacaatccatccttgaacgtggctttactaatccggnggggatccccctgatgaggagaaagccatagcctctcatccttctacccaaaatactggggtcttctttcgcacatggcttaatgggactcaatgcnatatcaggtgttggnatactgtncgnnccatatgcnctnncatctggagggtngttancttngttcnctatntgcnatggggctgagattggcacaggacgt

SEQ ID NO: 32041 - DNA, 275 bp, Glycine max
  unsure (1)..(275): unsure at all n locations; Clone ID: 701104796H1
gaatttaattctccaaaaaaaacatagatattgtgcaagcatggcttcaagacccggaattctctctgattggccatggnagcctcttggaagctttaagtatatgttactagctccttgcatcgttcatagctcgtattctatgatggtgaaagtaacagtgagaaggacatgtttaactttctcatatnaccctttttgctatggcgtatgttcataaccaaatatggatcactttctctcgttaccgaatgccaaaggcaacgcaagaattg

SEQ ID NO: 32042 - DNA, 282 bp, Glycine max
  unsure (1)..(282): unsure at all n locations; Clone ID: 701104801H1
gtaagtggaagaagagaaagtngcatcgcttaggtacagatacagacacnacctggtaaaaatcccgaccccagtgccgcacaattttccttcactcgcagcggagatttaggagtgtggtcttcctgtcttggaagtgctgcttgaaagaggaccttggtcatatggttgcttgtcatcattatttgtgtggtatnnatccatgcattatgtggtcagaacatantaatcaaataaggattctttctacccactcatctcacctctctttttattttcccc

SEQ ID NO: 32043 - DNA, 238 bp, Glycine max
  unsure (1)..(238): unsure at all n locations; Clone ID: 701104802H1
ggacatttggattcttagttttcactttnataccatatttgcttgnaaccttgtgttaanaattgttntccttntgaacttcaatnacaanttggacttncnnggagtttnattcccacatanccgtngtntgatttnanctggnngnactngctccatggctctctcacataaggagnggttgtngtactgtgatgcgtaattnaagngtncacagaatacgagctgntgcntcana

SEQ ID NO: 32044 - DNA, 275 bp, Glycine max
  unsure (1)..(275): unsure at all n locations; Clone ID: 701104803H1
tccgacaacgccaacggcagaacccaatccttcacttcctactccgaaaacggcaatgccggcgagcagacattcacctcgtacggcaaaaacggcaacggcccgaccaacgtgttcacctcgtatggaacanagtccaacgttgtgcgggtcagggttctccaactacgtcgagaccgccaacgccgccaacgacaccttcaagggatacggcgtcgacatgaacaaccccaccaacacgttctccaatacgccggcggggcaacggcnccgtc

SEQ ID NO: 32045 - DNA, 268 bp, Glycine max
  unsure (1)..(268): unsure at all n locations; Clone ID: 701104804H1
cttcagtactttagtgtgtgattnaattccaagattttgagaatantctagctgtgggtgtggaagtagctgcaactgtggcagcaactgcggttgcaacaagtactcttttgacttgagctatgttgagaagacaaccacagagactcttgttttgggtgttgggtctgtgaaggcccaattgganggtgctgaaatgggtgttgcagctgagaacggtncctgcaactgtggatcaagctgcanctgcgacccatncaactgaatg

SEQ ID NO: 32046 - DNA, 272 bp, Glycine max
  unsure (1)..(272): unsure at all n locations; Clone ID: 701104805H1
agantgtgaaggctaaatgcaagttgatagttcatccgaagagaaatntgacttggtgatggctgcatggnatagtgtngatgaattctcccaacgagggtgagnatatncaacggttgacattacttgaaaaggnttgctcagattttcctacttttggngattatgtgaaaaatacatggctgattcctcacaaggaaaaatttgttatggcatnggtagatcgagtgatgcnttncggtaacactacaatncgacaggnttgnaacagc

SEQ ID NO: 32047 - DNA, 268 bp, Glycine max
  unsure (1)..(268): unsure at all n locations; Clone ID: 701104806H1
cgatgggaagcattgattccattacatggcctgacaactggacaacaatancagctgatggtagtccggctgcacagtttgagcataccattttgataactaagactggagccgaaattttgactaaatgttgacatggtaattctttgtttaatccacattgatgttatnaaatatgaagagtttgtgtctaagttgtaaanatgtgccctgaaattaatttgcttctggaatattatgctctggctagtaaagatgcctcagaagc

SEQ ID NO: 32048 - DNA, 269 bp, Glycine max
  unsure (1)..(269): unsure at all n locations; Clone ID: 701104808H1
gcgtttcctccatttaccaaacaccttctctcgaactataccagaggccaaatactgctgcctccacttccnccgttaggttgcaatgtttagactccaagtctcanttcaacaacgtcctccgagcccaccaacgccactccactgggccgggcctcaagcccacaccgactactttcgtcccctccgccgtcgccacgcccaattccttcctcctcagcgaagaagccttcaaaggacttggncgcgacttccgacgaattcgacna

SEQ ID NO: 32049 - DNA, 269 bp, Glycine max
  unsure (1)..(269): unsure at all n locations; Clone ID: 701104809H1
caaaatgactcaagcccagattcaaccagttaaacttggaacccaaggctttgaggtactattaactacattacttgctccttattttgataattgatacaattaatctcattctaggtttcaaaattgggattcggatgtatgggccttactggagcgtacaatgaccctctccaagaacaggatggcatatctgttatcaagtatgcgttcagtaagggaatcacatttttngatacngcggatgtttatggnnccagtgctatgnt

SEQ ID NO: 32050 - DNA, 270 bp, Glycine max
  unsure (1)..(270): unsure at all n locations; Clone ID: 701104812H1
gggagtgttcccaaaatcgcaatatcttcaactcctatctgcaacagccanctttctcgttcgtcgatcacaaaaatngcggcgaaacttncaaatatttacgggattgccccccgcgccatttcaatcttcctcctcccantctctgcgtactcaagaagcctctnactacntccttnttccggcactgcacgagtgtnagtcctgaaattggagtgatgaggattgcgagctgtgcgcggtggaggtgctctcggtgctngatgaaat

SEQ ID NO: 32051 - DNA, 273 bp, Glycine max
  unsure (1)..(273): unsure at all n locations; Clone ID: 701104813H1
gatttctgtttctctgtcttcattttagtttttacggctagaagaatgtaccagctncatncggaatatttggtattntccggccaccacccggcgaactctccggcggaaaagtccactttctctcanacttgtagtctattgagccaatacatcaaggaaaagggtaccttcggagaccttaccctcgggatgantgcactgccgaaacaaacggttcccctganacatcgtgtcatctgcaacaaccatggagttgtttcccacgatcat

SEQ ID NO: 32052 - DNA, 274 bp, Glycine max
  unsure (1)..(274): unsure at all n locations; Clone ID: 701104814H1
ggcccaagagcaaagaaactaagaagattttgagcacaatggcatccacacaatgncttcttgcaccaccatgccctcaccactccaaccagagcttcatcacagcgcttagttgtgagcaccaaaccaaaccacattgtttgcaaggcacaaaagcaggttgtccaagagggtgaggacactactaacattgtctctcgcaggttggccctcactgttctcattggtgtgctgctgttggctctaaggttgcactgctgatgctgcctatgga

SEQ ID NO: 32053 - DNA, 274 bp, Glycine max
  unsure (1)..(274): unsure at all n locations; Clone ID: 701104816H1
atcnatgaanctcttaagccactaggcagcccaagttgtgagtgataaaattgagtccaagaaaacantnggattgaatgttcccgcagaggcaactaacccttctgttgctgattgcnttagcancagctgaaaaaaccctacatggctgccgaagcacttgcggaaggtttcatcaattccgtatccatttggcataggnaacttctttgtcacggtgnaaactgnttctggggaggattnatgnccanttgataancncnactaaatnnng

SEQ ID NO: 32054 - DNA, 273 bp, Glycine max
  unsure (1)..(273): unsure at all n locations; Clone ID: 701104818H1
gggncgggtcatggtncgggtcaccgtccgcacggaggtggccgtaagatngagtttgtgagcggcaaaagccacggttngagttctactaaatcaccggattcaactcaggcgagtgaaatgccgtggagattcggcgatcctgaagcgangaggaanaaaaggatagcgaatacaangtttacgggctagaaggaagggttaangntanncncaagaaaggtctcgatggtcaagnaaaagtgtnctcagntccatggctactatagaaat

SEQ ID NO: 32055 - DNA, 272 bp, Glycine max
  unsure (1)..(272): unsure at all n locations; Clone ID: 701104819H1
gaattgacaatgagaagtcatcactaatgtctcaatcgaagtttgagaagaagtttgggcaatcatctgttttcatagcttcgacactcttggaagatgggggtgttccaaaagcagcaagttctgctacactcttnaaagaggccatccatgtaattagttgtggttatgaagataagacagaatgggggaaagaggttgggtggatatatggctcagttaccgaagatattttaacaggtttcaagatgcattgtcaggttggagatctg

SEQ ID NO: 32056 - DNA, 270 bp, Glycine max
  Clone ID: 701104820H1
cagaaaccctaatttcctcgttatttcgatactctctccctttggaaaaaatcaaaggtgctcgcagtcgcagcgattagttcaaagattgtaagcgatcgtgaatcgtcgacaaaggttcgtgtctgaattgaagtagtgtcatcaccatgagattgagaaagggaaataaggtggagatccgtggcaatgctgatggacttagtgtggaatggtgttgtgctcgtataatttctggtgatggacacacctacagtgtccagtatgact

SEQ ID NO: 32057 - DNA, 271 bp, Glycine max
  unsure (1)..(271): unsure at all n locations; Clone ID: 701104821H1
tccttttgtgtggggnaattatggtaattnattttnagggtttgactactcatggattatgatggtatgagaaaaccttccaaaaacttatttcactcctcgcttcttcctttntgggttctattgctgggattgggagttcttgaccgctctcctcctttttagttcttccccttaatcttcttcttcacaattttnattnccntccgtattagacgtattagatcagattgaacaaaagggtntttcnttctttcttnttggggaataa

SEQ ID NO: 32058 - DNA, 270 bp, Glycine max
  unsure (1)..(270): unsure at all n locations; Clone ID: 701104822H1
ctactatagtgtctgantcacaggntngagggcaaagattttganccacaatggccttcgacacaatgctttttgcaccaccangccctcaccantccagctagagcttcaacacagcgcctagttgtgagcaccaanccaaaccacattgtttgcaaggcagcacananncaggttactgtccaagagggngaggacactactacnggccttgtctctcgcagttggcncttcatgtgctcatggtgctgntgctgttggctctaaggt

SEQ ID NO: 32059 - DNA, 267 bp, Glycine max
  Clone ID: 701104823H1
gacacacacaaaaaaaagctttagtttaggatgacccaagtgaggaacaagcaagtggttctaagagactatgtcaccggattccctaaagaatccgacatgaacattgttgaaggcaccataatattgaaggttccagaaggttccaatgatgtccttctaaaaaatctctacttgtcatgtgatccatacatgcgactcctcatggccaaggaccgttctttcggagatggctccttcacccttgcctctccattgaaaggatat

SEQ ID NO: 32060 - DNA, 268 bp, Glycine max
  unsure (1)..(268): unsure at all n locations; Clone ID: 701104825H1
cganaaattanaactcacaaagcaatgattgaaattaacaagctactgaactttgcattgcccccattatcactaattgtcatcttcatcttcacgccacctttgctcttagtgaagctgcttatgtatgtnaaaaagtttctatacaccgaaaacgtggcagggaaagtagtattaatcactggagcagcctcagggattggcgagcaagtagcatatgaatatgctaggcgcgganaaagctgtctctggttgacattagaaagga

SEQ ID NO: 32061 - DNA, 261 bp, Glycine max
  unsure (1)..(261): unsure at all n locations; Clone ID: 701104826H1
ctcgagngactttgtctcnctntctctgggtgggaagaacgnagaagangangcatcacagnaccgaacccattcanaagcaaatccgaaaacccctcacttaatattactggtattcagctgttcatgacaaaagcctgaaccaatcntgtcagaaggtgcnganattgttgagcgtgtggaccngatgaggaaantatagggagaaaatggngnatatnttggggnncaatgggcgttgnggggggantttngaagaaa

SEQ ID NO: 32062 - DNA, 271 bp, Glycine max
  unsure (1)..(271): unsure at all n locations; Clone ID: 701104828H1
gaaagatcggcgatgactgcctccaaggatcgcnaganctttcgtctacatcgccaaactcgccgagcaggccgagcgttacgaagagatggtggaatcaatgaagaacgttgcgaatctcgacgttgaactgacggtggaggagcggaatttgctttctgttgggtacaagaatgtgattggtgctacgcaganntcctggaggatcctgtcttccattgagcagaaggaagaaacaaaagggaacgagttgaatgcgaanggattaagg

SEQ ID NO: 32063 - DNA, 273 bp, Glycine max
  unsure (1)..(273): unsure at all n locations; Clone ID: 701104829H1
gcatttctgaaaaccccttacggcttacgctgctttcttttttcttcatttgcgnntttgatttggatttggatttggatttggactttggtcgtcaacacagcttttggtccttcgcttcgtttacgaatcctcttcttgttgttcctgcaacgcactgcattcgatcaatccatccatcttcacttgcttggtttcgatcggagggaaatggccgatcagttatccaaaggagaggaattcgagaagaaagctgagaagaagctcagcggt

SEQ ID NO: 32064 - DNA, 256 bp, Glycine max
  unsure (1)..(256): unsure at all n locations; Clone ID: 701104830H1
ttgaggtgctggagaagaagggataaagtgtatggtatggggncgtggtgaccgagggcacgaaaggaggaaactattggctacagaaagtcgtttctttagccgggtttctttcaaaaaatggtgcagagtctctgtttgatggcttctcatggttaccctcctggccttgtcttgcacccacaagtactgggcttgccctgcgctaccatgaagacagggctaccaaacattctttccttctccagtagcaaaa

SEQ ID NO: 32065 - DNA, 258 bp, Glycine max
  unsure (1)..(258): unsure at all n locations; Clone ID: 701104833H1
attttacttcgtttccgtacatatnatatcaaagttttagactaaagatcattcctgaactaccatgttttacattgatggtttaaactttgatattttacttcgtttccgtacatataataatttaagaataatgtgtattttgaaacaaanaaaaaaaanaangnnacagaaaaananaaaaaaacagggnngngnnccgtnnngnnnctncnccnccggganntntttnnggnncgggccccnggggggcacagc

SEQ ID NO: 32066 - DNA, 277 bp, Glycine max
  unsure (1)..(277): unsure at all n locations; Clone ID: 701104834H1
gaacaagaacaacaaagtaacgtgaaaganagagagatggaggcgattgttccagtggtggntttccagaggctttcagaggaagangagcgcaagaagctgagaaaaacatgtgagaaaccagggtgtttcagaatcatcaaccactcaattccantaacactcatggctgacatgaagtcagtggttaaatacttgcatgaccttcccacggaaatcaaaatgcgcaacaaaccctccgtccctgagagtggctatagggcggcaatgccaacaa

SEQ ID NO: 32067 - DNA, 270 bp, Glycine max
  Clone ID: 701104835H1
gaacactaccctgaacatagtaaagaagccagtgctaggatttgttagtgaagcaatggctcaaaccatgttgctcatgtctagtgtctctagcagttattccgtggatttgaagaaagaccttttcctccaattgcagagtcaaagtttaaggcctaagttctctcagctctcattcaacccacttccatcatcaacttcttcctttcttcaccccgtacattcacaatctggccctcttcaaatctaagaccaaagccgctcctgcta

SEQ ID NO: 32068 - DNA, 269 bp, Glycine max
  Clone ID: 701104836H1
gaaaaaagttacctgtttgcgatctcattacaatctccccagtttctaatctcagctaagaaaaaccaaaagatgtctctgattccaggtttcttcggtggccgaaggagcaacgtcttcgatccattctcactcgacatgtgggatcccttcaaggattttcatgttcccacttcttctgtttctgctgaaaattctgcattcgtgagcactcgtgtggattggaaggagaccccagaggcacacgtgttcaaggctgatattccagg

SEQ ID NO: 32069 - DNA, 270 bp, Glycine max
  unsure (1)..(270): unsure at all n locations; Clone ID: 701104837H1
agaaaatcaacattttttttctatcaattcacacgacaaaatttagcagagttcaaaacaccaaccaagtaaagtaaagaagggaagatgtcactgataccaantttcttcggtggtcgaaggagcaatgttttcgaccctttctcgctcgacgtatgggaccccttcaaggatttgtctttcccttctgctgaagattcagctttcttgaaaacacgagtggattggaaggagaccccagaagcgcacgtgttcaaggctgatattccg

SEQ ID NO: 32070 - DNA, 265 bp, Glycine max
  Clone ID: 701104839H1
caagttccaacatctatctcacttcttagttctttgtggctctttccatgatggcctctcctacatctccaagagttctcttcttgagtctctttgtaactctttccatgattttacatttgagttcagccaggaagttgtctgagtcagacccccaattgcagttccaataccacagaggccctctcctcacaggcaaaatctccgtaaacctaatttggtacggtaagttcaaaccttctcagaaagccatgttgctgatttc

SEQ ID NO: 32071 - DNA, 262 bp, Glycine max
  Clone ID: 701104840H1
attgcccttgggtgggccaatgtattgggctgaggaactaccgttacttctttctgtttgtttcttcggcaactattctatgtatctatgtgttttccatctcagctttttacatcaaggttctgatggatcattataaggggacagtttggaaggcaatgaaagaatcccctgcatctgttatattaatggcatattgtttcatctctttgtggtttgtcggtggactaactggcttcatttgtacctattggcacaaatc

SEQ ID NO: 32072 - DNA, 266 bp, Glycine max
  Clone ID: 701104841H1
ttcccagttatcggaaagcctccctatggtcaaaccttctttaagcgtgcaaccggccgttgctcagatggacgactaatgattgattttatagctgaggcatacgaattgccttatttaccaccctatctggcacttaccaaagacaaagacattcaacgtggagtaaattttgccgttgctggagccacagcacttgatgcaaaattctcatcgaagcaggacttgcaaaatatctatggacaaataattcattgagcattcaa

SEQ ID NO: 32073 - DNA, 266 bp, Glycine max
  unsure (1)..(266): unsure at all n locations; Clone ID: 701104842H1
caagcanaagcacaagcancagcacaagcacttctctaattccctttcacactgctattncagatttcacaagtgnttacacttcaaatggctttggaagctcttcaatcacccaccacanccactccatcgtttagtccctttnangatnccngtctcagttacttagagncaccgtggncganaggaaagcgtcctangcgtantgcacggggcaacantgcaacncccttcatgcaccgaggaagagtncctngtttttttnc

SEQ ID NO: 32074 - DNA, 268 bp, Glycine max
  unsure (1)..(268): unsure at all n locations; Clone ID: 701104843H1
ggataagtgaaagtnccaaaaactgagtcctccaccacacagaacananccantacaagtcactttgttctttgcattctcacacaacaacnatngnnncnctgcagaattcaccaacgcttcaccgaactatgntgccacanctctttccctcagaagcatgccagtcgttcatctcggagagatgccatgtgcntnatggggcaaagcngnncgagaancctctgnagnngggtncnacggganggaaaanagggnnaaggntggt

SEQ ID NO: 32075 - DNA, 50 bp, Glycine max
  unsure (1)..(50): unsure at all n locations; Clone ID: 701104844H1
cgactccatctattattcatcnnnactacctcncatatganatccgntcc

SEQ ID NO: 32076 - DNA, 272 bp, Glycine max
  Clone ID: 701104845H1
gttttgttttgggaacatcatcacattacattagattggtggtaatggcagcgtcactacaagcagcagctactttacatgcaacccaccaagttgagcaggagcaacactttgcagcaaaagtctactcagtccatttccaaggcttttggtttggaacctgttggagctaaaaaggtcacatgctcccttcaggctgatcttaaggacttggctcacaagtgtgttgatgctaccaaaattgcaggattcgcccttgccacctctgccct

SEQ ID NO: 32077 - DNA, 273 bp, Glycine max
  unsure (1)..(273): unsure at all n locations; Clone ID: 701104846H1
atcactctctcttccaacgatcatgttccgnatccaagaagctatggcacatcnctgccccctccatcttcacccgcctcgccatgttctccatcaccgtcgtcacccagtccttagccggccacctcggcgatctcgacctcgccgccatttccatcgcctgcaccgtcctcatctccatcaccttcggtttcttgttgggtatggcgagtgcgcttgagacactatgcgggcaggcgtacggcgcggacaacagcgcatattgggcgttta

SEQ ID NO: 32078 - DNA, 273 bp, Glycine max
  unsure (1)..(273): unsure at all n locations; Clone ID: 701104847H1
acagaaatnactgctttcagtgaccggcatgcagagttcgaggnactaaatactgagatattgggtgtttcagttgacagtgtgttctcgcaccttgcatggatccaaacagatagaaagtcaggtggccttggtgacttgaattatcctttgatttctgatgtcaccaaatctatatcgaaatcttatggtgttctcattcctgatcagggaattgcattgagaggtttgttcattattgacaaggaaggggttattcagcatctaccatta

SEQ ID NO: 32079 - DNA, 274 bp, Glycine max
  unsure (1)..(274): unsure at all n locations; Clone ID: 701104848H1
caaaatttganatagaaataatctgtgctgtggtagtggaagcatcgagaacatcgcagcgatggcgagagtgggtagaatgaagttgggttcacaaggcatggaggtgtctttgcagggacttgggtgcatgggcatgtctgcgttctatggtcctcccaagcctgaccccgatatgattgctctcatccaccacgctgttcaaactggtgtcattttcttgacacttcctgacgtcatggtctcanacaacgactccttctaggaangnccc

SEQ ID NO: 32080 - DNA, 237 bp, Glycine max
  Clone ID: 701104849H1
tgcacacttccatcatcatggccatcgcaacagagacttcaacctcaacctcagcaacacaaggattcttcggaggtttcgggttcagctgcggagaacgaaggtggacgctaaacgatttcgatatcggaaagcctctcggaaggggaaaattcggtcacgtttatttggccagggagaagactagtaatcatattgttgctttgaaagtactcttcaagagccattgcaacaatc

SEQ ID NO: 32081 - DNA, 273 bp, Glycine max
  unsure (1)..(273): unsure at all n locations; Clone ID: 701104850H1
cagcagttaacaaaatttcgataagaaaagttcccaacttcagctaagagaaaatgtctctgnttccaaactttttcggtggccgtaagagcaatgtgtttgatcctttctcccttgaagtgtgggatcccttcaaggattttcattttccctcttctgtttctgctgaaaatttagcatttgtaagcactcgtgtggattggaaggagactccagaagcgnacgtgttgaaggcagatattccaggctgaagaaggaggaagtgaaggtgca

SEQ ID NO: 32082 - DNA, 269 bp, Glycine max
  unsure (1)..(269): unsure at all n locations; Clone ID: 701104851H1
gcgtcgacgaaatccacaatcgaaaccgcgctctcttctgcctcctcggcgaaaccgtcgtcgtccacgtcacctccgccgtcgggntcgatgtgctcatggaatctccaccgccgtctgcggcggaggttgaggttgctgtcacggtcacggtcgcggtggcgtcgagttctatttccataaactcaggttcggttgcgcaaccgaaccggtgtnccacgtgtcggaagcgcgtggggctgaccgggttcaagtgcaggtgcggatgt

SEQ ID NO: 32083 - DNA, 267 bp, Glycine max
  unsure (1)..(267): unsure at all n locations; Clone ID: 701104852H1
aaaattgatgaagtcaatttttnattttnaatctatcaggaaactgctgtcatctcctaaattccacattctgttatgatgcantacatggggttggtggagcttatgcaaagagtatttttgtggatgagcttggagcacaagaaagctcttactgaactgtacaccaaaggaagacttcngaggaggacacccagacnccantttgacatatgcaaaagagttggttgctcgtatgggatnggcaaatccgnaccccaagaagag

SEQ ID NO: 32084 - DNA, 254 bp, Glycine max
  unsure (1)..(254): unsure at all n locations; Clone ID: 701104853H1
attanggtttgccgattganaganaaananaaatgggagaacgaaaaggaataccaatgggctttggggctcttggcgatgatcctcttcttgcattgcttcctcttcctctcacctgcgttcgcgcttccgatgacgccgacgacgcgatcttctacgagtcgttcnacgaggattttnatggacngtggattgtatccgacaangaggattacaatggtgtctggaagcatgccaagagtgatgggcatgat

SEQ ID NO: 32085 - DNA, 269 bp, Glycine max
  Clone ID: 701104854H1
aatggaccccctctctctcttctgcaccggagccctcctgcgccggcggcctctactggttcgtgtgcgttctgggccccgccgagcagaagggcaaacgcgccaccgatctttccggcggctccatctccgccgagaaagtccaagacaactacaaacagtactggtccttcttccgccgcccaaaggagatcgagaccgccgacaaagtccccgacttcgtcgacaccttctacaatctagtcacagacatctacgagtgggggtgg

SEQ ID NO: 32086 - DNA, 266 bp, Glycine max
  unsure (1)..(266): unsure at all n locations; Clone ID: 701104855H1
ttatttagggtttttgtgactgtgctccacaaccgagtcgccatggcgtgcgcaggagagtatcgaaaagatgcaggcacggcagaattaccggaatttatggcacaccgatctcatgagatccattcaggccgatactccttattgttgcctcgcgttgtggtgtgcaccatgtgtgtcttaccttcttcgcaaacgagctctctatgatgatatgtcaaggtacacatgttgtgctggctacatgcctngcagtggtaggtgtg

SEQ ID NO: 32087 - DNA, 268 bp, Glycine max
  unsure (1)..(268): unsure at all n locations; Clone ID: 701104856H1
aattaaactacatagaaaaataaaaccaaacctttcttcctactactcccattgcccacatttcgacaacatcngacgangacttcgacatgnccgacggcggaggcaatgggcgaggacttcgacttcgccggcgccaccggnggcgacctccgacgggcagcagcagcaaccccatcttgaaggtcggcgaggagaacgagattngaaaagagggtttgaagaagaaantatttaaagangtgaggntgggacactctgaattggt

SEQ ID NO: 32088 - DNA, 256 bp, Glycine max
  unsure (1)..(256): unsure at all n locations; Clone ID: 701104857H1
gcacaagacagngtagtacagattactaccantggctaccaaggtttacattgnctattattctacgtatggacatgttgagaagctagntanagagatagnaaaaggggctgttctgtgnagggagtagangcaaaactgtggcaggtacctgaaacattgcctgangaantccttgctaanttgggagcacctcnaagganngatgttccanttattnccccnatgantnccnggngntgatggtttttgtttg

SEQ ID NO: 32089 - DNA, 269 bp, Glycine max
  unsure (1)..(269): unsure at all n locations; Clone ID: 701104860H1
atgcagtgttgattaccatccccaaaagcagcacatacttgttactgcagaacatgagtctgggatacacatttgggatctaagaaaacctaaagttcccatccaagagcttccaggacatactcattggacttggactgtcaagtgtaacccagagtatgatggaatgatcttgagtgctggtacggattcaactgtcaacttgtggcttgcctcaacaaatcatgatgagttaacaatganagacaagtcgattcatctgcccgatg

SEQ ID NO: 32090 - DNA, 258 bp, Glycine max
  unsure (1)..(258): unsure at all n locations; Clone ID: 701104861H1
agagaagttaacaaccaatggccaaccatgcatnncgttnttcactcattccactgtgctgcttnactgcatcctcttcctacntgcctacccattttcacanccttgtacttcgcgcctttcgttctcttcttccctttnctncgnctcctcttntctatgantttntncntctttttnatcatanacttcttcaaattgtacacactttgccatcatgtgccttcagcatcagtgccagcgncgccgagaagaaga

SEQ ID NO: 32091 - DNA, 264 bp, Glycine max
  unsure (1)..(264): unsure at all n locations; Clone ID: 701104862H1
cacacccaacattctcacaagtcacagccaaacaccattnccattaattcttgcagaatattgcttagttttgttttatctgaatttggaaacagcttttgaatggctttttcaagagttgcactgctaatatgcacggtcgggnattttgtgattgcctctgccggcnatttccaccaagattttgatancacatggggagatggtcgggctaagatactcaacaatggagagcttctcactntgtcattgacaaagcctctg

SEQ ID NO: 32092 - DNA, 273 bp, Glycine max
  unsure (1)..(273): unsure at all n locations; Clone ID: 701104863H1
ctgttacgagcccatcaagcagattattaacacttgtatgaatgatcagaaggataagctgtggcctatgctgcaaaagcttggggtcaccatgaaatctnaggagaaggacctaatgggcaaagcattgatgaagcgtgtcatgcaaacctggcttccagcaagtagtgcattactggaaatgatgatatttcatctaccctctccatcaacagcccagaagtatcgtgtggagantcccatgagggncccctgaggtcanaacncgggnaa

SEQ ID NO: 32093 - DNA, 269 bp, Glycine max
  unsure (1)..(269): unsure at all n locations; Clone ID: 701104864H1
aagaaaatcctcacccattttcttcgtagccaaacactctgatattctcagttatgtcgtggcaagcgtatgtggatgatcacctactgtgtgaaatcgaaggtaaccacctcactcacgccgctatcatcggccaagacggaagcgtttgggctcagagcaccaattcctcagttcaaacctgaggaataactgcnatcaataatgatttatgagccggatnattgttcaactggttgtatatcggtggnacaaatanaggtntcnng

SEQ ID NO: 32094 - DNA, 272 bp, Glycine max
  unsure (1)..(272): unsure at all n locations; Clone ID: 701104865H1
gacaccgcaattcgtngcgcgattattctcgcgaantttacggttattcccgngangaggggttactgngggaacaagattgggaagccccacaccgttccgtgcaaggttaccgggaagtgtgggtccgttaccgttaggatggttcccgcgcctaggggttccgggattgtggcggctanggttcccaagaaggtgctgcagtttgctggtattgatgatgttttcacctcctccaggggatccaccaagacccttggcaattcgttaag

SEQ ID NO: 32095 - DNA, 274 bp, Glycine max
  unsure (1)..(274): unsure at all n locations; Clone ID: 701104866H1
gggatttaaatttaatcattatgtctgtttcttcaatnggaatcacgaacaacatggaagtnagaattccggcaaagggtttctcgcggaatgntccctatcctcgctctccacaccttcagcgngtattaccgctncgaccacaaacctccggtcacngncgcnctcatcgccgcnaacaccntcatntacntccgnccctcnttcctcgaaaccctnattccccccatcgnanaagtctggntcaaccctnactcntcctcaagaacaanga

SEQ ID NO: 32096 - DNA, 266 bp, Glycine max
  unsure (1)..(266): unsure at all n locations; Clone ID: 701104867H1
tnaaaacccagttttgagagggtaatatttnagaattgagggaaccttgttagaagggacattttctgggcaaaggtggttaataatgttgattaggattgaggtaagttaatccatccaaagggtgacggagttaacaggaagagacaggacaaaggctgggaacaggcagggcacgaatggagctatcaacagaaaatggtgaagtgagaatgaaaggagagaganagagagagatctgttgtggctacgctcatgcactgccc

SEQ ID NO: 32097 - DNA, 263 bp, Glycine max
  unsure (1)..(263): unsure at all n locations; Clone ID: 701104871H1
gtctttcttcctttgtaatanaaagcacgcgtttctctctgctgcnctctctcaacgaatatntgtgtacttcctgcttttgtgggtagattcaatttnccatgtcgagttcatcggaatactctcaattttccggccagaaaccggcgaggtcgncgagaaatcgagcttctctcaganttgtagcctgtngngtcaatacatcaaggagaagggtagcttcggagatcttaccctcggaatgacntcatgtgggtcgcctg

SEQ ID NO: 32098 - DNA, 262 bp, Glycine max
  unsure (1)..(262): unsure at all n locations; Clone ID: 701104872H1
cctanaacgattcgtctcttcccaaacacaaatcgtgattcgaagctaactggaagggtggccatctggcaaatcatccgaaacaaaaggagtggagaacgaaataaccaaaaaaantacaaatatntanataattaaagnagcctcganccacaaaatggcagagcgtgtgtnactcctcantccatntcagtctcatcactctccaaccacaatggctgtcttgggnggcgcgctnccgctcgcatcattcnctccgtct

SEQ ID NO: 32099 - DNA, 269 bp, Glycine max
  unsure (1)..(269): unsure at all n locations; Clone ID: 701104873H1
cttcctngttgtgttctgttctgtntcgtgtgtacagctntttctnntctctctttncttctnccaagcgattcattcaattttcaattcgnttcgatcncattcntgcttctncattctgcgattcctnccctnctcaacaantattatatncatgcatcttggactacntctnctcancanccacctagggtttctctccgacgttaggttttattntncgatnctcgncgggatattgggggcagatgaatctccggcagctatgg

SEQ ID NO: 32100 - DNA, 267 bp, Glycine max
  unsure (1)..(267): unsure at all n locations; Clone ID: 701104874H1
ataatttctgaggctgaggaaagtgagttaggatagccccagaaataganactcgaagttactccacttactcaactaccaccancnccaccgtgttctgatattcncccaaccaaacncagtcactcttaaaaaaataattaaactttatgcaaatgcaaagcatgtccaccnaccntggcttcgttttntcctccggcccatttntcagccgcactncttcnncgaaactccgncntgtctacaagaacnncntttcttctctct

SEQ ID NO: 32101 - DNA, 264 bp, Glycine max
  Clone ID: 701104875H1
gaaaaatcaaaaatcagtttttttgagtggataacatcatttgtaatgtcatcacgaaacattagcttcattttgggtgagggatctaatccagtgtattgattactctgttcttgtgctgttctatacattttatgtcatatcctccctattcctgtgaactatgcattcatagttgtcataaaaatacaatgagcataatcctaagttcagcctttttggtcaaaattgcagctgctttgtgcagctgtctacttcctgaaa

SEQ ID NO: 32102 - DNA, 267 bp, Glycine max
  Clone ID: 701104877H1
caaatttctgccctatcaactttcgatggtaggatagtggcctaccatggtggtgacgggtgacggagaattagggttcgattccggagagggagcctgagaaacggctaccacatccaaggaaggcagcaggcgcgcaaattacccaatcctgacacggggaggtagtgacaataaataacaataccgggctcattgagtctggtaattggaatgagtacaatctaaatcccttaacgaggatccattggagggcaagtctggtgc

SEQ ID NO: 32103 - DNA, 271 bp, Glycine max
  Clone ID: 701104878H1
agaatctcagctgcagtaaacaacgaccatgaaactaatgacagcaacaacaacgtttgatgtctctgccacatgcttccgtgcccctcctccttcgtgctcaatgaatccatgccacaccagtttttcagttataaactccctgaatcctcacaagggacgacggataagcgttgctgttccacccaagtttccaaacttccggagggaagcatctctgcaggggaatttggaggctattagagtcccaacttcggtgcctgtgcgtgta

SEQ ID NO: 32104 - DNA, 270 bp, Glycine max
  unsure (1)..(270): unsure at all n locations; Clone ID: 701104879H1
gttcctggtctttacgaggtanctgaggacatnattacattctaacaccanacattcctgttatttgctttctctcctgcgttcttcttcaatgcaactctattctgttcggtgacacaacatcactctgaagaacgtcgcacgcaccacccttctctctcttcaacaactcagctctcagaacagatanagtttccactgagtaaatcgcaatgcaggtaactgagangaggattcncaagtgaggngggttnaattancngggtggga

SEQ ID NO: 32105 - DNA, 262 bp, Glycine max
  unsure (1)..(262): unsure at all n locations; Clone ID: 701104880H1
ctataagctagtttatcgtgaggagaattcgaagttgtttgttttctttgttnctgcagtagttttggtagcatggccatgccatggcgcaggctaccaaaggttccctctccgaatgaaaactggctatggtgagcgttcttcggaggtaaaatgcgcaagttttaggcttgctgtggaagcacacaacatccgagttttaaaaccattcctgaagagtgcgtgaancaacaaanganacattatgncgacaattngntng

SEQ ID NO: 32106 - DNA, 270 bp, Glycine max
  Clone ID: 701104881H1
aagatctcccatcaaacttgtctgcaataagagactatattgagaacatgaatgcatcaaaatcttctgaagtttgtgagcagaatacgaattcagggcaacaaattgtttcatcaggctctcaaaaagatgacaactctggttcaactgaggaagttcctcattgcgacgttcgatgttcatctcagcaaagatctaaagtgccaggctacagaggaatattaaagtatagaatctgaactactgaattcatgcagaacatggacagga

SEQ ID NO: 32107 - DNA, 167 bp, Glycine max
  unsure (1)..(167): unsure at all n locations; Clone ID: 701104882H1
agcgctncatctctgaatttcaggatgggnacgtccanaanagcaganccctngaanaacgacgncgnacttcttnggnacgcagaaactggagnannatcttcaaatcgctggttcagatggtgtgcacccagcagnnncagcnacactccntcgtnagtcgccac

SEQ ID NO: 32108 - DNA, 266 bp, Glycine max
  unsure (1)..(266): unsure at all n locations; Clone ID: 701104883H1
gtcatcacaatggggttcctcgtgcaatttgttgtttttatgttattcccttggtttctgagtgtgagagctgaggaaaattactcatcacagcattgtgattttccagccatattcaactttggtgactccaattcggatactggttgcatggctgcagcattttaccctgaggttttgccatatggtgaaactttcttccatgagccagttggtagagcttctgatggtcgccttatcataganttcattgcccagcatctagg

SEQ ID NO: 32109 - DNA, 265 bp, Glycine max
  unsure (1)..(265): unsure at all n locations; Clone ID: 701104884H1
acaaaatcacaacacacacaaatcttctttttaacatttatcatcgtatctgaaactaccaactatcgatggccccttcattcgacacaagtactcacaangtatgcgtgatggatgcttcgggtcacttgggcttcagccttgtccaaagactcctccaaaggggatacactgttcatgcctccgttcaaaaatatggcgaagaaaacctattcactggaatttcatccgatcccgataagcttaaggtttttcgatctgaccc

SEQ ID NO: 32110 - DNA, 266 bp, Glycine max
  Clone ID: 701104885H1
ggtcatttggtataacggcacttgaacttgctcatggtcatgccccattttccaagtatccacctatgaaagttttgcttatgactttacaaaatgcccctcctggtcttgattatgaaagagacaagagattttcaaaggctttcaaagagttggttgccacctgcttagtaaaagatccaaaaaagcgtccaagttcagaaaagcttttaaaacaccacttctttaaacaagcacgtgccagcaatatctagctcgcaccattt

SEQ ID NO: 32111 - DNA, 258 bp, Glycine max
  Clone ID: 701104887H1
gttcttcctattcgagaagctatacacatggagcttgagaaacttttcttagataaggttatagcaaacttgggcctctgcatttctgtctatgatatcagatccattgatggtgggtttatcttccctggtgatggggctccaacctatacggttgtgttcaatttgattatgtttcgtccgtttgagaaggagatcattactgcaaggcttctttcatctgatgctgatggcttacgattaaccatggattcttga

SEQ ID NO: 32112 - DNA, 264 bp, Glycine max
  unsure (1)..(264): unsure at all n locations; Clone ID: 701104888H1
aagcagaaccacgtgctgccttgaacctcgcatcttatggaagtagtcatgctttcaaactagccaaggaagatgttgttttgtattcagctaaggttatccctggtaatgagtctcgtgtaatgaaaatgctaaaccgcatatncggagattggatcaacaattgttatgggaaaaaatgaaggtttgcacacatctggccatgcatatcgtggagaattggaagaaatacttagaatagtgaagccacaacattttcttccc

SEQ ID NO: 32113 - DNA, 264 bp, Glycine max
  unsure (1)..(264): unsure at all n locations; Clone ID: 701104890H1
agtatttttcaagtaacttaaggtttcaaacctaggaagttggaagtcatggcagcaacattgatggcagcaacaagttctggcacttcttaaagcaactcctttcctaggccaaggcaagggtgcccaatgccaatgctcttagggatgttgttncnatgggaaccgggaataccccatgggcaatgnttgtggnttggncnaaacagggnnaaatccttgggcccctttnaaggtnnagaccccttaatntngaaggggntt

SEQ ID NO: 32114 - DNA, 261 bp, Glycine max
  unsure (1)..(261): unsure at all n locations; Clone ID: 701104891H1
ttcacatnattctaaacccattctgaaacccctcacattatttcctnccaaccancgcttcgnatagcatgcaaagctatcatctaggttttcttcctcttctactgccctcactgcaaacccactattacccacaagactctctccaattccctcttcatcgttccgaccattcaccaatggcttggaattggaggcaacatgggtgtccccgaggcaatcaagnngatcaaatnacgcttggaggcangggaggacngt

SEQ ID NO: 32115 - DNA, 268 bp, Glycine max
  unsure (1)..(268): unsure at all n locations; Clone ID: 701104892H1
aatcattcagctttttaaataaataaatttcctttctccctcacaatcacaatgcnnnnnnnnnnnnnnnnnnnnnnnnnnnnnaatactataatttgttacgtcacggagcccaaatgtctgttacggagctcaaagagcgtcactccgctgccaccgacaccgtcaacaatctcagacaccgtttaaagcagaagcgcctttcgttgctcgacacagatgtttctgggtatgcaaggtctcagggtagaacacctgtgacctttgg

SEQ ID NO: 32116 - DNA, 267 bp, Glycine max
  unsure (1)..(267): unsure at all n locations; Clone ID: 701104893H1
acaacatgaatntnctnaccttcgttactgttctantcttcatactacntcnnnacctcntntcnnngtatttggggcacaacattctcactcatcgnaagatattcctaaaaanagacaacattattacctcgtacgctgtcatctttgacggtggtagcacaggaacccgtgtgcatgtctccattttgaccagaatnggatctccttcccantggtgatagtcttgagcttaatnaaaagntcacanccggtttaagtgcttag

SEQ ID NO: 32117 - DNA, 271 bp, Glycine max
  unsure (1)..(271): unsure at all n locations; Clone ID: 701104894H1
cttcaaatggaaaagctccatgcttctgtgctcgcccttgncattccttcttgtcatactatttcaggaaggattggtaacatgtatgaagaatgaagacggatcagaagaatggggatatgtgcaagttagaccaaaagcccacttgttctggtggctttacagaagtccncacagagtggagaatccctccaagccttggccaatcattctctggcttcagggaggaccaggctcttcaggagttgggtttggaaatttggagaggttg

SEQ ID NO: 32118 - DNA, 269 bp, Glycine max
  unsure (1)..(269): unsure at all n locations; Clone ID: 701104895H1
ctgggaaagnattcactanttaactgtgccaagaccagtntgtcctcanagttgatagctgntnnntagtgacttctttgnnantttggttgtagatgcagtgcaagctgtaaagatgaccaatgctcgaggtgnagttaantacccnatcaagggaatcantatcttgaaagctcatggnanaagtgctagagacagctttctgangaangnttagctcnagtacggcgntgntgtcagggangcttcnnggngnccnncnnaatggc

SEQ ID NO: 32119 - DNA, 280 bp, Glycine max
  Clone ID: 701104896H1
gggcaaatcaaagttttgaaccttggttcaatatctagagtccctgcaagctcaacacattcagagataatcaaaatgcatcctgcgcagatcgttttgtatggatcaactttatgtgtcatgataacagtgcacttctccatgaagctactcgctgaacatgttttgaactggaagaaaccaaaggagcaaaaggccatagtaattataatccttatggccccattgtacgctgtggactcctatgttggtttgataaatttcttggaagtgaagcatt

SEQ ID NO: 32120 - DNA, 273 bp, Glycine max
  Clone ID: 701104901H1
cccaaaggtccttccggggcttggactgtcaaagccgccacacgttgttgcccccaaatacactgcgataaagcctctgggagatagagtgctaataaaaattaaggaagcagaggagaaaactgagggtgggattttgcttccatcaactgctcaaacgaagcctcaagggggtgaggtggttgctgttggggaaggaaagacagttgggaagaacaatgtagagattgtgtgaagactggtgcacaagttgtgtattcgaatatgcaggta

SEQ ID NO: 32121 - DNA, 286 bp, Glycine max
  unsure (1)..(286): unsure at all n locations; Clone ID: 701104903H1
cttcactctcagttctgccacatattaacattccggcgcaaaatganggtcatcgccgcctacttgctcgccgttttgggaggcaacgcagccccttccgccgatgacttgagggacatccttggctccgttggagctgacgcgaacgatgacaacatcagcaacttcttgtctgaagttaagggcaaagacattgtggagcttatcgcctccggtagggaaaagctggcctccgtgccttctgcggtggcgccgccgttgctgttgctgccgctcccggcggtgg

SEQ ID NO: 32122 - DNA, 278 bp, Glycine max
  unsure (1)..(278): unsure at all n locations; Clone ID: 701104904H1
ccgaagaagagaaaaaagagacaaggaccgtcttgagttaatttgattcagtgtancagccagcagccataagcaacgcaacaattccatttccagtttctgattcgtcacgtcagacaaaggaaggggttagggtgtgacctgagatcaaaatgttgcggaggcttctctcttctcacctcaaaaccctannnnnnnnnnnnnnnnnnnnnnnnnngccactccccgatctgttccgctcgccagattcgcgctctctctcgctctggctctattct

SEQ ID NO: 32123 - DNA, 279 bp, Glycine max
  unsure (1)..(279): unsure at all n locations; Clone ID: 701104905H1
agaggggattccaccagaccagcagaggcttatctttgctgggaagcagctggaagatggtcgtactcttgctgattataatatccagaaggagtccactctgcatttggtgttgaggcttcntggaggtatgcagatatttgtgaagactctgacagggaagaccattaccttggaggtggaaagctctgatactattgacaatgtgaaagctaagantcggacaaggnaggtatcctccagatcagcagaggctcattttgctgggaagcaattgga

SEQ ID NO: 32124 - DNA, 129 bp, Glycine max
  unsure (1)..(129): unsure at all n locations; Clone ID: 701104907H1
ttttgtttatttganattaacaagtagcaaagatgtttggnatcatcggaggaaacaagggtcacaagataaaggggaacttggtgattatgcgaaagaatgtgttggatatcaacagcattaccagtg

SEQ ID NO: 32125 - DNA, 263 bp, Glycine max
  unsure (1)..(263): unsure at all n locations; Clone ID: 701104909H1
attctttcagcctcccttcaacacacttttngnttntcatacttccaagtctccaaatcgaacgctcgaagacctgcgaagaacaaagggttgtttaaattctgtgtggttgttgttggaggttgaaatacaagttgccgcctcaagtgtgtgttaatcttaaatttcacaagcaagttgtatttttggagtattgtattntatgaccaaatattttagtgtttaggactagatattttgcttctggtggcaattttctcttc

SEQ ID NO: 32126 - DNA, 285 bp, Glycine max
  Clone ID: 701104910H1
gccttttttgtgctcttcacctttcactccaccggaatcaaaagcaagtgctaagaagttccgtgttcctattctcaaacctgtagcaccaaacccaagttgtcatccaagttttataatactacatatattattattatacgatacataacaatagtattaatattgttgtgattgtgtgtgatttttggtgtagtccttttttcttatattaaggtggtacggagcttatatgtgttgatcaattcgtcgacaagaaaccttagtttgatatttgattggttc

SEQ ID NO: 32127 - DNA, 284 bp, Glycine max
  Clone ID: 701104911H1
ccaatgagccatttggaatcaattgcttcctctgcggttcgggcagctatcaaggttaaggcctctgttattatttgcttcacttcatctggaagagctgcaagattgattgctaagtacagaccaaccatgcctgtgatatctgttgtcattcctcaattgaagacaaatcaactccgatggacgttcaccggtgcttttgaggctaggcaatctcttattgtgagaggtctttttcctagctggcagatccacgacacccagctgagtccagaagtggaaca

SEQ ID NO: 32128 - DNA, 285 bp, Glycine max
  Clone ID: 701104912H1
tctttgggaataaaagctgcaaatggagttgtcattgccaccgagaagaaattgccatctatattggttgatgaaacatcagtccagaaaattcagttattaacaccaaatataggtgtcgtatatagtggcatgggtcccgattttcgagttttggttcgaaaaagcaggaaacaagctgagcagtatcatcggttatataaagaacccattcctgtcactcaacttgttagggaagttgcgctgtaatgcaggaatttactcagtctggtggtgttaggcctt

SEQ ID NO: 32129 - DNA, 289 bp, Glycine max
  unsure (1)..(289): unsure at all n locations; Clone ID: 701104913H1
cttcttcgagtttcacagccaagtcgtaaaagggtttcaagggatncgaaaacatgcagagcttctggcaattgggtgatgaactccgtgggcactcaaaagcatcggaggatcacaagtggttaatggttgcctcgaaactggccgaacagacaagattgaagggggagcgtgtgaacaaccttgatctttcaaagggacccattgaaacaaggtcaagggataaatttgggttccaggaagaaacaaatttgattctcttaacttgagcatgttgaacctggactct

SEQ ID NO: 32130 - DNA, 270 bp, Glycine max
  Clone ID: 701104916H1
tatgcccttcccttaaaattatgtactggcagccaaggaaaattaccatcacagctagcagcccccactcaagatacactgatcccaaggttttggtctcaagaacctaccagggaacatgttttgctgggcctcgattggaaaatggacagaactgtagctggtggatggtggatcttggccaagatcatcaggtacgcaatatgccgattgtttgtgtttccaagattttatattagtactcgcttttgatcagcatttgagcagtgg

SEQ ID NO: 32131 - DNA, 284 bp, Glycine max
  unsure (1)..(284): unsure at all n locations; Clone ID: 701104917H1
tcgctctcttttctgcaattttcttttttgttccttctctgcggttatctttttgagcttcaatggcggacgtgaaaccttcgctttccaggctgagatcaaccagcttctcagcctcatcatcaacaccttctacagcaacaaggagcnnttcttgcgtgaactcatcagcaacgcttctgatgctttggataagattcgatttgagagtttaaccgacaagagcaagctcgatgctcagcagagctcttcattcgtctgtgnccgacaaggccaacaagatc

SEQ ID NO: 32132 - DNA, 282 bp, Glycine max
  unsure (1)..(282): unsure at all n locations; Clone ID: 701104918H1
ctcttctcggagcttggcnttgcttatcgattctctctcctctcgnttctctaattccaaggtttgtaaaagatggcagatgccgaggatattcaaccccttgtttgcgacaatggaactggaatggtcaaggcaggatttgctggtgacgatgctcctagggctgtctttcccagtattgttggccgacctcgacatactggtgttatggttgggatgggtcaaaaggatgcctatgtggtgatgaagcccaatccaaaagaggtattcttactctcaagt

SEQ ID NO: 32133 - DNA, 255 bp, Glycine max
  unsure (1)..(255): unsure at all n locations; Clone ID: 701104919H1
actctacaacnacnanactaagtngttggttttggtttagtttcatttttttgaagctcttaaacttaaggcttaagccatggcatcctcatcctctctgcatctatctcaggccctctggcacgtgctgtgtaccttcatggctcttcttcttctgaccgngtctcactctccttcccatcattctctggcctcaagtcacattctgcatgctcaatatgctctccttcaccttgctggctatgacatgttcag

SEQ ID NO: 32134 - DNA, 277 bp, Glycine max
  unsure (1)..(277): unsure at all n locations; Clone ID: 701104920H1
caaacaccaccacccattgatcggtttttgcttcatccaaactcaatgggtgccgacgaagactacgattacttgttcaagctggtcctcatcggagattcgggtgttggcaagtccaacctcntgtcccgattcacccgaaacgagttcagcttggagaccaaatccaccatcggcgtcgaattcgccacgcgaagttccccgttgatagcaagctcgtcaagggaacaattngggacattgcaggcnaggaagttancgggnatacagtggcntc

SEQ ID NO: 32135 - DNA, 277 bp, Glycine max
  unsure (1)..(277): unsure at all n locations; Clone ID: 701104921H1
gaagtgacatttctagagcaacaactgattatngcttccgaccaagcagcaacaacagtccctttggattgttgggaggacaacgagaaaaaacgtgtagtcttggcggaagcaagtggagacttcatagatgttctctttagtttcctcactcttccattggnaactatcgtccggcttgggancaattttcaactatcagtagagatgggcngcatcaagaaactgtacgaggtgtgcaaaatttgggatctgatgttttctggaacgacatctg

SEQ ID NO: 32136 - DNA, 275 bp, Glycine max
  Clone ID: 701104923H1
tccatagaggaactccttgtttccgtggatatggaaggcgcaatggagagcgtagaaggaagtctgttcgtggttgcattgtcagcccagatctctctgttttgaacctggtaattgtgaagaagggtgagagtgatttgccaggtctcactgatgttgagaagccaaggatgaggggtcctaagagagcatccaaaatccgtaagctgttcaacctgtccaaggaggacgagtgagaaagtatgttaacacataccgtcgaaccttacaacaaa

SEQ ID NO: 32137 - DNA, 280 bp, Glycine max
  unsure (1)..(280): unsure at all n locations; Clone ID: 701104924H1
taggaaatagctttcctcggttataaccttcaaggtggaaagaaaaacccacccactatcccaattccaataaataccttcctctctatattttcgcacaataccctctcacccttcaacgatgagttactacaatcagcagcnaccacccgtcggtgttcctcctccccaaggttacccaccgccggattcttacggaaaggncgcgtaccctccgccagggtacccgccgcaaggngataccctccgcaggcgtatccagcacaggggtacctccacc

SEQ ID NO: 32138 - DNA, 281 bp, Glycine max
  unsure (1)..(281): unsure at all n locations; Clone ID: 701104925H1
tgcaatgacaagncttagttaggttaataaaaanaacattaatatttnctaccttaattcaaaccattcttctgattctgcaaattgttttgtttttgccattgctgccatcaccattctccactaacctaagcancnnttgtcgattggtgaaagagcaattgatgtccgattggaatccaagatgagtttcgtgccaaaggagacaatcgaagtcattgcacagagcatcggcatnccaatttgtcctccgatgttgccctctctctcgctcccgatct

SEQ ID NO: 32139 - DNA, 107 bp, Glycine max
  unsure (1)..(107): unsure at all n locations; Clone ID: 701104927H1
aatttggatccgnctgtttcaaatgaagacntgcgtcaaatatnntggggcttatggagaggtcaaagnagataagggaaactccacacaacatagcgaggnnacng

SEQ ID NO: 32140 - DNA, 265 bp, Glycine max
  unsure (1)..(265): unsure at all n locations; Clone ID: 701104928H1
ctttctcccaggtttttatgagactcgacttgcatattatgcaangaggggtacnaaaggataccgcttttctgccatccctncattattagagtgtgacggtaaatgagaaatagagctatctataccgtgaaaacatagtaatgatcaaattcggttgcaacttgtatgcttcaatggcaaagatggaacaaaatggtagaaaagtgtaatcgtacttgaacttaagtagttaattangtaacaaaatttagaaaaatgatgc

SEQ ID NO: 32141 - DNA, 254 bp, Glycine max
  Clone ID: 701104932H1
gcaatggcgaagaagaaggagaagaaggtacacgtctccggaaaacctaagcactctctcgacgtaaaccgcagcaatgacgcgaagaaggagtcgcgctccgccgccaccgtgcgccgcctcaagatgtacaacaccaggcccgtgcgcgaccggaagggaaaagtcgtatcccacgagcttcagtccaaggagcttcccagcacaagatccaacccgatcgtcgatggttcgggaacacgcgtgttgtgaat

SEQ ID NO: 32142 - DNA, 273 bp, Glycine max
  Clone ID: 701104933H1
gtggattccaatcctaaggaaaatatgttggtacttggttctagcgccctatgatccaatgcagtcaagccttctcaattccaccttggaggataagaatatatctgagattccaaacttcaagttacttttgaaacagctggttaccatggaggttatccaatggaccactctatgggatacatataagagtgattttgagaatgagaaggcctctgggaaatcttggtgaaaaagcagcagaagatctgaggcaaagaataattgagcata

SEQ ID NO: 32143 - DNA, 279 bp, Glycine max
  unsure (1)..(279): unsure at all n locations; Clone ID: 701104934H1
caacaacnttctgcaagtnggaaagatccagagatcgaganatgggaaagagcgtgggggagttgggagtggaggagttggtgaatgcaggaggcctaagagtggaagaaggcaatgaattgtaccatgctttgagggatatcctttctgagtttcagtctccttcacacatatggcgccaaattgtgactcggagactgctcaaaccatcctatccacactccttgcatcagctctctactactctgtttatcactctcaacattcttccctcccact

SEQ ID NO: 32144 - DNA, 275 bp, Glycine max
  unsure (1)..(275): unsure at all n locations; Clone ID: 701104935H1
cttttgactgggccagtgttgccagangaggctgaggggaagttagaagaanattgggccaattggcttgatgcgtttgcgcaatgagtctattgtgtattgtgcatttgggtctcaaatcaatttggagaaagatcaatttcaagagcttttgcttgggtttgagctttcagggttaccctttttggttgctctcaaaactcctagagggtgtgagagtgtggaagaggcatgcctgaggggtttgaagagagggtgaaggggagaggggtggt

SEQ ID NO: 32145 - DNA, 271 bp, Glycine max
  Clone ID: 701104936H1
ttcaccgagaaagtcgtactgattcctcttcatctttcgttaaagcgagtacttttcgttcttgatctgttggttacgatgtcgtattcaaggagatctaggtattctccttctccttctccttctccatacaagcgatacggtcaggtctgtgtccaggtctctctcaatatcaagatccagaagccgttcaaggagtttatcaagagatgcagaaaatccaggaaacaatgtatgtgacaggattgtctctaggattacaagagagaat

SEQ ID NO: 32146 - DNA, 275 bp, Glycine max
  unsure (1)..(275): unsure at all n locations; Clone ID: 701104938H1
ctcactcactgcaacgncgccgganatccgtcgctctcctcctccaccaccaccgcgatgggcgccaattccatgctcgccgagttctctcacgatctcgacgaccagatctcccagctcatgcagtgcaagccactctccgagcaacaggtccgaggtttatgtgagaaggctaaggagattttaacggatgaaagtaatgttcagcctgttaaaagccctgtgacaatntgggcgatattcatgggcagtttcatgatcttgctgaactgttt

SEQ ID NO: 32147 - DNA, 270 bp, Glycine max
  Clone ID: 701104939H1
acgaatctcacagcacactcagatctctcttctctttcttcaattccattgttgtttggttcccttcactctcacaatgcgaatcctcgtcctgctctctctcgccacccttctcctcttctcctccttctctcccaccttctgcgaccacctcgccgacgacgaggacctcagcttcctcgacgagccctccgccgcgccggagcacgaccaccactacggcgccgatgctccaatttcggcgatttgaggattcgaggaggacgacgc

SEQ ID NO: 32148 - DNA, 264 bp, Glycine max
  unsure (1)..(264): unsure at all n locations; Clone ID: 701104940H1
cgaattctcgagaaagcaaagtattttaaatttgtggngaggcttgtaatgcagaatgttgttgccaaccagtggagtagggatgaattctgcaatggatgatatgaatttgattcagcaaacccagaggcatcacttggttgtgagggagattggcgaggagattgatttagaaataggagctggggaggatgacccgtcatttggtaacgctactctgatggtgcaccaatgcgggaatcttctgtagaagaacatggagag

SEQ ID NO: 32149 - DNA, 276 bp, Glycine max
  Clone ID: 701104942H1
cgggtctcttcatgatattttacacggcagaaaaggtgttaaaggagcacagcctggcccagttttgacatgggcacaaagagtaaaaattgccgtaggggcggcaagaggacttgaatacttgcatgagaaggctgatccacacattatccaccgggacatcaagtcaagcaatgtgctaatctttgatgatgatgttgctaaaattgcagattttgatttatcaaatcaggtcctgacatggctgcacgtcttcattctactcgtgtccttgga

SEQ ID NO: 32150 - DNA, 274 bp, Glycine max
  unsure (1)..(274): unsure at all n locations; Clone ID: 701104943H1
actcgaaaaggaaggatgcaaacaaaaaacaaactgacaagtctttganggctttattgancgatcaaggcaaagataaaagtagtgagaaggccaaagcagaacctagtaaggnggagttgcatcgagtggctgttgatattttgaaggaagtagatttcaataaggcaactttatctgacatcctcaggcaacttggtactcactttgacgtggatttaatgcctagaaagcagaggtgaaggatataattacagatgtattaataacatgt

SEQ ID NO: 32151 - DNA, 276 bp, Glycine max
  unsure (1)..(276): unsure at all n locations; Clone ID: 701104944H1
cncaaaagagcactgaccaaaccattttattttatttttgaatcaagggtgagggccttccatggcttccgcttgtgcttcctctgcaattacagctcttgccatctctacgccgagttccgggcagaagaatggatcaggaggttgttttcttagtggaaggaaattgagggtgaaaaaggagagagcagcaattggaggacgatcgatgggcactacagtgtgcgcattgtgagcctgacagacctctncggttcccaggcagcacccctcctc

SEQ ID NO: 32152 - DNA, 279 bp, Glycine max
  Clone ID: 701104945H1
tgaccccaatatacttagccatatctttacttcccaaaacttgctctacaatgagtttccttcgttcttttgcaagaaacaaggatatatcaaaagtaggacgcagaggtatccattgcatgcagaaactatgtgcagaaaaaatatctcctgattcactagagaaggcccaaaatcgtgtgatagatgctgcactcacacttgttcgagaaaatacaaggcttaagaaagaactgtgcatagtttgggaggtgctgtggcaacttcaactcttcttgg

SEQ ID NO: 32153 - DNA, 273 bp, Glycine max
  unsure (1)..(273): unsure at all n locations; Clone ID: 701104947H1
acttcgcttccccttaattcccaaccttacattattaacttcaccaactcatanccctctaccaaacaaaacgacncancaaaaccctacgtctaaaaccctctctctgtctcccttccttctcatcttcaccaccaccaatggcgtcgccgccgccaccaccttctnnnnnnnnnnnnnnnnnnnnnnncgtcgccgccacggcttcctccctcacctgcaccacccaaagctcacggactccaagaacaacctctactccaatgcctggac

SEQ ID NO: 32154 - DNA, 283 bp, Glycine max
  unsure (1)..(283): unsure at all n locations; Clone ID: 701104948H1
aatggctgaaaagcctgaaatcctttatttaaagtcagttgccatttactaagtgatcatncatgattttnttaaaatgaccatccaagtattttactaattcagtaactccaaaatggaggtttgtgtatcttgattgagcatggtatgcaccaaacccagttgtttcagggtacatcatgtcaacaaatatagctgaatgtgcatgcatcattacaacctctttgagaatttagaagaagcctagagtgaccctagaaccacatgttaatggcacctagtt

SEQ ID NO: 32155 - DNA, 277 bp, Glycine max
  unsure (1)..(277): unsure at all n locations; Clone ID: 701104949H1
cttacatctatcactacaatacttcaataaaaatggaaactatcannccaagaaagcggtatgatcaagggtgttgaagtcctcttcttcgaagaagccgagatccaaaagatgagaggcaacacccccatcttcgctgccatgggtcccctcagcgtcctctacttcaaggactacaacagatttgtcctcagactcaacgattggagatatcccctcctcagaagactcaacattctggctctgacaagaatttgtnctccccggtgccaaggtg

SEQ ID NO: 32156 - DNA, 272 bp, Glycine max
  unsure (1)..(272): unsure at all n locations; Clone ID: 701104950H1
cgagggaatcaaacaaaccttgtactactatttatcttcatcctcattnttgnccgtcgtcgttctncctttttccgtttttcatctggttcttctctcagaaaaagctcgccaatcgatcttgctctcttctacgcttttcgaattgctttcattccattatggacgcagattagattcgcactcacattcccttctccncgatttgttcaaactctctgctctgagattgatcgcattttcatcagaaaggaaactcgtgtgactgattt

SEQ ID NO: 32157 - DNA, 270 bp, Glycine max
  unsure (1)..(270): unsure at all n locations; Clone ID: 701104952H1
ctttttctcaancaaaaggggttcaattctagctagttctattacatcgtccgcnaccatgaacatggcgatcgtgcttctgttcatggttttcgcagtttcatcagctttagacatgtcaataatatcacatgacaacgctcatgcggatagggccacgaggcgcaccgacgacgaggtgatgtcaatgttcgaggagtggctggtgaaacacgacaaggtgtacaagcgctcggtgagaaggagaagaggtttcaaatcttcaagaac

SEQ ID NO: 32158 - DNA, 270 bp, Glycine max
  unsure (1)..(270): unsure at all n locations; Clone ID: 701104953H1
cnaaaactcatttataccatcctttgatgatatctcctatagtatttcaaatgccagtnatagcttgcatgctcacaaacatgacaatatctatattattccgactgtgaaaaactacagtaattatgaaacattacttctatttactataccgtgtccttaaaatgctgacatcttttttagatttgacttttttatgtaacttctcagggaagaaaccttcaatactttccaactaagctccatccacggactgtagtgcataactgg

SEQ ID NO: 32159 - DNA, 263 bp, Glycine max
  unsure (1)..(263): unsure at all n locations; Clone ID: 701104954H1
gacagcacttactagtccaacagcgacggctgaacctctttgttctctctgtntnnnnnnnnnnnnnnnnnnnnnnnnnnnnnnnnnnntcaaatatccttgagccagacatgtacaggaacgctgcttcacgtcttagggtcatcagtgcccgttcgtgcagcagcagcaggatacctgccagtgccagatttgcaagttccgttgccacacaacaatctctncctggtttgggtgcctttatttggatggctcactggaga

SEQ ID NO: 32160 - DNA, 266 bp, Glycine max
  Clone ID: 701104955H1
ccagaagtcattcttcgttgcatgcaagtttctgtttctcttatgggatcgggagtcctgcctgattgtcatgatactttgatagaactggttggcagtcctgaaaccgactttcttcatttgtttagtcaacagcaattacaggagtttttattgtttgagagggaatactcaatctgcaaaatggagattacagaggagtgattattgcccctgagctgagcttgttcggtgttctctggagcttaaattttgaaaggatgtaa

SEQ ID NO: 32161 - DNA, 271 bp, Glycine max
  unsure (1)..(271): unsure at all n locations; Clone ID: 701104956H1
tggaatgtcccttccttaatacccctcaaagaaaagccaccttaacatctcttctctgaaaattctctttagagagatagagagaggaagaaagaatggcagcttgcactgtctactcaacacaatntcngagctnaaattgctccatctcaaccccatcaaagacgcaactcagttttttccaccaaaagcaggtantttctggaggaacagcaagaagggcagctgagcagcagaagaagctatgtgntaacatgtgcagcaggtgact

SEQ ID NO: 32162 - DNA, 273 bp, Glycine max
  unsure (1)..(273): unsure at all n locations; Clone ID: 701104957H1
caaaattttctgttcgatctcaaccaaggttgttccttccaccgccatgagtttcntcttcggaaagcgaaaaacacccgcagagcttctgcgggaaaataagaggatgctggacaaatcaatcagagaaattgagcgcgagcgncaaggcttgcaaacgcaagagaagaaattgattgcggagataaagaaaagtgccaaacagggccagatgggagctgttagagntaggcaaaagatcttgttagaacaaggcatcaggttgagaaattt

SEQ ID NO: 32163 - DNA, 270 bp, Glycine max
  unsure (1)..(270): unsure at all n locations; Clone ID: 701104958H1
cgagccggtatcangtgcgcacagttgnttccggtgaagaagagaaggattgatttgaaggntttagtggctcgtcgtgcaagatggagctggggcttgaatgctcggcttgaggactagtggctcggctcagttttgactcatcggctttctgtgnntgatataagagaacagaagtacagaaccgnnnnnnnnnnnnnnnnnnnnnnnnnnnnnnnnngtaatttggttattgttaacccctttgtgaatgcggtgctgtacaacagt

SEQ ID NO: 32164 - DNA, 272 bp, Glycine max
  unsure (1)..(272): unsure at all n locations; Clone ID: 701104960H1
cttttataattcgatgtgtgaattttttttaatgattggnattcaccgnagttgaatcaactgcagagaaccctgatcactggggaagattggattactttgaataattgtagttttttagatatgttttggcaagtcacgtaggtatttattgagtaactgtacatcacatgacataacttaaattttgatgagtttcagtcggtcttgttgaaataaggtaacagaacacacttcctgtaactataagtnatgatttgtataagctctgc

SEQ ID NO: 32165 - DNA, 275 bp, Glycine max
  Clone ID: 701104961H1
ggcttatttctctttcaccagaaacatcttacaagggaaacctatcaccgtttaccgcggtaaaaaccatgttcgacctggccagggatttcacctacattgatgatattgtcaagggttgcgtcgggtcgttggatacttcggccaagagtaccgggtcgggtgggaagaaacggggacccgctccgtatagaatatttaacctggggaacacgtcgccggttactgttccactcttgtcagtatattggagcgccattgaaggtgaaggccaa

SEQ ID NO: 32166 - DNA, 276 bp, Glycine max
  unsure (1)..(276): unsure at all n locations; Clone ID: 701104962H1
cnaatgactcaagcccagattcaaccagttaaacttggaacccaaggctttgaggtttcaaaattgggattcggatgtatgggccttactggagcgtacaatgaccctctccaagaacaggatggcatatctgttatcaagtatgcgttcagtaagggaatcacattttttgatactgcggatgtttatggagccaatgctaatgaacttttggttggaaaggcttgaagcnctgcccagagaaaagattcagatagccacaaaatttggtattgc

SEQ ID NO: 32167 - DNA, 263 bp, Glycine max
  unsure (1)..(263): unsure at all n locations; Clone ID: 701104964H1
gctcgtaaacgacgcgaacttcgaacngctcctccaccgggacnctccctccaggccatggaactccagccacgtcgccctcgttgcgctcctcctccggtccgagggctttgagcactaccgctgcgaccgcaatacctccatgggcatgaacctcaacaacatggccaagatgctcaagtgcgccggcaatgacgacatcataaccatcaaggccgcgacggcagcgacaccgtcactttcatgttcgaaagccctacaca

SEQ ID NO: 32168 - DNA, 274 bp, Glycine max
  unsure (1)..(274): unsure at all n locations; Clone ID: 701104965H1
ccggcactcacactgttctcaattcaatcggtcatgctcgcattgcattttcgcccttgctttcctcttcccttccatcgctccctaacagttagggtttcctctctcctctcttttcctctttctctctcctccgccgncccctctccgcgccatgtcgaagcccccctccgccttcgatgccctcatgtnnnnnnnnnnnnnnnnnnnnnnnnnnaagaaaaaatcccaaccctttcccaatcatcaccctcatcccccaagaaagcaaaac

SEQ ID NO: 32169 - DNA, 266 bp, Glycine max
  Clone ID: 701104967H1
cggttcgcagagaggcagcaaaacgctaaagccctaaacccccatattgagctttctccctctctctccgtcttcgatggcaacatctcttctgaaaactccgctcaatgtgttcaacagacaccacaatcacgtcgcattcttctccaatggcacaagtgcaagaagcagtgctccaatttcgcagaagaggagatcgcgtccattccccgtagtgtcaatggatccacaccggttcaaattctctcgaaaaaactgaactttcg

SEQ ID NO: 32170 - DNA, 69 bp, Glycine max
  unsure (1)..(69): unsure at all n locations; Clone ID: 701104968H1
cgctgttctctcccatcctttcgcatannctcaatacccttttgnnttgtgaaaggaaagcaaacatgg

SEQ ID NO: 32171 - DNA, 264 bp, Glycine max
  Clone ID: 701104969H1
tttgttgtttcccttcatctattttttcttcgcccccttttgtgtttctttttttggttgtttgttctttcttctcgttcgtcgctttgtgatctctctctgcaaccatgtccgccgagaaagagagagagacccaggtttacttggccaagcttgccgagcaggccgagagatacgaagaaatggttgagtgtatgaagaaagtagcaaaacttgatcttgtctaactgtggaagaaaggaacctcctctcagtgggatacaa

SEQ ID NO: 32172 - DNA, 264 bp, Glycine max
  Clone ID: 701104971H1
gttgaccgtactttagacagtaaagctttcagaggatggacagaaatagacaatccatggacaaatgacgatgagactgacaatgatgagatgacatacgtgaatcttcaactgaatcccgaaagatatactggttatactggtccatcagcaagaaggatatgggatgctgtctactcagagaactgccccaaatatccatctcaagagttatgccatgagaaaagattttgtataaattgatatccggtcttcactcctcca

SEQ ID NO: 32173 - DNA, 265 bp, Glycine max
  unsure (1)..(265): unsure at all n locations; Clone ID: 701104972H1
gaagctgntgttgttgtgattggtagtggcattggcggactgtgctgtggagcactgttggcaagatacgaggnagatgtgttggttctggaaagccacgaccaaccaggtggtgctgcccattcctttgatatcaaaggctacaactttgattctgggccatcgttgttctctggcttgcaatcaaggggtcctcaggctaatcctcttgctcaggtcttgatgcgctcggcgagtctcttccatgcgctacttacgactcatg

SEQ ID NO: 32174 - DNA, 267 bp, Glycine max
  unsure (1)..(267): unsure at all n locations; Clone ID: 701104973H1
ctggatttggggntccctaagcacaccattattttattatgaatgagtggnnnnnnnnnnnnnnnnnnnnntataagtaaaagaatctctgtgttgtcatcacacttcgctagatccagccccatcatggcttcagagaagcaagcggctcttgccgtcactccctctgatgctgatgctcctaccatatttgacaagatcatcaataaggagattccttctacttggtttatgaggatgacaaggtgcttgccttcagggacataa

SEQ ID NO: 32175 - DNA, 270 bp, Glycine max
  unsure (1)..(270): unsure at all n locations; Clone ID: 701104977H1
ttttcttcgttgctacaattttggtagcatggcaatgccatgcgtacgatatgttccctctccgaatgaacactggctatggtgcccgtactccggaggtgacaatgcgcaagttggaggcttgctgtggangcacacaacatctttggctttgagaccattcctgaagagtgcgttgaagcaacaaaggaatacatccatggcgaacaatatagatcagactccaaacagttaaccaacaagcttacttttatgccagagacctcgaag

SEQ ID NO: 32176 - DNA, 270 bp, Glycine max
  Clone ID: 701104978H1
acataatagcagaatcccttttccaacctttcttctcttcagatcggatcagatcagaatcccaccgccatggatttcatgaaggtcttcgatcaaaccgttcgagaaataaagagagaggtgaatctgaaggtgctcaaggttccggaaatcgaacagaaggtgctggatgcaactgataatgaaccttggggtcctcatggtactgtgctggcagagatttcacagctaccaaaaaatttactgaatgccaaatgatcatgaatgtcc

SEQ ID NO: 32177 - DNA, 272 bp, Glycine max
  Clone ID: 701104979H1
tttggcatcaacaatcaacaatcacaaatagaaactcactctttcgaaaaaaccagaatttgaatatgacgttagggtttgagggttatagttataccacaacacttggaaggaagagggtcgtgttattacacaatgaagcttcttctctcaactctaattcggcggtgaatccattgaagagaatgtgcagcggaaaattcacttttgactctgaaaggtctcgcctgaggccctcctcttgatgttctgattagggtgttgtgtggtgt

SEQ ID NO: 32178 - DNA, 265 bp, Glycine max
  unsure (1)..(265): unsure at all n locations; Clone ID: 701104982H1
gcggttcttcttgttgttggcttgttgctatatataatgattttatatctttgatggccaaccacgatttgatactcggtcaaagtcacaatttagcacttggtcatgatcagcaattggtgctgggccatgaccataattngggcctcagtcagaaccatgaattggaaatgggatcagcccatgagcaccatttagatctgggacaaactcatgatcatgactaggcttggggcatgcccatgatgaattgggattagaacag

SEQ ID NO: 32179 - DNA, 263 bp, Glycine max
  unsure (1)..(263): unsure at all n locations; Clone ID: 701104983H1
tggttgnnagtnaagaagtagcaaanntgtttccattcgggcacaagggtcaaaagataaaggggactatggtggttatgcagaagaatgtgttggatatcaacagcatcaccagtgttgacgggatcgtcggcaccggcttagacttcttaggcagtgcactcgatacagttacttttttagcctcctccatctccatccaacttattagtncctaccaagctgatggtgggaaaggaaaagttggaaaggctacaaatttg

SEQ ID NO: 32180 - DNA, 263 bp, Glycine max
  Clone ID: 701104984H1
gaacataccaatctacaataaacgatgattctcattatctccctcattttttctcttctctctttctcccatgcttctgtcctagatttctgtgttgcagattatgcaggtcctattggacctgcaggatattcctgcaagaagccttcaaaggtcacagcagatgattttgcttacagtggccttggcattgctggtaacacctcaaacattatcaaagtgcagtgacccctggcatttgatgctcagtttgctggtctcaa

SEQ ID NO: 32181 - DNA, 259 bp, Glycine max
  unsure (1)..(259): unsure at all n locations; Clone ID: 701104985H1
aagcttgaaccgagatacgattttnttttaaagcgtttaggcgaattcagcgagagttgcggctgggantggacggtgacggcgaggagttgacggcgcnggagaccgctttgtatgaccgtcaaattagggtttggggagctgatgctcaaagaagattaagcaaatctcatgtcttagtctatggaatgaaaggaactgtagctgagttttgcaagatattgttctggctggagtaggtagtctgactttagtagat

SEQ ID NO: 32182 - DNA, 262 bp, Glycine max
  unsure (1)..(262): unsure at all n locations; Clone ID: 701104986H1
cattattgcagataagatcaaccctacncccttgcagattcgggccnagatggcatcacttcatgctaatggnacatcagttgtttgcaagagtggcaaccatgcttctcaatcgaaattcacaagctcttcattcttgcctggntttgatgttgttggtcgtgcttcaaatgcttggaagaaagaacttgtcccatcttccatttccttggtgcctagagcacacaacatacgacggtccnaannangaactcnnncanga

SEQ ID NO: 32183 - DNA, 260 bp, Glycine max
  unsure (1)..(260): unsure at all n locations; Clone ID: 701104987H1
ggnggcataccgatgacgatggcgatgacggcgtcgcagttgcggtgcggttgggggtggaggccaacgccgaatncagcagcagcaacgacgtcgtatggttccggtggtgtgttccatcgctatagagaacgcgaagaacaaagagagagcgaaactgaagaagctcttcgatgaagcgtacgagaggtgccgcactgctcccaccgaaggcgtttcttcactctccaacnattcaccgactcntcgacaagtacgac

SEQ ID NO: 32184 - DNA, 263 bp, Glycine max
  unsure (1)..(263): unsure at all n locations; Clone ID: 701104988H1
tggaattgcatcttcaggccggtgggcctttctacgaggttgaattgggaagatttgatgggctaagatctaaagattcagatgtaaacgggaggctgcctcatccagagttcaacttgaaccagcnccaattcactgtttgcggccaacggtctcacccaaacggaaatgatagctctatcaggtgctcacactgttggattctcccattgcaacaaatnacgaacagagtatacaatttcaagagcaaaagtcgagtggac

SEQ ID NO: 32185 - DNA, 270 bp, Glycine max
  unsure (1)..(270): unsure at all n locations; Clone ID: 701104989H1
ctctgatccaaacgaataacgaanccanggaatcaccctgtctttctngacccaaaaacatagtgcccaaattcgaacaaaatcaatcaactaactcctccaacgttgttgttattatgcagacaacaagttccaacacctccggcgccncctcgatccgttccggcatggagctcttccaccgcgcgaaggcggncgcgcctccgcagccaccacggacaagtacctctggccgacgaggacgaggagtccgtcacgcaagaccgcaac

SEQ ID NO: 32186 - DNA, 264 bp, Glycine max
  unsure (1)..(264): unsure at all n locations; Clone ID: 701104990H1
gagtgagtattaatcgttcttcaagatcaggataagctttttccttctgcttcatccccttccatggccgcaccttccctctcctccgctctcaactccctctcctctctatccctctccacctcctcccgcttctctctcctccctccntgtncctcctctccaaacctctccccctcctcttcgcaaccaccaccctcaaatccaaaccctccgacgacttgacacatcgttcttcgacaacatcaacccgcaagacgacat

SEQ ID NO: 32187 - DNA, 263 bp, Glycine max
  Clone ID: 701104992H1
aactttgaagcttagaaaagcggttaggtagctaggttgagttccagatctggtagagaagttcatcatggcgccgttaccggcggagcaaaccggtgaatcagcgccgacggagttgcagagatccattccgacgccgtttctgaccaagacgtaccagctcgtcgatgatccctccgcggatgacctaatttcctggaacgaagacggcaccagcttcatgtatggcgacccgcggaatttgcaagggatttgcttcctaa

SEQ ID NO: 32188 - DNA, 266 bp, Glycine max
  unsure (1)..(266): unsure at all n locations; Clone ID: 701104993H1
ctttgccttctgcatgttggttctctgtaaacagatactgcaaaagnagaataatattgaatatttggttgggttgaatccctgggttgaagcgttgcagacatcacggctattctaagagtgtctcgctctctcattcatgtcccaactgtacgacggaggacaggttgcgtaactgccaccaacccttcgccgcacggtgggcgtggtgctttgccttctgaggtggtagcccttcagacttgctcttcttagctggtggtggt

SEQ ID NO: 32189 - DNA, 268 bp, Glycine max
  unsure (1)..(268): unsure at all n locations; Clone ID: 701104994H1
gtttgttgtgagctataagctagtttatcgtgaggagaatatgaagttgtttgttttctttgttgctgcagtagttttggtagcatggccatgccatggcgcaggctaccaaaggttccctctccgaatgaaaactggctatggtgagcgttcttcggaggtaaaatgcgcaagttttaggctgctgtggaagcacacaacatccgagcctttaaaaccattcctaagagtgcgttgaaccaacaanggactacattaatggcgaaca

SEQ ID NO: 32190 - DNA, 270 bp, Glycine max
  unsure (1)..(270): unsure at all n locations; Clone ID: 701104995H1
gatcatatatatntagtaacccaaactcttttgtctcattagcttttctacctagctacatcgatcaagatggaagctaagactaagccatggttggctctatctctatttctattggctacaaattgcatgcaacaatgtgtccatggagaatcgcaagtgccttgcatgttcgtccttggggactctctatctgacaatggaaataacaanaaccttcaaacaatgcaagttccaattacagaccatatggcatcgcatacccaacag

SEQ ID NO: 32191 - DNA, 271 bp, Glycine max
  unsure (1)..(271): unsure at all n locations; Clone ID: 701104996H1
ttttgtnntncnnttaaattnttctntaaatttctcaattnatcnaagatcttcagcaanccggtcaagtttgtgtagtttggccagatgggaggtgggtttagagtgctacacttagttagaccttttctctcgttcctacctgaagttcagactgctgataggaaagtgccatttagagagaaggtcatatatactgtgatctctctgttcattttccttgtttnagtcagcttcctctgtatggaatacactcaacaacaggtgctga

SEQ ID NO: 32192 - DNA, 289 bp, Glycine max
  Clone ID: 701105001H1
ttggaaagctaatggaaaactacatagctgaaatagccaccgaccgaaatttagccgttacaaagttcaccagtttggcagaattaattcctgaacagtcaaggccaacagaagatgggatgtatagagccatagacatctttcttaaggctcatcctgctctaagtgacatggacagaaagaaagtttgcagcgtgatggactgtcagaagttatcgcgagaggcatgtgcgcatgcctcaaaatgaccggctacctgtccagacagtggttcaagttctctattatg

SEQ ID NO: 32193 - DNA, 287 bp, Glycine max
  unsure (1)..(287): unsure at all n locations; Clone ID: 701105003H1
cactcttctaatgtctaggtctgagagcacaaacgcgaganctagaacagcgtcatggttttctaccccattctttgttatcgttctcccggtggccgtggctgcgcttctctaccggctcgaaccattcaagccggttcttttgccggtccagctgggccggtccaccgtggcggttccggctcgtaacggccacatgcaagatggatcggaacgtgtgggtgagggacacttggagcccggaagacttggcctacgacgctgcggcacgtgtcgtttataccggg

SEQ ID NO: 32194 - DNA, 284 bp, Glycine max
  unsure (1)..(284): unsure at all n locations; Clone ID: 701105005H1
ggnattgttgtaactttttgattcctaaattctctaaaattcgaaattctaatttcgttaggggaaagagattgtttgtgtgtgagtnagtanggctggaaaaggcgagggtcctgctatcggaatcgatttgggaacgacgtactcttgcgtcggcgtgtggcaacacgatcgtgttgaaatcatagccaacgatcagggtaacagaactaccccatcctacgtggctttcacccacagaacggttgatcggcgatgcggcgaagaaccaggtcgctatgaac

SEQ ID NO: 32195 - DNA, 276 bp, Glycine max
  unsure (1)..(276): unsure at all n locations; Clone ID: 701105006H1
ttcaagtgtagaactagaaggtaaagaagcaattgacgtgagcggccatccanggtttcgcttcatccacatacactaacactngcgtgccctttgtccgtttcctcttcatcctcccgttttctcagatgctccgtaaattctgccccgaagcgaagaagaagcagcttcattactgcttcgtngcaagagctcgcgggagttttactattctccgcgattcctttctgccgtgaaagctatagctaatagtccgctagggagtcgcttcagagg

SEQ ID NO: 32196 - DNA, 283 bp, Glycine max
  Clone ID: 701105007H1
gggaaggtctttttgaggctataactggttatggtttgggtggatcttccatggctctgtttggcagagttggtggtggtatctataccaagggctgctgatgttggtgctgatctggttggaaaagttgagagaaatatcccagaggatgatccaagaaatccagctgtgattgctgacaatgttggtgataatgttatatcccctactcatcagttctatgggcattattgtctttgattactactctctttgcaactgatttcttgagatcaaggctgtc

SEQ ID NO: 32197 - DNA, 285 bp, Glycine max
  unsure (1)..(285): unsure at all n locations; Clone ID: 701105008H1
cctcatctccaatgagttaacgttctccactcgtccctgcttctgcttctgctcattcttctccttccacagggatcgcntatnttccacatggaaatgcaaantgcaactctttattccaaaaatttgcaaattcccatgtgggtatttctgctttgcccttcctgcaaccgggactaaaatcttgtacagntttcaacagaggaacactcattcccctgtgcttaaatggaaaggagctttgctttatcagaaaagggatttaattgcaagttttcaaagaga

SEQ ID NO: 32198 - DNA, 288 bp, Glycine max
  unsure (1)..(288): unsure at all n locations; Clone ID: 701105009H1
ggcagggagtctactctagagaaaccgctncntggatgancnctctnaagcagattcatctttatnnggtaggactaatcagagcaatgcaccattgatttcacctcctcctggtttcagggctaccttagatagaccttatatgggttctttagaggatgatgttagagataactctaattcacgatacagaagaagtagtgaacctggatttggaagaggacatggtggcaattccgagggcagttccaaactggaattcaccnctaccaaatgggtatgttccct

SEQ ID NO: 32199 - DNA, 283 bp, Glycine max
  Clone ID: 701105010H1
cgcgtgtccttattgggtacatactttggcagtattgtattggtgattggtcagactagtgttattctccggtggctccttccttccttcgccatggcgttctacgtgctctcgcgtcgtttatcagctggatccaactcaacgacgctcctcgccctgcgttttgcttcctcttccagatccttctcctcttccttcagggaagaaagagatacctttggacccattcaagttccccgacaaatatggggagcacaaactcaaagatcgttgcagaattcga

SEQ ID NO: 32200 - DNA, 282 bp, Glycine max
  unsure (1)..(282): unsure at all n locations; Clone ID: 701105012H1
agattcctttatttaaggtccagaaagtaacattgttattggtgcaattctttgccaaaatgggcaatgggccctacggtcatagtggaatcgaagaaaaaatattgaaatggttcncatttcttcttaggaagttgcaaaactttgtttatttctcaatttcatacctttctccctttcaagtatcatgtcctaaaggttgactacaaacattaaagggagaaaaggtactatattatttggtgtaatctagattattacatgttttgggtggaaaattga

SEQ ID NO: 32201 - DNA, 144 bp, Glycine max
  unsure (1)..(144): unsure at all n locations; Clone ID: 701105013H1
ctgtttgttagggagagaagaaagagagaaaaagaaaaatcnccaggacggtggtgagtgctgcttctgctttcatcatcatcagagaagaatggcggctactgtgtcttctgcgtggtcaaagcccggcgcgtgggctctcga

SEQ ID NO: 32202 - DNA, 260 bp, Glycine max
  unsure (1)..(260): unsure at all n locations; Clone ID: 701105014H1
ctctctntgctacctccttagtcaanncaaagtaacaaaccangctcccctctcttctcttcacttgttctctagatttcttctctcttgtttcttagaatccgtcacaatctaatcaacataacaaaaatggatgcanttagttgcatggatgagagcaccaccactgagtcactctctataagtctttctccgacgtcatcgtcggagaagcgccttctcgatgattacatcgtcggagaaggttctcgtccccgcgc

SEQ ID NO: 32203 - DNA, 282 bp, Glycine max
  unsure (1)..(282): unsure at all n locations; Clone ID: 701105015H1
taaatttgtcatatagctcagttacagatgtggggcttctgtcacttgctaatatcagctgccttcaaagttttactgtgcttcacctgcaaggcttggttccaggaggactggctgcngccttattagcatgtggagggctaacaaaagtgaagctcatctttcactaagacctctgttacctcagctacttatcagacatgtagaatcacgtggctgtgtgtttgaatggagataaagngtttcaggctgaattggacccaaagtgttggaaattacagt

SEQ ID NO: 32204 - DNA, 284 bp, Glycine max
  Clone ID: 701105016H1
ggcatcgttagcagttttgtagattcaacctcaatttgcagagttacgttctaatatatttacacaagactgataagagaaaatgtctctgattccaagtttcttcggtggccgaaggagcagtgttttcgaccctttctccctcgatgtgtgggaccccttcaaggattttccatttcccagttctctttctgctgaaaattcagcgtttgtgagcacacgagtggattggaaggacaccagaagcacacgtgttcaaggctgatattccagggctgaagaag

SEQ ID NO: 32205 - DNA, 285 bp, Glycine max
  unsure (1)..(285): unsure at all n locations; Clone ID: 701105017H1
gngaaantntctgtttggctgcccagaaaatctgtgctccactcagaaacattcncnaaaacgggttttcgaggcgagcgagtgggtccgcatcggagtcccaaaacacacacacttctgccaatttatgagcangagatcccgtaattcgatacaggagtaggggtttcgnnnnnnnnnnnnnnnnnnnnncctgctctcaagctctgcgtcttgttactcatcttctcggattagtgtggttctttgcggaaaatgataggacgctgcgaaaggttgttaaga

SEQ ID NO: 32206 - DNA, 288 bp, Glycine max
  Clone ID: 701105018H1
aaaaaccaacttcgtaggttcaagaattaatttcttgaagcacccagaaaagacagaacgccatgctctcgttacttcctgatatgatggaggactcatgggaaaactggctctctcaccctggaaatgaatgatgattttggctgcaccaacgctgtatcctttgatgagatggtaaggttcaacaatgatagctcaaatgttgtggcagctattgggccaaaagtggaatacactgtcttatttgaagagcagcgaagaggaatttggaacaagttgttattggcc

SEQ ID NO: 32207 - DNA, 285 bp, Glycine max
  unsure (1)..(285): unsure at all n locations; Clone ID: 701105019H1
gctaagttgaaaganaaatcaaaatcaggactacccctgcctggtgtggagagatttatctttgtgctccaaggtgctgtcaccctcactaatgctgctggtgttagccaactactgaaggttgattcttatgcttattttcctccaaattttgagcattcaattgaatgtgatacacctgctactattgtggtatttgaacggagatattctccgctaccaaatcatatcccagacattggttggttcaactgataagcagccactccttgagactccaggcga

SEQ ID NO: 32208 - DNA, 285 bp, Glycine max
  Clone ID: 701105020H1
tagcagatggcgatggtttccatgggcattcggtgtcagcactgcgacttttccgaatctaaacaggtgtcgtggagtggcatatgcaagtttgagcaacaaagcaagtactacatctttgggagtgcgagttacagagggagaggggaatttgccgaagcttgttctcacttccccggccggtagtgaggctgagatatacctgtttggaggttgcattacttcttggaaagttcagtggtaaggacctcctctttgttcgccctgacgctgttttcaatggga

SEQ ID NO: 32209 - DNA, 283 bp, Glycine max
  unsure (1)..(283): unsure at all n locations; Clone ID: 701105021H1
tggaaagctggttaaacattcgcaatcccgacacaccgccaaaaaaaccctcgtacccggttcgatttccaatgggttgcacctgncctaggtttccacctttctcttccttnntatctttgttccttcttcccattcctcttctcttctcgctgccaacaattcctcaattctccctccatcatacgccatgtccaacagggtttgcaagttctatgcccgtggagcatgtttagggggatcaatgtgattttgctcatgagaaaaaggatgatattgcagc

SEQ ID NO: 32210 - DNA, 95 bp, Glycine max
  unsure (1)..(95): unsure at all n locations; Clone ID: 701105022H1
ttcattaattnttatttctccccttttctcaatgcttttcttaatgttgaatccttcacaaatcgtcaagagntagcccacccagaacaacaacg

SEQ ID NO: 32211 - DNA, 270 bp, Glycine max
  unsure (1)..(270): unsure at all n locations; Clone ID: 701105025H1
caggcattagaccatgaatcatctanncttttccaaacctcacnccctcnctccctcttnctactcaccgatgccatatcttttgccactttacaaaaaacagtctaactaacaatgtcatcttttgttgctcttcagggcctgcatggctctcttctcagntcccagttcctaggccaagacaccctcactcatttccaccctcgcaacaaggcttcttaccattcaaaacaagccaacaacagcacnacaaccaagtgncaaanttgg

SEQ ID NO: 32212 - DNA, 285 bp, Glycine max
  unsure (1)..(285): unsure at all n locations; Clone ID: 701105026H1
aatacataagcaacgtgtacaatgctcttccgtntagaatggccataggtccaaagcattctccaacgattgtaatttgcaacacctttaaagttcctatgaccaccaatttggaatatttgctgtagcttcattcaccatttttacgagagtcacctgtaaaaggtttacaagttgatgttagagaaaaccgccacaaacaagaatgcaactcaacaaaatcacattatctagtgggaggtgaaaacataccacactttctggaacaccaggtggtggcaatgt

SEQ ID NO: 32213 - DNA, 249 bp, Glycine max
  Clone ID: 701105027H1
gtcaggtttcttgctcagcttttgtgtttcctctattcccattatccttctatgtttgagcataaattcaggatctgttcttctttcttgatactacaacccgtgttcttccaaaaacaactgtagttcatctgccttagcccatgttggggtatttgtctagatacccactaattcattgctgagggatattcaactttcacctttatcttgaatctttattataattaacgaggattttcttcctct

SEQ ID NO: 32214 - DNA, 262 bp, Glycine max
  unsure (1)..(262): unsure at all n locations; Clone ID: 701105028H1
cctgtgtggtgcctggtgctttganntctcctcttcagtgangcactgcgttggacttcgtanggcaccgtcacgcgttccttgttcgaatttgaacttctgtgtggtgccnnnnnnnnnnnnnnnnnnnnnnnnagagaggggaccatggtttgctaaaagggataagatgatgaagcttgcaggatattccctggccgtttcatttgctcccaagttctaatgtcgttaaaagcaataaaagatcacggtagtatatctc

SEQ ID NO: 32215 - DNA, 266 bp, Glycine max
  unsure (1)..(266): unsure at all n locations; Clone ID: 701105029H1
ttatggttgtaatattcaccaaaanccgtttaaccacttcaacncacccaaattggtcatacacgggttttatctatggtttcataaatcgttaaataaattacactacatcctattggtaaattcccaggaaccatgagcgtgcgagcgcctagaccaatcaattcctgtaaagaaaaaaaaagtacaaaagactttgagtatgctttaaagctgataagaaagattagtaagagattataaaacaaaaaagaaatatataaatc

SEQ ID NO: 32216 - DNA, 285 bp, Glycine max
  Clone ID: 701105030H1
ccgttcccaaacagaaaaacgaaagaaagataaaattctcaaaaatggctgcgacttcgatccccatccgagtcgccggaatccaagcgtgcgccacctcgggccgccgaagggccgatcccgatcgccggagagcctcctccgccaactggtggaccccgctgttcggctggtcctccgagccggactacattgactccaacaacaaagcatcgagtcttcaaccggcaaagccgaaccggttacggcggagaggagtcgaaagcgccgagaccgcgcttcgcc

SEQ ID NO: 32217 - DNA, 281 bp, Glycine max
  Clone ID: 701105031H1
taacacaaagcacaaagcaaagctcatccttgagttaaaaaatggcagcagcttcttccatggctctctcatccccatccttggctggcaaggccgtgaagctgggcccatcagccccagaagtgggaagggtgagcatgaggaagaccgtcaccaagcaggtctcctcaggaagcccatggtacggcccagaccgagtcaagtacttgggcccattctctggcgagcccccgttacctaaccggtgagttcccaggcgatacggctgggacatgctgggt

SEQ ID NO: 32218 - DNA, 232 bp, Glycine max
  unsure (1)..(232): unsure at all n locations; Clone ID: 701105032H1
aatccaaacacaacaatggcactcaaaagggcactgtggttgatgctgctgctgttatctgtagctgcagctgctaccaacaccaacaatgtgtaccagccttgtgctgatgccaggattcagagatccgatggcttcacttttggcattgccttcagttccagagactctttcttctacanagaaccagtcccttcagctctctccctgtgaccgacgcctctctctctct

SEQ ID NO: 32219 - DNA, 278 bp, Glycine max
  unsure (1)..(278): unsure at all n locations; Clone ID: 701105033H1
atcttcttcaccttgnctctccacctttctgggtaatgtttganannctggtgttagctgcggctgtttgacaaaaatgaatattgcacaagttacagcatggcagcctgggatttgtgtgaaaaatatgtctcagttgcaccggcttcaatctaaaccatgtgttataccaaagagtttggtcctctcactgtgttctactgagcntaagagcaagacaatcgtttagcgaaatgttggcccatttacaatctcgggaacctcttcatattgcttag

SEQ ID NO: 32220 - DNA, 286 bp, Glycine max
  Clone ID: 701105036H1
tgaaggagccgtagcagcagcggaagcttctagcttggggcagcgaatcacaatggcgagaggattgaagaagcatttgaagaggcttaatgccccaaagcattggatgcttgacaaactgggtggtgcatttgctcctaagccctcatctggaccacacaaatccagggaatgcctgccactcatactcattttgcgaaaccggctgaagtatgctctgacataccgtgaagtcagctattctgatgcagcgacatgtccttgttgatggcaaagtcaggacaga

SEQ ID NO: 32221 - DNA, 283 bp, Glycine max
  unsure (1)..(283): unsure at all n locations; Clone ID: 701105037H1
cncatttgtgttcagtatagatggcaccgtactctctaatattccatactacaaaanacacggatatggggtggagaaatttaactcgaccttgtatgatgaatgggttaacaagggcaatgcaccggcactgcccgagactcttaagaattacaacaagctggtgtctcttggcttcaagattatattcttgtcaggaagaacactggacaaacaggccgtaacagaagcaattaaagaaggctggctaccacacatggnaaaaattaattctcaaggatcc

SEQ ID NO: 32222 - DNA, 279 bp, Glycine max
  unsure (1)..(279): unsure at all n locations; Clone ID: 701105038H1
gnaagaagggagngaagaagttgttgggttgagttggattggntttctaatctaatctatacctttctttttcctatgcttttaaggcacaaacccttctttcttccctcttctnnnnnnnnnnnnnnnnnnnnnnntgcctttaccctttagggaaggaagaaggaacnactatactactantatccttattattgttattattgtaattaatcttttattatagttatttgttgttattattcctcaaatatggatcgttgtgcctctccaacgact

SEQ ID NO: 32223 - DNA, 281 bp, Glycine max
  Clone ID: 701105039H1
ctctgttcttcactcactctcattcattcaccatgacgaaacaacatgccaattggtctccttacgataacaacggaggatcatgtgttgcgattgctggagcagattactgcgttatcgccgcagatacgagaatgtccaccggttacaacatcctcactcgcgcttactccaaaatctcccaactggctgagaagtgtgtgatggctcatctggcttcaagctgatgtcagctttgcagaaggttttgtctgctaggcatttgatttatcagcatcaac

SEQ ID NO: 32224 - DNA, 281 bp, Glycine max
  unsure (1)..(281): unsure at all n locations; Clone ID: 701105040H1
aagtgccacgttagagaacagaacactcttcttcttctctctggaaggaacaggctcttcttcacgagaaattattactctctctactttatcattagcttttatttcagtgtttgactttttgcgttgttgcttcgttgtgtgtgcactcggttctgtttggcgtctggacaaaaaacatggggnnnnnnnnnnnnnnnnnnntgagcgtcaccgctttgcatcatccaaaccggaaacgatgatcagagcctcgaattcgatatatatccttgagcagt

SEQ ID NO: 32225 - DNA, 284 bp, Glycine max
  Clone ID: 701105042H1
ggaagaagcacttgctgaagaacatccaaaggcgcaggtcatctcaatcccagcaggttggtagctatattggaatcgaatgttctactgaggcaggaaggtctgatgttgagattgagatagaaaggcttaggaaagaaaggactatgttgatggaagaggttgttgatttgaaacaagagcagcgaagaatggctcaccgcgcaggagaagtgaatcaaaggctccaatccagaacaaaggcagaaacaaatggtttctttcctggtcaagttaatccagaa

SEQ ID NO: 32226 - DNA, 280 bp, Glycine max
  unsure (1)..(280): unsure at all n locations; Clone ID: 701105043H1
cgactgcgcttcacgatgggtgcttacaagtatgtttcggagctatggcgcaagaagcagtccgatgttatgagattcttgcagcgggtgaggtgctgggagtaccgccagcaaccttctattgtccgtttgacaaggtctactcgcccagacaaggctcgccgcttgggtttcaaggctaagcagggttatgtgatttaccgtgttcgtgtacgaaggggtggccggaagaccagttccaaaaggtatgtttatgntaagcccaccaaccaaggtgtta

SEQ ID NO: 32227 - DNA, 277 bp, Glycine max
  unsure (1)..(277): unsure at all n locations; Clone ID: 701105046H1
cngaaagcaagattatgccttcaccctgacaaactgcagcaaagaggagcgacactcctacaaaagtatattgcagagaaggcttctccattcttcaggatgcatggactgggttcatttctgaagatgtttccttataaacagtaggcgactccaattcctgataactcatttttggtttaaagctcgtggacagacatcaagatagacatttggaatgacaaaagcgaattccatgcggcaaatacatgatgtatatgaatttgaaaatngctgt

SEQ ID NO: 32228 - DNA, 267 bp, Glycine max
  unsure (1)..(267): unsure at all n locations; Clone ID: 701105049H1
gnaaaaaataaaaatcaaagagcatnntgtcagggnatcattccccaagattggggagacccttacntgtgggagggcacaagaaggaggaggagcataagggtgagcaccatgctggagaatacaaaggggagcaccatggtgaacacagtagtgagtacaaaggagagcatcatggtgaacacaaagctggagagtaccatggtgagcacaagccagcacaaagaggggttcctagacaaatcaaggacaagatccatggtgagg

SEQ ID NO: 32229 - DNA, 282 bp, Glycine max
  unsure (1)..(282): unsure at all n locations; Clone ID: 701105050H1
gggtgtgagaagagaatggagagtaaagaggaagatgttaacgttggagcaaacaagttctcaganaggcaaccaattggtacagcagctcagggtggtggtgacaaggactacaaggaggcacccccagctcctttgtttgaacctggtgagctcaaatcatggtccttctacagagctggaattgctgagtttgtggcaactttcttgttcctctacattaccatcttaactcatgggtgtcaacaggtcaccctccaagtgtgcctctgttggcatcaa

SEQ ID NO: 32230 - DNA, 281 bp, Glycine max
  unsure (1)..(281): unsure at all n locations; Clone ID: 701105052H1
cnatatctttctctctctgtttggtttggcctcttgctgtaagangccagccacagnaatgttgcgctcctgtggaaccatcgatgggctttaacaggttccacatcggttganctttgtgtcagatatgccaatagtgttatccttattcttgtgatatactagtttgtatgatcatattttctcggattgtctagcaagtttagctcaattggacgttgaacgaattatnntatctattaagatatcttcaatttctacgaaaaaaaaatatttatagg

SEQ ID NO: 32231 - DNA, 284 bp, Glycine max
  unsure (1)..(284): unsure at all n locations; Clone ID: 701105053H1
ccgaccgagtgcttcagaggagaagtaatgactgcgatcgcgggaacgcacgttntnggtgttgtgagttttcagctcaaacaagctgaaatgccttttgcatgttcttgcttaatccgcaagcgtattggagattctcctcagcgcaatgtggctctaagacgcagagtaaatggaacaattcttccccaaatcagagcccagaatcttccagactatgttccaaaatccgagttacaaagtagaagcgattctcaggccatggcgagttccccaggtttctg

SEQ ID NO: 32232 - DNA, 284 bp, Glycine max
  unsure (1)..(284): unsure at all n locations; Clone ID: 701105054H1
cnaaatttcgatatgtgatgtggttttctgacagtcattttgatacatacatggtgtgctttccaaataagttaccaaatccaaattggttcttcaaaagcaacattttcttcctcccntatttnggttacccactcttggttgggaatgaatgaaggaagctggcagancttggctacaacagaaatgccaagaaatgcaaagagaagtttgagaacgtttacaagtaccacaagaaccaaagnaggacgaatgggaaatcagaaggcaaaacttatcgcttc

SEQ ID NO: 32233 - DNA, 284 bp, Glycine max
  unsure (1)..(284): unsure at all n locations; Clone ID: 701105055H1
ggcagggaaaccccagagggccaaaaagctattcaagcattgaaggatgtttatgctcaatgggtccccgaaganngaatactaaccacaaatctctggtcggcagaactatctaagcttgctgctaatgccttcttggcccaaaggatttcatctgtcaatgccatgtcagcactttgtgaggctaccggggcaaatgttcaacaggtgtcctattctgttggaacagactcagattggacccaagttcctcaacgccagtgttggttttggtggatcctgct

SEQ ID NO: 32234 - DNA, 274 bp, Glycine max
  unsure (1)..(274): unsure at all n locations; Clone ID: 701105056H1
tttgctggtaaacaacttgaggatggaagaacccttnctgattacaatattcannaggagtctaccttacacttggttcttcgtttaagaggtggcatgcagattttcgtcaagactttgacgggnaagaccatcaccttggaggtggagagttcagataccatagacaatgtgaaagccaagattcaagataaggagggtatcccctcagaccagcagaggctcttgctggtaaacagcttgaagatggacgaacccttgcagattataacat

SEQ ID NO: 32235 - DNA, 283 bp, Glycine max
  Clone ID: 701105057H1
gggcaaaggaagtagaataccttcttaggaagggatggattccttgcttggaattcgagttggagcacggtttcgtgtaccgtgagcacaacaggtcaccaggatactacgatggacgctactggaccatgtggaagctgcctatgtttggttgcactgatgcttctcaggtgttgaaggagcttcaagaggctaagactgcataccccaacggcttcatccgtatcatcggattacaacgttcgccaatgcagtgcatcagcttcatcgcctacaagccccc

SEQ ID NO: 32236 - DNA, 282 bp, Glycine max
  Clone ID: 701105058H1
taagaacgctcctcctcagatccagacggctgaatactctggaccatcacttagttactacatcaaccagttcaagccactggaaattactgaagtgtccgtgcctagtgaggcagaactatcgtcatctgttcaacttgaaagctcgcctccggaagtttcccaggttcaggttgaagctcaagctcctgagacctctagtgtgaacattgtatcgtaggtgtatcatgtggaccacttttgctacgaaaacatagcaaagaagtttattttgtgtcaata

SEQ ID NO: 32237 - DNA, 276 bp, Glycine max
  unsure (1)..(276): unsure at all n locations; Clone ID: 701105059H1
cacaaggcagaaagcaagctcatcctagagttttaaaaatggcagcagcctcctccatggctctctcttcccatcttggctggcaaggcgtgaagctgggcccatcagccccnnaagtcgggagggtcagcatgaggaagaccgtcaccaagcaggcctcctccggaagcccatggtacggcccagaccgcgtcaagtacttgggcccattctctggcgagcccccgtctcttcactggcgagttcccagtgattaggctgggacatgctgggctt

SEQ ID NO: 32238 - DNA, 282 bp, Glycine max
  unsure (1)..(282): unsure at all n locations; Clone ID: 701105061H1
cncgcacactcccaaacgaaaagcacaaaaacaaaacctcttttaaaacttcgaccaaaacaaagttgtggttcagatccaatctctcttccttcttcacagcacttccannaagggcacttcacataataaaccattccattgaacacacacaccatcaaacaccttcttcttttttatacatcattgcctcatcttttgtaaattatagtttaatttcatgcacgtgagatactatatagcaagcactgccatagaaggaaaagggttggtattgctttg

SEQ ID NO: 32239 - DNA, 278 bp, Glycine max
  unsure (1)..(278): unsure at all n locations; Clone ID: 701105062H1
tcaatgtagaaatcgctgcacatgtttcacgcctgtcatcatcaaaacatgaaggggagcacgattcttccagctagaagggttaatggagagtccgtccgtggatgacgatggganctgcttctcgcctttacagttaaacgcaacatccatcaacattgaagtctactataataaagcattgaactataccttgatggttacttttatctcatttttgcaagttcctncataattcggcaatggagcttagcaacacccatctggggcggtaaggt

SEQ ID NO: 32240 - DNA, 280 bp, Glycine max
  unsure (1)..(280): unsure at all n locations; Clone ID: 701105063H1
cnttgccattctcatcctcttctttctctctctaccattgccatggatccctacaagcaccggccatccagcgccttcaattctcccttctggactacaaattctggtgctcctatttggaacaacaactcctctttaaccgttggagctagaggtccaattctgctggaggattatcatcttgtggagaagctgcaaattttgatagggaacgtatcccagaacgtgttncatgccaggggcgctagtgcaaagggtttctttgaggtcacccatgaca

SEQ ID NO: 32241 - DNA, 274 bp, Glycine max
  Clone ID: 701105066H1
ttcagtttaaagttacatagtttttcattgttttacttaatctacaatggctgcttcaacaatgggctctctcttcatcatcattggctggccaagctatcaagcttgccccctccacccctgagcttggtgttggaagggttagcatgaggaaaacagcctccaaaactgtttcctcaggaagcccatggtacggcccagaccgtgtcaagtacttgggcccactcaggtgagcccccatcctatctcactggtgaattcccaggtgactatg

SEQ ID NO: 32242 - DNA, 281 bp, Glycine max
  unsure (1)..(281): unsure at all n locations; Clone ID: 701105067H1
tcacttcccttctccaacatgccaaacgacagcgttctgagtcttttcttcttcgttaccctcttcacatgccttctctctgctacttcccacgatgaccatattttcctaccgagtcaactccatgacgatgactcagtgagttgcactgcaaccgacccaagccttaactacaagccggtgatcggaatcctgacccaccccggcgacggtgcctctggccggctcagcngccaccggggtttcttacatcgccgcctcctacgttaaattcgtggagt

SEQ ID NO: 32243 - DNA, 279 bp, Glycine max
  unsure (1)..(279): unsure at all n locations; Clone ID: 701105069H1
caccctagattttcaantctagggttttgttttcttaacttgttacggttctggttctggttctggttcaggaactgaactcccaccctacnntaatttcacttttctcttctcaatcttagcctctggtttttctacattttccctccctngctaacctctgccatgggattttcaatgctgattttgtttcacctctaaagccactccctctcttattttcttcaaccttggcattcgcaactcatcttctttgtggtgtttctaggtaaacgagac

SEQ ID NO: 32244 - DNA, 281 bp, Glycine max
  Clone ID: 701105070H1
cacaactacataaagtcaaggcaaaccatatcatgaaaaaccaacttatgttcttatccatgttcctttcgtttctgattcttccaaccgctagccaaaaacatgcatgtggctctgccaagcctagcaactttccattttgtgacacttcactatcttatgaggacagggcaaaggacttggtgtcacgcttaacacttcaagaaaagacacaacaactagtaaacccttccaggtatttcgcggcttggtgttcctgcttatgaatggtggtcagaggc

SEQ ID NO: 32245 - DNA, 277 bp, Glycine max
  Clone ID: 701105071H1
tcatatgcttgtctcaaagattaagccatgcatgtgtaagtatgaactaattcagactgtgaaactggcgaatggctcattaaatcagttatagtttgtttgatggtatcttctactcggataaccgtagtaattctagagctaatacgtgcaacaaaccccgacttctggaagggatgcatttattagataaaaggtcaacacaggctctgcctgttgcttgatgattcgataactcgtcggatcgcacggcctttgtgccggcgacgcatcatca

SEQ ID NO: 32246 - DNA, 276 bp, Glycine max
  unsure (1)..(276): unsure at all n locations; Clone ID: 701105074H1
gttgcacatatccatgtatcatttatctgttgataggtgaaagaatcaactgcacattgctggtttattcttcatgtgattggacgtattgaatccaacatagtgattgtncttttgatcaattgacggaattgtaacttttttaatccatttactgtcttaccgctcttggattcttntttccttctttttagactggaaataccttacgagaccttgtatgtgtacgaaagctgtctacatatgcctcacttgtagtactgttagatctagttg

SEQ ID NO: 32247 - DNA, 279 bp, Glycine max
  unsure (1)..(279): unsure at all n locations; Clone ID: 701105075H1
gccaagtnaaagtncaganaaaataaaaatcaaagancataatgtcagggatcattcacaagattggggagacccttcatgtgggagggcacaagaaggaggaggagcataagggtgagcaccatgctggagaatacaaaggggagcaccatggtgaacacagtagtgagtacaaaggagagcatcatggtgaacacaaagctggagagtaccatggtgagcacaagccagcncaaagaggggttcctagacaaagtcaaggacaagatccatggtgag

SEQ ID NO: 32248 - DNA, 279 bp, Glycine max
  unsure (1)..(279): unsure at all n locations; Clone ID: 701105076H1
ccngctcctcactatggtggccggaaaganatttgggatgctcttcgagctgctgctgnggctgatctaactttagcacaagtaattgtngatagtgctggggtcattntccagagtnctgatttgacagtatgctatgatgaaagangagcaaagtatgagctacccaagtacgttttgagcgagccaactaacctgattcgggacagttaataacagagantataaataaagattcatgggcgaaaacattgtaaatcatgtatattggttatctca

SEQ ID NO: 32249 - DNA, 274 bp, Glycine max
  unsure (1)..(274): unsure at all n locations; Clone ID: 701105077H1
anccgcaacacaatggttacagacatgctgggactggtggtgtgcacaaccagaagactcatgaacctttggtcaaccaatcaagagcacctgcaaatcaaccttatcatttacatgaaaagcatgctgcatccactgctcagacagtgcctcaaaatatgccatggaagcctcctggtccagcccttagtcctaaacctgttgttggtgttaggcaagacacaatttgggaagcagtttgaggatgtgaagcagttctacacacttgggaagg

SEQ ID NO: 32250 - DNA, 275 bp, Glycine max
  unsure (1)..(275): unsure at all n locations; Clone ID: 701105078H1
gcaaacagagtgtctaatcgaagatagaagaagagatggctaaatctccagaaactgaacttcccgtcgaagctttcggttgggctgcttcagacacttctggcacccttgcaccttttcatttctccagaagagaaaatggcgttgatgacgtcactctcaagattctcttctgcggggtttgccactcggatctccacactctcaaaaacgnctggggtttcaccataccctgtcgttcctgggcatgaaatgttggtgttgtgacaaaagtt

SEQ ID NO: 32251 - DNA, 279 bp, Glycine max
  unsure (1)..(279): unsure at all n locations; Clone ID: 701105079H1
atcttcaacaactctcgtcaatctgtctcaaaaaaacctttttttctgtncttctatggctgctactccaaaacccaccatcaaatcttgcactcccaagaaactccccaacgctctaatctcagtttccaaggtgagggtcattgtcagggtcagacccttcctcgcacacgaaacctctgcaagaaacggcgacgtttcgtgcatctccgtcctcgatcaagattccgtctccgcaggacgagattgccgtttatctcaaagacccactaaccaggt

SEQ ID NO: 32252 - DNA, 278 bp, Glycine max
  Clone ID: 701105080H1
cataacttgcatagactattgattaagaaagctattgtcattgatttgctagctccaacaatgggttctagcagattatcattcattttagtacttgtgcttgtaaccttttcatccatgatcattgactcaagggttgcagaggcacgtaccctgccaaaatcagccttattgccttccaaagttgatatacctactgttgttcctcttccactggtggcaccactgaaatttgcctgttactctccctccagtgcctgaactacctgcagtaccta

SEQ ID NO: 32253 - DNA, 280 bp, Glycine max
  unsure (1)..(280): unsure at all n locations; Clone ID: 701105081H1
gttcatctccctcttcctttccatctttgctactggaatcctggagatgaggtggagtggcgttggaatcgacgagtggtggaggaacgaacagttttgggtcattggtggtgtctcggcgcatctctttgctgtcttccaaggcctgctcaaagtgcttgctggaattgacaccaactttactgtcacctccaaggcctcggacgaagatggagnctttgccgagctctatgtncaaatggaccacccttctcatcccccccacaacccttctcataat

SEQ ID NO: 32254 - DNA, 259 bp, Glycine max
  unsure (1)..(259): unsure at all n locations; Clone ID: 701105082H1
aagggatcttgtctttcttactgcacntgaagaagtgaaaaantgctgaagtgaacacaatanngagaagggttggctatgaggtgctggtggctttggtgacccttttggttttctcattgacttgtgtcactgcttcaccatcagggccaacaaaacttcaagaccatgtgaagcaattcagggggaatcttcttgctaatggccttgggaactcctccaatgggatggaacagttggaatcattcagctgtcaaat

SEQ ID NO: 32255 - DNA, 280 bp, Glycine max
  unsure (1)..(280): unsure at all n locations; Clone ID: 701105086H1
cttatctacgcaaganaagaatagaaaatggatatcaggttgatggatttggactctccattgttcaacactctgcaccgaatcatggatctgacagangacgcagagaagaacttgaacgctccgacgcggacatacgtgcgcgacgcgaaggcaatggctgcgactcctgcggacgtgaaggagtaccctaactactacgtgttcgtgatcgacatgccaggcctgaaacggggacattaaggtgcaggtggaggatgataacgtgcttctgataagc

SEQ ID NO: 32256 - DNA, 281 bp, Glycine max
  unsure (1)..(281): unsure at all n locations; Clone ID: 701105088H1
caggattaaagccaacagttgcagcaattgaagcagggaaagacatagcattggccaacaaagagacaatgattgcgggagccccttttgttcttcctcttgctcacaaacataacatnaaaattcttcccgctgattcggaacattctgcaatttttcagtctatccaggggttgccaaagggtgcacttaggaaaatccttttaactggatcaggaggtgctttcagagaagcctgctgaaaagatgaaagatattaagctgctgatgcattaaagcat

SEQ ID NO: 32257 - DNA, 282 bp, Glycine max
  unsure (1)..(282): unsure at all n locations; Clone ID: 701105089H1
cnaaacgctccatgactcgatatagcttacaccacttgggccatcaaaccccaaccaattctaaccatttcttttcgttccgatcagtttttcgnnnnnnnnnnnnnnnnnnnnnnnnntccgaaaccttaatctcttgcccgataagggaaaattatgaatcctgataagttcacccacaagacaaacgaagctctggtgagtgctcacgaaatagcaacaagcaacggtcacgcagttcacccctcttcacctggcgtcctctctgatttccgacaagga

SEQ ID NO: 32258 - DNA, 100 bp, Glycine max
  unsure (1)..(100): unsure at all n locations; Clone ID: 701105091H1
actaggtcccgcttcgctcgctacgctacgctacttctcttccctncaccctctggctgcggcgaaaaccgataacgacaccgttcgccgttgaaatgat

SEQ ID NO: 32259 - DNA, 279 bp, Glycine max
  Clone ID: 701105095H1
gagcatacagtgattctaaagggagaacctgtggatctactcccaagatcatcacacataatatctctgcagctggaacttgttcgcaaataccaactagaaacaaggagaatcagtggagattcaggtgtacatttgcgcatacttccatcccattatgaaacggatgaagtaaaaactagtgaaacttctgagtttgatagtgaattattagatgactttgcctccaagcagtgtgaatggctcattcaacagcttggatagattgcccctgctacc

SEQ ID NO: 32260 - DNA, 269 bp, Glycine max
  unsure (1)..(269): unsure at all n locations; Clone ID: 701105096H1
gaaaacccaaagtgcttctctcctctgtctttttctctctcttgctatccttttggctagtngcatgctgcaagtgcaacttccaagaagcgcagtgccaagccaccatgtttcaacattcaacagaagcctttttccttccacttttctctttggacatggttttctgttaccaggcagaaggagcagcaatgtagangggagaggacaangcntacgggacactactagaggnntngngaaaatttgggnaannccgggnaaggggg

SEQ ID NO: 32261 - DNA, 296 bp, Glycine max
  unsure (1)..(296): unsure at all n locations; Clone ID: 701105101H1
cgctcttgcaattattcctcttctcgcaatccgcactaaaattctagggttccgaaatggacgctgacggaaagatcaagaagggcgccggcggaagaaagggcggcggcccaaagangaagccggtttcaaggtccgtcaaagccggtctccaattccccgtcggaagaattggccgtnatttgaagaaaggaaggtacgctcagcgtgtcggtaccggtgctcccgtatattggctgcagttcantatacctagctgccgaggtgttgagttggctgggaatgcagcacgtgac

SEQ ID NO: 32262 - DNA, 292 bp, Glycine max
  unsure (1)..(292): unsure at all n locations; Clone ID: 701105103H1
ggcggtgggcccatctacgtcagcgacgcgccggggaagcataactttgatctgctcaagaaactggtcttgcccgatgggtcgattttacgggcccgtctaccaggaaggcccntaaggattgcttgttcaccgacccggcccgcgatggagttagtctgctgaaaatatggaatatgaacaagttgggtggggtgttgggggtttataactgtcaaggtgctgcctggagtgctactgagaggaagaatgcgtttcatagtacggactattctggtggtgatgccatcac

SEQ ID NO: 32263 - DNA, 293 bp, Glycine max
  unsure (1)..(293): unsure at all n locations; Clone ID: 701105104H1
ganaaacaattaagatatagccaaagtccaacccatatagtctcattgctttcaattttccaatactttttctgagtaccaaaacagaaggcacatccgcacatacacattccaacgtacaaaatgaggcactttttagtactagtaccactgatcttgcttgtttttgctggttttccatccaaagcaaaagggtctctgctaccattcacaaatcatccaaataccctcttgggctgatctatggtctaatcatttccctgatccatttcgcgtgttagagcaaatcccat

SEQ ID NO: 32264 - DNA, 297 bp, Glycine max
  unsure (1)..(297): unsure at all n locations; Clone ID: 701105105H1
agatcaattgcnacggttgaattttgactgangacntcagttagaanaaaaaaaacatgtcttgcatccgtcggggtttccaattgcggccggtgttctctccttgctcacttccctcttgcngctcgaagccctccatcatctcttcttcgccggaatccctctccctgctctctgtcgcatctcaaaccttcgaactcttctacgacgtcgtcntgttcttcggcttctgctgctgntgccccttcttctccgtttcgattcggcttcccaagcttcccaccgcgttctccggtt

SEQ ID NO: 32265 - DNA, 291 bp, Glycine max
  unsure (1)..(291): unsure at all n locations; Clone ID: 701105106H1
antttctcagttctcacactcattccgtgntctaaatctcaaattctagggttagggttcccaatttctccgccaatcagaagatgagttccaccggtggttctaccaagggcngaaggggcaagcccaaagcctccaaatccgtttcaagatcgcagaaagctggtctccaattccccgttggaagaatcgctcgattccttaaggctgggaaatacgctgagcgtgttggtgctggtgctcctgtgtacctctctgcagtgctcgagtatctcgctgctgaggtttgga

SEQ ID NO: 32266 - DNA, 284 bp, Glycine max
  unsure (1)..(284): unsure at all n locations; Clone ID: 701105107H1
cttctcactctttcagatctctctcccttccttccatcccaaccacaaggtacgctgagaagacataaaaaatggtgaagatttgctgcattggagctggctatgttggtggcncaaccatggctgtaattgccttgaagtgtcctgagatcnaggtggtcgtggtggacattgctgcaccgcgaatcaacgcgtggaacagcgaccacctcccgatattatgagcctgggcttgatgatgtggtgaagcagtgcagggggaagaatctctcttcagcactgat

SEQ ID NO: 32267 - DNA, 292 bp, Glycine max
  unsure (1)..(292): unsure at all n locations; Clone ID: 701105108H1
aaaccctaggtagagagctnttcctcactctcattggcaggnggcngnagcagcacgtcctntngtcaccgtgcaggccctccgacanngacatgggncancgacgcctccgccacngtnnctatccctgacgtcatgaagtcntccatccgcccggagatcgtcaacttcgtanantccaanatctcgaaggacagcngacaaccctatgcagtcagcngnngcgccggccaccagactttcgcngagtcntggggaacggtngtgcgtctcncgtatcccccgtgttncc

SEQ ID NO: 32268 - DNA, 294 bp, Glycine max
  unsure (1)..(294): unsure at all n locations; Clone ID: 701105109H1
gagtctctgtgactcaaactcgaaggtgaaggtgaaggtgatgatggaattggaagtcgacgagaacgacttgaaagccgccggtgctgagctcttcgtcgacggtggncggcgcggcattcgcatcaatggctgggtgatcgagactcggaggcantccatactcaactcttccacactccaagagtggacaacagaatctcgatacgtctcatttaccagaaatggtttttggggaaaacacttgattctaaaacacttgagcagtgggcaccaacattcattttaatgcat

SEQ ID NO: 32269 - DNA, 236 bp, Glycine max
  unsure (1)..(236): unsure at all n locations; Clone ID: 701105110H1
gattccggaaatcatgtctgtagctgctctttttatttatgtgataaatgtaaaacgcttggtttggcnggccgttgtgcattaggttgaaaaaataaatgttataattactcagaatctcagatctttctcatactttgcccctgattataagtctctcaaatttcaactaattcatcttactttaaaaaaaatgttaattaattaatcatattaaatatatgttaattgtttat

SEQ ID NO: 32270 - DNA, 293 bp, Glycine max
  unsure (1)..(293): unsure at all n locations; Clone ID: 701105111H1
ctcagatagggcacgtctctngcggcctcttctctccctcgcgcngcccacactaaaaggttattgctctattattgtttgacgatggctgatgctcatgggactgataagaacattgaggtgtggaaaatcaagaaattgatcaaagctcttgaggctgccagaggaaatgggacaagtatgatttcccttatcatgcctccacgtgatcaaatatctcgtgtcaccaagatggctggtgatgagtttggaactgcatcaaacatcaaaagcagggtgaatcgacagtcagt

SEQ ID NO: 32271 - DNA, 237 bp, Glycine max
  unsure (1)..(237): unsure at all n locations; Clone ID: 701105112H1
aaaaatgcaatctatgtccctgacgctgagcaagaggctctccaattcaaagcctctcttcagaatctctccagcctcgtcgtcacgcatctccgccacaacctctcgnagcaccttcgccgcagtccctctcctcgnntaacagctctcacgcncgtgtcgcaccagtagcggatagcttcggnctgtataggtcggatcnatggaacgagaggtagagttaatgatngcttgaga

SEQ ID NO: 32272 - DNA, 294 bp, Glycine max
  unsure (1)..(294): unsure at all n locations; Clone ID: 701105114H1
cgagataactagaaacagtgtgatgaaaatgaaggnccttgttttcttcgttgctacaattttngtagcatggcaatgccatgcgtacgatatgttccctctccgaatgaacactggctatggtgcccgtactccggaggtgaaatgcgcaagttggaggcttgctgtggaagcacacaacatctttggctttgagaccattcctgnagagtgcgttgaagcaacaaaggaatacatccaggcgaacaatatagatcagactccaaaacagttaaccaacaagcttacttttat

SEQ ID NO: 32273 - DNA, 293 bp, Glycine max
  Clone ID: 701105115H1
agaactcatattgagaagcagtgaaatagcgaccattggtgccatcttcaacttcggtgggaaaaaacctgattatcttggagtgcagaaaaacccaccagcattagctctgtgtccggcaactaagaactgcgtgtcaacctctgagaatatcagtgatcgcacacattatgctcctccatggaactataatcctgaaggtaggaaaaaacctgtgagcagggaagaagcatggaggaacttatagacgtgatagaatcaacaacaccagacaattttcaccaggatagttg

SEQ ID NO: 32274 - DNA, 269 bp, Glycine max
  unsure (1)..(269): unsure at all n locations; Clone ID: 701105117H1
agcaagtgcgtttcncnagcagagaccgaananncttcgagatggcccgtacaaagcaaactgctcgtaagtcaactggaggaaaagctcccaggaagcagcttgcaaccaaggctgcacgtaagtctgctccaacaactggtggtgtgangaagcctcatcgttatcgccctggaactgttgctccttcgtgagattaggaaataccagaagagcatgagctcctaatcaggaagcttnctttccagaggttgggnangcgaaatgcc

SEQ ID NO: 32275 - DNA, 292 bp, Glycine max
  unsure (1)..(292): unsure at all n locations; Clone ID: 701105118H1
ttcttctcttggcggctagggttttagcgcacttcttctagatnnnaggaagatgggtaaggaaaaggttcacatcagtattgtggttattggccatgttgactctgggaagtccactaccactggacacctgatctacaagcttggaggcattgacaagcgtgttattgagagatttgagaaggaagctgctgagatgaacaagaggtcttcaagtatgcctgggngcntgataagcttaaggctgagcgtgaaagangaatcacaattgatattgccttgtggaagtttg

SEQ ID NO: 32276 - DNA, 290 bp, Glycine max
  unsure (1)..(290): unsure at all n locations; Clone ID: 701105120H1
agaagaggaaaagtcataaaaagcataagaatctgcaacaaatagtcatggctgcgcttggggaccaatncagaggaacaagccatggctgcccaacctaaacctcagaaccgacccatttctaacatcgtcatcgtcgttgctatgcagacggaggcacttcccattgttaacagattccagctcactgaggaccctgacaccccgtttccgcaagggttcttgggtccgttatcaggggacatacaaagatcttaatataagcttgatttggccgggaaaagatccaa

SEQ ID NO: 32277 - DNA, 292 bp, Glycine max
  unsure (1)..(292): unsure at all n locations; Clone ID: 701105121H1
gtttcgcaagtgcgatcgaagaagaacaacgacgatggcgatggctgcagctctgcgtcgcgaaggaaggcgtttgacccaaccaatcaacgccctccactcttctctcaattcctccctcatctctcaagaccaagcccctcatggcgcgcgctccatttccactcaagttgtgaggnaccgaatgaagagtgtgaggaatatccagaagatcaccaaggccatgaagatggttggccgcgtccaagctgcgggccgttcagaccagaactgaaaattcccgcggctctgg

SEQ ID NO: 32278 - DNA, 270 bp, Glycine max
  unsure (1)..(270): unsure at all n locations; Clone ID: 701105122H1
ggttaaaacgttacgtttaaaccncnctgcattgcattcncntatgatccgttaacgttaccnacaacgatggatgantcgaagcagcagcagcaacgaaaaanaaactaccgaaagagaagcgctccaacagacgaagntgaacttcctcaatctcaaagtaacaatgaatccgacgacgaacganancgaagaatggcattggaggaattaagctcctccagaagcagcgggaaaggaaatcgggnattccagcaaaccctngtttgc

SEQ ID NO: 32279 - DNA, 296 bp, Glycine max
  unsure (1)..(296): unsure at all n locations; Clone ID: 701105125H1
gnaagttgaaganacaatggngtatgcnantgntgnttcaantagnncaacaacatnttcaannctctcnccgcaacccatggaanggctgcacgaggtgggtcnccctccgtttctcaccaaaaccttcgntngnggtggaagacccatccaccaacgacatcgttnncgtggagcagagcccgcaanagtttcgtcgtttgggantctcacaagttctctaccancatcctggnntggctacttcaagcacaacaatttctccagnttcgtangacaantcaacacttaggttt

SEQ ID NO: 32280 - DNA, 292 bp, Glycine max
  Clone ID: 701105126H1
ggcgaagagaagagaaaaattaagatggaggggaaggagcaggatgtgtcgctgggagcgaacaagttcccggagagacagccgattgggacggcggcgcagagccaagacgacggcaaggactaccaggagccggcgccggcgccactggttgacccgacggagtttacgtcatggtccttttacagagcagggatagcagagtttgtggccacttttctgtttctatacatcactgtcttaaccgtcatgggagtcgccggggctaagtctaagtgcagtaccgttggga

SEQ ID NO: 32281 - DNA, 290 bp, Glycine max
  unsure (1)..(290): unsure at all n locations; Clone ID: 701105127H1
gctaacggagttcttccacggngagatcnngttcagagctatggaaaatgctggtttcaatttcccgaaaagccntcagntgcaagtngagcgccgagagcctcatcacctacgtccgcgagctccttccgacgatcgaagagatcaaatattccggcgtggagntgccggcgccgcgccagtntcanattcgaccgcntctcggagatctccgctccggcgtcgagctctcgcancaggcctctcctcctcccgctggaacgtgtaccgcaattccagctcgcnaaaaa

SEQ ID NO: 32282 - DNA, 293 bp, Glycine max
  Clone ID: 701105128H1
ttctacaattattgtaatctacccaatattttagggtttcgacatattccccatgcaattcaataacttgccgtgtaaattgatccattctaaacaatatctcccttcttagccaaaaagatcaaagtttcgttatttatagccaaaggctttctgggtcgttgtgagtcttgtgtttgagagattaagacctttttgcattgcaaatgggctgctgcaactgctggagttgttggtggaaaggttcgtctgcttcttggatgcgattcaaaggcaaggaaaggaagcaaacc

SEQ ID NO: 32283 - DNA, 292 bp, Glycine max
  unsure (1)..(292): unsure at all n locations; Clone ID: 701105129H1
ttctcttcactttaaagttacatagtttttcattgttttacttaatctacaatggctgcttcaacaatgactctctcttcatcatcattggctggccaagctatcaagcttgccccctccacccctgagcttggtgttggaagggttagcatgaggaaaacagcctccaagactgtttcctcaggaagcccatggtacggcccagaccgtgtcaagtacttggggcccattctctgggtgagcccccatcctatctcatggtganttcccagtgatatggttgggacactgc

SEQ ID NO: 32284 - DNA, 294 bp, Glycine max
  unsure (1)..(294): unsure at all n locations; Clone ID: 701105130H1
atgactactcaccattctctctctttccaactctgagcctcgcnccgttagctaggctccctgtctcttctcggagacccacaaaaccatttcttatttatttccttctcaaacaaagaacttctatttccccttgctgctcactgctcactgctcagatctattattactcaagtcacaacctttttgttccgttggcggtgtgaganatgagtaaagaagaattcttgaagatacagaaatgtgttcttaaagtgaacatacactgtgacgggtgcaagcacaaagtgaaga

SEQ ID NO: 32285 - DNA, 291 bp, Glycine max
  unsure (1)..(291): unsure at all n locations; Clone ID: 701105132H1
ctttcaagaaggctaatggaaaggatttggccctgcatgnatgcgccggggaccctcccctcacattcctcgncctcacttcttcttggagagtgggaagatcgcatgcagagaggactttttcgctatgatgttaccgcctgtgaaaccaaggtgattcctggtgaatatggtttcgttgcccagcttaatgagggtcgtcacctcaagaagagaccaactgagttccgagttgacaaggtcttcaaccctttgatgaaaacaattcanctttaccaaagttgggcaaga

SEQ ID NO: 32286 - DNA, 294 bp, Glycine max
  unsure (1)..(294): unsure at all n locations; Clone ID: 701105133H1
agaaaccctagncacgttcgatttgatgctctcccatttgcaatcaagggcgagcgcattcggttcttgcacgcaagggctggtactaccgctgcatcggcctcgatccctgaattcatcattctttctcgcaccatctttttctattccgattcgatnnnnnnnnnnnnnnnnnnnnnnnnnnnnnnnnnnnccttccttgacgaatcatcacgatgttgatgagcaagcagaagaagagccagatccagaacgcgaagaggttgttgataagcatcaatgtgctgnggagcg

SEQ ID NO: 32287 - DNA, 288 bp, Glycine max
  Clone ID: 701105134H1
cattgctactttagtggaatgggttttgaaaaatgcttcaaatgccaactgaaatttcaaatcttgttacatcgtatgtgaaacacaggatgagataagctcatcttgtgatgtttgtgcttcaatggggtttggttatatgaaataagttatttaaagggatggaaaatgtggtaaaatgaggcattttttagtgtattcaaacttttttctagatacaaaaaacaacctttttgttttttcacattaccaataattcagtttgccctcatagtttgttttattata

SEQ ID NO: 32288 - DNA, 291 bp, Glycine max
  Clone ID: 701105135H1
cttggggctccgcagcctcaggtattgggccatccatccacgggtgggttcttgacccactgcggctggaactctattctggagagcgtggtgaacggtgtgcctttcatagcctggcctctgttcgcggagcagaggaccaacgcctttatgctcacgcatgacgtcaaggtggcgctgaggcccaacgttgcagagagtggcttggtggagagacaggagatagccagcctagttcaagtgcctcatggaaggtgaacaagggaagaagcttcgttaccgaatcaagga

SEQ ID NO: 32289 - DNA, 270 bp, Glycine max
  unsure (1)..(270): unsure at all n locations; Clone ID: 701105136H1
gtgagaggggcagtagccgagattaccgtgagttgcaaaaatcnagacgattctttccaccgngaccatgaacatcccggacggcgtgagcatcaaagttcatgccaaggtcatcgaagttgagggcccccgcggaaaattggtgcgagacttcaagcatttgaatctcgattttcagctcattactgacgaaaacggtaaaagaaagctgaaaatcgacgcgtggtttggttctcggaaaacatccgccgccattcgcaccgccttgag

SEQ ID NO: 32290 - DNA, 288 bp, Glycine max
  unsure (1)..(288): unsure at all n locations; Clone ID: 701105137H1
tgggatatgcgtttgagaattgccactgaagtggctggagctctattttacttgcactcagctgcttctcaacccatttatncatagagatgtgaagtcaacaaatatattattggatgagaagtataaggcaaaagtagcagactttggggcatcaagaatggtttccattgaagccactcacctcactactgcagttcaaggaacttttggatacttagatcctgaatattttcatacaagtcaattgacagngaagagtgatgtctacagctttggagtggttct

SEQ ID NO: 32291 - DNA, 253 bp, Glycine max
  unsure (1)..(253): unsure at all n locations; Clone ID: 701105138H1
ggaaaanngcaagannaaatagagannagatcgatcgagatctccntcgcgtttgtcctcagttgaagaaattaaaaagcagaactagagtaactcaacggtctcagaattttcagggttttcagtacttccatattttttcttccggatttgagttggaagaagatcgaagaggtttctagttgcttcaattgttcctctgggtggtggagactgttatatttttaaaatattgacaattcgaaatgccggg

SEQ ID NO: 32292 - DNA, 290 bp, Glycine max
  unsure (1)..(290): unsure at all n locations; Clone ID: 701105139H1
ccttgcaanntggttctancacctgctctcncccaaactgctctttgttgtgctngcttcagcgtgctgcaggtagcaaagatgggcgacattgactgcttcaagtaacttagtctctagaaattctcatgtccaccatggaccaacaactgcttcatatgagtctaaagcagtagcaatgggacttagatctctgaagcagacaaatactcataatggactaagaattttgaacccggtggatgagctacttaacagaaccccattaaaaccaatgcagtgcaagctat

SEQ ID NO: 32293 - DNA, 280 bp, Glycine max
  unsure (1)..(280): unsure at all n locations; Clone ID: 701105142H1
ctaaccttnatcacactgtggactgtttgttctgttgcatttgcatgtggtgccaanttccatttccagaacctttttttttccngaattgttttccttttctatcattttctctttctctcgatcatcactctctctgaaaaatcatgaatataattgcgggagctttcaagcccccatgcaagatctcaatctgtcttgctgatggaagtactcccaagcaggttcgcataaagaaggaaaatggccanatggtcatggttcctctctttcaaagtca

SEQ ID NO: 32294 - DNA, 288 bp, Glycine max
  unsure (1)..(288): unsure at all n locations; Clone ID: 701105143H1
tctctctagaatccattttctctctctaaatttttctttctcattttctctctctttcttatctcggaaaatctttctgagctttcaaacgaactttggaattctccagaaccttctcgtttttccgccgaggatcgcgattccgcagaatcgttctcantcgtcgcttgattcggttcgattccgtggttcgagctgcatgaactggttcgggaagctgggattcatcatcgtcgaattgaacttcaatcacttcgttacgtgtcngttgagttttttcctccattt

SEQ ID NO: 32295 - DNA, 288 bp, Glycine max
  unsure (1)..(288): unsure at all n locations; Clone ID: 701105144H1
tttatcgtgaggagaatatgaagttgtttgtnttctttgttgctgcagtagttttggtagcatggccatgncatggcgcaggctaccaaaggttccctctccgaatgaaaactggctatggtgagcgttcttcggaggtaaaatgcgcaagttttaggcttgctgtggaagcacacaacatccgancnaatanaaccatnctgaagagtgcgttgaaccaacaaaggactacattaatggcgaacaatttagatcagactctanaacagttaaccaacaagctttctt

SEQ ID NO: 32296 - DNA, 290 bp, Glycine max
  unsure (1)..(290): unsure at all n locations; Clone ID: 701105145H1
aacaagaggcacaaaattttattattatgaagtgaganactcctcagagatgtttgttgcatcccttggcttgctcttgcacttatccctcccttttgttgcgatctttgtgtcccacatttacttcgtggtcttatcagctcaagcaactcaacagaaagaagaatcgcattttggcatccatcaatggtaacagtgcctacgatgtgggcggaggatatccggaattggagcagaatcagaatggaaagttgcattcagacatgtcttctcaacgcgagccctcctta

SEQ ID NO: 32297 - DNA, 290 bp, Glycine max
  unsure (1)..(290): unsure at all n locations; Clone ID: 701105146H1
agagtggagtaaaaaaaaagagcagtgtaaganattagaaagggcgaaaggcgcactttatctgaaagcaaaaaccctacctagggtcaaccgtgacgccacaatcgccttcggcatctttgcaacgggatcaggtgctcctcgtccttcacgatggcgggaactgaagccaaaaaaactgaatccnaaaaacctgccgctaagcaatccggtgcgaagaagaaggaggtgaagaaagganatggccttaggtctcacgcatcggaagcggagaactcggagagtggtat

SEQ ID NO: 32298 - DNA, 291 bp, Glycine max
  unsure (1)..(291): unsure at all n locations; Clone ID: 701105147H1
aaaatcttcancttttagcagttttttttttctatattgcagaagccatggatttcagggtgatgggtttggattctccattgttccacacgctgcaacacatgatggacatgtcagaggacgctgcaggggacaacaagacatacagtgctccgacacggtcatacgttcgagacgccaaagcaatggctgcaacacctgcggatgtgaaggaatatcccaactcctacgtattcgagattganatgccagggttgaaatctggggacataaaggttcagttgaagacga

SEQ ID NO: 32299 - DNA, 298 bp, Glycine max
  unsure (1)..(298): unsure at all n locations; Clone ID: 701105149H1
cgcatttgcgagaattcaaagatagaaaagcgacacatagtccacacggaagaataccncaaagcagaacttcagacagcggcacgtacgatggccttcccttggagacacgacagaatgtccccacggaacaggtaataaaattaggtatggaagcagcatcaaaggccattaaggaatggggcgaacccttatcagaaatcacacacctncatgcttctacaccacttcttgctccgggctccgttcccggtcctgaccatacctctccaaacaacttggactccgctcaaggtca

SEQ ID NO: 32300 - DNA, 286 bp, Glycine max
  unsure (1)..(286): unsure at all n locations; Clone ID: 701105152H1
ctccaccacctaatcacttaccctgtaaatcacgtttagttcgcacaaggttttaaaaaatggntgatgctgaggacattcaanctcttgttgttgataatggaactggaatggtcaaggcgggttttgcaggtgatgacgctcctagggccgtgttccccagtattattgggcgaccacgccataccggtgtaatggttgggatgggtcagaaggatgcttacgtgggtgatgaagctcaatcanaaaggggtatactcaccttgaagtatcctatagagcatgg

SEQ ID NO: 32301 - DNA, 285 bp, Glycine max
  Clone ID: 701105154H1
ttttattttattttattttcctggttggtggggaatcggggaagtgtaggctaagatggggatgacagatgagtttgagacttctttgcaagtgttacgaggatttgacacagatatatctgttgaagtatatgaaattaagatctgtggctcaacgggaaaaagagctacaatccgatttgcagatctcaagaggaaaagatattggttccccttaatggttggtattgggattacttgttctcagcagttatctggtatcaatggagttttgttctattcaac

SEQ ID NO: 32302 - DNA, 289 bp, Glycine max
  Clone ID: 701105155H1
tcaacttcaacctttcttcacttcccttcacatggcagctcttgtgaaaccaatttccaatgtcactcccaaatttgtcagcagccccagaatgggctcatcacactcctccaaattcagcaccataataagaatgtctgccactgccaccccaccaccatccacctccacaaagccagcaagcagcaagaagggcaatatcaaggagaccctcttgactccaagattctacaccactgactttgatgagatggagacactcttcaacactgagatcaacaaaaacctc

SEQ ID NO: 32303 - DNA, 286 bp, Glycine max
  unsure (1)..(286): unsure at all n locations; Clone ID: 701105156H1
caaaatccaaccaagtctctactattatccattattgtctgccacatcttccccttagtactanaaatgaggctgccacaactaaacttgttcttagtgtcatntnntgttgctctttgttgccagagcaaatggttctctgctcccattcatagatcctcccaccactctcttggctgatctctggtccgatcgcttcccggacccgtttcgagtgctggaacagattccattggtgttgacaaagatgaaccctccaggctatgtcactgctagagtggatgga

SEQ ID NO: 32304 - DNA, 287 bp, Glycine max
  unsure (1)..(287): unsure at all n locations; Clone ID: 701105157H1
cnatagtactctgagtngaaaatagagagagatagatattggcacggggcagatagggttagatgtgagttgtaattaagcacactatttccacccacaccacaagctccttatcgtgtttgcattgcagagagagagagaatggcgaccacacccggtttgtgtggcagtgtgttgttgagcacctcgttcctgaggaagcaggcaatggcatcagtgaacatgagaatgctgaaggctaatgctggtgtttttggctaaaggganggcgtggagggcgtgtgagt

SEQ ID NO: 32305 - DNA, 287 bp, Glycine max
  Clone ID: 701105158H1
acatggcaagagtggtggcactccaacagaaccaactatctttctctaccttagcttcctctctttctgacttcagtggaaccagacttcaaactcaacttcagttcaagagaaagcaatgccatccaaaagggtctttctacgtctccgcatcgagcaccaagaaaatcctaataatgggaggcaccaggtttattggtgtgtttttgtctaggctccttgtcaaagagggtcaccaggtgactttattcacaagaggtaaagcgcctgtcatcaacagttgccag

SEQ ID NO: 32306 - DNA, 285 bp, Glycine max
  unsure (1)..(285): unsure at all n locations; Clone ID: 701105159H1
tggaaaaaagggagtgaaaagtctgctcgctgttccaattagcttcgtcagtgagcatattgaaactctagaagaaattgatgttgaatacaaagagttggctctagaatctggtatagaaaagtggggccgtgttcctgcnctaggatgcgaacctacctcatttctgatttggcagatgccgttattgagagtctcccatatgttggtgccatgacagcttcagaccttgaagctcaacaatccctcgttccatgggcagtgtagaagagttatggcagcata

SEQ ID NO: 32307 - DNA, 289 bp, Glycine max
  Clone ID: 701105160H1
actaccatggctaccgctccttcgcttctacactcatctgggtcctcttttttctctcaatttcgagcctttcaattctcttcttcttcgctgttccctcatggaaacaggcatgggaatgccgtggtctctgtgaaggcctctgcttctggggttgtgttggtggagaagtctgaggcagagaaggccaataggctcaaaacagcttacactgagaaaattattcccttgcttcatggaagagttctcttacaccaccaaacaccaggtgcctaaaattgagaagatt

SEQ ID NO: 32308 - DNA, 290 bp, Glycine max
  unsure (1)..(290): unsure at all n locations; Clone ID: 701105161H1
taacgggaaaaaaatgagtgtgtgagantcatttattttctccctacttttccattggttgaattattntctgtattttttttattagcacatgattttgcaacttaaaagcatgattgtgggaaagcaggagaaaatagatcgactaacactttaattaatttcttattcacaatgcataaaaataatactcttttatgttaaattaagtatataagatctgatagagtaaatatggcttgtgcgtgtggtccttccaatgtaacacgtacggtgcggctggtgttgtt

SEQ ID NO: 32309 - DNA, 294 bp, Glycine max
  unsure (1)..(294): unsure at all n locations; Clone ID: 701105162H1
agagataagggtgctgcagaacaagagaatgaagaggcgcttccatatgatgtgcgccttaaggaacctcatgcagcagtatccggaattattggtagcacctttgcttcctggatttggaatggaaggagcttgtctagcattgattccagagaagatccagaggtgtcaacaagcaagagatctcgacataatgctgatttgtttggctcagtttggctactcctttcagcatgggcanattccacaaaaaaatatggggacttaaccagggtagatgctcgtttagatata

SEQ ID NO: 32310 - DNA, 291 bp, Glycine max
  unsure (1)..(291): unsure at all n locations; Clone ID: 701105163H1
tcaaactttgtaacttcaaaacatactcctctgttctctctgtttctcttcaatcttcctgaaaaaaacaaaaacacgaaaaatcatccaccctctcacattctntctctctctcctttcaactaatatggncaattgaaaaccaagacaacactgtcagagaaatcaagccaaagaacaggagaatcatgggtgctggaggcccgatgatgacgacaataggtggncaccgtggttgaagccatgctgaaagagagttctttgttcatgcaagttgcatgctgactctca

SEQ ID NO: 32311 - DNA, 275 bp, Glycine max
  unsure (1)..(275): unsure at all n locations; Clone ID: 701105165H1
ctttattctcccaatttcaaaactcnctctccgttagaagcanctaatcctgatggcaccanacngcagagaagaagccagcggagaagaagcccgcagaggagaagaagtccacggtgggagacaaggctccggcggagaagaagccaaaggccggaaagaagcttccgaaggagggaggcgccggcggcgaaggnnnnnnnnnnnnnnnnnnnnnnnnnagcgtggagacatacaagtctacatcttccaaggttctgaagcaggttcaccct

SEQ ID NO: 32312 - DNA, 291 bp, Glycine max
  unsure (1)..(291): unsure at all n locations; Clone ID: 701105166H1
cttggccgcatagtcacatcagatattgaaaccaaaccagaacgaanaacctcgccgtcgacacgatgcggagtttcaggatgagaaacttgttgtcccgtgtcaaaaagaaaaccatcaaaaacagaaacagaagttgcatttccattacaaaagagttanccacatctnnnnnnnnnnnnnnnnnnnnnnnnnnnnnnnnnnnnnnnnngtttcaacatcaaaagctctgccccatcacacactcacggtgttcaaccctggggaatctctatctgaacacaagttcca

SEQ ID NO: 32313 - DNA, 286 bp, Glycine max
  unsure (1)..(286): unsure at all n locations; Clone ID: 701105167H1
tgggatgggattgttgactggtgttggaattgagagagagaacggaaggatggcaagangaccaagatgaatgtgattcaacttgcgaatganagacaaaatccatattcagaattgcatgatatgcacaaagtcgatttttaattcacaatatgagctagccatggaactaacatagaggatgattgcnagtatggattcaccatcacaaggcttgacttagctgactgagtcaaccaaaatggatgcatccgaagaattttttgaaagccacaatgttaataag

SEQ ID NO: 32314 - DNA, 288 bp, Glycine max
  unsure (1)..(288): unsure at all n locations; Clone ID: 701105168H1
atnctaacagcaagactgtgccggcatcaagcatcccagatgggtggatggggttggatattggtccngattccatcaagacatttggtgaagcattggatacgactcagaccattatttggaatggaccaatgggtgtttttgagtttgataagtttgccacaggaacagaggctatagccaagaaactggcagagctgagtgggaagggagtgacaaccatcattggaggaggtgactccgttgccgctgtggagaaggttggacttgcagacaagatgagccaca

SEQ ID NO: 32315 - DNA, 284 bp, Glycine max
  unsure (1)..(284): unsure at all n locations; Clone ID: 701105169H1
ctggattagtagtacttgtgaaaaacttgtaacgtgaaattggagacgctaagcagaaatgcttctgcttgatgttaagtgttctcctgtgaatgttaattatgcacgaaatcgagagggaaggacgacggtaaaaaatactgatgaggttgagatcactatgaaaggtaatggcaagaaantggattgaggccattggagattttaatttattcatttattaagtttgattctacataaacgctgatttgctgcagtacagaaaatagcgctggtttaccgaa

SEQ ID NO: 32316 - DNA, 283 bp, Glycine max
  unsure (1)..(283): unsure at all n locations; Clone ID: 701105170H1
tgcagcggagcagaaagaagcaaagggggaagaaaggtggtgtgtgttgtcgcaatggacatcactgncttgcaaatccctcaacattccatttccaacctttccatcaaaattttctccttttcgtccattcagtttctttcacttcaaaccttttcgcactccttcctcacctcgcttcatctcccattgctctctcagtaatttcattttttttttgcctctctctctattttttatttatgggtaatttcttttcttgttccaaagttgtttttgttct

SEQ ID NO: 32317 - DNA, 285 bp, Glycine max
  unsure (1)..(285): unsure at all n locations; Clone ID: 701105171H1
cttcaccaagcacttttggttgcagctttggttaatttccaatatgntgtttcctctcctatctatctttgctttactcaatcttgcagtggtggcaacccatgcagaaaccttgccccctgaagtttactggaagtcgaagcttcccaccactccaatgccgaaagccattacagatatccttcacccagatttggcagaagacaaaagcacctctgtggccgtaggaaaggggggcgtaaacgttaacgcaggaaaacaaagccaggaggcacatcagtgaac

SEQ ID NO: 32318 - DNA, 54 bp, Glycine max
  unsure (1)..(54): unsure at all n locations; Clone ID: 701105172H1
atttaatnatgnagcctcgttgagttctntgtntatatccactantnactaaca

SEQ ID NO: 32319 - DNA, 284 bp, Glycine max
  unsure (1)..(284): unsure at all n locations; Clone ID: 701105173H1
aatgctctcttcaaacccctcactcctaataaggaaatggtcgaccccaacaccttgcttcactacaccaacgtcctcgacgctatggtcgacgccgcttatttctccatgaagaaccttaatatcaccgatgttgttgttcttgtcaccgnnactggctggcctgccaagggtgattctaaggaaccttatgctaccaaggacaatgctgatacttataactccaatttgattaggcatgtcttgatcgcagtggaacccctttgcatctgagactacttcca

SEQ ID NO: 32320 - DNA, 284 bp, Glycine max
  Clone ID: 701105174H1
gcagagagagtggtgtgttgcgaattgcaatggcagttaaccgtcctgtccttcgtgttcacgagaatctaccattagcattaactgttgctcctcaccaattcctccccttcaaattcacctccgttggaattcgtgctcccctttcaacgacaaaaccctcatttccatcaaacctaacacttcccacctcaaccacgacactctcgcttgtcgctttcacgtgcccagtttgctgaacaggagagcaacaagtacgtggaagcctatgctgtggggagaaa

SEQ ID NO: 32321 - DNA, 284 bp, Glycine max
  unsure (1)..(284): unsure at all n locations; Clone ID: 701105175H1
cagaagcagcaatgaagaagaagatgatggcaagcacagccatctccctcgtcttcgncgcgctcttcctcttctcctccgtccactctttctacctccctggtgtcgctcctcgcgatttccaaattggtgaccccctctttgtcaaagtgaacaagttatcatctaccaagactcaacttccatatgactactacttcttgaagtattgcaaacccaaaacgatattgaacantgcagaaaatttgggagaggttcttagagtgatcgtattgagaattcag

SEQ ID NO: 32322 - DNA, 264 bp, Glycine max
  unsure (1)..(264): unsure at all n locations; Clone ID: 701105176H1
cttgattgcnttcttggattttctacngggtcgggggtttacnctctctttctctgcagtacnatggatcgggaaggaggatccaacgccggatcttgctactactccgttctcgggattcgtagggatgcctccttctctgatattcgcactgctaccgcaaactcgctatgaggtggcacccggacaagtggggctctgaatcccgcaaccggncggcgaacaaagcgccggtttcagcaaatccaagaagctactcagttc

SEQ ID NO: 32323 - DNA, 286 bp, Glycine max
  unsure (1)..(286): unsure at all n locations; Clone ID: 701105177H1
ggaggacgaggatgctgtaccttattattcacacactcttgtcacgcgcgcattagtgtctcaaatctcaattccgtttccccttcctcttctttcggagccacacacacgtacgtacatatatacgttaacacgtacgtaagttttatatagtaaaaagtattaattacgacatatacgacacgaatnnnnnnnnnnnnnnnnnnttttgttatctccgtcgcgctgttggcgggcggtactggcggatcgccggcgactctgactttggaaagagcgtttccga

SEQ ID NO: 32324 - DNA, 290 bp, Glycine max
  unsure (1)..(290): unsure at all n locations; Clone ID: 701105179H1
ancttttctcttnatccaaatacgatggcagcnatggcaaccacaaccctctcttcanaccccaaactctcattcttcaacggaaagcccgtnacatattcttcccgcgtcgcgcccaccaccaaattatcctcatccaaacaaggcacaattacatgtccctaaccccacccncctacgacttncagtccttcaaattccagcccatcaaagaatccatcgtgtcaggggaaatgacgcgcgctacatgaccgacatgataacctacgccgacacngacgtggtatcgt

SEQ ID NO: 32325 - DNA, 292 bp, Glycine max
  unsure (1)..(292): unsure at all n locations; Clone ID: 701105180H1
aagaaaaaaaaaacccttagccaacacaaccatcatggnccacctctgctattcagcaatcagcattcactggtcaaactgctctgaagcagctcaatgagttcgtccgcaagaccggtggcgccggcaaaggtcgcactaacatgcgccgcaccgtcaagagtgctcctcagagcatttggtatggcctgaccgtcccnagtacttgggtccattctcgggagcagattccatcantacctgaccggagaattccctggtgactacggatggganangtggttatcagtng

SEQ ID NO: 32326 - DNA, 293 bp, Glycine max
  unsure (1)..(293): unsure at all n locations; Clone ID: 701105181H1
tgaactcaattcaactcaacattcttcantcaaatcagccatggcagcagaacccacccgccccgtaaaaatcattcgccgccgccgatgacttcggcactcctctcaaagacgccctcgtcgctcacttgcgcactctcaacatccaagtcgaagatctcggaacctcttcctactactccgccggagccgaggtcggtcgccgagtctcccaatcctcctcctccgacatccgtgggcctcgtcgcctgcggcaccggcgccggcgtctccatcttcgccaacaaatatcc

SEQ ID NO: 32327 - DNA, 289 bp, Glycine max
  unsure (1)..(289): unsure at all n locations; Clone ID: 701105182H1
ggagaacaccatggtgagcacaaaggtgaacacaaaggagaacaccatggtgagcacaaaggtgaacacaaaggagaacaacaccatggggagcacaagganggacttgtggataagatcanggacaagatccatggtgatggccatgacaagggtgnnnnnnnnnnnnnnnnnnnnnnnnnnnnnnnnnnnnntggacatgaccatcatggtcatagcagcagcagtgacagtgatttagatcttatatgttaagcaggtgtacggtacgatggtagtgaggagccnc

SEQ ID NO: 32328 - DNA, 276 bp, Glycine max
  unsure (1)..(276): unsure at all n locations; Clone ID: 701105183H1
gaaaggggttgtattgttaaatgtgagcttgtcaagggaagtagttccttcctttgctagaatccttctgcatacttcacttggaaagaaacatttggttcgtccactactaagaacagaaatcacccatgtggtgaatcggcgctcgtggtatgacgctaccaaactgacaacagaagttttgactctntataaggctccactatatgtagaaggatgggatgaagcacttcatgagattggtaaattgtcatcggaaactatccttctgcaaaa

SEQ ID NO: 32329 - DNA, 282 bp, Glycine max
  unsure (1)..(282): unsure at all n locations; Clone ID: 701105184H1
ttccgttcctcttcaccatcaagcagttggtggcatcagggaagccagacagctttagtggagagtttctggtcccatcataccgtggaagctctttcttggaccccaagggaagaggtgcctctacaggttatgacaangcagttgctttgcctgctggtggaagaggagatgaggaggaacttgccaaggaaaacaacaagagtgcctcatcatccaaggggaaaatcaccttcagtgtcaccaagaccaagcctgagaccggcgagttatcggtgtgtt

SEQ ID NO: 32330 - DNA, 283 bp, Glycine max
  unsure (1)..(283): unsure at all n locations; Clone ID: 701105185H1
aaaaggtaaacttttgcaacaaccatggttgcaatggcagcagcaacagcatcctcccagttgattttctcaaagcctcgctcaccctcgcgtctctgtcccttccaactaacngtctttgacaccaaacaagtgctgtcaagttcaagtggcaggagaaggcatgtggggggttctggagttaggtgcatggcggtgggagaagctgcaaccactgagactaagaagagaagtggatatgagcttcaaacactcactaactggttgctgaagcaggagcaag

SEQ ID NO: 32331 - DNA, 285 bp, Glycine max
  unsure (1)..(285): unsure at all n locations; Clone ID: 701105186H1
cgcttgtactttggatgatgatgaggtgagtgtgtaacgagaaggtagggtagggtgcagattgnagaggattgggaattttgaatttgaacaacaatccgagcttgcttgtttcctcgttctgttctgagctctaatggaagcactatcccttcccataaacactctcaccaattcctctgccaaacaacacatttatctgagtgcttcttccaattatgcctcactctcttcttccttacaactcaatcctnctctcccaaccagacccctcactctgaggaa

SEQ ID NO: 32332 - DNA, 282 bp, Glycine max
  unsure (1)..(282): unsure at all n locations; Clone ID: 701105187H1
gcttcttcttctnccttgccctctctcgctattgngcttttctttttaacacggaatatgagtncacacaaaagggttttgaggcttctatcactctaaagctcttagctcattcacctcttgggtggtgtggtctattatgtaaattaccatttgtgcaattttttctcagatctatccaacttctcttttttatccttattctgtttgcaaatcgccatcatcaccatttgatttgcaagaccataattttctgctttggttttcccctcttccacacaa

SEQ ID NO: 32333 - DNA, 281 bp, Glycine max
  unsure (1)..(281): unsure at all n locations; Clone ID: 701105188H1
aaatttgtactactctattactccttccaaattttctctcaccttatctcccacctaatccattaagatgacttcatacggtaccacaattttggcacacntgtttggccttcttgctctcatcctcttgcttgtttggttgctgaattatcgcgagggcattgaatatgattctgaaaatccacttcgtgttttcaatgttcaccctttatgatgttctttggatcattttcctattggtcaagcaatactgtcataccaaacggtgccagggccaacga

SEQ ID NO: 32334 - DNA, 286 bp, Glycine max
  unsure (1)..(286): unsure at all n locations; Clone ID: 701105189H1
ctggggattggtattatcagagtctgaatctacaaattcaaaatctgtaaatagtgtcagcncttgcaagtngaagggngtccatgtgtttcctttggaagagagtggtatctcagaggaatctgtggaaaatggaactgaaagtgtttctgcacaagaggaagacncctgagcagtattttagctttctgaaagtcttgactgaggggaacaattggaggaagcaatgtgaagtagtagaacagttaaggcgctgctgagggatgacgaggaagccaggattttt

SEQ ID NO: 32335 - DNA, 284 bp, Glycine max
  unsure (1)..(284): unsure at all n locations; Clone ID: 701105190H1
cccgaccaaaacaggtttttgtggccaatcatacttccatgattgatttcattatcttagaacagatgactgcatttgctgttattatgcagaagcatcctggatgggttggattattgcagagcaccattntggagagtgtagggtgtatctggttcaaccgtacagaggcaaaggatcgagaagttgtggcaaggaaattgagggatcatgtcctgggagctaacaacaaccctcttcttatatttcctgaaggaacttgtgtaaataatcactactcgtca

SEQ ID NO: 32336 - DNA, 290 bp, Glycine max
  unsure (1)..(290): unsure at all n locations; Clone ID: 701105192H1
aacactaccctgaacatagtaaanaagccagtgctaggatttgttagtgaagcaatggctcaaaccatgttgcttcatgtctagtgtctctagcagttattccgtggatttgaagaaagaccttttcctccaattgcagagtcnaagtttaaggcctaagttctctcagctctcattcaacccacttccatcatcaacttcttccatttcttcaccccgtacattcacaactctgggccctcttcaaatctaagaccaaagccgttcctgctaagactaaggttacaaat

SEQ ID NO: 32337 - DNA, 284 bp, Glycine max
  unsure (1)..(284): unsure at all n locations; Clone ID: 701105194H1
cnggatgttgaagttgggtcttagcattgatgaggatgacaatggtggagacgatgttgatatgcccccattggaagaggacggtgctgaggagagcaagatggaggaagtggactaaatgccaaaggtctcgtgttaaatgaattgtggttcgtgtctgttaaatggtggtggatgcagaagtcttttagttttatctttctttttgtnttgttttttgagatatatagggttttacttttaagtttttgtgatgtgaaaaaaatgtgtctgtcagtcgtgtg

SEQ ID NO: 32338 - DNA, 274 bp, Glycine max
  unsure (1)..(274): unsure at all n locations; Clone ID: 701105195H1
ctctncctctctctctactctgagacacaaaggataattattagaaattatggctggttattcataancttcagntctttggatcctgaagcgtctctttggcttctctgtngctaaggatattttggttggaggtaagactgatgcatngaangtttcagcctctgaatcagattcactcaaccaatgggcaganaagtctcgtttccanttggagactatctgtntgganatatnanggggaaannnctnagngtggcaattgagcaagaga

SEQ ID NO: 32339 - DNA, 289 bp, Glycine max
  unsure (1)..(289): unsure at all n locations; Clone ID: 701105196H1
gtatctgggtaaccttcagttgccactnctcactcattaatcattatntatagaatcctttgntggaatcttatcctatccccataagtaactatcactacccactgacncatgttctgttcagatggctctgctctgtattcgtganangtgacgaacctcattttcacttcactcctaatcatttccgggtagatcgggtatcatggcgctggacacaaagnacaacatcgcntcatctcccngttggaacctctgccttgtcgaatnccaaacgagcttngagtnt

SEQ ID NO: 32340 - DNA, 277 bp, Glycine max
  unsure (1)..(277): unsure at all n locations; Clone ID: 701105201H1
tncgtgcaatgttgnantagaganaanaagcgaacatgctntgtgtctttgtnagnattggcnnnactnacncntgtgaattntttgtttaggttgttgcagaaaatgatancaaagacaagaggatnanattcggctctgatgatggagantccaaaatcaccaagagtaacacancaaacncnaataccaacaacaacanagaaacttgcgcagagacttcaaattccaaggcctccgaaaagccngattacattcatgtccgagcacgtcgtgg

SEQ ID NO: 32341 - DNA, 279 bp, Glycine max
  unsure (1)..(279): unsure at all n locations; Clone ID: 701105202H1
gtacaccgcacgcngacgtntccggcagccantgtccgtntttancttgtaatttgtgaactncagcataaaaggggtgggntcacgcnttgcaaccattggaanttccaacaatggcaggcatagctatactttnagatctatggaggnnaaatcaaaacttganctnctggattgcactcctctcatgactttncagtcttccagtgnctttttntctgcctctgctggnaactgctgctgcagcgtcttttgntgcanggactggttgtgcctcaa

SEQ ID NO: 32342 - DNA, 273 bp, Glycine max
  unsure (1)..(273): unsure at all n locations; Clone ID: 701105203H1
ctttcaacgccagttcacactctntgcttcgcgtgtaccaacaagtgcaagttcgnatcaatggccagcgctcagctcacagcaatagcgtcatcgatctctacggcgtcgtttgaagggcttcgacctccccgctgttcagtttgcttccacgggcagaattagaattggcaatctctcccaaaggtccttccggggcttggttgtcaaagccgccaccgttgttgcccccaaatacactgcgataaagcctctgggagatagagtgctaat

SEQ ID NO: 32343 - DNA, 273 bp, Glycine max
  unsure (1)..(273): unsure at all n locations; Clone ID: 701105204H1
tacaattcttccgttcgttctctgcagttatatcctttttgagctncaattgncggacgctcganacctttcgntttccaggctgagatcaaccagnttctaagtctcatcatcaacacattctacagcaacaaggagantttcttgcgtgaactcatcagnaatgcttctgatgctttggataagattcgattcgagagcttaaccgacaagagcaagctcgatgctcagccagagctnctcattcgtctgtgccganaaggataacaagac

SEQ ID NO: 32344 - DNA, 269 bp, Glycine max
  unsure (1)..(269): unsure at all n locations; Clone ID: 701105205H1
agctagcaccacattcacctgaggcttccaaagcaatggcttcccttgcagcatccactgctgntgcttcccttggcatgtcaganatgcttggaanccccatcaacttcagtggtgccacaaggccagctccatctgcttctagtcctgcctccttcaagactgtggctcttttctccaaaaagaaggctacaccaacacctccaaaaaaagctgctgcngctgctcctgccaatgatgagcttgccaagtggtatggncctgacaga

SEQ ID NO: 32345 - DNA, 270 bp, Glycine max
  unsure (1)..(270): unsure at all n locations; Clone ID: 701105206H1
cncncctctctctctcggtgtctggnacagagattgagtttgtntcnccgaattgtgaagccgctggtgaaatagcanccaatatgaggggaagaagctgcagttacagcccatcaccttcacctccaaggcgttacagccgaanaaggcacagccttngccctaggggccgatatagaggatgtgatagggatttgccaacaagtcttctggttcgaaacctcaacagagattgcnggccagaagatctgcatggtccattggccaatt

SEQ ID NO: 32346 - DNA, 275 bp, Glycine max
  unsure (1)..(275): unsure at all n locations; Clone ID: 701105208H1
tctgcttgcaagagtgaaaaccttctcttacccttctgctcaagtttcaagagatttcatcatggctccaaagaaggacaaggctccaccaccttcctccaagcccgccaaatctggcggtggcnnnnnnnnnnnnnnnnnnnnnnnnnnnggaaanccaaaaggagaaggtgaacaatatggtgctgtttgatcagggcacctatgacaagctcctttctgaagctcccaaatacaagcttcatcactccttccantctctctgatcgtttgag

SEQ ID NO: 32347 - DNA, 271 bp, Glycine max
  unsure (1)..(271): unsure at all n locations; Clone ID: 701105209H1
antntntcttattctcntcctctctgctgtactctgagacacanangaaaattataaganatnatggctggtgattcaaaagcttnanctctttggatcctttnncttctctttggcntctctgtagctaaggaaattttggttngaggtaanactgatncatggaaggttncagcctctngatcagatcactcanccaatnggcagaaaagtnctcgtttccaagttggagactatcntgtttngaaatngcnggtggaaaanactcngc

SEQ ID NO: 32348 - DNA, 272 bp, Glycine max
  unsure (1)..(272): unsure at all n locations; Clone ID: 701105211H1
gcctttgaacatcgttttgcngccatgganacaggcatagcatgntagcactcgcgggnctttccngcctagtgtttcttccaagcantctccaccctccatctctccatcttttggcttgaggagtctgaaatcgagctctttatttggagaatctctaagantggcatccaaatcaacactaaaggtttcaaagacnaagaatacttcactcgtgaccagatgtgaaattggtgacagtctgggaagaattcctcacaaaagcaacaccc

SEQ ID NO: 32349 - DNA, 269 bp, Glycine max
  unsure (1)..(269): unsure at all n locations; Clone ID: 701105212H1
caattttctcctccttttgtgcttccaactcttttctttgttatattattctctttcactttctcccaacccttggaatcganatgactatcctcattgagcaatctgatcactttggggctgaagtagaggcaaagactgaaccaataaatgagagggaactggtgttggatggtggatttctgataccacagaccaactcatttgggcacatgtttagggcttataatgatgctggaagtgagaggcgtgaaggagtggagaacttc

SEQ ID NO: 32350 - DNA, 270 bp, Glycine max
  unsure (1)..(270): unsure at all n locations; Clone ID: 701105213H1
gtaacgcgnaanataangagncgcagtcacacacnaacagnctacanaggcttcttngcagttcaganggaganagagantgtganagttggaatggcgaaaaaggcagtgttgatcggaataaactacccaggaacaaaggcggagtgagannatgcataaacgacgtgtngagaatgcatcgctgcctnatcgancgatacggtttctccgaagacgacatcancgttttgatcgacacggacgagttcttacacggagcccaccggg

SEQ ID NO: 32351 - DNA, 273 bp, Glycine max
  unsure (1)..(273): unsure at all n locations; Clone ID: 701105214H1
gagaaagtttgtnatagagagagaaagcgcgctgcttgcttcttctggcttcttctgctgctgctttcgaacagtgagaagagagaganaagcgctcttctccgtaccgtttctagagagagaaactgatggccggagttaatccgaacggcgtcgccgattttccggcgactccaacgcacggcggacagttcattcagtacaacatattcggnaacctcttcgaggttacggcgaataccgtcctccgatcatgcctgttggacgcggcgc

SEQ ID NO: 32352 - DNA, 270 bp, Glycine max
  unsure (1)..(270): unsure at all n locations; Clone ID: 701105215H1
gcgacaagggttgctaaggctttcaagaaatcatcaccaaggatatgtaaatactggatcaacaacaattgtgtacatggtnaacaatgcctgtatctgcattcatggttttgtggtgatgggttttccaccgtaaccaaacttcaagaacataagaaggttatcactggcatcgcacttcctgttggatccgacaaactttattctggcagcactgatgggacagttaggatatgggactgccatactggtcaatgtgctaaagtcatc

SEQ ID NO: 32353 - DNA, 292 bp, Glycine max
  unsure (1)..(292): unsure at all n locations; Clone ID: 701105216H1
gaaaaaactagagtgaatntcaaaacatgtcaattgtnttctntggntggctgcaacccttttcncctgggnctcggttattattgccctcccacttagtttttactacacacttaccctacngccatgtgcatcgaaatgggtggcatgccaagtctctgccaaatncgaggacgcangccccttatttacaaactnctttggtttgctgataagtttccaacggtgggttcgctgtcaacgggacccatttccatccagttcacctcattgnagtggttnaaactgctgg

SEQ ID NO: 32354 - DNA, 271 bp, Glycine max
  unsure (1)..(271): unsure at all n locations; Clone ID: 701105217H1
catgttttgctgattccgcgcatatttgagtgnttgcctcaaaggattgaccgtgagagttcctccttgcacttcagatggcagtggaagccgataatccttattttcgattgggttacaacagcttgggtgcttttgcaactatcaaccatcttcacttccaggcttattatttggctctgcccttcccaattgagaaggcccccactaagagaattgcaagtgtaaatggtggggtgaagatatctgaactgttgaagtatccggttag

SEQ ID NO: 32355 - DNA, 277 bp, Glycine max
  unsure (1)..(277): unsure at all n locations; Clone ID: 701105219H1
gtaaagccttgtngctnccatngcnanccncgcggctcttnccttaccacnaggatnccttccaaacacaaggttcccatncaaggcntcncantctttnccaacccaatgcgccnctaaagagacttgcggtgacagaattctctgggcttagatccacttcatgtgtcanancatgctaacagngctagagnntcttcctttnttgatcttgtagcttcccaantcantcccaanacnaanggatnaactcctgtgaggggagaggnagtggcct

SEQ ID NO: 32356 - DNA, 271 bp, Glycine max
  unsure (1)..(271): unsure at all n locations; Clone ID: 701105220H1
tgcaattnangttgaagtcttgcccttctctcttcaactccaaacacaagacatcancatccatggctgcctcgcgtcctcnantgtgggagctgtcaacagagctcttttgaacctgaatgggtctggacctggggtttcagctcccagttcatccttctttgggagcagcttgaagaaggttattggctcaagggtccccaacacaaagatttnctctggaagcttcaagatgttgctgtagaagngaaganagagattgaagagancc

SEQ ID NO: 32357 - DNA, 274 bp, Glycine max
  unsure (1)..(274): unsure at all n locations; Clone ID: 701105221H1
gggaaagagaagccacttccaatttcacacacncacngcaancacactngcactgtgtggaaagtaagcatgggcaagagtggtggcactncaacagaaccanctatctttctctcccttagcttcctctctttctgacttcagtggaaccagacttcaaactcaacttcagttcaagagaaaactatgccatccaaaagggtctttctacgtctcggcatcgagcaccaagaaaatcctaataatgggaggcaccaggtttattggtgtgttt

SEQ ID NO: 32358 - DNA, 50 bp, Glycine max
  unsure (1)..(50): unsure at all n locations; Clone ID: 701105222H1
aganaagaagcacncttttgtggtgnctctntacctctctctctnnctga

SEQ ID NO: 32359 - DNA, 272 bp, Glycine max
  unsure (1)..(272): unsure at all n locations; Clone ID: 701105224H1
ggagaatatgaagttgtttgtnttctttgttgctcgcngtagttttggtagcntggccatgccatgggcgcaggctaccaaaggttccctctccgaatgaaaactggctatggtgagcgttcttcggaggtaaaatgcgcaagttttaggcttgctgtggaagcacacaanatccgagcctnnaaaccattcctgaagagtgcgttgaaccaacaaaggactacattaatggcgaacaattagatcagactctaaaacagttaaccaacang

SEQ ID NO: 32360 - DNA, 269 bp, Glycine max
  unsure (1)..(269): unsure at all n locations; Clone ID: 701105225H1
cttcaagcgatcaaggaaggtgttaatttgaagggctattatgcatggtcattttcggacagtttngaatgggatgctggttacanagttcgattcgggctcatatatgtggattacaagaacaacttgaaaagataccccaagttctctgctttttggttgcaaaagttccttctcaagtgatctgaatttagtgttcctttgacatgtctagtgtttttcttgtttatttccctagatttcatcgtatatcacttgtgttggatgta

SEQ ID NO: 32361 - DNA, 231 bp, Glycine max
  unsure (1)..(231): unsure at all n locations; Clone ID: 701105227H1
ctganttgcgatcagcatccattgatgtacgcggcagaggnttnncgcgtcttcgccgtgcgcggnggnaacgcttctccggcggtngctcccaccaccaactggcttaaaaatcgcagctttcagcanacccactttccgnnacagcgtgaatgcgaggtnggcgaaggctttgacgctctgtcgctgcantgntgactcaaagtcctccgtcggcgacgaagttttctt

SEQ ID NO: 32362 - DNA, 270 bp, Glycine max
  unsure (1)..(270): unsure at all n locations; Clone ID: 701105228H1
gaanaacttagctactaaggaaggatcaaagagaatggctcaagcaatggcatcaatggctggcttgcgtggttcctctcaggctgtgttggaaggtagccttcaggtgagtggctccacacgcttgaatgtggggagtggaagcagggtggcctcagtcacacgtgcagggttcacagttagagcacaacaacaacaagtgagtggtgaggtacaaagcagccgtagggcagtgctttcacttgttgctgctggtttggccactggctc

SEQ ID NO: 32363 - DNA, 273 bp, Glycine max
  unsure (1)..(273): unsure at all n locations; Clone ID: 701105229H1
gttttgncgtgttggtgttggtgttgaattggagttgagaagaaaagaagaggtcntagananacacacnagacatgtgctgntgttgagtcagctgaacacaacaacatcagaggagtaccaactcatggtggacgctatgttcagtacaatatctatggcaatctcttcgaagtttccagaaagtatgtccctcctattcgccctgttcggtagaggtgctatggtattgtttgcgctgctgtaaatncagagacaggcgaggaagttgcc

SEQ ID NO: 32364 - DNA, 270 bp, Glycine max
  unsure (1)..(270): unsure at all n locations; Clone ID: 701105231H1
gtctgctacagttggaaaaaanagagatggagagaaaataaaancgggaggacccatgaagcttattaagaggaatggctaatgagaacaaagnggctatgcttttatcccgagcaatgcttctcttgcttggagaccccanattttggaacaggagaaactcatcatgaagattgaggaagatggagatttatgaatgattgcagttgcacccacataaaaagtcatgtccactccacnaganggttcagtaataggaataggagantt

SEQ ID NO: 32365 - DNA, 269 bp, Glycine max
  unsure (1)..(269): unsure at all n locations; Clone ID: 701105234H1
gagtgaggattatataattngntntnancacnanccaaccacaaattnacacacacatantntttggtgcaatatcacaaacacctcgtccgtcacaatgcagctagctgtggcggtcancgctgtcgtttcaccgncgccgttccgacctcatccccttctncggtcatccttctccggcgtctccgttaagctcactcccnaatccataacgttttcacgttnaagcccctcaccgtcttcgccgccaccangaaggngtcgctgtc

SEQ ID NO: 32366 - DNA, 272 bp, Glycine max
  unsure (1)..(272): unsure at all n locations; Clone ID: 701105236H1
canccctaacgcgtgcagancagagagatacgcngccatggggcgaagncncgcgangtcgttatatggcanattcnagnngaaaccataccccaagtcacggttttgccgtggtgttncctgatcccaagatcaggatttacgatgttggtatgaagaagaagggtgttgatgaatttcctttctgtgtcnatctggttagttgggagaaggaaaacgtttctagtgaggncctggaagntgctcgtattgcttgcaacaagtacatggnc

SEQ ID NO: 32367 - DNA, 268 bp, Glycine max
  unsure (1)..(268): unsure at all n locations; Clone ID: 701105239H1
cacgatccttctcctctcatcaaaccccaaatgataganagctgaaaaaagggtttctgaaatatcagctaatggnactgagtgcgtaatcattgagatctgccttcatcttggggtgattttgttgatgggtgcttgctggagtaataggattaaggctgtgagtccttccaatacagggatcacttctagaagtgtcagcaggngtggccatgacatcagctcaaatagcaggagctcatcagcctccatacccgccacttctcgg

SEQ ID NO: 32368 - DNA, 273 bp, Glycine max
  unsure (1)..(273): unsure at all n locations; Clone ID: 701105240H1
ctctccctcaaaacactcatcanactcacacacaataaccataacantaccataccacagccatggccactnctaagcttcaaccctgttagaataaaatccccaacgttcaaacattccaaactcaccactccatccaaaacgcatcacaattccatgcaccactccctcnaanagccaccccaaactgctccacttccgaccccgttcggtgtccgaaagcacccagaaagaagcacccgaagcggttctcggagaagaagnagaagaagg

SEQ ID NO: 32369 - DNA, 270 bp, Glycine max
  unsure (1)..(270): unsure at all n locations; Clone ID: 701105241H1
gtcggttcttccttctcaaatattcttgagatccccattttctccgaagcaaagccatggctaagggtcctggtctctactctgacatcggcaagaaagctagnggatctgctgttcaaggactaccacagtgaccagaagttcaccatcaccacctactcaccgactggagtggctattacagcatcaggaaccaggaaaagtgaactgtttctggctgatgtcaacacccagttgaagancaaaaacatcactactgatatcaaagtt

SEQ ID NO: 32370 - DNA, 265 bp, Glycine max
  unsure (1)..(265): unsure at all n locations; Clone ID: 701105246H1
caaaagagaaaaaaacaaaaatgctgagaatcgctgctagcgcgaaganaattgttcgaacgnggtcgttggaggngccacnattggggattagggttctgcctcggctctaccacgananggtngtggaccactacgataacccccgcaacgttggatccttcgacaagaacgaccccaccgtcggaacgggtcttgtcggagcacccgcgtgtggtgacgtcatgaaactccagataaggttnatgacaaaacggggaagatc

SEQ ID NO: 32371 - DNA, 269 bp, Glycine max
  unsure (1)..(269): unsure at all n locations; Clone ID: 701105247H1
attggnaggccaatntctcaantcgcacctgttcagcctattcanatatcttctctggacctgtcaatggggacttttggcaagccaagggttgngtggnccttcacttgancttgatcttctccctgggagttcttcatcacccatgctgaatgtgcctcctttccaaccagcatgtctctnggacatggataagtccctcatgtcagacattgcctcaaatgccatggaggaaatgatcaggctattgcaaacgaatgagcccttgt

SEQ ID NO: 32372 - DNA, 270 bp, Glycine max
  unsure (1)..(270): unsure at all n locations; Clone ID: 701105248H1
ttccccagtcacacacaaacagctcaacctcggaccaagatttacattagatagatacatgattcatacatggcttgttcccgcattcactncaaccttaatctccctttcccctccgatgcggcaccaattccgtacacatgtcactctccctctcgcctctctctttcccctctctncacattcacaacaccaaagatcgcttattccagtgctccgcggngcacgtgtggtgcggtgtgctgtcagatgaccatggaggagaagcct

SEQ ID NO: 32373 - DNA, 268 bp, Glycine max
  unsure (1)..(268): unsure at all n locations; Clone ID: 701105250H1
tcgacaagcaaggacaaaaaggaatnttcaagtgacgcgacgaggaatccgtgggncagctcacgatagaatgacagtggcagggtgtagggagtaagattctggtgaggagncgccgancccgacgtgatgacgttggcgttattttgagagagagttgtgttttgtaatcaactcntccgtagttggtttttaagttttattntgttgagnccaagatgtaaaactgaaattttaattatatatatatgaacatatttaatttcgt

SEQ ID NO: 32374 - DNA, 294 bp, Glycine max
  unsure (1)..(294): unsure at all n locations; Clone ID: 701105251H1
tgattctgctcacagtcgtttcggggtagcattcttgcgcactcagttatnnnnnnnnnnnnnnnagagcgtcgtcgtttagttagggcagaaaaccccttttcggatcggtggatgcgaagccttcgtccggcgagacccccggaggctgttcaatcgggcgattcgagcaagcggncgaaaaaggcgagcgaagnatgaaggttttgcgtgaagacttctncaaggggcacncactctcgaaatttcaagtgaacccctttcgggacacgncttttctggaagtgnaagaat

SEQ ID NO: 32375 - DNA, 265 bp, Glycine max
  unsure (1)..(265): unsure at all n locations; Clone ID: 701105253H1
ctctgctttggctcagcagtggtacaccaggaaggtcttgcagncnttnttggaaatggnttancaacagcatgtgttctgaatattggtgctcaggtgacatcacttatatgcattgaggatggaggtgctctaccttcaactggaaagacttgccttttggtggtgaggatatatcaagggcctttctntggacccaaagacagcgccaaacttggccaccaattcactcagatgttttcggaaagcctatagatctgttagt

SEQ ID NO: 32376 - DNA, 267 bp, Glycine max
  Clone ID: 701105254H1
gttctagctcgcgatctagaactagtcgaacaagtagttgagaactaagaaggagaagcaaatggcttcctcaatgatctcttccccagctgttaccactgtcaaccgtgccggtgccggcatggttgctccattcactggcctcaagtccatggctggcttccccaccaggaagaccaacaatgacattacctccattgctagcaacggtggaagagtgcaatgcatgcaggtgtggccaccagttggcaagaagaagtttgagac

SEQ ID NO: 32377 - DNA, 110 bp, Glycine max
  unsure (1)..(110): unsure at all n locations; Clone ID: 701105255H1
cnaagtaagccanancgcaacancggtagttgantttttggacgtggnattctagcgttggggaattgcgaagganangngcanagggttattancacnacagcagcatt

SEQ ID NO: 32378 - DNA, 274 bp, Glycine max
  unsure (1)..(274): unsure at all n locations; Clone ID: 701105256H1
gactgctcgaagcnanggatagatggagnanattnatcnttgttatcagacttgatnacatnngcagttntnaggcnttgatganangcagcaaccagtngtcatnctcttagctacccaactagnaaattcaacatcctgaagnctttgctgtattttngtcaaggttcagccctntcatcaaanatcacggttcatanagatggtcaaatgacatttatgggnacngcnattgagttnaaagagcttntctctggagnngnngagtcatacc

SEQ ID NO: 32379 - DNA, 265 bp, Glycine max
  Clone ID: 701105257H1
taatctgcgagactttctgaatgttgctggacctatgggtgtcacacatttcttcatattgtcaaaaaccgctacttcaccttacttgagggttgcaacaacccctcaagggcctactcttacgtttaagatacatgaatactcattggccgctgacattgctcgatctcaattgcatcctcgatgccctaaggatctgtttaaaagttctgctctgattgtgcttctggatttgtgagtggagatccaccactgcagcttacaa

SEQ ID NO: 32380 - DNA, 270 bp, Glycine max
  unsure (1)..(270): unsure at all n locations; Clone ID: 701105258H1
ctcaggactcagcagcttcatcanctctcnctttgattgtcttgnaaccttcagtacgactttaacaaactggtgccttttcttagtngcgctgcttttaaaaagtctgatgggttcaagattcccattctcatcanctcagcaatggcctgtatgtatcaggccgccctgaacagccaaaagaaaagactccgacaatnagttcagttgccatgccctataccggtggtgacatcaagaagtctggagaactagggaaaatgtttgata

SEQ ID NO: 32381 - DNA, 270 bp, Glycine max
  unsure (1)..(270): unsure at all n locations; Clone ID: 701105259H1
ttccgtcccttctctcattnaatacaggcctgtctttggctgnccctgcncccatncatcacgnccaactgtgagagaggatatggnaaaggaatacgagcaagctattgaagaactccagaaattgttgagggagaagagtgaactcaaagccacagctgctganaaagtggagcagataacagcttctctgggaacatcatcatctgatggcatcccatcatcagangcctcagacaggatcaaagctggtntcattcacttcaagaa

SEQ ID NO: 32382 - DNA, 267 bp, Glycine max
  unsure (1)..(267): unsure at all n locations; Clone ID: 701105260H1
cttgggagangaggtcgagtttcacagcagcaatggtntacgtnaaggctcagnnatcaaaagcctactncaaganatatcaagtcnagttcaagagaagaanagagggaaaaaccgattaccgtgccaggnttcggttgattaatcaggacaagnncaaatataacactccgaaataccgatttgttgttcgctttagcaacaaggacattgttgcacaaataatatctggctagcattgctggcgatattgttctgctgcagcat

SEQ ID NO: 32383 - DNA, 266 bp, Glycine max
  unsure (1)..(266): unsure at all n locations; Clone ID: 701105261H1
caacgagaangtgcaggntntgcngttnttngatgttacacccctttctctnggtttngaaactgccgtcggcgtcatgactgttctcattcccaggaacacnactattcccaccaagaaggagcaagtgttcnctacttactcaganaaccaacctggtgtcttgattcaggtgtatgaggganagagagctagaaccagggacaacaacttgttgggtaaatttgagctttctggcattcccccagcacccaggggtgttcctc

SEQ ID NO: 32384 - DNA, 268 bp, Glycine max
  unsure (1)..(268): unsure at all n locations; Clone ID: 701105262H1
gatcgagataactagaaacngtgtgatcaaaatgaatgtccttgttttcntcgntgctacaatnttngnagatgggcaatgccatgcgtaacgatatgttnccctctccgaatgaacactggctatngtgcccgtactccggaggtgaaatgcgcaagttggaggcttgctgtggaagcacanaanatctttggctttgagaccattcctgaagagtgcgttgaagcaacaaaggaatacatccatggcgaacaatatagntcagact

SEQ ID NO: 32385 - DNA, 267 bp, Glycine max
  unsure (1)..(267): unsure at all n locations; Clone ID: 701105263H1
atttttcatgtgtgantcgaactcgagtggtgatggagacaattttacaagcaacgtgaaaaggctcataattgatttggtcaccatttgaaggaagagagtgtgaaagagtgaggtcagagttgccagnagatgaagacaatcgtcatcagttggcagctgcaaaggaatgaggtaattgcattgacgaacctctcaatcgactctcggaatttgtcaaattcgtccacgaaggggacctacagctgaaaggatcatggaaggagg

SEQ ID NO: 32386 - DNA, 105 bp, Glycine max
  unsure (1)..(105): unsure at all n locations; Clone ID: 701105264H1
gtntgtatcttcttcantattctgggcagttgtcttatacttgttctngtttacttggaatnggtcaatgtggcagagcattcnttttggnagatgtttgtgacg

SEQ ID NO: 32387 - DNA, 211 bp, Glycine max
  unsure (1)..(211): unsure at all n locations; Clone ID: 701105266H1
ctcctccatcccgatctctttattgtcttcttnctctcttcctggttttcgttncgagaatcctgaaaaccgcttgattttaatcaaagggtcatcaggattcgggcacccatatctnctatcactccttctctcntctgttgtcntagaaagaagaccaagaaaagcatnaatttttgcaagcaatcttcttctttngncctttctnntg

SEQ ID NO: 32388 - DNA, 272 bp, Glycine max
  unsure (1)..(272): unsure at all n locations; Clone ID: 701105267H1
gtttccgtgatcatcgnacatnactctcanccatggctgcntcatccaccatcaacaacnnnctcttcttgtcttctgnacgcncaaaagcacnancannancntctnccatngcagttcaagcccacnncttcncagaacnagaaaccctcctnntnacancctctaattgcccaatagaancctcctccttcaccctcttgcgcttcttcttctgagttgtcctctgttatatgcccanccatggcgtactccaagacgntcttcttccg

SEQ ID NO: 32389 - DNA, 265 bp, Glycine max
  unsure (1)..(265): unsure at all n locations; Clone ID: 701105269H1
caggtttagnattttaccccaaatctatatntgnctgtaatnccttaacgtgtttatctgctgtttatagttaaatttttatntaanctttaaggtgggtggcaaatgtttcactttcaccaaatgcctattgtatttcatgtaatgttgtccagggagctgttagagttatggcaaaagatcttgttagaacaaggcatcaggttgagaaattttataagctaaaatctcagctccaaggtgtatcactcagaattcagacttt

SEQ ID NO: 32390 - DNA, 175 bp, Glycine max
  unsure (1)..(175): unsure at all n locations; Clone ID: 701105270H1
acccttnccagtgatcanttcaacgatgttagagcagttgctgatattcacgcgcggagggctcntcctctgncacctgcaancacctcagcaacgccctgaggggatctccgatcganacgttgatccgatcctgcctcctggaggagcgatccggtgcggcctccttcaacta

SEQ ID NO: 32391 - DNA, 269 bp, Glycine max
  unsure (1)..(269): unsure at all n locations; Clone ID: 701105271H1
ctgctcgtncntctagggttatcatatctccatttccatttcctctcnctcagtttccaagnatcttnagctatgggaaagtctgacccaaccgtgagcgctgnttancagaaggncgttgagaaggcgaagaagaagctcagaggcttcatcgctgagaagagatgcgctcctctaatgctccgtttggcatggcactctggctggaacttacgacgtgagctcgaagnccggtggtccctntcggaaccataaagcacncctccgnt

SEQ ID NO: 32392 - DNA, 265 bp, Glycine max
  unsure (1)..(265): unsure at all n locations; Clone ID: 701105272H1
gcaggattccttatgcagaaggaacttgnctatctagttggagctgtgtcanaccccaanagnccatttgctgctatcgttggtgggtcaaaggtgtcttccaagattggagttattgagtccttgttggagaaagttaacgttctcttgcttggtggaggaatgatctttaccttttacaaggctcagggttattcagttggttcatctcttgtggaggaagacaagcttagccttgcaactacacttctcgaaaaggccaagg

SEQ ID NO: 32393 - DNA, 268 bp, Glycine max
  unsure (1)..(268): unsure at all n locations; Clone ID: 701105273H1
tttcatttgtgaaactaacaacaacacaaggccatcatcntggcancttgttccccaatggcaanccaactgcaagtccaccttcactaggactctngtagctccaaagggcctctctgcctcttcaccacttcanctcgtgccttctagaaggcaatttagcttcactgttaangccatccaatcagagaagccaacctatcaagtgattcagccaatcaacggtgacccattcattggaagcctggaaaccccagttacatccagc

SEQ ID NO: 32394 - DNA, 271 bp, Glycine max
  unsure (1)..(271): unsure at all n locations; Clone ID: 701105275H1
attcaanatgcagcaagtgcgtttcngnagcatagaccgnaatacttgcgagatgggctcgnacaaagcaaactgctcgtaagtcaactggagganaagctcccaggaagcagcttgcaaccaaggctgcacgtaagnctgctncaacaactggtggtgtnaagaagcctcatcgttatcgccctngaactgttgacttcttcgtgagattaggaaataccannagagcactngagctccgaatcaggaagcttccttttccagaggttgg

SEQ ID NO: 32395 - DNA, 267 bp, Glycine max
  unsure (1)..(267): unsure at all n locations; Clone ID: 701105276H1
tcctttgtgtangtgatcaaccctagtaagncgcaatgagtgaagtantcaagggagcctggcaatcnagttaagtcttggcaaggctataggcgccgacctnagggttcatngtaagaacacaagggaanctgcctttgcaatcaggaagttgccctggtcaaggctaaaaggtacttggaagatgttcntnnccacaagcaggcaattccatttcanacgtttttgtcgaggtgttggangacagcccaggtctannaatagacc

SEQ ID NO: 32396 - DNA, 267 bp, Glycine max
  Clone ID: 701105279H1
caattattcctcaattatttcccacttttcttctctctcaagcaaaagttttcttctctcattctcagcgttctgaatcgaaactaatggcttcacacagaggtgttaaatattatttcctctgttttcgaacgcttcgagagaaacatgtctctgtttctgcccttcatcttcggcttctctgacgccacctcaggacgagatagcgacgacccagatcacgaaactgctcacacagaaggttcactgcgtcaaagaataatcttg

SEQ ID NO: 32397 - DNA, 269 bp, Glycine max
  unsure (1)..(269): unsure at all n locations; Clone ID: 701105280H1
gcaagagaatcattggattcagattccatgaagcccaactacatcctttcccaaaccctaagcgggcacaancgcgccatctcggccgtgaaattctcctcaaacgggcggctcctggcctcctccgccgccgacaagaccctccgaacgtacggcttcacgaactcggactcggactccgacagcctgncgctgtccccgatgcaggagtacgaggggcacgagcagggcgtgtccgacctggcntctcgttcggactcccggttctt

SEQ ID NO: 32398 - DNA, 268 bp, Glycine max
  unsure (1)..(268): unsure at all n locations; Clone ID: 701105281H1
gaaaattcagcatttgtgagcacccgtgtggactggaaggagaccccagaggcgcacgtgttcaaggcagatattccaggactgaagaaggaggaagtgaaggtgcagattgaagacgataaggttcttcagataagcggagagaggaacgttgagaaggangataagaacgacacgtggcatcgagtggagcgtagcagtggcaagttcatgagaaggttcagattgccggagaacgctagagtggagcaagtnaaggcttctatgg

SEQ ID NO: 32399 - DNA, 266 bp, Glycine max
  unsure (1)..(266): unsure at all n locations; Clone ID: 701105283H1
gtgagataagctgccatgtcgntcttnnccgtnncgtcancaacacagcgttgttccatttcgatttctcggntggccattgccattgccattgccgttncaattgcaagtaagaagaagagcaaaagggggaaaagtggnaatgagcatggaggcaggtattggagtgatgggcaccaagttgggnatgatgagctatttcnaatccgacggagaggttgtcctgtcactgtcgttgggttcaaagaaggcaacntcgtcanccc

SEQ ID NO: 32400 - DNA, 267 bp, Glycine max
  unsure (1)..(267): unsure at all n locations; Clone ID: 701105284H1
tctnaactcactctgcncactttctcactccctcagtcnctccgttgacgtntttgtcntcttnnctctgtgagtctgnagaantnntagngtttcgttttgtttctntacttcggcnacttcaggctatggattcatttgagccagatgganatgggaatgagtcactgccaccaccncctnntgtngtnccctctgatattgtanctctcaaagcagaggaggtgctctgtagccntagcgagcanaataagaaaaaggcttncc

SEQ ID NO: 32401 - DNA, 236 bp, Glycine max
  unsure (1)..(236): unsure at all n locations; Clone ID: 701105286H1
caaaacgcttcgcataaggtacttatgcgcgataagactgtactggtaaccggcggagcggttganntnnggcagccacaccgttcttgcagctcttgctcngnggtttnagagccgtngtcctcgacaacctcggaaattcctcctaggttggncatccacagagtcaaggagctccnccggcgaatttnggaanaacctctcctttcacaaggtggacctacgggacagagctg

SEQ ID NO: 32402 - DNA, 259 bp, Glycine max
  unsure (1)..(259): unsure at all n locations; Clone ID: 701105288H1
cttctggtaagcngntggagggctgtaccaaggctaangatcaaccaggcattantgtacagganagtggtcgtcgtaactgggcttattcaagtnctttttgagtatgcactgggcatgaaattatccactgactatcaaactgaaggaatttgcctttcngcagtgcatcaatcaagcggttactccttcagtttatcgtggattagcaaatcccctgatgaggaagcaggnctgctgtaccatgttttatctctng

SEQ ID NO: 32403 - DNA, 270 bp, Glycine max
  unsure (1)..(270): unsure at all n locations; Clone ID: 701105289H1
agctcctctcactcncnctagtctntagttantcatntcctttatatttctnctgtttctgananancgnacagaattagatngctgnaggttttcccnaagaaantgggaacaccaagaagaagttagattgtatncattgntccaantggggaggagatcagtaccaaaanacanttngagcagtacctaaaggcnnntcctggnaatcctgtcatttcagnagtttgncttggggnactggtgaganccctaggcgntcagcaaagg

SEQ ID NO: 32404 - DNA, 267 bp, Glycine max
  unsure (1)..(267): unsure at all n locations; Clone ID: 701105295H1
ctaaatctcattcttcatctgnagctatttggattgctgnttattgtgtnantgatattggtgcttttcnttgaganagtgtgtacacttttnggntnngagaaaacaagagaggtgncattggaagctaactcagagagaggcaaagatgttgggaattttcaagcagaagttggttaatgcacccaaggagctgaacagtccagcttctttganttcatgcattaagcctaagctaagtnatgaaatcctgaaggtttcatgncc

SEQ ID NO: 32405 - DNA, 267 bp, Glycine max
  unsure (1)..(267): unsure at all n locations; Clone ID: 701105296H1
aggtccatntcntctctntcngtttccaaganncttaagcnntggtaaagtcttacccaaccgtgagcngtcatnnccagnagggngttgaggaaggcgaagaagaagctcagaggcttcatcgctgagaagagatncgctcctctaatgctccgtttggcatggcactctgctggnattacgacgtgagctcgaagaccgtggncccttcngaaccataaagcacccctccgaactcgctcacgtgctaacaacggtcttgnnagc

SEQ ID NO: 32406 - DNA, 287 bp, Glycine max
  Clone ID: 701105301H1
ttcttaaattgtgctattattgtggccattgctttcacttcattgcctaaagagagtccccagctcaactctctagttgttgttgctgcatttttcattttctaggcttagtcattagatagaaagagaaggaaaaaaaggctattatggcaggaggaggagctccagctaaagcagatgagccacagccacatccaccaaaggatcagttaccaaatatttcttactgtattactagtcctcctccaggcatgagaaggcaagagttatcgaaaccctgctttttg

SEQ ID NO: 32407 - DNA, 284 bp, Glycine max
  unsure (1)..(284): unsure at all n locations; Clone ID: 701105302H1
gaacaagtagttgagaactaagaaggagaagcaaatggcttcctcaatgatctcttccccagctgttaccactgtcaaccgtgccggtgccggcatggttgctccattcactggcctcaagtccatggctggcttccccaccaggaagaccaacaatgacattacctccattgctagcaacggtggaagagtgcaatgcatggcaggtgtggccaccagttggcaanaagaatttgagactcttcctnacctgccagaccttgatgatgcacattggcaaagga

SEQ ID NO: 32408 - DNA, 282 bp, Glycine max
  unsure (1)..(282): unsure at all n locations; Clone ID: 701105303H1
aatttttcaacggtgttagttcatctccacttttcttcaacaccatccttctcttcnctttttatttttatatttntgtcaattgttcgattcttttggtgttccagggagatcgattgataccgtcccgttgattttccaattcgacgaataagggtatcacatctcttaatcaaccatgtttacccgaatttttggtaaacctaaaccggaagtcaatactctaaccgctttagacgagttaaatgacaaactgaaatgttagagaaaaaggagaaagta

SEQ ID NO: 32409 - DNA, 282 bp, Glycine max
  unsure (1)..(282): unsure at all n locations; Clone ID: 701105304H1
gatggcgaangaaacgctgtcgttgcggcactcgcggcgttggtgctactcgcggcgagtgtggcggtggatgctcaggagaactcggacgtgaagacgctggtgaagtacaagcacgggaagaagtactgcgacaaaggatgngaatgtaanggctggtcaatttactgttgtaacctcaccattaccgattatttccagacctaccagttcgagaatctgttcttcaagcggaactcgccggtggcgcacgcggtcggattttgggattaccactccttc

SEQ ID NO: 32410 - DNA, 282 bp, Glycine max
  unsure (1)..(282): unsure at all n locations; Clone ID: 701105305H1
tgcntagantcttcagncaaggtannaagntggtcagnagttcnagaggcccttctggtncnttttcttttggnttgtcagtaaatgctnnacttgtnaatgaaacaatattgtttctaagattcnaaattgtggtcgcggtcgcacnttcatggngaccctncaatcanaactgtggttgcaatgcggtcgcgantgaaatcatggttgctaataattttttaaaacacagtgtcactgtgtttttgaaggggtgntntgatttctagtgcnngtttgcct

SEQ ID NO: 32411 - DNA, 289 bp, Glycine max
  unsure (1)..(289): unsure at all n locations; Clone ID: 701105306H1
caaagtacagatagatagattcgatccattgcataatctgaagcctttttannnnnnnnnnnnnnnnnnnnnnnnttacgatcgaattgtgacggaacggagatggcagcgccgaacaggatcgaacgcgcccaccagatgtaccgcgacggacgttacgaagaggcgttagggttctacacggaggcaatcgnccatggccaagaccaaccctcagaagatcgctttgcatagcaaccgagccgcgtgctatcttcaagctttcacgatttcaaaaaggcagcagaag

SEQ ID NO: 32412 - DNA, 167 bp, Glycine max
  Clone ID: 701105307H1
cgaaaagcgtgtcgaatggatttcacggagaaggatctattcggcgaagattccgacaacgacaacggggccccactcctccggttcctcttcttcttcctccgtcgcttcctcttcctcatcgtcctcccggttccctcttctgcctcttcctccaaagccagcga

SEQ ID NO: 32413 - DNA, 116 bp, Glycine max
  unsure (1)..(116): unsure at all n locations; Clone ID: 701105308H1
gaatgtctatagcaagaccccatttggtatgaattatgaccatggctttaagttccactttttttctcccacnncgtttcattcccacaccctttgttactnccacnagaaacatg

SEQ ID NO: 32414 - DNA, 276 bp, Glycine max
  Clone ID: 701105309H1
tgggacatgggcagacagaaaaaatgagaagggatacgtccacatatgtttacatctgtaatagctgccagccatcctgaattttcatctacgcagcaacaggatgctttagaatttttcctacattttcttgatcaagttgagcgagctaatactgggaaaactgaactggatccatcgaggagtttcaaatttggtattgaagatagaattttgtgttcatctggaaaagttacatataatagaaggatgactacatcttccctcaatatccca

SEQ ID NO: 32415 - DNA, 282 bp, Glycine max
  unsure (1)..(282): unsure at all n locations; Clone ID: 701105310H1
gtaaccctgaactgcacaagggtaggcttcaggtgcctaaattaatcaaggagtacattgatgaagtaacgactccaattgagaatggtctgtgattctgattcagaggngctatcattggaagaaaagctgcttcatgcatganacaaggcatgcatttgggaggncagctttgcgttaagcgggggtgcctctcttggagcttctcatgtgggtgtagttaaaacaatggtagaacataaacttcagcctaggatantgctggttcaatgtgggatccnt

SEQ ID NO: 32416 - DNA, 272 bp, Glycine max
  unsure (1)..(272): unsure at all n locations; Clone ID: 701105311H1
gttaccttcgattttcctttctaccctgggcaaatttcttancctctctttctttnctcagacaagcatttttactccctttttcgtttccaatttccccttctcttaactcaccaatttcgcctccttcgtgtccctttctcttcaaattaaggctcggtagggttaggttaggataggttttcggtgaggcgagagaaagagagagagtatgaggttgagggaggaggtagcgtgtaaaaacgacgacgtttgtgcagaaagaggaatgg

SEQ ID NO: 32417 - DNA, 226 bp, Glycine max
  unsure (1)..(226): unsure at all n locations; Clone ID: 701105312H1
cttaccttattccaatccaatagcaaggaggtaccaaaatagtnngattcatgggctgcaacgaatgcgtcaatctttgcatcttccacgcaaccatgcttgnncgtgcctcctaccattccaaacacgcttgctactccttttctcaatgtttcgtcaccaagaagttaccttgtgaagaaaaagcatgtgaattttagcaaaaaaatcagtgctgctgctgttg

SEQ ID NO: 32418 - DNA, 270 bp, Glycine max
  unsure (1)..(270): unsure at all n locations; Clone ID: 701105313H1
aaaaaggaaacgtatagaaaaaacttttccaagaattgncgaaaagagaagaagggagacgagattccatgttcatattttccccttcgtgcccgtcaagtttctgattctctttttcaattcctttctctttcaggtgattttttctccacgataaagttgcgatttcgccggtgtcgttttgccgcaagatggtgtcgttttcgggaatataaaatcagggttgaagttctttcttcagcactgaatcttggttacataggttggttc

SEQ ID NO: 32419 - DNA, 292 bp, Glycine max
  unsure (1)..(292): unsure at all n locations; Clone ID: 701105314H1
gttcggtggaaggagccgtagcagcagcggaagctctagcttgggcagcgaattcacaatggcgagaggattgaagaagcatttgaagaggcttaatgccccaaagcattggatgcttgacaaactgggtggtgcatttgctcctaagccctcatctggaccacacaaatccagggaatgcctgccactcatactncattttgcgaaaccggctgaagtatgctctggacataccgtgaagtncatgctattctgatgcagcgacatgtcttgttgatggcaaattcaggac

SEQ ID NO: 32420 - DNA, 298 bp, Glycine max
  unsure (1)..(298): unsure at all n locations; Clone ID: 701105315H1
tcgattgaagaattaggatccaatagatggcattttgggggacgcgggtgatggagattgtgaagaagcatgattctggaggactagtttggaagagaataaaactcacaaccacccgaaaagccaacgctaagaagcgtcttctccgcgtttggcagaatgaagctgtcctgaaggcatgtgttgctncaagttccatctgccaccaccactaccgccaccaccggccggccaccaccagttaccagttaccagttacctagctnaagttccatgggccatcttcatttaaatacnt

SEQ ID NO: 32421 - DNA, 286 bp, Glycine max
  Clone ID: 701105316H1
atcttcgcaatcttagaagtccctggtgtgtactggctggccatcgtaaagctgtgagctatgtccaaattcttggactctgaaacacttgtttctgcttctactgataatacattgaagatctgggatctcaataaaacctctcctgtgggtgcatccattaatgctgcagcctaactctgtcgggacatactaatgagaagaattttgtgggtctatcggtggctgatggatatattgcagtggttcagaaacaatgaggtttacacttatatagatcgcttcc

SEQ ID NO: 32422 - DNA, 279 bp, Glycine max
  unsure (1)..(279): unsure at all n locations; Clone ID: 701105317H1
attgatttatttattattaggaacctgggtttggctcttcgaaagtntcctcaggtctccattgatgtggttgggttggttgatgagtgggctgctcgattttttgaggagttagactatgtgaatgaaggtgaaaatggaaaccgttttgcagaaatgatgaggaaagacctaccacaggttgtcataccaagaacctaccataaatatacatcaaggagggttctacgacagaatggattgatggagagaagctgtcacagagcacagaaatgatgt

SEQ ID NO: 32423 - DNA, 278 bp, Glycine max
  unsure (1)..(278): unsure at all n locations; Clone ID: 701105318H1
ctcagcagggataggcgcaactgcagcatttctgctgttgcttaattcaattttaaacaaagaaaaagaaaagaaaagaggattaaagaatcaccaaagttctaagagcagagncgatttttggaactgaggagctaatcttaatttcaatcttattgtattatatctatatgtatataccgttgttcatgagttaattaaggtgtcagtataattgagagaaggtgggaattttatattcttagttttatcnttttgaagataataaaaaagggggg

SEQ ID NO: 32424 - DNA, 280 bp, Glycine max
  Clone ID: 701105319H1
caagaaggtgttccattttcaacactcatcagatcccagtacatcaattgcgttaacaactcgtaaggcaaccatgaggggcattctttctgtaaggacagccttggttcaacatcgtagtgagaaattgggccttggtttcaggctatttagcactcagggtgcttccactgctagtaccccacagccgccgccaccacctccaccaccagagaaaacccatttggtggccttaaggatgaggacaggatatttataacttatatgggctgcatgatcc

SEQ ID NO: 32425 - DNA, 260 bp, Glycine max
  unsure (1)..(260): unsure at all n locations; Clone ID: 701105320H1
aacttcacgacntccatgccttctaacancnnctcttcantgccgtcaaaccctaatccaagaagttccgaagtcggtaaccctatgagaaggagtttcactggaaaccccttctccaaaccctcaattgtcccaaaccatggagtnaaaactcccgccaacagcccttctgcagatttttcgagaagaggctntgttgggattcgggaaagcggagggtcgttgagggactcctttgatgacaaagaaaacgggaaaga

SEQ ID NO: 32426 - DNA, 280 bp, Glycine max
  unsure (1)..(280): unsure at all n locations; Clone ID: 701105321H1
ttccatgatgctcaaggcaccaaggctgatagacttcgataacaagagagcctatttccgctccaagaataaggcncacaacatgaccaacacttgtctgggccattgcgtataagtgtaaggcgggcttacattttggaggactcttataatcagctaaggatgcgtcctactcaggatctgaaggggcgattaaatgtgcaatttccaaggtgaagagggtattgatgctggtggtctcaccagagatggtatcagctgttgtcgaggtcatatttga

SEQ ID NO: 32427 - DNA, 272 bp, Glycine max
  Clone ID: 701105322H1
caaggcagaaagcaagctcatcctagagttttaaaaatggcagcagcctcctcccatggctctctcttccccatccttggatggcaaggccgtgaagctgggcccatcagcccccgaagtcgggagggtcagcatgaggaagaccgtcaccaagcaggcctccttccggaagcccatggtacggcccagaccgcgtcaagtattgggcccattctctggcgagcccccgtcctaccttcatggcgagttcccagtgattaggctgggacatg

SEQ ID NO: 32428 - DNA, 278 bp, Glycine max
  Clone ID: 701105323H1
acaaatttgaacttctttcctttgaaattgttacactttggccagagaaatgcagattttgcttgggaaatggcaatgtgacagttgaacttggtggaggtgaggaggaggtgtctcgatgcataaattgtgacggtgttggttcattgacatgcacaacttgtcaaggatctggaattcaacctcgttaccttgaccgcagtatgaaattctgcagcctgttgggacaatttatatacagttcttttaagttctttgccaaaatagagttttaactc

SEQ ID NO: 32429 - DNA, 280 bp, Glycine max
  Clone ID: 701105324H1
cttgaatgttcacatgagattcaaataacaagctccctccatttcaaaggacaaagatgcatagcacattgatgaagttaaagttttggttacctatggtggctgacataaaagacaaattcattttcttatttgtttcacacgtataaagaaggctgcctcttctgtatgcttgccaagttcttgaatattttcagcttcagcaaaactactagaaaacccagtgatcaacttttgaaggttcaaggtaccaggccatgacattggaatatgcgatttc

SEQ ID NO: 32430 - DNA, 283 bp, Glycine max
  Clone ID: 701105325H1
tcgatccttgctgatcaaaatcacatttcctttcatttcttcgttatttcctaatcccaatggctcaagcactatcaacttcatcactactactatcacaaaaaacagggtcctacgtcaaaccacagaacaatgtaattgtaccctgcatggcctcttttccatcaaggaaggaatttccaaggctaggaagggtgagagctcaggcttctggtgataacaaagacaactctgtggaagtacaacatgttaacaaggtgaccaaggaaccgcggttgagaag

SEQ ID NO: 32431 - DNA, 210 bp, Glycine max
  unsure (1)..(210): unsure at all n locations; Clone ID: 701105326H1
gtggttgnaagttaagaagtagcaaagatgtttccattcgggcacaaggntnccaaaagataaaggggactatggtggttatgcagaagaatgtgttggatatcaacagcatcaccagtgttgangggatcgtcggcaccggcttagacttcttaggcagtgcactcgatacagttnctttttncagcctcctccatctccanacaacat

SEQ ID NO: 32432 - DNA, 260 bp, Glycine max
  unsure (1)..(260): unsure at all n locations; Clone ID: 701105327H1
tgcatttcgcagtgtgtgtgagacgaagagaaaaatggannaaatgatgcgactgagnaccactgttcccgatcactgagttgcagatcttatcatgccttcccattcatcaaccatgtngttcttcgaccttctcttatctctcgctctcccaatcctcttccttctccttcacactcagaatgcatgtctcctttctcgatgggtttagggagcagcgatctatagtgaagattgacccagtgcccaatataaggacc

SEQ ID NO: 32433 - DNA, 287 bp, Glycine max
  unsure (1)..(287): unsure at all n locations; Clone ID: 701105328H1
agaaaaacaagtagttgagaactaagaagaaggaaatgggcttcctcaatgatctcctccccagctgttaccaccgtcaaccgtgccggtgccggcatggttgctccattcaccggcctcaaatccatggctggcttccccacgaggaagaccaacaatgacattacctccattgctagcaacggtggaagagtacaatgcatgcaggtgtggccaccaattggcaagaanaagttcgagactctttcctacttgccagacctcgatgatgcccantggcaaaggaa

SEQ ID NO: 32434 - DNA, 282 bp, Glycine max
  Clone ID: 701105329H1
caaacaacaaggttggttcaacttgtgtgaagggattggaacatggaaaatcttggtggttctagtcgtaggaaagcaattgaggagcttcttagagggcgtgattctgcccaacaacttaagagtgtcatcaatgggacttatgatgatggatcagccaccccatttgctcaacaacttgtgaaagaggtgctcatgtccttcacaaactccctcttgttcttgcacaacaaccccattctgaatcacatcagtcttcatgttcaagtagggactctccca

SEQ ID NO: 32435 - DNA, 288 bp, Glycine max
  unsure (1)..(288): unsure at all n locations; Clone ID: 701105330H1
tggcagcaacgttctcatgtacccaaatttggcaattgngatagtggagagnatgttccttatancagcncattttgacaaggcacggaaaggtcgaactggcacaaggataataaatccaaatgaccccgaggancaatgctgatttaagttttgataatccatcatctgataacctacctcctaccagacctagaacncaattcagaggatcatccggaaaaggatcactgcattgggaagatgatcccaagantttatcgaatctccagctcgtcatgacatgta

SEQ ID NO: 32436 - DNA, 288 bp, Glycine max
  Clone ID: 701105331H1
aattgttgtaactttttgattcctaaattctctaaaattcgaaattctaatttcgttaggggaaagagattgtttgtgtgtgagtgagtatggctggaaaaggcgagggtcctgctatcggaatcgatttgggaacgacgtactcttgcgtcggcgtgtggcaacacgatcgtgttgaaatcatagccaacgatcagggtaacagaactaccccatccctaacgtggctttcaccgacacagaacggttgatcggcgatgcggcgaagaaccaggtcgctatgaaccc

SEQ ID NO: 32437 - DNA, 181 bp, Glycine max
  unsure (1)..(181): unsure at all n locations; Clone ID: 701105332H1
gtnaatcttgggagtgagtcactcttcctgcagaacccagatctgtagacaatatgggaagcactggtttgctacatttgatatgccttgtcattgctttagtaagtgtgtcgcttgtgcaagcagaagatgcgtataagtatttcacatggacggtgacttatgggactcttatcccttg

SEQ ID NO: 32438 - DNA, 276 bp, Glycine max
  Clone ID: 701105333H1
gaagtagtaaacttttggtgtgaggtgtgagtgttctgcgcgcgccgcatcaacaataatttctcaaacagcgtcgtaaaagaaacacattagactaggcagatcattatggctgtacattccgaatcagcttcatcagagaagaaatcaagcaatggagtgaatgagttgctgacttttaatgctgagaatatgcaaagcaacatgaaaattatctatacagccgaacattttatctataattggtggcgttgttgcggaatttgggattacagc

SEQ ID NO: 32439 - DNA, 273 bp, Glycine max
  unsure (1)..(273): unsure at all n locations; Clone ID: 701105334H1
tgggtgggggtaggagatactctcattcacctcccatcatcattataatcattcattccaacctacccttattcttcttcttcaatttcacacccatcatggacngttttccgatcctctttctcgtcgccaccctcatcaccctcgcctccggtgcccgccacgatattctccggttaccctccgaagcttccaggttcttcaaagcacctgctaatgccgatcaaaacgatgagggcaccagtgggccgtttagttgcggttccaaggtat

SEQ ID NO: 32440 - DNA, 279 bp, Glycine max
  unsure (1)..(279): unsure at all n locations; Clone ID: 701105335H1
aaaaaaaagaggatgctgattgttctaatcactctgatggtttgaatacttttggtcatggggtgcataatgatttggacattgaaaaagttgacaatagtaaacaaaaaacagaaaaagctaccaagaaacaacgaaaganatcaagctctttcaactaaatcggcaaaaccttccaagggtcaagttgctactaatgagaaggaaactgagaaaatgcttcgactgtgaaagcaactgcaagatagttcacgttcccctcacgagggccnttctgtt

SEQ ID NO: 32441 - DNA, 126 bp, Glycine max
  unsure (1)..(126): unsure at all n locations; Clone ID: 701105336H1
tcgccacgtacgtanggangtcctctcctcttcctccgccatgaacttcanggnnaagcctctccgtcgccctgcganattctgcggcgccacccaaaccctatctntgaccatancacaacatcc

SEQ ID NO: 32442 - DNA, 258 bp, Glycine max
  unsure (1)..(258): unsure at all n locations; Clone ID: 701105337H1
caaaggttccaagaccctaaacgctatcgattntacattntctangntttctcttttcaattcanngcttcntacggcggcgcgtgggagtgtctttggcgcgtgattcctagttccccgcttacctatgcttcgctcgacccgcattgtagagttcacgccggagagacggcggaatctncaccggacgatactgcattcgcatcttcatggctccgcctaccggaagaactaatggccaggcatagaagcggtggc

SEQ ID NO: 32443 - DNA, 276 bp, Glycine max
  unsure (1)..(276): unsure at all n locations; Clone ID: 701105338H1
cacccagctgggctcactcaaacacctggacctcagcaataatcagctctgcggcgagattccggaagacttcgggaatctgggcatgctgagccgcatgttgctgagccggaaccagctaaccggtaaaataccagtttctgtctccaagatttaccggcttgcggacttagacttatccgcaaaccgnntatccggttctgtcccgttcgaactcgggacaatgccggttctatccacactgaatttggagcctaattcttagagggntattcc

SEQ ID NO: 32444 - DNA, 283 bp, Glycine max
  unsure (1)..(283): unsure at all n locations; Clone ID: 701105339H1
cttatctttctctcttctctctccccgcccaaaccctaactcccncaccctattccgctttctctcatccatcatgaaaggaggaaagtccaagaccgaatctaagagagccgatgccaaacttgctgtgaataagaagggcgccgccaccaagactaggaaacccgccggaaaggggaaggcagcgaaagatcctaacaagccaaagaggccttccaagtgctttcttcgttttcatggaggattcaggaaggtgttcaacaaggaacatcccgacaacaaa

SEQ ID NO: 32445 - DNA, 278 bp, Glycine max
  unsure (1)..(278): unsure at all n locations; Clone ID: 701105340H1
aaagatctttctttcagcttcttgttctacaatgaaaagcctctgccttgggccgtttcttgctgctagtgccccagttggtagaagagcctatggaggccacttaagcagaaagtgctttcaaaagcaacttcacttccacttcangttgtgttgggatctcttcattcatatgttctgcaactatatcagtgatgccagaattagaagagaagcaagtgtttgatggagagaaggctaattgtatttnaaagatctcagaaagagnttgatcaggc

SEQ ID NO: 32446 - DNA, 280 bp, Glycine max
  Clone ID: 701105342H1
ggggaaaataaactagtggaggagtctgacttgtcaaagttgccttatttgaacatggtagtgaaagagaccttaaggttatatccggctggacccttgctattgcctcgcgagtccctagaagatattactattaatggttatcacataaagaagaagacaagaattttagtcaatggcatgggccattggacgagaccctaaagtttggtccagataatgctgatatgttttgtccagagaggtttgtgaatagcatgtagacattagaggacagact

SEQ ID NO: 32447 - DNA, 88 bp, Glycine max
  unsure (1)..(88): unsure at all n locations; Clone ID: 701105343H1
ttctccctctgtggtgttccctggctggctcactgaganccggagattcgtnctcccccttctgttaccttcccacacaancataaca

SEQ ID NO: 32448 - DNA, 287 bp, Glycine max
  unsure (1)..(287): unsure at all n locations; Clone ID: 701105345H1
caacgaaccactctgaagccgcttcacgttatccacaacactctcaacnctccttaaaccctaaccaatccaaccatggcttcttcttccaccttcactgcaatgncncgcctgaaagctctcctcctccgccgccatctcctccttcccctcccgccgcngctccaacgccgtcgttctgtcgaggcgcagcgcgccgcnagggtctccgccatggccaaggagttgcattcaaacaaagacggcaccgcaattaagacgctccagagcggtgnnaacaagctcgc

SEQ ID NO: 32449 - DNA, 279 bp, Glycine max
  unsure (1)..(279): unsure at all n locations; Clone ID: 701105348H1
agatgattcaagttaacattccaagatataaggaagtcctgccaggtttagaaagttggcaagcccagaaaattgcttcttggcacaatatggaagggcactccatccaatggttatctgtagtatgtatagaccgaaaaggcatgatggctgaggtcactacagcattggccactgcaggcatagccatatgttctgtgtggctgagatgatggaggaagggaatggctgttatggtattcacgtagaaggaaatttggaaaattggtcangcttgcc

SEQ ID NO: 32450 - DNA, 278 bp, Glycine max
  unsure (1)..(278): unsure at all n locations; Clone ID: 701105349H1
gaagaaagcagagcctctactacatcatcacattcacatttcagtaccttctctttctcccagtctctcacacacaacaattgaagnagaaaatggttgacaatgattcgctctcggaattcctcgcatctgcggtcgacgcggctcagaaagctggcgagattattcgaaaaggcttctaccagaccaaaaatgtggaacacaaaggacaggttgatttggtcacagaaactgataaagcatgtgaagaactcatatttaatcatctgaaacagctt

SEQ ID NO: 32451 - DNA, 280 bp, Glycine max
  unsure (1)..(280): unsure at all n locations; Clone ID: 701105352H1
ctttgtcgcttgtttaagaaacatgatgagagccttgaagtttcacactgtgatgaagcngagccgactgcttccactcctgtggctgcctattactccacagaggaaatacanccctgatctggctgttgttgcaggatcgccgtcacaagttacagaagatgataagcatcagtcaatgatccctggcacacttctgaggaagcnatatccaatgttgtaaccccggttgatcgctgtactgatggatatgatgntgtgatggcacaaaattcaattg

SEQ ID NO: 32452 - DNA, 287 bp, Glycine max
  unsure (1)..(287): unsure at all n locations; Clone ID: 701105354H1
gataaaccctaatagtcacaccgtcccttcaaatatggccanaaagaaagtctctcaatctcacgaccccaaagaatccccaaaacgtaaagcaacccttgccaatggctactccaaccgatggctcctcagaactgcagattnagaacctcaaaaacctcaacgccgtccttctcaaggagaccacccaacgccgnccagcagattcactctctccagttccgcgctaccagcaatccgccgttcactcacgacaccaaccttcgctttgcacgtccaaaacgctg

SEQ ID NO: 32453 - DNA, 277 bp, Glycine max
  unsure (1)..(277): unsure at all n locations; Clone ID: 701105355H1
cttcacttgaactccacagagcaagggttngccagattttgaagcaaaaataatggggaagaagagaaaacacagtgagactactcaaagtgtggcacagcccaaaaaggaagatgctgctccagagagaccagctaggacccttttggggtggaaggataagaatcaagttgaggataataataatgctgattcaccaatatttaggaacaaagagaagctattggtcattgctactaggcgcatcatttcagtaccggcnttgatgttgatttgg

SEQ ID NO: 32454 - DNA, 277 bp, Glycine max
  unsure (1)..(277): unsure at all n locations; Clone ID: 701105356H1
atccttccttcattcgtttcgttgagttgaaaactctttttccacattcttttatttcntgtctcacccgcaccatgcaagtgtgccaactactgtgattggtatggcgacacgtgtcccttttgttttgtgcgcagccaccacttctcccaaccactgccttaaatactgcgtggtggcaccgtcacttcctctaccggtttcttcctccttcattaagccgccatttctctctctttcctttcgtcttcttttctcttcgttggggttgttgcca

SEQ ID NO: 32455 - DNA, 273 bp, Glycine max
  Clone ID: 701105357H1
cgcgaaatgtggaacctatttctccaatgggttctaggatttctatgctagctcagcgcgagaagcaacaatttcgcagcttaagcttccgagaactcggctccaactctgctgctgcctctgccgattcttggtcaaaatggggatcacctaatgttaaattggattggccagttggtgctggtgaagttggtaagctaagaaggtcatcatcattgagctgggaacaatggtgaggagcctgattatctgggtgcagtcactgttaaggaa

SEQ ID NO: 32456 - DNA, 256 bp, Glycine max
  unsure (1)..(256): unsure at all n locations; Clone ID: 701105359H1
ggctaattagatttctgganagaaaanntaagggtgtgagacgcgatggagagtanagaggacgatgttaacgttggagcaaacaagttcttcagaaaggcaaccaattggtacagcagcttcagggtggtggtgacaaggactacaaggaggcacccccagcttccttgtttgaacctggtgagctcaaatcaggtcctctacagagctggaattgctgatttgtggcaatttctgttcctctacataccatnta

SEQ ID NO: 32457 - DNA, 281 bp, Glycine max
  unsure (1)..(281): unsure at all n locations; Clone ID: 701105361H1
aagtagcaaagatgacaggtgggttctttggagggaaggggcaaaagataaaggggacagtggtgttgatgccaaagaatgtgttggacttcaacgccataacctccgtcggaaaaggcagtgctaaggacaccgccaccgatttcttgggcaaaggcttgggcgcattaggtggtgcagttgatgctctcactggccttcgctggccatagcatctccttgacagcttatcagtgctactcagatgatggtagtggaaaaggaaaattgganacganncc

SEQ ID NO: 32458 - DNA, 238 bp, Glycine max
  unsure (1)..(238): unsure at all n locations; Clone ID: 701105362H1
tcacaatcacaatggcgngagtggatctggatggtaaccccatcaagccacttacgatctgcatgatcggcgctggcgggttcatcgggtcgcacctctgcgagaagctcatgtccgaaacccctcacaccgtcctcgccctcgacgtctacagcgacaagatcaaacacctcctggatcccgccgattcccccctcccttgggctggccgcatcacttccaccgcctcaacatcana

SEQ ID NO: 32459 - DNA, 277 bp, Glycine max
  Clone ID: 701105363H1
aaggaggtgcagaatggctgatgcaggtgcagaaggagcatcttcttccacggtagggccaaattgacgttttctggcacgaagggatgctgaagcatgacacgggcaatggcgtgtttgacacggggatggatccaggcttcttagaggtgttggagaagcaccctgaaaactcagacagagtgaaaaactagtgtctattctcaaaagggtcctatctcccctacattctggcaccttggtacacctggcaaaaatccctgagttttttctttca

SEQ ID NO: 32460 - DNA, 268 bp, Glycine max
  Clone ID: 701105365H1
acccatttgattctctgcagaatctggggttgttcctgctttggtctggtctctcagctctgatagattggcaccgattctgggtgtgagccaaaaaagctttcttttgtttcctctgtttttctttcggcaaagtagaagatatttgtgattttcttctgtgaattgaattcgagtcgttgctctggctcggtgctgctgttttgttggcacaagttatggtccaatgaaatgaaagagtttgagtgaaaaggagacttagacgtgt

SEQ ID NO: 32461 - DNA, 274 bp, Glycine max
  unsure (1)..(274): unsure at all n locations; Clone ID: 701105366H1
gttcatttctacacatccctagctctgtcgttccgtcgttgacgatggcgtttcgggtgcgaagccctgacctccgctctctctttcttctctctctcttgtccatcgcttccgccaatgtcttcttcgaagagcgtttcgatgacgggtgggaaaatcgatgggttaaatcagattggaaaaaagatgagaacgtggctggggagtggaaccacacctctggtcaatggantggagacgctaatgacaaaggtattccaaaccatgaggatta

SEQ ID NO: 32462 - DNA, 265 bp, Glycine max
  unsure (1)..(265): unsure at all n locations; Clone ID: 701105367H1
cacaagttttgttctttcctagcaattcggcgcaatcgtcttctgcttcaaggaaggagagcttgttattctctatcaacaaggaaaatgtcaggtgaagaggttgttgttgcagctgagccagctgctgccatcccaggcgagcctatggatatcatgactgcctgcaacttgtgctcagaaaatctctggctatggtggtctgcacgaggcttcacgaagggcaaaagtgatgagaagcngctggcacaactcgtgttctagc

SEQ ID NO: 32463 - DNA, 269 bp, Glycine max
  Clone ID: 701105368H1
ataaattgcaggtgtagcagcagagagtgcggtaggctcttccgagacccgaagcagccatggggatcgatctcaaggccggaggtaagagcaaaaagaccaaaagaacagcacccaagtccaatgatatctatctcaagctctggtcaagctttatcgcttcctgttcggagaactggcagcaacttcaatgctgttatacttaagagattgttcatgagcaaggttaacaaacccccatgtcttgtcaaggttgattaagtatacga

SEQ ID NO: 32464 - DNA, 243 bp, Glycine max
  unsure (1)..(243): unsure at all n locations; Clone ID: 701105369H1
gtgaaagggaacttctacaggctactaaccaacttggtgangtaatgaggtctgaatgnacgtgctgtggtgtcatggcttcgcatgagtaataagcttacaggacgggatttttcaacttgttcttcagtatcaaacaactcccctcagcatgctgtggggagttgtttgatatgaagaacaactcccctcagcatgctgtggaccatagcattatttctggagacaccgtgagttgatcnt

SEQ ID NO: 32465 - DNA, 185 bp, Glycine max
  unsure (1)..(185): unsure at all n locations; Clone ID: 701105370H1
ttctctctcccttagctagtttttaccaatggctgctgcggttagtgctgcagtctcttttccatccaccaagtctangcagtcncaagcaggacttccatcattaccccagagagagttgtattcaagaaggttcattgcaatacagagatgtttgtagcagtggaagggtagtttccatcaga

SEQ ID NO: 32466 - DNA, 255 bp, Glycine max
  unsure (1)..(255): unsure at all n locations; Clone ID: 701105371H1
cacaaatgaaaatactttgctctcttcctccaactctctcatactttcacttttctttgttcatgcaagatccaaagaacgattcaaacacaaggaagccatggtaccaaagagcaattgaggtgactagcctatggaaaagtgtatcaaaatccacagaaattccaacacctaattctcaactttatggaagagatcatccatcaatgccaaaatccccncaagtccctactcacaccaagtcctcaacaacaa

SEQ ID NO: 32467 - DNA, 270 bp, Glycine max
  Clone ID: 701105372H1
tgatacaaggaatcaatggtggtggaatgatcaaatctgagcctggatattctggttgttctccttacatgtttggtactgatggaaatgtcctggagacacgcccaactattggtggtgcttcagtcacatcattcactaatgttgagtccaacttcacattctctgaatgaggtggtcctagatccagacacttcttcattggattctggggcagattcccagaaatttagccttcagatctgactgctgattttctcagagtctgaa

SEQ ID NO: 32468 - DNA, 134 bp, Glycine max
  unsure (1)..(134): unsure at all n locations; Clone ID: 701105374H1
cagctggtagtaaatgtaatgtagccctcttccaaatgggagagagagcgtgttagnntagtatcctttaatttctatggggttgaatatgtgtaatggtcccaatggctatttaatggatattttctcggacc

SEQ ID NO: 32469 - DNA, 201 bp, Glycine max
  Clone ID: 701105375H1
gagaagccgctggagttacgatactctcaagaatttccgtgagatctctccgctggttcagaatcacatcaaacgggtttattttacgttatgttgcgctgtggtggctgctgctgttggagctttctcatgttctgtggaacatgggggttttctcaccacgttggctccatggaagcaggtttggttgctatctacacc

SEQ ID NO: 32470 - DNA, 276 bp, Glycine max
  unsure (1)..(276): unsure at all n locations; Clone ID: 701105376H1
aaaaaaaggaagactaaaactaaaactaaaaccccacttcagtcttccagtgaaaaaagaaaggcagcgatggaagaagacttcgacatccccggcggcgaggaaatggatctcggcgaagacaaggtcggcgaggnngcgggagatcggctcccgcggcctcaagaagaagctcctcaaagaaggtcaaggctgggaaacccccgaagtcggcgacgaatccaagttcntacnggggatttgttcgacnggaattaagttgattcgagccgcgac

SEQ ID NO: 32471 - DNA, 277 bp, Glycine max
  unsure (1)..(277): unsure at all n locations; Clone ID: 701105377H1
acacaagaactctccaaggatcctccttcccacgaaattctttggtgggaaaatccaagaagagggtggaatttcaagccagggaagatggattatttcaatgcaccaggaagaaaccatctctttgttccggggccggttaacatcccggaccagatcattcgggccatgaacagaaacaatgaggactaccgttctccagcattccagctatgaccaaaacactgcttgaggatgtcagaagattttcaagaccataatggatcccatttctncc

SEQ ID NO: 32472 - DNA, 282 bp, Glycine max
  unsure (1)..(282): unsure at all n locations; Clone ID: 701105378H1
cgcaacacaacaaaaaaagacaacccagagagcgcgtcttaataaacgctncttctctgaaaacccccatttcttttcttctttcttcttctctttcgcttcttcgatcttcgatcttcgtcgctgaaaatgagagagtgcatttcaatccacatcggccaggccgggattcaggttggaaacgcctgctgggagctttactgcctcgaacacggcattcagcctggatgggcagatgccaagtgacaagaccgttggtggaggtgatgatgctttcaacac

SEQ ID NO: 32473 - DNA, 278 bp, Glycine max
  unsure (1)..(278): unsure at all n locations; Clone ID: 701105379H1
gncgttgctctgcttcaaccttgcggaagaagaagacgccgcagccatggtgaagtacttccagagaacccgacaatcccaccaagtcctgcaaggccagaggcgctgaccttagagtgcatttacaagaacactagggagactgcctttgccatcaggaagttgcccctggttaaagctaaaagatacctggaggatgttttggcccacaaacaggccatccnttccgacgttctgtggtggtgttgggagacagcccaggttaagagcagacatcc

SEQ ID NO: 32474 - DNA, 279 bp, Glycine max
  Clone ID: 701105380H1
ccaattgaacttgcctttttctgatgcagttggaaccttttcctttggtcttctttccttctctgtctctctgtcttattgttattgctgttgtgactaaggaacaaggggttgcttcttcccttttgttttcaaaggaagagaattttcaattttcaatttttcattgggttctctgaaatggagagagatttcatgggtctcaacttgaaagaaccactagctgtggtgaaggaggagatgaacaagatggctgcaaaaactctggcttcaaaaaag

SEQ ID NO: 32475 - DNA, 268 bp, Glycine max
  unsure (1)..(268): unsure at all n locations; Clone ID: 701105381H1
catcctcttgttgtatcacaactgaagtgagatatcaaacattcaataccccaaattctagttctagagaaagcaaagttctttgatttgccttccacccccttaatttcnnncaattaaccaactgggaaatttggtctaattgtgattcattctctttggggggctttgtggattaaggttagtatttgctgattagggaagtctttatgtgacctgggtggaatnattctgtgtctgcatgtgtgaatctgggcaagggcattgg

SEQ ID NO: 32476 - DNA, 276 bp, Glycine max
  unsure (1)..(276): unsure at all n locations; Clone ID: 701105382H1
tcgacactaccttgttcttaaacttcacaacaaaaactattnngcatccaccaacttactttcnaangcctattatatatttcaaaagttgtgaagaatatgagttcaacaagccgtgcttgggcttggaccgtggcagctggtgttggagtggtggaggccatgaaggatcagggtatctgcaggtggaacagtgtgatgagatcagcacaacaacatggctaaacataatatgaggtctttgtctcaaaccagaagcttattctcaatcatctg

SEQ ID NO: 32477 - DNA, 279 bp, Glycine max
  unsure (1)..(279): unsure at all n locations; Clone ID: 701105384H1
gggnntanggcnatntggtaancttggtacagaatcagagtggatntgcgcagnnagaaaaaacttgatatataagacnccagnagcttcctattgcatttgcatcctcnatctcaatccatttattttgtataaagtgaagcgaattggtggatctgaatcagcagcagagggagatggcgatggcgagagcaactttctggtctggcaataccccagagcggttctacgctggcgggcgtcttncntgggggtttgatgggntcctntcccaaccaa

SEQ ID NO: 32478 - DNA, 162 bp, Glycine max
  unsure (1)..(162): unsure at all n locations; Clone ID: 701105385H1
agctatctagctagcaagtgggacaagagatatatatacgtngtaccctagagtgccattctgtagtttatttctgctcaccaaggcttatcacatcacaatttgtgcattgcctcgtgtctttttctctttgcttgccaaaaatctacacacacaggtatc

SEQ ID NO: 32479 - DNA, 269 bp, Glycine max
  Clone ID: 701105386H1
atatactatacaaaaagttcttatcagtgacagagtaaaggaggcataccgatgacgatggcgatgacggcgtcgcagttgcggtgcggttgggggtggaggccaacgccgaatcagcagcagcaacgacgtcgtatggttccggtggtgtgttccatcgctatagagaacgcgaagaacaaagagagagcgaaactgaagaagctctcgatgaagcgtacgagaggtgccgcatgctcccaccgaaggcgtttcttcatcttccaaca

SEQ ID NO: 32480 - DNA, 259 bp, Glycine max
  unsure (1)..(259): unsure at all n locations; Clone ID: 701105387H1
cggctgacgcngtcggggctcactactnggggcccagggnngangactgttgtgttggatganttanggaagtcctaaagtggttaacgatggtgtcaccatnngctcgcgccatcgagctnnccanatcctatggnnaanaaccggtgcagctcttattagagaggttgctagtaagactaacgactctgcccggtgatgggacgancacggcttcggttcttgctcgcgagataattaagntggggctttagtgtga

SEQ ID NO: 32481 - DNA, 271 bp, Glycine max
  unsure (1)..(271): unsure at all n locations; Clone ID: 701105388H1
ctttnctcggaggatcaaatcctccgagaaaagatattccgacacgtggacgaggcgtgtcgggagtgggggttcttccaggtggtgaaccatgggacttagccatgagttgatgaaaagttctagggaactgtggcgcgagttcttcaaccagccacttgaggtgaaggaggagtatgccaactncccccaccacttatgagggctatggaagtcgcttgggagtgcagaaaggtgccaccttggactggagtgatattctttctccata

SEQ ID NO: 32482 - DNA, 272 bp, Glycine max
  unsure (1)..(272): unsure at all n locations; Clone ID: 701105389H1
gagacagagacgcagccatggggcggagacctgcgaggtgttataggcaaattaagaacaagccataccccaagtcacgtttctgccgtggtgttcctgatcccaagatcaggatttatgatgttggtatgaagaagaagggtgttgatgagtttcctttctgtgtccatctggttagttgggagaaggaaaatgtttcaagtgaggccctggaagctgctcgcatgcttgcaacaagtacatggccaaatttgctggaaangatgcttcca

SEQ ID NO: 32483 - DNA, 276 bp, Glycine max
  unsure (1)..(276): unsure at all n locations; Clone ID: 701105390H1
tttaatgaaaccttatatgatgaatgggttaacaagggcgacgcaccggcattgccagagactccttaaaaattacaacaagctgttgtctcttggcttcaagattgtattcttgtcaggaagatatcttgacaaaatggccgtaacagaagcaaacctaaagaaggctggcttccacacatgggagcagttcaattctcaaggatccacatcttatcactnccaaatgcactttcatacaaatcagcatgagagagatctgttgagggcaggata

SEQ ID NO: 32484 - DNA, 278 bp, Glycine max
  unsure (1)..(278): unsure at all n locations; Clone ID: 701105393H1
gcggctggaagagcaccgcacgtcgcgtggtgtccggtgngcncccggcgnnnacttgaaaatccggaggaccgagtgcctcccangcccggtcgtactcnnaaccgcatcaggtctccaaggtgaacagcctctgnntcgatgganncaatgtaggnaagggaagtcggcaaaatggatcngtaacctcgggaaaaggattggntctgaagggctgggcacgggggtcccagtccngaacncgtnggctgtnggtggaatgatcgaatgcttcgcgg

SEQ ID NO: 32485 - DNA, 267 bp, Glycine max
  Clone ID: 701105395H1
cgcaagcaaaaagaaagaatcccaggcgaggagaaagatggaggggaaggagcacggatgtgtcgttgggagcgaacaagttccccgagagacagccaattgggacggcggcgcagagccaagacgacggcaaggactaccaggagccggcgccggcgccgctggttgacccgacggagtttacgtcatggtcgttttacagagcagggatagcagagtttgtgggccattttctgtttctctacatcatgtcttaacgtatgggag

SEQ ID NO: 32486 - DNA, 259 bp, Glycine max
  unsure (1)..(259): unsure at all n locations; Clone ID: 701105396H1
ctctgaccgggaaaagaaaaatcaactttcttcaagcacccacngatttcctctctctctctacnaaaatggcgttctcttcttttctcggccgagtcctcttcgcctctgttttcatcctctccgcttaccaagaatttaatgcttatggagttganggggacccacagcaaaagcactncagaccgaagtttgatgcctttgcacatcaagtacatctaaagctggctttcaattccagatattgatatgaaaattt

SEQ ID NO: 32487 - DNA, 277 bp, Glycine max
  unsure (1)..(277): unsure at all n locations; Clone ID: 701105401H1
ctcaaccaaatctcagttttgagttcaactcaactaaactatgncttccttatccctatatgccaacctctcctctctaccatcctccctcaccattcgttcttcttcatccaaagatacctctttgaaacaggattggaggacaaagtccaaacctatcccaccaggtggcacataccctgcaaaagatcattgcagtccgttgtgggttgtgtgatacttactatattgcccatgtcaagaatgcatgtgctttcttgggagatggaatgnntaa

SEQ ID NO: 32488 - DNA, 272 bp, Glycine max
  Clone ID: 701105402H1
ggtccttccaatcatcccgtgttctggtcgacttttctcccttctccccatttgctcattctcctccccattcctgctcagacaccgcacagcgaacaaatccaccattcattttcctttttcgcaacagcgcaatggctcgaagatccctcccgctcctgaagcacctcctctcgcggcggatcccggcccgatccgtgacgtacatgcaccggccgggcgacgggtcgccgcggccggtgacactgatcccgggcgacgggatcgggccg

SEQ ID NO: 32489 - DNA, 272 bp, Glycine max
  unsure (1)..(272): unsure at all n locations; Clone ID: 701105403H1
cgacctcgcatcgcaccttcaacttaacctattccacntnnnatagnaaactgatttgctagaagaagagancaaagtgtgtctgtgtgtgtgagananagagcaatggctggctcgtgggcacgccgttctctgattgttctagccatcatttccttcggatgtctatttgcgatttccattgctaaggaggaancccaccaagttagggacggtcatcggcattgatcttggaacaacctattcatgtgtcggtgtttacaagaatggcc

SEQ ID NO: 32490 - DNA, 269 bp, Glycine max
  Clone ID: 701105404H1
tacggtgggagaagggaaggtgagtagtaatggtcatggatgttgcaaatcagggccaggctatgcttccccactggaagccatttctggtcccagagagtctctcatttatgtaacctctgtctacacagggaccggaatagagaagccagactatttggcgacagtggatgtggatccaaactctccaacttattccaaagtcatccataggcttcctgttcctatttaggtgacgaattgcatcacacaggctggaattcatgcag

SEQ ID NO: 32491 - DNA, 269 bp, Glycine max
  Clone ID: 701105405H1
tttcagtggcgtgaaacttccagaagaactcaaagtcactcctcttctgcttgccctctttcgcttcctgcaaatctttctgagaatcgagtcacagactagagctaaatcagcatagagatacaaaaatgccaaaagtaaagacaaatcgtgttaaatacccagagggctgggaattaattgagcctacactccgtgaacttcaagcaaagatgagggaagctgagaatgatccgcatgatggcaaaagaaaatgtgagaccttatgg

SEQ ID NO: 32492 - DNA, 171 bp, Glycine max
  Clone ID: 701105406H1
ccacttcttagagtgagaaagagcctctttaagagagaagataaatagcttgggaagtctctatcctcaagcttgagtgagccaccatagagtgagtcaattttgtaaacacatccttgtaaccctactatcactttgtatagtggaagaatctccatattggagaattat

SEQ ID NO: 32493 - DNA, 268 bp, Glycine max
  unsure (1)..(268): unsure at all n locations; Clone ID: 701105407H1
ctcctccttttgtgcttccaactcttttctttgttatattattcnctttcactttctcccaacccttggaatcgacatgactatcctcattgagcaatctgatcactttgggcttataatgatgctggaagtgagaggcgtgaaggagtggagaacttctacagaaaaaatcacacttaccaatcagttgatttcgtgaagaaaatgagagaggagtatgcaaaattgaacagggtagagatgagcatatgggaatgttgtgaactcc

SEQ ID NO: 32494 - DNA, 260 bp, Glycine max
  unsure (1)..(260): unsure at all n locations; Clone ID: 701105408H1
ctcttcttctcttgcggcnagggttttagcgcanancttctagatttaaacccagatgggtaaggaaaaggttcacatcagtattgtggtcattggccatgtcgactcctgggaaatccactaccactggtcacctgatttacaagcttggaggcattgacaagcgtgttattgagaggtttgagaaggaagctgctgagatgaacaagaggtctttcaagtatgcctgggtgctggacaaacttaaggctgagcgtgaa

SEQ ID NO: 32495 - DNA, 266 bp, Glycine max
  unsure (1)..(266): unsure at all n locations; Clone ID: 701105409H1
agttttgtttatttgaaattaacaagtagcaaagatgtttgnaatcatcggaggaaacaagggtcacaagataaaggggaacttggtgattatgcgaaanaatgtgttggatatcaacagcattaccagtgttangggngncatccgaaccggcattaacatcattggaggngtcgtcgacaccgttactgctttggcgtcccacatctccatccagctccattagtgccaccaaggctgatggacatgggaaaggaaaagttgga

SEQ ID NO: 32496 - DNA, 268 bp, Glycine max
  unsure (1)..(268): unsure at all n locations; Clone ID: 701105410H1
acaagattagctgtgaaaaaaagancccacacactttaacgagtncccagatctcagcgtggnggagaagtgataganccacttgttagtaagcagtggtttgtgactatggagcctcttgctgagaaagctcttcaagcagttgaaaaaggagaactgaccataattccggaaagatttcaaaagatttacaaccattggctttccaacattaaggattggngtataagcagacaactatggnggggacacaggatacctgtatggt

SEQ ID NO: 32497 - DNA, 176 bp, Glycine max
  unsure (1)..(176): unsure at all n locations; Clone ID: 701105411H1
acacatccctagctctgtcgttccgtcgttgacgatggcgtttcgggtgcgaancctgacctccgctctctactttcttctctctctcttgtccatcgcttccgccaatgtcttcttcgaagagcgtttcgatgacgggtgggaaaatcgatgggttaaatcagattggaaaaaag

SEQ ID NO: 32498 - DNA, 269 bp, Glycine max
  Clone ID: 701105412H1
ccatttccttttcttatgaatatcattccaaccagtgccaacaattcggttcaagaccaccctcaagcaccatccaaacctgttatttgtgatctaccattggctaggaaagcttcacttcatcggttcttggagaaaagaaaggatagaattgctgccagagcaccatatcaaacaagcaatcacatggcagcccttaataagccagctgaatccatgacatggctcaccttggcacctaaatcaccacaacaagacgaatctgattc

SEQ ID NO: 32499 - DNA, 266 bp, Glycine max
  Clone ID: 701105413H1
gagtttgttgtgagctataagctagtttatcgtgaggagaatatgaagttgtttgttttctttgttgctgcagtagttttggtagcatggccatgccatggcgcaggctaccaaaggttccctctccgaatgaaaactggctatggtgagcgttcttcggaggtaaaatgcgcaagttttaggcttgctgtggaagcacacaacatccgagccttaaaaccattcctgaagagtgcgttgaaccaacaaaggactacattaatggc

SEQ ID NO: 32500 - DNA, 266 bp, Glycine max
  unsure (1)..(266): unsure at all n locations; Clone ID: 701105414H1
ctttccattgatttcttgcttctatatattacttgcttcttttcntgatcatgtcccttgctggtaaaatcagctctgaaattggtgttcaggcaaccgctgcaaagtggttcaacctcttcacaacacaacttcatcacgttcaaaatcttactgatagaattcatggaaccgagctgcatcatggtgaagactggcatcacaatgagtcggtcaagcactggacttataccatagatggcaagttacaattgcaaggagagtat

SEQ ID NO: 32501 - DNA, 261 bp, Glycine max
  unsure (1)..(261): unsure at all n locations; Clone ID: 701105415H1
ctaaaaccgccgcaaganccgccgcagcgggaggcggagaaggtcaccgtgtcnntcaagaagtggcagcacaccgccgcacctttctgttacgagcccgctcccatggtgcctcccttcgttcccgtgtagatatacaaaccaaagaaaaagaagaagatgaaggaacagagagagttttaggatgctgctatctaatggttcatactactatttagatagaatgaagaagatctaacgctgtatttttaattaattata

SEQ ID NO: 32502 - DNA, 272 bp, Glycine max
  Clone ID: 701105417H1
caggaagctctaaggtcaagagggctgaaggatgatacaacttgcctcgttgtagatattattccttcagatcatcctgtgttaccagcaattccaagaaagaaacgtagtgtggctaacttcccttctctttggaaagaaatctccaaactctacaaacaaaggcaacaataagctttctgctgttggtgttgtggaggaattatttgaagagggttctgcaatgcttacagagaggtaactgagactataattgctaaatttatatttgc

SEQ ID NO: 32503 - DNA, 267 bp, Glycine max
  Clone ID: 701105418H1
ggatttcttcattgttttgctctaaaaatggagagagattttctgggtctgagctcaaaagaaccattggctatgatgaaggaagagatgaatattgatattggaagcaaagacacaggtttcacaaatggagcagtggtaaaatggcccttcatgaacaaagtatatgtccatcctcttttgatgtcattcaatcctcctcaggtgaattctgtgaaccatcctcatggtatgaagatgttttcagttcccaatcaagcaatttca

SEQ ID NO: 32504 - DNA, 268 bp, Glycine max
  unsure (1)..(268): unsure at all n locations; Clone ID: 701105419H1
cttccttgtctgttatcactgtgttgcgagcagtgatcgattcacgcgaactgcgattcgcattgccaatttcaacagcgtgcnttcgtacgtcggagatggagtcgctaccgacgacgaagcgaggaggagcgagatcgaagcccgttcagacctcgaaatcgtccctcgtcatggccttcttctcctgcgtcgcgtggctctacgtcgctggaaggttatggcaagacgcagagaatcggaatttgctcgctagtcttctgaaaaa

SEQ ID NO: 32505 - DNA, 267 bp, Glycine max
  unsure (1)..(267): unsure at all n locations; Clone ID: 701105420H1
cttcactctgctatcccccatattcctgtgtttcctttgaaaaacnaagaagaagaaaaaacatgtctaggttttttggattctctttgtgggtcttacgttgatgttggtcggtgtggcaaatgctatggctaactcttccaacaaatttgatcaactcttccaaccaagttgggcttttgaccactttattcatgaaagggatcttctcaaactcaaacttgacaaattttccggggctggttttacttccaagagcaagtatat

SEQ ID NO: 32506 - DNA, 266 bp, Glycine max
  unsure (1)..(266): unsure at all n locations; Clone ID: 701105421H1
ttatattcacacaacaaaccactacagaaaagagaggataaaccaatggctacttcactttcagcaactgggtgtgttggaacttccttctatggaagttggggcacttcaattgttggggaggattacaccatgctggccaagtcagtgccatcacaagttcgtatggggaggggaaagccagtgagattgcagcctatgatgaagaatgtcaatgaagggaaaggtatcnttgcacctcttgtggtgatcntcgcaacatcgtt

SEQ ID NO: 32507 - DNA, 268 bp, Glycine max
  unsure (1)..(268): unsure at all n locations; Clone ID: 701105422H1
gacaataagcaaaccaaaaccaccgccgccaccgccaccaacaccactaaaccttcaaaaggctcgctccacagcgccgccgcagcattcgaaggcggcgcggcggttctataaccaaaacatcaaggaatcctccgccgcgcgcctcagcaaggttctcgccgcctccggagttgcgtccaggagaagctgcgaagagcttatcttcgaagggaaggttacantgaanggncncgngtgtannangcctcagactaaagtngatctt

SEQ ID NO: 32508 - DNA, 243 bp, Glycine max
  unsure (1)..(243): unsure at all n locations; Clone ID: 701105423H1
ctgcgattcactctagtgagagacngaagagaaggaaaaccacgcagagttgaaaatgnctctgcgcaccctctcttcgctgcaatgaagaaacgtttttttttcttctccgaagaagaaaaatggctctcggcgacgatgcgcagaccactctcactctccctcgttcctcgattccctctctgcgaagagcgagaaacgttcgaggaagactttgacgcgaaggtgacgagtgcgagaccg

SEQ ID NO: 32509 - DNA, 117 bp, Glycine max
  unsure (1)..(117): unsure at all n locations; Clone ID: 701105424H1
ctctccttgaaaagggaggagaagaggaagaagcagaggaagagagaagaacaaacgaagcatggtttcgacgagacgcagtggatctctctctgccaaaagatcttcctnnctcgg

SEQ ID NO: 32510 - DNA, 264 bp, Glycine max
  Clone ID: 701105425H1
tgatttgaggtgcgtttagacagaaaacactaggtcacctttagttctcttctctcgcgcaatttccatctggttcacgacacctaaacattgcatcagccttcaatctttctcgtgattccatctccattcctttgatttgaccatcttctcttcggatcatcatccattgaaggctgtctcaggtttgttaacttttcttccaccatggctaacaaatcctcaagaagagcccaagactgctcctgagcctgatcggtggta

SEQ ID NO: 32511 - DNA, 262 bp, Glycine max
  Clone ID: 701105426H1
caaggaataatgtgtcaccacaaaaggcatctttgaagttcttgatatatggtggtgcagggtggattggggggcttataggaaacatttgtgagaagcaagggataccctttgaatatggcatggctcgcttagatgatagatcacagatcttgtttgattttaggaccattaagcctactcatgttttcaatgcttctggggtgattggagcattaaatgtgaaatggtttgaagctcataagccggaaactatacgtgc

SEQ ID NO: 32512 - DNA, 262 bp, Glycine max
  unsure (1)..(262): unsure at all n locations; Clone ID: 701105427H1
tttctgtctctgtgtttgcggctgaggattccgaacgagcgaccttcttcgtttctcgcaaagtttaagtcatcatgggtaaggaaaagactcacatcaacattgtcgtcattggacatgtcgactctgggaagtcaactaccactggtcatttgatctacaagcttggaggtattgacaagcgtgtgattganaggttcgagaaggaggctgctgagatgaacaagaggtcattcaagtatgcctgggtgcttgataagct

SEQ ID NO: 32513 - DNA, 259 bp, Glycine max
  Clone ID: 701105430H1
attaaataaaaccgccacaaatttctccatagttatgggcacttccattctcgacgccctgaacgttcgcgtggaaggttccggcgacaagtaccttgtcctggcccacggcttcggcacggaccaatccgcgtggcagcgcgtgctcccttacttcacccgcaactacagcgtccattctctacgacctcgtctgcgccggcagcgtcaaccccgaccacttcgactaccgccgttataccaccctcgacgcctacgt

SEQ ID NO: 32514 - DNA, 268 bp, Glycine max
  Clone ID: 701105431H1
aagtattgggcattcttactgtccctgcgctcagattaagatgtagaataaatcaatctgcttatctccatcccaacccaagcttgagagtgcatcctcttgtgattgctgcacatccctccgaacccaatcaatttgcattaggactcaccgatggtggagtacatgtacttgaaccactagaggcagaaggaaaatggggtactccacctccgaacgagaatggtgccgggcctagcactgcttcaggtgctgctgtttcagagca

SEQ ID NO: 32515 - DNA, 272 bp, Glycine max
  Clone ID: 701105432H1
ggagagaataatgaggcaaatgtctttctcatttatgaatatgtgtcaaatgggactttccagacttatctctctggagatagtccaggcaaggttttcaattggtcagagcgattgtctgtactaattaatgttgctaaggctgttcacttcctacacactggcatgatacctggtttcttcaaaaatcgacttaagaccaacaatatcttgctgaatgagaattggatggcaaagttgagtgactatggattatccattatatcagaagg

SEQ ID NO: 32516 - DNA, 264 bp, Glycine max
  unsure (1)..(264): unsure at all n locations; Clone ID: 701105434H1
gggatgctggctaccatctcttcaagcttcctcgaaccaacaatcgcggagatggcctgctgnctgccatacgtaaagaatgtctaagagttatggnttatanagagttgctttttaacgattgtggtgatcgtgtcgctcagttgttacatgttcagtcagttacccccttgttacaaaacccaaaaggctgtgttccccaagagtttctgnttgtgaacacccacttgttaattcctcatgattcaagtctgtgcgtatgag

SEQ ID NO: 32517 - DNA, 264 bp, Glycine max
  unsure (1)..(264): unsure at all n locations; Clone ID: 701105435H1
ggtggtttcaatttggagcacatccctgnttgnnnccgttcctttctttctctacctnnnnnnnnnnnnnnnnnnnnnnnnnncaagtacctgtataatntgcaaagagacagaaagaagggcagtaagtatcctcccggggagtcttctaatcctcaatcatcagaaaaagatgatcacaataatgatacaaatcttgctgaaggatctagtaaaccagagctgagtaacaagaatactccacaatcactgaaggncanatct

SEQ ID NO: 32518 - DNA, 265 bp, Glycine max
  unsure (1)..(265): unsure at all n locations; Clone ID: 701105436H1
ccaagcacaagtnctctgagttgttttgtgagatagcacatagcatagcaaggnaggagtattacaaccgaaaccctgaagaaaaaaagagtagaggaagaaaaaacacctgcaccaccaacgatgggtgtggattactacaagatcttgcaggttgataggagcgccaaagacgacgacttgaagaaggcttataggaaacttgctatgaaatggcaccctgntaagaaccccaacaacaagaaagacgctgaagcnagtttaa

SEQ ID NO: 32519 - DNA, 264 bp, Glycine max
  unsure (1)..(264): unsure at all n locations; Clone ID: 701105438H1
cgcatcttcagaaaggcgaatccatagcacccgagctgctacaggccattcaagggtctcgccttttccttgtggtattctctaagaactatgcttcctcaacttggtgtttgcgtgaacttgcacacatctgcaactagantgatgaagcatccccgagtcatgttcttccgattttctatgatgttgatccatcagaggtgcggaaacagagtggttattatgggatagcctttgcagaacacgaagaaagattcagagaag

SEQ ID NO: 32520 - DNA, 262 bp, Glycine max
  Clone ID: 701105439H1
acacttggagctgcgagcactagttttcccttttccccttgtttgtttttttaggataataattgaccaattgggtatcttgtcagttgagacatttttcaagaagtagcaaagctccttctacaatatttgacttggtgctttccttttggatcttacaatgggaaacagtgaggaagagaaatctaccaagactgaaaaaccttcttcacctgtaacagtggatcaagccaatcagaccaaccagaccaatattcatgtc

SEQ ID NO: 32521 - DNA, 261 bp, Glycine max
  Clone ID: 701105441H1
gtagttcttcatcatagtcttaaacattaaaccttagcaaaactcaacaatgctagacatcaaaggctacctcgtactcttcttcctatggttcatatcaaccattctgatacgttccatcttcaagaaaccacagcgtctaagactcccaccgggtcctccaatttcaatacccttgctgggacacgcgccatatctccgttcactgctccaccaagcattgtacaagctatcactgcgctatggacccttgatccagtc

SEQ ID NO: 32522 - DNA, 261 bp, Glycine max
  Clone ID: 701105442H1
caatgatacgtcgtcgttttgccccccagaacctctgaagaagaagaaatggcgagtagcagcagcaacactccgaaggaaagcgttgttgtcgattgcggaaggcgtcgaacctcttgcggctattgcagatcctctcgtcacaatagcatctctcatggcatgtgggcacatagccttactgtggatgactaccaagatcttcttgatcgtggctggagaaggtctggatgttttctttataaaccagagatggaaagg

SEQ ID NO: 32523 - DNA, 259 bp, Glycine max
  unsure (1)..(259): unsure at all n locations; Clone ID: 701105443H1
tgggccttccttntaacttgcaaggngaactattgcagcctttatgatcaaggttatacttcaattgggagcatatacgactngttcccaactcattatnatgcattagcaattcttccaataaattcaaacctgcatatttacttgctgacggaagattagagagggcaggganggctaaaaggccatctacttcaactggtggacaaattcctgcagagagcaatggcctgactagccaggattcatataaaaacag

SEQ ID NO: 32524 - DNA, 117 bp, Glycine max
  unsure (1)..(117): unsure at all n locations; Clone ID: 701105444H1
gcntggatggtgcatgggaaaagccctggacttgaatttncanctantcganacctgccacgcntnntatcactgtgttngtacntgcattnatgatgcaggnaggaacctcngntt

SEQ ID NO: 32525 - DNA, 262 bp, Glycine max
  unsure (1)..(262): unsure at all n locations; Clone ID: 701105445H1
ctctantattnttctcactgtcttgtctctccanagaactgtataganaganntggcagctgcaacatctggtgctgtgttaaatgggttnggatcttccttcttgagtggaggaaacaggagccaaacccttctggccactgctattggaggcaaagttngtgctgctgctgntactgtnagtcctagaagactcattgtggtagctgctgctgcacnaaagaagtcatggctccctggtgtcagangtggtggcaacctc

SEQ ID NO: 32526 - DNA, 117 bp, Glycine max
  unsure (1)..(117): unsure at all n locations; Clone ID: 701105446H1
tgttaaatngcgntcgccttgttagtgctccttatnagncttagttttcaagaaggagaaagactcctanaggttgtatgcaagaggaagnctcacaaaggagcaagttgcnncant

SEQ ID NO: 32527 - DNA, 264 bp, Glycine max
  unsure (1)..(264): unsure at all n locations; Clone ID: 701105447H1
gcgtaccanagactatgcanatnagagggcatatttccctctttggnggccgcacatgcattggctatcttagataaattggtccctactctatgcaatggtactaaggttgttgtgaattgtagtgggcgaggagataaggatgcagcaatagtcttcaatcggggaatatatatttgacaaggaataacaaagatggatgaagacctgtgttaaataacgatttgacctagcttacgatgaatactataaatgctatatatt

SEQ ID NO: 32528 - DNA, 255 bp, Glycine max
  unsure (1)..(255): unsure at all n locations; Clone ID: 701105449H1
tgaaaattctagacccaaaactagaggggcaatattcaagtaaaacggcatncaaggtggcccatttagcataccagtgtcttagccaaaacccgaaaggtagaccactaatgagccaggttgttgaaattctcgaaaactttcagtcaaagggggaaaatgaggaagatcaaatgcttcaaactggcgataccagtataaccctttatgaggttcctaagggcagcaatggcactccaacttagggctaaaacc

SEQ ID NO: 32529 - DNA, 263 bp, Glycine max
  unsure (1)..(263): unsure at all n locations; Clone ID: 701105450H1
caaaaccctgaagaaagacacagccattgtttgtttactttccattgattgagcgaaanntttgttttttctgcgatcattttccattgggtggaagaaagtctcaacctttagtcgaaagagcaaggatctgagtgagtgagcgatcatgtgtggtggtgcgattatctccgacttcattccagcgggtcccgccggcggggcgcagcgcgtgaccgccgacatcctgtggccgaatttgaggaagcggttctcgaantcgt

SEQ ID NO: 32530 - DNA, 260 bp, Glycine max
  unsure (1)..(260): unsure at all n locations; Clone ID: 701105451H1
aggatagcnacagaattattgctaaaggagaggangcaacagctgagcttgatgctaagntgaaaaaatttactgaagatgctatcaaatttaagatggatgacactgctgagttgtatgattttgacgatgagaatgaagagaacaaatttgatttcaaaaaaattgtgagtgaaaattgggtcgagccaccaagaagagaacggaagcgcanttactcagagtctgaatacttcaagcaaacaatgcgccaaggnnga

SEQ ID NO: 32531 - DNA, 263 bp, Glycine max
  Clone ID: 701105452H1
ccttaataatttattctgtttgtggtctcactagctagaaacaacatcactacacacaaatggcacatactttatccactaatctggctcttaaccttcccacatcgaggtatgttcgtccctcgagaccaacccaggtgaagcccatgaaggtcatgatgggtgatgcaagagaaaagctagaacatgtccatgtgcctaaacacaacaagcaccaccagcccctccccaaaaacaaagttgctcctaccccacccgtagtt

SEQ ID NO: 32532 - DNA, 205 bp, Glycine max
  Clone ID: 701105453H1
aaattctctctttcttctaacctaaccctacaattatgccccattaacacaaatcgcaattaccccaaattcctcaccctagcgtagatccgatctcttcttccttcgtgaattctggttcagggtggctgccatgtatggcacttagtattttcccttttgaagattaggggtgggtgggttgtgtctcgcttagggttccaaa

SEQ ID NO: 32533 - DNA, 225 bp, Glycine max
  unsure (1)..(225): unsure at all n locations; Clone ID: 701105454H1
cattatctacctttctttcattcccctgttctctctgtttctctgttccccagttcccgtcaaanccgcacactttcccatttcccatttcccatttctggttcaacccatggactcccaaccgggtctctctcttgggttaagcntccctctctcttcacccgcngctccactctgtgatactacctctgttctgtggcgtttatttnacanaanataccccat

SEQ ID NO: 32534 - DNA, 267 bp, Glycine max
  unsure (1)..(267): unsure at all n locations; Clone ID: 701105455H1
cngggcttccgncgtccgtagganagaagcttccggcaaccgctccccgttcaaccccgttatacgtcctccgcggccnnnnnnnnnnnnnnnnnnnnnnnnaaccacgacggcgtcagcacgttcgagctcttctacgacgacggcnacggcancggcctccgccctcttcctcccancatgtccgganttgctcctcggctntggntttgacagacttctcgaacagttcnncccagatcgagatgaacggattcgggcggccgg

SEQ ID NO: 32535 - DNA, 262 bp, Glycine max
  unsure (1)..(262): unsure at all n locations; Clone ID: 701105456H1
ctaatggcataccaagcgatgcagggtccgagttcgggatcgagttcgagttcggggtttcagttattgaattctccgttcggagacacnacctacacnaaagtcttcgtcggaggattggcctgggagactcagagcgaaaccatgcgccgctacttcgaccagttcggcgagattctcgaggccgtcgtcatcaccgataagaacaccggaagatccaagggctacggtttcggtataggtgactttccgggatcccgag

SEQ ID NO: 32536 - DNA, 259 bp, Glycine max
  unsure (1)..(259): unsure at all n locations; Clone ID: 701105457H1
ccaaacccttggnggctncgagacccnntgtgttctcctcttctctctctcntcttttntantctctttccctctcttcttcgcnccttttagggttttctcaactcttcgatttggggcttaaaccctctccgattcagattcggatttagggcttccctttctctattccgcctccaaagaaaaacagatctcgtggttggttcgtcatggccaccgttgctaatcccgcggatcaagcaactgatttgctacagag

SEQ ID NO: 32537 - DNA, 257 bp, Glycine max
  Clone ID: 701105458H1
gttcaggcgtcttaagaagcttggtatttcaaagatcaatccagatgatcttacaccagatgaagtaaataaatttgctaggcttgatattgaccccaattctatcacatggaggagagtaatggacatcaatgaccgattcttgagaaaaattactattggccagggacctgacgagaaaggaatggtgagagaaacaggctttgatatttcagttgctagtgagataatggctgttttggcactgacaacatcct

SEQ ID NO: 32538 - DNA, 259 bp, Glycine max
  unsure (1)..(259): unsure at all n locations; Clone ID: 701105459H1
ggcagagcgaagagaaggggcaaaagagaaagaagcgcttatcgaactcggacggaagcactgagttgactcggagggagtggaaagtgttgttgcgtaatgtctggtggtatcgctcgtggacgcctcaccgaggagcgcaagtccgtggcggaagaaccatccccatggttttgttgcgaancggagacgctgcccgatggaaccgtgaatttgatggtgtggcattgcactattcccgggaagactgggactgatt

SEQ ID NO: 32539 - DNA, 260 bp, Glycine max
  unsure (1)..(260): unsure at all n locations; Clone ID: 701105460H1
agaggttctgatcttctttgttttgttttgtctggttccctttcttccttcaaccaattttgancatccgaaaccggcatcagatccgattcgaaatgtacggattcgaagctctcaccttcaacatccacggcggcttcctcgaggccatcgtccgcggccaccgcgccggcctcctcaccaccgccgattncaacaacctctgccaatgcgaaaccctcgacgacatcaagatgcacctctccgccaccgagtacggt

SEQ ID NO: 32540 - DNA, 260 bp, Glycine max
  unsure (1)..(260): unsure at all n locations; Clone ID: 701105461H1
ctcagtttcttattcgttagatctcatcttacactcaccgtcaagttcgtctcgcgccaccgtcgacgcagttccggccactgcctttggttccctcactnnnnnnnnnnnnnnnnnnnnnncagaaatatgccttctcagaaggttgaaacgggtcaagacacagtccatgatgttgcgatggattattatggtaagaggctggccacggcttcatcagatcacacgattaagataattggggtgagcaacacggcctc

SEQ ID NO: 32541 - DNA, 261 bp, Glycine max
  unsure (1)..(261): unsure at all n locations; Clone ID: 701105462H1
catcagttgcgttattattccagagaaacctactgancngcatcccactagttcctgataaattttattgtgaactctgtcgtctcactcgtgcagatccattttgggtttcagtggcgcaccctttgcatcctgtgaagttgaccacaaccagtaatccaactgatggaaacaacccagtgcagagtgtggagagaacatttcaactgactagagctgaccaggacttggtatcaaaaccagaatttgatgttgaggctg

SEQ ID NO: 32542 - DNA, 217 bp, Glycine max
  unsure (1)..(217): unsure at all n locations; Clone ID: 701105463H1
atgctaagaacaaagatgcgccgcgagtacagatagatagacacctatcaatattcaatctatcaaaacgctctttgttccgaaggcaaacacagatctatatgaaagagcaaaaccagtacactctctattttttcttcactaaattggattccnagaatctcagtggagccaattaaggctctgcgatatggcaccatacgttattcggtgttgt

SEQ ID NO: 32543 - DNA, 273 bp, Glycine max
  unsure (1)..(273): unsure at all n locations; Clone ID: 701105464H1
ggagannataatgaancncatttncnanggaagacgatgggtccgatgctacaaaccattctcactgtncttcttctcctnangcttcttctcatcgtcattttncttttctttctcttcaaaccatggngcttctttttcncttcgngtttcctctcctcnatcaagggcgagctanagcggcccctttttggggacgtaggtgatgcgtcgtcgtttaatcggagtaatgaattgcctcgagatcatgatctcgagggtgcgtgttatccc

SEQ ID NO: 32544 - DNA, 263 bp, Glycine max
  unsure (1)..(263): unsure at all n locations; Clone ID: 701105465H1
ctacaattcgctctgtgcagtttcctcgctctcttttctgcaatnttcttttttgttcgttctctgcggttatctttttgagcttcaatggcggacgctgaaaccttcgctttccaggctgagatcaaccagcttctcagcctcatcatcaacaccttctacagcaacaaggagaccttcttgcgtgaactcatcagcaacgcttctgatgctttggataagattcgatttgagagtttaaccgacaagagcaagctcgatgc

SEQ ID NO: 32545 - DNA, 259 bp, Glycine max
  Clone ID: 701105466H1
ctgtacctgaaattggggatgacccaaataaaactccagcttcagcacgacacaaaagaggatgcaactgcaaaaaatcaagctgcctaaagaaatattgtgaatgttatcagggtggtgttggttgctccattagctgtagatgtgaaggatgcaagaatgcttttggtagaaaggatggttctgctcctgtaggcatagaaactgatccagaagaaacagaagcctctgacaagggtatggtagaaaaaacttacag

SEQ ID NO: 32546 - DNA, 259 bp, Glycine max
  unsure (1)..(259): unsure at all n locations; Clone ID: 701105467H1
cttttttgacttccagactcaaatctaantgncaaaaaaaacaaaccaaacatttgtctccatcaaaaagcactgcccttaacgtggtgccttcccctgcaactttttttctttagcatccaaccggaaaaaaaaaatagtactctcacagtctcacctcacttgcccccttttgtctatggcacaagatggtgtcttaaaactgtgtgatcctatttgcattgaaaaaagttgcaacctttttgttgtgagttttcnc

SEQ ID NO: 32547 - DNA, 259 bp, Glycine max
  unsure (1)..(259): unsure at all n locations; Clone ID: 701105468H1
aggatttgtataaagggactaccaagaaaatgaagatttcaagggatgttagtgatgccagtgggagaccctccacagtagaggaaatacttacaattgagatcaagccaggttggaagaaaggaacaaaaataacttttcctgaaaagggaaatgagcagagaggagttatcccttcggaccttgtctttattattgatgagaagcctcatagtctctttaaaagggatggcaatgatcttgttgtcnccccgaagnt

SEQ ID NO: 32548 - DNA, 257 bp, Glycine max
  unsure (1)..(257): unsure at all n locations; Clone ID: 701105469H1
ttctgttttgttctcattctgtgactctgtgtttagttaacgttaacagtgacttaagatggcggattctgcagatgtcacccacgatgttgtgtccctcctctcttctcctcaaaggnactttcttcttcgaaacaacggcgatcangttaaaattgacagcttgaagggtaagaaacttggtttgtatttttcggcatcctggtgtggtccatgtcaaacatttacgccaactttggtggatgtgtacnatgagg

SEQ ID NO: 32549 - DNA, 230 bp, Glycine max
  Clone ID: 701105471H1
ggcgaacaatttagatcagactctaaaacagaccaaccaacaccgctttcttttatgctagtgaacgcgacgtccatcacaacgacatatttatattcggcatagataacaccgtactctctaatatcccatactatgaaaaacatggatatggggtggaggaatttaatgaaaccttatatgatgaatgggttaacaagggcgacgcaccggcattgccagagactctt

SEQ ID NO: 32550 - DNA, 258 bp, Glycine max
  unsure (1)..(258): unsure at all n locations; Clone ID: 701105472H1
ttatggtaactgaaatctcgcaacgttatcactaatgttattgtngctgcgctacgtaagatcacgaganaagagaagacaaaagctattgtgatttgtgagtnatatgagtatgtctattatgcatgcaatgtcaatcagaagcagcgctttcttttgctttcaaataaattgctccgattcaaagcaaggccgtggttttggagaaaacactaacagtaacaggattaagaccaacaaatctgacaagggattggt

SEQ ID NO: 32551 - DNA, 257 bp, Glycine max
  Clone ID: 701105473H1
gagagactgagacagtgatatggcgtatctgagattctcacacgcagcaccacagccacacctcacactagggtttccttcaccacctcaatttctctctattgctgctccaaaattctctccctcgtcttctaccatcaggtgcaaaggttttagtagattgatagtgaatcagaggctggtgactgtttttgcaacaaatcccaactctgtaggtgaaaaatcacccacagaaggatcagatgtaaatgaaacta

SEQ ID NO: 32552 - DNA, 254 bp, Glycine max
  unsure (1)..(254): unsure at all n locations; Clone ID: 701105474H1
cttcaggatctccgaggaagagtatgtaaagtcaattaaggaggaaattcgcaaagttgttgagcttcaagaagagcttgatattgatgttcttgttcatggagaaccagaggtccgctctcatttcataacatgactaaatattagtcttttgaattgaagatagcttctttctttctgaagagcaactactctttgcatattttctttcctattgttagattgcngattccaaaattgcagcacctccaact

SEQ ID NO: 32553 - DNA, 256 bp, Glycine max
  Clone ID: 701105476H1
tacaacatcacatatctgtattgctttttgttgggttatcttgtggcattgcgatgcttttgttcacaaggctatttggtgctgctataataactgctttcactggaccaaagaatgtacacgtagtacctgcagctagcaattatgtaaagattcgaggcttggcatcacctgcattacttgttggatgggtagctcagagtgcaagtcttggtatgaaagattccttgggacccttgaaagctttagctgctgc

SEQ ID NO: 32554 - DNA, 231 bp, Glycine max
  unsure (1)..(231): unsure at all n locations; Clone ID: 701105477H1
gttcgttctagaagggctctattatacatcagataaaaccccacctatctctattttagggtnnttattatcttcatttcatcgtttcgttacgttctgcttcgcgtggaccaacaagaagtgtaagttttcattcaatggccagcgctcagctctcagcaatatcttcgtcgatctctaaggcgtcgtttgagggttcgacttcggtgttcattgcttccggggnaaatt

SEQ ID NO: 32555 - DNA, 261 bp, Glycine max
  unsure (1)..(261): unsure at all n locations; Clone ID: 701105478H1
gttctttttgccattaacagaaggaaattncngtttgggattggactgttcaacttttcaaatcccaaaccnctcctttatcctttgccttcaccaccgtcgtcgaganaaaatagaaaacagcggttcagattgagaaccacacgcacggtgcacctggntaattcnaacatcgaggagttggagtaattgatgtttggtgagggaatgcgttcttgggcttaatcttgttgaagcgcgtaagtagtcctgttgcaaagg

SEQ ID NO: 32556 - DNA, 236 bp, Glycine max
  unsure (1)..(236): unsure at all n locations; Clone ID: 701105479H1
gtttctttttatatatataacaaanatacaatttcanccaccctcccctcacacttgcaacctgcatgcttttagaaaatgagtattccggcatcctgctaatacttggctaattaaatagagctttgcaatctattgacccctctatctctgacttatttcaaagatatatcaatatcgatacaagaataagaatctgcttgggtggtggtagcgaagtgccaaagaacattaat

SEQ ID NO: 32557 - DNA, 264 bp, Glycine max
  Clone ID: 701105480H1
caaacaatggcgagtgcaggcagttgcagtatctcctgacagttttcagagccgaaaggctctaaccctcacagtggcaagggttaagggatgaagaattgtcgaaggagtctggcattccaggatgtgtttttgtgcatatgagcggatttattggtggaaacaaaaactttgacggtgccttggccatggcgaaggctgctttgacaatgtagacgaggatcatatgaaccaagggctatcgtttttgcacgctcattcact

SEQ ID NO: 32558 - DNA, 259 bp, Glycine max
  unsure (1)..(259): unsure at all n locations; Clone ID: 701105482H1
ctcagaattcgaccgttaaatttataacccaaaaactagtctcatnccttcttcttccgttgcacaaaaaacatatttntttcgtttatctctttctcctctatagtagtagctaaaaatggaggcgaagaaatcgggtttgaatctcccagctgggatgtccggaacctcactccggctggacactgcagcagcatcttccatctcgcaccctcaattctccttcttctctccgttccatctctaatctcacctcgcc

SEQ ID NO: 32559 - DNA, 257 bp, Glycine max
  unsure (1)..(257): unsure at all n locations; Clone ID: 701105483H1
gaaggtcggcggcgtggtgttatacggcggagttccacgtggcagcgtcgttccctctgcttctcagccgccgcagagtttctcttcgcgnnnnnnnnnnnnnnnnnnnnnncatttctgaccacgtttctttcgtgaaggatgtagctgcgactcagcctcctcagcatctttcacaactcctcagcattttgaaaaccagaggtgaatctattatctctccgggtgccaggcaaggattaattcctcttgctaaa

SEQ ID NO: 32560 - DNA, 248 bp, Glycine max
  unsure (1)..(248): unsure at all n locations; Clone ID: 701105485H1
gggggaggagttgggagtaccaattcaggtttatggaccggaggccacgatgacgncgtatctgcaaacaagctattgattgcatcatgtccgaagcataaagaagattaatttttgtctcatcatgtttcatttgtgaaactaatttggtggtgttttgatggatatattgatataagtccataatctgaaccaaagcaaagagtaannaggtgaagatgatagatgttacaagcctgaaactgttt

SEQ ID NO: 32561 - DNA, 257 bp, Glycine max
  unsure (1)..(257): unsure at all n locations; Clone ID: 701105486H1
cgagtttgttgtgagctataagctagtttatcgtgaggagaatatgaagttgtttgttcttctttgttgctgcagtagttttggtagcatggccatgccatggcgcaggctaccaaaggttccctctccgaatganaactggctatggtgagcgttcttcggaggtaaaatgcgcaagttttaggcttgctgtggaagcacacaacatccnaatcaataaaaccattcctgaagagtgcgttgaaccaacaaangac

SEQ ID NO: 32562 - DNA, 253 bp, Glycine max
  unsure (1)..(253): unsure at all n locations; Clone ID: 701105487H1
gctttgaatgccatctggggtttctttctcaggctatcaagctccaaagctgacccctttctctcagttctnnnnnnnnnnnnnnnnnnnnnngttcttctctttctctctctagaactacaatggtagaagacgtgtgtttcctctacaaggaaattcttgttatgaagcctccaaagagatcaccaatgttgttaaggatggcagtcgtaatattttcaatggtttgtggcgtttttatcttctctgtgtg

SEQ ID NO: 32563 - DNA, 258 bp, Glycine max
  unsure (1)..(258): unsure at all n locations; Clone ID: 701105488H1
cagaattcgaccgttaaatttataacccaaaaactagtctcattcttcttcttccgatgcacaaaaaacatantaccnatcgtttatctctttctcctctatagtagtagctaaaaatggaggcgaagaaatcgggtttgaatntcccagctgggatgtccggaacctcantccggctggacactgcagcagcatcttccatctcgnaccctcaatnctccttcttctctccgttccatctctaatctcacnccgcct

SEQ ID NO: 32564 - DNA, 253 bp, Glycine max
  unsure (1)..(253): unsure at all n locations; Clone ID: 701105489H1
cctgacaaaggattgccaacctgaatgtgaataattttgcatganatgggttggtttaccaagttgcttaagggctctgatcataaaattttacgaggacaataccatggcaaatatggagaggacagaatttgggataatcatcatagttcaatggatgatttgactgatattgagaaagaagacattgaccgtgcaattgcactttctctgtcagaggaggatcataaagggaaaaaagttgttggtaaga

SEQ ID NO: 32565 - DNA, 250 bp, Glycine max
  Clone ID: 701105490H1
cagggtgttattggtgggtgtagaaagtagcagaaaatggctgtgatcccgtgtcactgttaccgtaccgtcggatcagacaaaccctacctctccggtcagagtctccgccgtcgcgctcctttccccgccgtctctgtttcatttcgacgccgaatatcatgcgtcgcctcttctgccatcgctcacaaagttgggctgaaagattttcttcacttagatgattttgataaggacatattctgaagat

SEQ ID NO: 32566 - DNA, 98 bp, Glycine max
  unsure (1)..(98): unsure at all n locations; Clone ID: 701105491H1
agatcgtcagattggnaggctgcaaagacatatcaagatagtaaagtcatttataatggtagggttgaaggttttaattctggaggcctgctggtncg

SEQ ID NO: 32567 - DNA, 254 bp, Glycine max
  Clone ID: 701105492H1
aaaattgaagcattattaatgcatacttgatgcatgtttgtttatgatgtttaatgctcaagaatttgaatgacgatgtttgattttgaccaaacagggagcaatattatcggctgcgctgccgggtcttcaggagaaggtatgcgtaaaacaatactagaaacttagcttgattatgaattctctttaccacgttgacttagctagccataaatttatatttcttactaatgcaataaaaaaacaataatata

SEQ ID NO: 32568 - DNA, 256 bp, Glycine max
  Clone ID: 701105493H1
cttttgttctgctcagctcgatctacctaccttggttcttctctgatctgttatttcagtgcagcagcagaaaatgaccatcctcattgagcaacctgcccttgagttacaagttgaaggcaacaatgtgcatgctgaagaaaccaatgagcttgtattggatggtggatttccattgccaaaggatggatatatggccccagaaatcaattcatttggccactccttcagagaatatgatgctgaaagtgagagg

SEQ ID NO: 32569 - DNA, 258 bp, Glycine max
  Clone ID: 701105494H1
cttcttcttttcgcctcacaccatgaaaccccttctccgcttcggaatcgccttcatcctcctcctccattcctccctcgcttctcatatcccctaccccaaagcaatttccgatttgaaggatacaattgtgaagggatttgggttcacggcggaagatgatgttacgattacggggttcgatcctcgagacgccgaggtagggcattccgtggagtaccaattcgacctcgaaatcgatcacaaggttattccctt

SEQ ID NO: 32570 - DNA, 260 bp, Glycine max
  unsure (1)..(260): unsure at all n locations; Clone ID: 701105495H1
ccatttcattccaatacttgcctcnnatgaaactttacctgctacttcttgttgttctgttcttgctacattnnggcgcattttggcatcaaaccaccaagccccaaaaaaagcattatcctccttctttgttctttgcttttctcttttctcttttcctctgaaaacacaccctctttacagatcctgtnnnnnnnnnnnnnnnnnnnncacaatttctanncntccanngctttgtagctaccaaaacaatttgctca

SEQ ID NO: 32571 - DNA, 263 bp, Glycine max
  Clone ID: 701105496H1
agggtttgggttttgacaccatgactggttcgcgcagaggcaatggcgatgtcggggaaaatgtgaggaaagcggcgagcgagcagaacccggccactcgcagggtcatacgctcccagttcctccaactcaagaatctccatcaatgagaaaagagatgatttgatgaacacggagtctgacaagttcgacaccatcttggatgagttcgataagttacacgtccaagttgagaagccgagggagcaagttgcagatgcaga

SEQ ID NO: 32572 - DNA, 294 bp, Glycine max
  unsure (1)..(294): unsure at all n locations; Clone ID: 701105503H1
cacctccttcctccagtgtctcacaaactacacaaaatcacctganccaagtttccaacatagtatttgctccaaaccaacgcttccttttcttcagttctccaagcctacatacgcaatgcccgattcaacacaacttcaacnnntnaaacccttgcttgttgtcactccctcggaagaaccccatgtccaaggtgcagtaatttgcgccaaaagcattgcgattcaactcaagatcnaanntggtggccatgactatgagggtatctcgtatgtctccgaccaaccctttat

SEQ ID NO: 32573 - DNA, 284 bp, Glycine max
  unsure (1)..(284): unsure at all n locations; Clone ID: 701105504H1
cnatctcatacaatggcaggaactgctttctccacctcctgtctttcctcttctagcaacttagggacatgttggttggtattaaaaactcacaatgcaagggccgtgccagggaaactactacctggaaatggaaggagaagaatggcattaataaaagcagaagtgaagtatgtgaacgctgaaaaagctaaggaacttgtggaagctgatggatatacggttctgatgtgcgggacaaaaatcagtttgagcgagctcacatcaaatcttgttctcagtgc

SEQ ID NO: 32574 - DNA, 286 bp, Glycine max
  Clone ID: 701105505H1
tccaaagtccaaattttctagttccaccaaaccaaaccaaaccaaaatggcagcagcctcagcctcatccatgatatgcaacaccagccttatctccaaccatccaaaagcaccatcatttgaagccatccaacgtgtgcttccaaggtcttagacccctcgcaaggttcaccaaagcctcatcaaccaaagtgagcaccaccaccaaaagggttattccaaagggtggtgttagagctgaactcaactcagcccttgtgataagcctcagcactggcctctccct

SEQ ID NO: 32575 - DNA, 273 bp, Glycine max
  unsure (1)..(273): unsure at all n locations; Clone ID: 701105506H1
tgatgaaggcaatggcaagcagagctctagtcangaagatcgtgatttacnagaatgtttggagcataatctccctgatagcccttntgcttccccaacaaaagctgatggagacttcatggttgccttctccaatggatctaatgaggccattgatgcagatggcttagctgcatctgccaactccaaatttgggactagcacattacttcctggcagcgtctgctcttgacatgggaactttcaaatcctttaattgccaaataccaagtt

SEQ ID NO: 32576 - DNA, 280 bp, Glycine max
  unsure (1)..(280): unsure at all n locations; Clone ID: 701105507H1
aaatatctttcaaaacctccaaaacttaaatcaaaccaaaatcattagtaaatcttgtctggtcgtttgtntttgtgtcagagtttgtgcttcataggtattgacaaaaagtgttagtgtaatgtgtttggtgtttgtgtgcgacgaggaagaaagggtgttggggagacagacagcaccgggggcatgcccttattgtggagggatggttcaggccattgatgtagagagccaatggagattctgttttctacccttatgctttaagaccaaacgcaaa

SEQ ID NO: 32577 - DNA, 282 bp, Glycine max
  unsure (1)..(282): unsure at all n locations; Clone ID: 701105508H1
cttctcttgttttttgcaaattcgcaaccaacacagcaagggacaggtgcgagtncagtgagtatggcgtctccattatcagctccaattggttcaatgtcagaactcacttccacctcttcagggtaantttagccaagatgtgtctaaggttcaaaggtcgcgtgtggtatgttacggtaccagatcaccgcttggttattatggtaaagcattgacatcaagatcacataacgccctgaggttttctgtcacgcgacaatctgaagcacggtcaattgg

SEQ ID NO: 32578 - DNA, 278 bp, Glycine max
  Clone ID: 701105509H1
gggttcttcacttctcttcttcaattcattctagttctggattccgactcgccgcattgactcggtccgggttggggtcgactcagttcggtttttcattctctcgcgaatctaatctataggaaaagctaagggcacatcacaatgaaggcattgattctggttggggggtttggaacaaggctgaggccactgacactcagttttcctaagcctcttgttgattttgctaacaaacctatgattctgcatcagatagaggcccttaaggccattgg

SEQ ID NO: 32579 - DNA, 278 bp, Glycine max
  unsure (1)..(278): unsure at all n locations; Clone ID: 701105510H1
tggtgttccagacaacagaagaattngctcaanagtantcttggtctgcatccaattcaggttgcnntcaagtngntctgccagagtagatggaggnatgnaggcaattgcattcgctggtcgannnctannacagganaatctcatgctctncataagagagtggaacagtctctgcatcaggggcaatcagatgggctgnnttgagctagaaaatnagaggaagagnngacactagnantcatgtcttcagtttccctccagacaaaggaaagtgg

SEQ ID NO: 32580 - DNA, 277 bp, Glycine max
  unsure (1)..(277): unsure at all n locations; Clone ID: 701105511H1
atgctgatattaaacctggaagcatcattccttatagggtgaaggttagtctcatttttgcngttcccatcttgggaaggctaactctacctttggagaaaactggagaaattcccataccatacaagcctgatattgatcttgagaagattcattttgaaaggttctcttttgaagagacaattgcaacttcttcacttgaagttggaaaacaagaatgattttgacctcggcctcaacgcgctcgattatgaggtcggctggtgatgttagcatt

SEQ ID NO: 32581 - DNA, 279 bp, Glycine max
  unsure (1)..(279): unsure at all n locations; Clone ID: 701105513H1
ttcggttcatcagcgtgtgtctcancccatggcgtttccctacatggaagccgttgtnggatttatgatattaatgtacatttttgaaacttacttggatgtgcgacaacatagggccctcaaacttcctactcttccaaagactttagaaggtgttatcagccaagagaaatttgagaaatctagagcctatagtcttgataaaagccacttccattttgttcacgagtntgtgacaatagtgacagactctacaattttgtactttggggtattgcc

SEQ ID NO: 32582 - DNA, 285 bp, Glycine max
  unsure (1)..(285): unsure at all n locations; Clone ID: 701105514H1
caaaaatagaaagaaagagaaataccaaaaccttggcgcatcatattctttattccctncacttggatcgttaattccgcgaacgagcttctgcccttcaaattaaccatggagaatattggtgaggagtacggctactggccggagaacgacatgcttttccaaaacgaagaccttggcagctgggcgataatggatgaggcagcgttatcagggtcagggtactatgattcaagctccccggacggtactggtgcttcttcatcggtggcatctaagaacatt

SEQ ID NO: 32583 - DNA, 285 bp, Glycine max
  Clone ID: 701105515H1
gttttgggagcttttgatatgtcgagtggatccgtgagacgggtttcccgtcaagatattcagttggtgcaaaatctcatagaacgatgtctacaactgtatatgagccagaaagaagttgtggaaacactactagctcaagcaaaaatagagcctggtttcactgaactagtttggcaaaagcttgaagaagaaaatgaagaattcttcaaggcttattatgcaaggttggttttgaagcagcaaataatgcaattcaacaaattgctggatcagcaagtgcaa

SEQ ID NO: 32584 - DNA, 172 bp, Glycine max
  unsure (1)..(172): unsure at all n locations; Clone ID: 701105517H1
ataaactatggnagacttgcnaacnactacctanaccggcgaaagtcgtggagcttcttaagantcaggggtgaaccgtgtgangctctacgacanngacgccanngtcttaanngngtttgacaantcaggaatgaaggtggtggttgncatgccaaacgagttctcgnna

SEQ ID NO: 32585 - DNA, 276 bp, Glycine max
  unsure (1)..(276): unsure at all n locations; Clone ID: 701105519H1
gactgacccagtccatgtgacttaatatgtcaatacaacaacaattcccnaaatncatccttccattaaagttttgcctnttactgtaccatatacatttcctatagcctcttgcaaagctaaattcaattattgaagccaaagaaaaagagacaagaccaaaggcagtggctgccgtggaagaaagacgaaaggtttcatcgatctctgttgaacttcaaacactgaggaagaagagccacaaaattcttcctcgcaggtgcaagtatgcttcaa

SEQ ID NO: 32586 - DNA, 285 bp, Glycine max
  unsure (1)..(285): unsure at all n locations; Clone ID: 701105520H1
ccacaccacacctggctttctctttatcattcgttccttcctttcttcgcattgacaaaccctaacatagcatcatcctaaggcacatgcttctccccctgaatacttnntcctccaggggaacacaacttataaagacgatctatatttaaggaagaggacagggatgcntcggtggctttgttgcacatgtcaggtggaagagtcttacccatcaaatgaaaatgagcacctgaaaagcccaaggaattatggagatggnaatcaaaaaggctcaaaggtgtc

SEQ ID NO: 32587 - DNA, 281 bp, Glycine max
  Clone ID: 701105522H1
ctcacttcttaatgctttatctttctctgtttctaacgtttgtcattcttaactaaaaactaactttataatcattgaaatttcagaacttttttgcttatcctttatccttttttagcaataccaagggatgaatcatgtttggggtaaaattttctttcttgattaatatattgtgcttactatccatatccatgtccatttacactttgacttttatcaaaattgtaatttgtgtttcatctcatcagtttatgaaggggagaaatccttttacaagg

SEQ ID NO: 32588 - DNA, 240 bp, Glycine max
  unsure (1)..(240): unsure at all n locations; Clone ID: 701105523H1
tggagaagtcagggaagagagtnttgcttacccccaacggcgacgacatttctcaaggcattgccttcnatttggtgaagcaagggtgcaggttggttttgctgggagatcagaattccctgcggagcatcgcgaacaaaatcatggattccctctccctcgnagacagaggnaccgtgcaggtcgttggattggacnggangatcaancggaatcgactttcccatcantccgtggana

SEQ ID NO: 32589 - DNA, 272 bp, Glycine max
  unsure (1)..(272): unsure at all n locations; Clone ID: 701105524H1
aaatcctttatcctctccacgctcccaannatcntngcaaatgtcccgtcaagctcccggcgtcgtcaaaacgcgcctgaggggcgtcgttttcgacatggacggcaccctgaccgtcccggtgatcgattttccggcgatgtacagggcggtgctgggcgacgaggagtacctgaggctcaaagcggaaaacccttccggcatcgacattttgggccgcatcgacggctggccacctcacaaacagcgcaaggcattcgacgccattgctg

SEQ ID NO: 32590 - DNA, 257 bp, Glycine max
  unsure (1)..(257): unsure at all n locations; Clone ID: 701105525H1
attttgnaagcaaatatggatangcgacatgggataaanngatgaagtgtggttcaacagaagangagcagcgatagtgtttagttggtnanctgtggntgggatnttgcattcccnactcannatcantccagggtcggaagacaggtaccatgttgtttattcggctggaactaggcaagaatagagttaatggcaaacctcagattaagtaccatgatattgatctacattcccaacttctcggtcgacaaaac

SEQ ID NO: 32591 - DNA, 278 bp, Glycine max
  unsure (1)..(278): unsure at all n locations; Clone ID: 701105526H1
ctcccactcactttctcgcagaaacgtattgtttttctctctttccgcggcctagatctgngcagtttggaaaccctaactgctctcaccaacgacatcaccactctctccgatcaactacctctttcgtcgccctaagtcatggcaggaattgcacccgagggatcacagtttgatgctcgtcaatatgatacccaagatgaatgagctgcttacgtccgatggacaggatttcttcacatcctacgatgaggtttatgacagttttgatgctatgg

SEQ ID NO: 32592 - DNA, 255 bp, Glycine max
  unsure (1)..(255): unsure at all n locations; Clone ID: 701105527H1
gcataatgcacggcatgcaagacntgcagacctgtacannatttattcggatagcaacaactgctgacaaaagcatcttgcctcatatgaagggtattgctgatacaatgggatgtttgcaaagggagggtcgtttgcttcagggagagcataatcttttaggtgaagcttttctgttatggcncctctgctgggatccaacagcaacaagatgttttaaggtggttactagaacctttgagcattcagtggaca

SEQ ID NO: 32593 - DNA, 281 bp, Glycine max
  unsure (1)..(281): unsure at all n locations; Clone ID: 701105528H1
gcggaatcactttcactgtaaaagcaccataatacaagaacccaagccaagcgattcactaatcattattaacacacacaacacgcacatnccgtcccaaaccctaatccccaattttgattccaattccgacgagatcccagggagcatagcagagccctcaaatctaaattccgttcggagagatcctagtctcttcttcatggcgcatcgaggagccacgctgttcttccttctattcgctatctgctattctctcatcgccattgctggaaagagct

SEQ ID NO: 32594 - DNA, 278 bp, Glycine max
  unsure (1)..(278): unsure at all n locations; Clone ID: 701105529H1
aaaatgtggaagagaacgggttttgaagaagaagcagttcaattgatcaactcagatttcagggacctaagtctagctgctaatagactcgcccatcatgccatcaaacttggtggcattggctttggagcctcttttttcggattgtttgctgccattgctgctatttatctgttgattttggatcgtacaaactggaaaacaaatattctcacagcactactcattccatacattttcttcagcttgccttcattaatnttcgacgtcttcagggg

SEQ ID NO: 32595 - DNA, 284 bp, Glycine max
  unsure (1)..(284): unsure at all n locations; Clone ID: 701105530H1
cnagcttgccaacgcaaacgtatcgagccagcctcacaagctagggactcttcaccgcgctccanccttcttccctctcccntcgtcccctccaattggaatgtgtttgtgacttcatatgctggtagttgacattttgaaattgtaactgtggtgggagcaataatatattttgacatcatcatggagatacagacttgtggcaggccgattgactccttgctagagaaagtgctttgtatgaatattctgtcgtctgattacttcaaggagctctatcgatt

SEQ ID NO: 32596 - DNA, 285 bp, Glycine max
  unsure (1)..(285): unsure at all n locations; Clone ID: 701105531H1
gtanaatctgcagaaccccaagttgctggggcaaatgatgaagaggagcaggaagatnacaacaacactagagagcaggaaactggaagtgttgaaggagtgaaacgcggtgactatgaatatctgttatccatgtcaattggaactttgaccctcgaagctgttcagaagctgctagcagagaaagctgaaaaagaaaaggagttcgagattttgaaggctacaccatcaaagtctctgtggttgaaggatctgatgagcttgagaataaacttgatgacatag

SEQ ID NO: 32597 - DNA, 240 bp, Glycine max
  unsure (1)..(240): unsure at all n locations; Clone ID: 701105533H1
agagtttgttgtgagctataagctagtttatcgtgaggagaatatgaagttgtttgttttcttgttgctgcagtagttttggtagcntggccatgccatggcgcaggctaccaaaggttccctctccgaatgaaaactggctatggtgagcgttcttcggaggtanaatgcgcaagtnttaggcttgctgtggaagcacanaacatccgagccttaaaaccattcctgaanagtgcgttg

SEQ ID NO: 32598 - DNA, 280 bp, Glycine max
  unsure (1)..(280): unsure at all n locations; Clone ID: 701105534H1
annatnanttcatttgtnnnccnanangttaangtcnctgcctncgattctttcntttcttacttnntttctagtttctcccttccctctcacacaacacaagagannnacgaataaaacgcactgcacgtgaatcgcaattattagggtttacacaccctcgcagatggtttgagattgcgaattcgacgacgatgatggaaggancgagcaatggagggatgctgtaccacgaggtgcangagtcgaagctctgcgcggtgcatgcgtgaacacggtg

SEQ ID NO: 32599 - DNA, 284 bp, Glycine max
  unsure (1)..(284): unsure at all n locations; Clone ID: 701105535H1
gncatattccacaagaactctccangcgatcctccttcccacgagattctttngtgggaaaaatccaagaggtttgaaatttgaaggcagggaagatggattatttcaatggaccaggaaganaccatctctttgttcgnaggccggttaacattccggancagatcatccgggccatgancagagncaatgaggatacngttctncagnanttccagntatgacnatcnactttgcttggangatgtcaagaagattttcaagaccactactggnaccctttc

SEQ ID NO: 32600 - DNA, 280 bp, Glycine max
  unsure (1)..(280): unsure at all n locations; Clone ID: 701105536H1
ctggaaaacaacacacatatgttgagactgagaatgtgcgctatntttaccagccaatagaggcactgtacctgcttctcgtaacaaacaaaaacagcaacattcaggaagatttggaaactctgagacttctctctaaacttgtacctgaatattcttactcccttgatgaagagggtgtttgcaaacatgcctttgagttgatttttgcatttgatgaagtcatctctcttgggcacaaggaaaatgtgactgttgcacaagtgaagcaatactgtgc

SEQ ID NO: 32601 - DNA, 270 bp, Glycine max
  unsure (1)..(270): unsure at all n locations; Clone ID: 701105537H1
aaaaaatattttcccacatgaaaccaaatagcatactgggtctgtcccatganntttcttcttgggcatttacagtcaataggacttgattttcccaagcacttcagngtaattgcngtctgcccgaaaggtatgggtccttctgtcaggaggctgtatgtccaaggcaaagagataaatggtgctggaattaattcgagttttgcagtccaccaggatgtggatggcagagctactgatgttgctttgggcatggtctgttgcccttgg

SEQ ID NO: 32602 - DNA, 280 bp, Glycine max
  unsure (1)..(280): unsure at all n locations; Clone ID: 701105538H1
ggntactgatacagtcaaagaacatgttagcaaaggcaccacaaatgctgaaagcaaagtggttgcacccagcggaggcggcagcagagaggtgtctgatcttgagtacgaagaatttcattctctgccgaggtcatccttgtgaagaaagatccgatttcggactgccaaagactagaatagaagcatccaaatgatgcatgtggaagacccagcagcaagatgcccttcactgtgagaacggaacacattcaaattgggcaggtatcacttgcattgc

SEQ ID NO: 32603 - DNA, 274 bp, Glycine max
  unsure (1)..(274): unsure at all n locations; Clone ID: 701105539H1
gngatatgccgccaatgaagtttgtggtgaagaaggcatggagcagtggtggatgtggtcgggtaggagcactagagattggaagctgcccgggacccatagagacacccgctcttctcctatctactcgtaaagggctcctcactttatctcccctgacctactcacttctctcccttcccccgattcccatctccttcaaatttctccactccactttttggaaggattgctttcaaccactatatcaaaattaggagggcttcaccaaatg

SEQ ID NO: 32604 - DNA, 149 bp, Glycine max
  unsure (1)..(149): unsure at all n locations; Clone ID: 701105540H1
gttaaggatggcagtcaatccactcctcaagctggncatgttccatcccattgaagatgtcactggaactgtcgatgcccatggtccagatatccatgggactgtcataattgatgntgangatnatgacgatatnccacnngcacana

SEQ ID NO: 32605 - DNA, 228 bp, Glycine max
  unsure (1)..(228): unsure at all n locations; Clone ID: 701105541H1
gngattctgtcangctagtgatggaagaggatccatnacgtcccttaatttngggtggtgatcactcaatctcatatccagttgtccanagccatatctgagaagcttgggggancagttgatgttcttcattntgatgcacatcctganctctatgatgaatttgaaggaanttattattcgnacgcntcttctattgctcgantcatgganggtggttatgctcgt

SEQ ID NO: 32606 - DNA, 273 bp, Glycine max
  unsure (1)..(273): unsure at all n locations; Clone ID: 701105542H1
cacacacagtcanactttngtgaaggcctaggattggtgagtcaaacttgaattgaaggtgaagaaggagatggcagcaacttcttccttgtgttcatcgaccctccaatcccaaatcaatggattctgccttcacaaaacctctctttcccatcctcgttccctcactttctccaggaagaaaatttcaaccacagtgaaggctacatctcgtgttgacaagttttcaaaaagcggatatcattgtttctccatccatctttctgcaaattt

SEQ ID NO: 32607 - DNA, 84 bp, Glycine max
  unsure (1)..(84): unsure at all n locations; Clone ID: 701105543H1
gtggagcttncttttaggtanggcattttccacatnatntannacntgggnttgtcncaggggaatgnacagagagcagagatc

SEQ ID NO: 32608 - DNA, 275 bp, Glycine max
  unsure (1)..(275): unsure at all n locations; Clone ID: 701105544H1
aacacaacacaacccatggccaccacctccgcattcctcctccttgnnactcctcctgctgctccaccttcgccatcgccgctcacggcatcggcatcaactacggcacgctcggcgacaaccttccaccgcccgcggggtgnccgaacttcctgaagacgaagacgaccatcgaccgcgtgaagatctacgacgtgaacccggacatcctgcgggccttcgccggcagcggcatctccgtgacggtgaccgcccccaacggcgacatcgccgcc

SEQ ID NO: 32609 - DNA, 274 bp, Glycine max
  Clone ID: 701105545H1
actcactcttctattttccaactttacaatttcatttcagatagcttcttgactcgttactgactcactcaatggctgaccgagttcaccccagccactcgccttccgtttccgcggattcacaaccgccatcgcctcaagactcctccgtcgttccgaaaccgccgtcgccaccgtcaccggagaagccagtgcctccgcctggaacctacgtcatcaagatccccaaggaccaagtctaccgcgtccctccgccggagaacgctcgcgctac

SEQ ID NO: 32610 - DNA, 274 bp, Glycine max
  unsure (1)..(274): unsure at all n locations; Clone ID: 701105546H1
ttcgagataactagaaacagtgtgatgaaaatgaaggtccttgttttcttcgttgctacacttttggtagcatggcaatgccatgcgtacgatatgttccctctccgaatgaacactggctatggtgcccgtactccggaggtgaaatgcgcaagttggaggcttgctgtggaagcacacnncatctttggcntngagaccatncctgnagagtncgttganncaacaaagaatactccatggcgaacantgtagatcagactccnaancagtt

SEQ ID NO: 32611 - DNA, 272 bp, Glycine max
  unsure (1)..(272): unsure at all n locations; Clone ID: 701105547H1
ctggttcggctcggggcgaacatgcgagtcatcgatattggaggtggactaggcatagattacgacggttccaaatcttgtgactcagatatttcngttgagtacggnctcgaggagtatgctgcagcggttgttcacgcggttcagtgtgtgtgcgaccgaagtccgtgaaacaccctgtcatctgcagcgagagtgggagagccatcgtgtctcatnattcggtcttgatttcgaggcggttggcaccagcagcacaaaggcggagagtc

SEQ ID NO: 32612 - DNA, 285 bp, Glycine max
  unsure (1)..(285): unsure at all n locations; Clone ID: 701105548H1
aactatngaaagctnactatncatttcttcatcgttngattcttctcntcctanagatagcagatcttcgtgaaaatttgaccggtaagaccatcaccctttnggtngagtcctccgacaaccatcgataacgtgaaagctaagattcaagacaaggaagggatcccacctgaccagcagagncttatctttgcgggtaaacagcttgagggtggtcgaacccttgccgactacaacatccanaaggaatccactctccacctcgtgcttcnctcagggtngcng

SEQ ID NO: 32613 - DNA, 114 bp, Glycine max
  unsure (1)..(114): unsure at all n locations; Clone ID: 701105549H1
ctgtctcatgtntgttntgtcaggggtttangtctggtctggtattgtgacgcatgtngttgcagtngcacaacacaggcaaagatacatagattcattcatattagnattaga

SEQ ID NO: 32614 - DNA, 283 bp, Glycine max
  unsure (1)..(283): unsure at all n locations; Clone ID: 701105550H1
gcaactgtgttggagttgacatataactatggtgtgactgaatactctaagggaaatgcttatgcacagattgccattggtactgatgatgtatataagagtgctgaggtagttaaccaagtcatanaagaggttggagggaagattactcggcaaccagggccaattcctggccttaatacaaaaaccacttcgtttttagatccngatggatggaaaactgtcttggttgacaacggtgatttcttggaagaactgaagtggagagccagctttatatgaa

SEQ ID NO: 32615 - DNA, 261 bp, Glycine max
  unsure (1)..(261): unsure at all n locations; Clone ID: 701105551H1
tttccttcgtctcttttgtttcatcctttacttcaccacttttcccttttcattantcaggataacaaaacaacactccttgcaggattaaacttcacttcaattgaactaacctatctgtgggttttttgtagattgattcaattcaatggcttcagtaatgctcagtggaactgaaaagctcactctcagaaccctaaccggaaacggcttaggtttcactggttcagatttgcacggtaagaatttccaagagtgagt

SEQ ID NO: 32616 - DNA, 204 bp, Glycine max
  unsure (1)..(204): unsure at all n locations; Clone ID: 701105552H1
ctcgaattcgatgcggttaggattataaatagtaaaacgacgacaatgcgatcaagnngcgtggttgggtcacgtggncgtangagagangtcttctgatnanactttcacgctgncacctctcatacacaacgcgatcccanatttaccttgcatcttttctccatggatttggattggtccgtgntcttccaccaccaacac

SEQ ID NO: 32617 - DNA, 274 bp, Glycine max
  unsure (1)..(274): unsure at all n locations; Clone ID: 701105553H1
cgttctccatttttggctttacnaaaccactgtgtctgattaagggttctttaatatttccaatatttcttgtagtgaaaaanttgttagctaaaagaagaccaagtttttnctnctgtagaaggaagagaagaattaacatgaaaattcagtgtgacgtgtgtgagagagctccngcaacagtgatttgttgcgcggatgaggctgctttgtgtgccaaatntgacgttgangttcatgctgcaaacaagcttgcaagcaagcaccaaagact

SEQ ID NO: 32618 - DNA, 274 bp, Glycine max
  unsure (1)..(274): unsure at all n locations; Clone ID: 701105555H1
ttngtctcncctgcantcaacggcaccccccacaaaaatgacaggagagacagtgaacccaaaagcttaccctttggccgatgcgcaactcgcaataacaatcttggatcttgtgcaacaagctgccaactacaagcaactaaaaaagggtgctaatgaagcgactaagacactgaacagaggcatttctgagttcgttgtgatggccgcagacactgagcctcttgagattcttctccatcttcctctccttgctgaggataagaatgttccc

SEQ ID NO: 32619 - DNA, 273 bp, Glycine max
  unsure (1)..(273): unsure at all n locations; Clone ID: 701105557H1
cttcgttcgttctctgcagttatatcctttttgagcntcaatgnccggacgctgaaaccttcgctttccaggctgagatcaaccagcttctaagtctcatcatcaacacattctacagcaacaaggagatnatcttgcgtgaactcatcatcaatgcttctgatgctttggataagattcgattcgagagcttaaccgacaagagcaagctcgatgctcagccagagctcttcattcgtcttgtgcctgacaaggataacaagactctttcca

SEQ ID NO: 32620 - DNA, 192 bp, Glycine max
  Clone ID: 701105559H1
gtttaaagattatattttctgtcttgcaccctctagaacaaagaaatatgggtgctcctattaaatcatttgcattgccagcaatgcttctcttctcaatgatcatcataccccagcttgcactagggggcattaccaggcactaccattttgatataaaataccaaaatgtatcacgattatgccacacaa

SEQ ID NO: 32621 - DNA, 268 bp, Glycine max
  unsure (1)..(268): unsure at all n locations; Clone ID: 701105560H1
cgctcttcctcttccttttttnctcntcnttcnttcntcnttccttcnattaaaanttacnncnanacnngnaattgnnggcaacaattntnaccnntnacntnananattccnatnatcnaaacnttnttcntcggaatgggtggctttttcggttgtttgggttcctcaaaacatagaaaccacaagcacaaggttcaaagaatgatagtagcatagcaagcaagagcaacatagtgtctcttggttcaggttgctccacaaatgt

SEQ ID NO: 32622 - DNA, 89 bp, Glycine max
  unsure (1)..(89): unsure at all n locations; Clone ID: 701105561H1
gagaaatgtgtggggtctcgntctggcgtttctgcttcngctatccctctgcgccgaagcttntgttcacgactanagaggggagaaat

SEQ ID NO: 32623 - DNA, 278 bp, Glycine max
  unsure (1)..(278): unsure at all n locations; Clone ID: 701105562H1
gntgttgagttcagcgttcaccaacagaaacagcagaaggaaggaaaaggtgactgcacagaggtatcgaataaagtcaaaagtcggaatggtttcactctgatcaaactgaggaatcgaggaaggaagggttaggattagggtaaggattgggaagccataggagaagagaacaagaggaagaagaggtcaattcaaaatgccggaagaggatttggtggacatcaaatttaggttgtacgatggttccgatatcggacccttcagtactcctccgc

SEQ ID NO: 32624 - DNA, 297 bp, Glycine max
  unsure (1)..(297): unsure at all n locations; Clone ID: 701105565H1
gtccgntngagctngancngtggtgatnaagcntcgcnccnntttggntctcttggttctctatgtcacagtggagcagantaagctactccaccacgtagaagccgntggtgggtttgtaaaaacaagaggagtgcagcttatgctgaatgggagtccctactatgctaatggctttaatgcctattggcttatgtaccttgcctctgatccttcccagaganacaaaatctcatcggtatttcaacaggcttcaaatcatggactcaacattgccagaacttgggccttcagtga

SEQ ID NO: 32625 - DNA, 282 bp, Glycine max
  unsure (1)..(282): unsure at all n locations; Clone ID: 701105566H1
atttatcatttcatttgtngtctgttacgttaacgtccctgcctccgattctttccatttcttactttctttctagtttctcccttccctctcacacaacacaagagatcnacgaataaaacgcactgcacgtgaatcgcaattattagggtttacacaccctcgcagatggtttgagattgcgaattcgacgacgatgatggaaggagcgagcaatggagggatgctgtaccacgaggtgcaggagtcgaagctctgcgcggtgcattgcgtgaacaggtg

SEQ ID NO: 32626 - DNA, 279 bp, Glycine max
  unsure (1)..(279): unsure at all n locations; Clone ID: 701105567H1
tccgcgtataccccaagtntctctctctacccttttctttctagttggacacntccgtcgccgcantcactttgatgncaattttctgaacacgcttttgaagagggtaagttcgagcaccggtactgtgctgtgctgcattacttgnatttcctctataatgggntgnttccagtcnaagtcagcgangcagtttcntggacaggagaanactgttaatcttgcggcagagacagctttantgncagtgagggtgnagcactggttgagctttttagg

SEQ ID NO: 32627 - DNA, 109 bp, Glycine max
  unsure (1)..(109): unsure at all n locations; Clone ID: 701105568H1
anttgcntcantnctcancaacaccnaagaagacaaagttnnttgcattgnnaaactgctatattagtgntttactgctatgttgtttattccaccagcaanatagnga

SEQ ID NO: 32628 - DNA, 270 bp, Glycine max
  unsure (1)..(270): unsure at all n locations; Clone ID: 701105573H1
caactccataacacaaggcagaaagcaagctcancctagagttttaaaaatggcagcagcctcctccatggctctctcttccccatccttggctggcaaggccgtgaagctgggcccatcagcccccgaagtcgggagggtcagcatnaggaagaccgtcaccaagcaggcctcctccggaagcccatggtacggcccagaccgcgtcaagtacttgggcccattctctggcgagcccccgtcctacctcactggcgagttcccaggtga

SEQ ID NO: 32629 - DNA, 269 bp, Glycine max
  unsure (1)..(269): unsure at all n locations; Clone ID: 701105574H1
ttaaactacataganaaataaaaccaaacctttcttcctactactncccattcccacatttcgacaacatggacgaggacttcgacatgccgacggcggaggcaatgggcgaggacttcgacttcgccggcgccaccggggcgacctcgacggcagcagcagcaaccccatcttgaaggtcggcgaggagaaggagattggaaaagagggtttgaagaagaaactacttaaagaaggtgaaggatgggacactcctgaagttggtgacg

SEQ ID NO: 32630 - DNA, 270 bp, Glycine max
  unsure (1)..(270): unsure at all n locations; Clone ID: 701105575H1
ccatcttcactnnctctctccatctatgtccatgctnccncntcngtttcggtttctcgctcgctgcccctttattttattaatactatttttcgattaactttgtttntatttttttaatttcgggaccttgtccctttgacgtgaattcatctctttcttcgtgattaaattaactgcctgcccgaaatgatgggaattgcccaaattgatgcattatttctctccagatttttcatttttcgataactccattgtcgcaggtatggc

SEQ ID NO: 32631 - DNA, 90 bp, Glycine max
  unsure (1)..(90): unsure at all n locations; Clone ID: 701105576H1
cncaattgcgtaangctcaaagctttgtggcagtttgagcattncctgactaacatgggggatgatggaaagaagatgagtgnngagggg

SEQ ID NO: 32632 - DNA, 154 bp, Glycine max
  unsure (1)..(154): unsure at all n locations; Clone ID: 701105577H1
attgtccaattataaggcaccaccaccaactcatntcaatattctctcttgtctaaaaaaacaagtatgnnattcangtcaagangattagangcagaagcaggngcactggncttannntgctcattttgtcatcgtcatcttgttccaatta

SEQ ID NO: 32633 - DNA, 274 bp, Glycine max
  unsure (1)..(274): unsure at all n locations; Clone ID: 701105578H1
gagaacagaagatggcacaaacgctggcaatgcccgtggcaccttcgctcgctatcatctccaattctgcgcctctccaagacactctccgttcccgttctcaacaacccaaagtttcaagggttaagcatcaagtgcgttcgtgttggaggtgtggagattccgaacaacaagcgaatcgagtactcgctgcagtacattcatggagttggcaggaccagagcaaaacagattctgtgtgatatccaaatggataacaaaatcacgangaact

SEQ ID NO: 32634 - DNA, 282 bp, Glycine max
  unsure (1)..(282): unsure at all n locations; Clone ID: 701105580H1
ctagggttttactttacctctgtcgcgggaaacctcactgtctcacnacacaaccttcaanncaaaacaataccatccacaccancnacntaancgnnagattaagattaaaactaacataattattataganagtaaccaccaagtaggcgcaaacatgacagagaagaagcggaaggagagggacgaaggcaaccgccaaagactgaagccgaagaagaagccaaacactcaatggaagaagagaggccctcgtttgccctcatctcttcagaaanagct

SEQ ID NO: 32635 - DNA, 297 bp, Glycine max
  unsure (1)..(297): unsure at all n locations; Clone ID: 701105581H1
atantagtgnnactntgncgtcnagtatctcaanncntgcngangnnngangnttggtcagcanataagtcccactggtactaaggctagaatatgtacaattgaanagctgtttggccaaagctttttctctaacgnagaagacatcaactnccatgtgctttgnacgactgtggaacacagggttntgagcaatggacacaacactttggtggtcataganaaggacangagtagtgaatggtacttgtaattctgttaaaagagcatgaatccatgttaactcaatggaagttt

SEQ ID NO: 32636 - DNA, 280 bp, Glycine max
  unsure (1)..(280): unsure at all n locations; Clone ID: 701105582H1
agcagtttaaccttggccctaatggtggaattttgacttccctgaacttgtttgccactaagtttgatgaggtaatttctgtgattgagaaacgggcagatcaacttgactatgttcttgtggatacccctgtnncagattgaaatatttacctggtctgcttctggtgctatcattacagaagcttttgcatccacatttcccactgtagttgcctatgtagttgatacaccccgttcagaagatcccaccactttcatgagcaacatgttgtatgctt

SEQ ID NO: 32637 - DNA, 275 bp, Glycine max
  unsure (1)..(275): unsure at all n locations; Clone ID: 701105583H1
agcagatcgcgtctctcgaaggtctcatgagatttgtggacatcangtacgatgatttaaatttgctgctaacttttttttactaccctactttcatcnattataagttttctgtttgtccatttttctgtaattaagatttaaatgtatagatgtggtggtggacggggatctgtgtgggtatgaggtggagattaactcccccttatttaaaaagcccattcctggttcgagcatatgttattattcaaatagcctcactagattttagcagc

SEQ ID NO: 32638 - DNA, 274 bp, Glycine max
  unsure (1)..(274): unsure at all n locations; Clone ID: 701105584H1
cgtcatttccaaggccagctatctcntcatcatcaatcgcctctacgagtgcatttgggatcgagcagttcatctagctgactagcttctttgtggtgttctgctaggaggtgtctttttcagatcttcaggtagattgacatgtgtcanatgtntcttgttcttaattcttgttttttcccttttattccttgaggatttcttatcctttttgtacctctcntttctctcttaataaacctttatttataataaaaaatanagtcaaacaaaa

SEQ ID NO: 32639 - DNA, 270 bp, Glycine max
  unsure (1)..(270): unsure at all n locations; Clone ID: 701105587H1
gccaatactatttttctntctcaggntctcattatgaaaatgctggaacatcctaatatagtcaatctcattgaggtgattgatganccagagacgganaacttctacatggtacttgaatatgttgaaggaaaatggatttgtgagggttcaggtcccacttgtggcttaggtgaagagactgctaggagatacttgcgtgatatagtttctggattaacatatctccatgctcataatatagtacatctggatattaagccagataat

SEQ ID NO: 32640 - DNA, 268 bp, Glycine max
  unsure (1)..(268): unsure at all n locations; Clone ID: 701105588H1
caagaancactcaantgcacacatnggagnacgttggaagatatgagagggttgcttcaggctgctgaannnaaaaggnaancggcactagctgagctctcagctaaacatcaaaagaatatacagagtttggaggctcaacttaatgatgcattgttcgacaaaagtaaggcatttttnnccataacagtgatgattatgtgtaggtcaatggtcctacacctacaccaggcccagttataccngannacagcatcattcaatccca

SEQ ID NO: 32641 - DNA, 269 bp, Glycine max
  unsure (1)..(269): unsure at all n locations; Clone ID: 701105590H1
gagggattattcagcttccctttttccttccctcgacacaaccagagttnngnancgaaaatggctttcaaactgaaatcactanntntcntttgnngtnttnactcannttnnngnnaaaancctaattcaacactctcaaaccatcacttttntcgtcgcttcttcgcaccttccattcctcccaccctgtgcctatncggngcagtgcagcgtccacctttcatcgccatcgcttcttcgtaaccgctcgaagcnaagangaagac

SEQ ID NO: 32642 - DNA, 268 bp, Glycine max
  unsure (1)..(268): unsure at all n locations; Clone ID: 701105591H1
gaagcactcttcgttcttcgactgtctacganctgctttctctgaattgtgaaaatgtcgctgggagaaactgcttgttcatacgcagctctcatccttcatgaagatggaattagtgtaactgctgacaagatcagcaccttgttgaaaactgcaaaggttccagtagactcttattggccaaccttgtttgctactttgctgagaagaaaaatcttggcgatttgatagcaaatgcggcaggcggtggtgcaccagttgctgttgc

SEQ ID NO: 32643 - DNA, 272 bp, Glycine max
  unsure (1)..(272): unsure at all n locations; Clone ID: 701105593H1
cncaatcttaagcagtgcatccagtctttttaccttcctggtatccctagcattcttgggcgagaggtttacttggttaaagcttttcagtgttcttctttgtatggcaggaacaataattgtaagtctaggtgattcgcaatctggtttagcaacagttgcatcgaatcctcttcttggagacatttttgcacttgcttccgcaggattatatgcagtttatataactctattcgcaaganattacctgatgatgatggaaaaagtggtga

SEQ ID NO: 32644 - DNA, 278 bp, Glycine max
  unsure (1)..(278): unsure at all n locations; Clone ID: 701105594H1
caacacaccanttttgcacaagcnattgcaacnnaccnncgttnaatagtgtnaatntctttttcctttttcttatttncctctccatagtgtctctctctccctttctcttatntaaatctcatagtgtctctnttgtncttnnatcaagagaagaaagaataggcgctgagggnatggnaggnggtgtgnnagaggttgntatgtctgccttcagagaatgtttgtnctctatnatggaagaatccttatgttcttcgncttgctttctctgctgg

SEQ ID NO: 32645 - DNA, 278 bp, Glycine max
  unsure (1)..(278): unsure at all n locations; Clone ID: 701105595H1
gnagcctcagacaggatcaaagctggtttcattcacttcaagaaggagaantacgacnagaatccagctttgtatggtgaacttgccaaaggccagagccccaagttcatggtgtttgcttgcttcagacttcaagggtgtgcccatctcatgtgctagatttccaaccaggagaggcctttgtggtcagaaatgttgccaacattgtcccaccatatgaccagtcaaaatacgctgggaatgggggctgcagttgagtagctgttttgcatcttaag

SEQ ID NO: 32646 - DNA, 282 bp, Glycine max
  unsure (1)..(282): unsure at all n locations; Clone ID: 701105596H1
taaaaccancttcattcccatcctttctttctgtcaaattntacattaaattacangacatggcataaacncacacnaacannaccctcncnttaaatanncacaccctacccctcagantcagacacccagttgcttccttttattcctgtaatccatgaaataaaattgctagcttaatagtgatccgtatagaagactagggaacttgtttgctatggcaactctgagcaattcaactaatatcttttggcaagattgtcaaatacttncgcctgaaag

SEQ ID NO: 32647 - DNA, 290 bp, Glycine max
  Clone ID: 701105601H1
atttgcttcacatatctttgccctactgtttcacaaatggttatttgaagttcatcttgataatccagaagtgcttctccggtattcatctgctctggttcaaggtgccacaaatgttttctggattgacattcaaacaaatacaaggcgattccagtctttattccggtaccttttggaagatgttgcattagaccacactcgattgaacaaaattcctttccaggctcagcgggatacatatcttatgctctcaaggttcatctattttacaacaaagctgacaaaat

SEQ ID NO: 32648 - DNA, 288 bp, Glycine max
  unsure (1)..(288): unsure at all n locations; Clone ID: 701105603H1
gcttctcccaaaactccagcgtaaggcanncttttcaccaaattgtcaactatccatcttcgttatttgcaaattccgtttcctttgaattacaatttacattttacaagaccggaaagacagcctccgatgttgctgtcgtcgtgttcgtaggttttattcggagacacagtttttcattcttccaatggcccagtctttcggccagaccgagatcaactgggacaagcttgataaaactaggttctatgtcgtaggagctgggactctttacaggtgtttcggtgg

SEQ ID NO: 32649 - DNA, 290 bp, Glycine max
  unsure (1)..(290): unsure at all n locations; Clone ID: 701105604H1
ganaagctgaagattctcaggacggaaacactgtgtcaagcattaatgttaatgaaagtgtatcnggcaagtncattnctacatctgagaactcancgacaaatgcaatgggcttaactaagagatcggtattaccccctccacccgcgggttatttnttgggctatcgtcttcctccagggcatccgtgtaatagcttcacactccctcccccacctgctgataaaaagcgtactgggccacgtccatgcccggtgtgttaccttcctgtggaagaagccattggactg

SEQ ID NO: 32650 - DNA, 286 bp, Glycine max
  unsure (1)..(286): unsure at all n locations; Clone ID: 701105605H1
ctttcctaaaganaattggaanctgnctctgttgnnaaagttantanatntttnntgagnngggtggattgagaaaactgtgcaagctttggaacttcttcaangtctggtacttcaatggntancnaagaggntnataaacttcaannanttcctccttaccctgaggtaattcacntcaatattcagaatccctttnttattntangnngtctcnccaaaattantaaaccttggaacaattttcctagtnaagttggcanatttcacactggtgtaattganc

SEQ ID NO: 32651 - DNA, 285 bp, Glycine max
  unsure (1)..(285): unsure at all n locations; Clone ID: 701105608H1
gtcgcccgacaacttgggtgttccattttcctgttacctgaggacataatagaggtcaaccagaagatgattctcattttagctgctagtataatgtattggagcctcaagaaacctgaagaaaacatcacccctgaagcatcgcctaaagcttcagtagatggtgaaagcgaaacagatttagttgatgaggtatcccatttagccattgacgaggtatccaatttagccatgatgagacaacttcggagaatgctagctctctaagttagtannggttgaagt

SEQ ID NO: 32652 - DNA, 294 bp, Glycine max
  unsure (1)..(294): unsure at all n locations; Clone ID: 701105609H1
gttcccatcgcatctgtaacaatggaagcgcgccatgcaactcttggtcgacgaacgttgggaggaaattcggcaaaagagggccgcggagagattnancaaaacctcttcgggaccagatctcgggcaggttcccagcacctccgagacttcgggaatgagcaaatccgagagcgcaaataggctctctgagacagatcttagtgctctattgtctcaattgaaaggtctgcaaaagaagaacacggagttggaggaagaaaacaggaaaattactttaaagcttcanacgat

SEQ ID NO: 32653 - DNA, 289 bp, Glycine max
  unsure (1)..(289): unsure at all n locations; Clone ID: 701105610H1
ctcttcttctcttgcggcnagggttttagcgcantttcttctanatttaaggaagatgggtaangaaangttcacatccagtattgtggtcattggccatgtcgactctgggaaatccactaccactggtcacctgatttacaagcttggnggcattgacaagcgtgttattgngaggtttganaaggaagctgctgagatgaacaagaggtctttcaagtatgcctgggtgctggacaaacttaaggctgagcgtgaaagaggaatcaccatgatattgcttgtggaa

SEQ ID NO: 32654 - DNA, 293 bp, Glycine max
  unsure (1)..(293): unsure at all n locations; Clone ID: 701105611H1
gagataactagaaacagtgtgatgaaaatgaaggtccttgttttcttcgttggctacaattttggtagcatggcaatgccatgcgtacgatangttccctctccgaatgaacactggctatggtgcccgtactccggaggtgaaatgcgcaagttggaggcttgctgtggaagcncacaacatctttggctttgagaccattcctgaagagtgcgttgaagcaacaaaggaatacatccatggcgaacaatatagatcaggactcnaaaacatttacccacaagnttantttt

SEQ ID NO: 32655 - DNA, 287 bp, Glycine max
  unsure (1)..(287): unsure at all n locations; Clone ID: 701105612H1
caataaatagcatagagtgagaagtgagaagagaaaaatggcaatctccatacgcagtagacaactnttcatagatggagagtggaaagtcgctcttctcaacaatcggtttccgatcatcaaccccgctactgaagacatcatagggcatattccagccgctactaaggaagatgttgacttgcggtggatgctgctanaagagcttttcccataanaaaggnaaagattggtcttcagctctggctctgttngtgctcgcnatcnncgagcatcgttcanagaaa

SEQ ID NO: 32656 - DNA, 295 bp, Glycine max
  unsure (1)..(295): unsure at all n locations; Clone ID: 701105613H1
atcctattaaccttttcttctttcatttcccaccccattctatanctcaatcaatggcaatggctttcttcaatccctaatgcgccttctgcgttcaattctcagagctacgttggtctcagagcgccactgaggaccttcaacttttcttctcctcaagctgccaaaattcctcgctcccaacgccttttcgtcgtcagagcctccgattcggagttcgaagccgccgttgtcgccggtaaggttccgccggcgcctcccgtnccgnccagaccggcggctccggttggaacac

SEQ ID NO: 32657 - DNA, 293 bp, Glycine max
  unsure (1)..(293): unsure at all n locations; Clone ID: 701105615H1
cagccacacgcttcagaagacatggcctcattgggtgggttacaaaatgtgagcngcatcaattttcttatcaaagagggtccaaaagtcaatcgcaaagttcgagctgaagccgccaccatatccactgaatggtttggagccggtgatgagccagcagacacttgagtttcactgggggaagcaccacaagacttatgtggaaaatctgaaaaaacaagttgttgggacagagcttgatgggaagtcactagaagagattattgtcacatcatacaataagggtgacttcc

SEQ ID NO: 32658 - DNA, 287 bp, Glycine max
  unsure (1)..(287): unsure at all n locations; Clone ID: 701105617H1
gcgnnnngctggggcgccgcatcacctttgagtnacagggactacgtcgtggaggagctgacggcggagagcttcgatggcgtcgacatcgcgctcttcagcgccggcggctccattagcaagtacttcggccccatcgccgtcgatcggggaacggtggtcgtcgacaacagctccgcgtttcggatggacgagaatgtcccattggtaattcccgaagtgaacccggaagcaatgcaaaacatcaaagccggaatggaaagggcgcattcatgctaaccctaatt

SEQ ID NO: 32659 - DNA, 286 bp, Glycine max
  Clone ID: 701105618H1
gcttcttagaatcagtagcaaaggctcttcgacccggaggagtgttctctgctccagcagacagcctgtggcataagaactttgtggttgcagacaccatagcaaattgcaagaagatattcaaaggctccgttaactatgcttggaccacggttcctacatatgcaagtggggtgattggattcatgcttgctctacggagggtccaccagtgaacttcaaacatccaataaataaattgaatccagagaaaaatggggtggcaaagggacctactaagttttat

SEQ ID NO: 32660 - DNA, 287 bp, Glycine max
  unsure (1)..(287): unsure at all n locations; Clone ID: 701105619H1
gtggaacaaccttgtaagtttgtaacaatgacttcctcggttacttcctcttttcgcatcagcaatttgaattctgtttttgttggtgagacaaataaattcagagtttcaactgtccctggncgctcatgttggtttcattagaaagactgtagaatgtnaggtatcacgaattgggaagctaccaattcctgtnccatccaatgtcacagtcaaattggaaggacaggatatacaagtgaaaggtccnctgggagaacttgcataagttatcctcgagaagtgtt

SEQ ID NO: 32661 - DNA, 286 bp, Glycine max
  unsure (1)..(286): unsure at all n locations; Clone ID: 701105620H1
attcggatctagagtcttcagtttctcctcgttgttcttcgctttcctgtttncancttcgattcttcgtnaatttaataagatgtttgggagggcaccgaagaagagcgataatacgaggtactacgaaatcctcggcgtctccaagaacgcttcgcaggatgatctgaaganggcttacaagaaagccgccattaagaatcaccccgacaagggcggtgatcccgagaagtttaaagagctggcgcaagttatgaggttctgagtgaccctgagaagcgtgaga

SEQ ID NO: 32662 - DNA, 281 bp, Glycine max
  unsure (1)..(281): unsure at all n locations; Clone ID: 701105621H1
ctgggcagttgtttctcaaggttattcatancagtgtgtgggctggtcagaagcgacttgggcagttggcgaagtggaaaacagcagnagaagttgctgctcttgtaaggtctttgcctgttgaagaacaaccaaagcaaattatcgtcactcgtaaaggaatgttggatccattggaggttcacctgctggacttccccaacattgttattaaaggaagtgaactgcaacttccttccaggcatgtttganaattgagaatttggggatctatctgaagg

SEQ ID NO: 32663 - DNA, 286 bp, Glycine max
  unsure (1)..(286): unsure at all n locations; Clone ID: 701105623H1
tggctctctctctctgaacccttcagtgagacacaacanaagtcatagtccattgggcatgcctgtgtatctttggnggttatatagggtttctggctgagcagcaatttgttgtngttgtaatcaatttttgaagaaaagatggggaagacagcagcttccaatcctgctttgcaagtgtctgtttcatttggtagatttgagaatgattcctgtcttgggagaaatggtctgctttctccccaaataagtacttggaagaagttgagaagtgtgccactcctgg

SEQ ID NO: 32664 - DNA, 288 bp, Glycine max
  Clone ID: 701105624H1
gaacatgctgctcctcaacctagaagatatatacctccaaatcatacgacagagttcttgaaacaggtttcaaagaaatgcaggcctggtggcatctggtgttgccaaaaacttgaacagagtgggtaactatgtgaaagatctcctaaatgacattctaaactaattctacaatgcaccttgcatgggtggtacattcatgctcccttatgttgatttttcattcaatcctcaccccctaatgtgcaaggcgcattatagaactactccgacattctatttaggcga

SEQ ID NO: 32665 - DNA, 292 bp, Glycine max
  unsure (1)..(292): unsure at all n locations; Clone ID: 701105625H1
cttctctcgttgattcggatctagagtcttttttcactcttcanttctcgttgttgttcttcgtttcctgaaactagggttttcaatttcgattcattcgttaataattaaagatgtttgggagggcaccgnngaagagcgataatacgaggtactacgaaatcctcggcgtctcgaagaacgcttcgcaggatgatctgaaganggcttacaagaaagccgccatcaagaatcaccctgacaagggcggtgatcccgncaagtttaaagagctgggcacaagcatatgagg

SEQ ID NO: 32666 - DNA, 296 bp, Glycine max
  unsure (1)..(296): unsure at all n locations; Clone ID: 701105627H1
tcagattacattgcaaaaatgggcatcattcaccatgacagcttctatctttggctgcccagctgtgcancaaacggtccggcagtggctgcgcagaggagattactcgtagtgagtgctgccaaagctgaaggggaaaaggtcagttatgacaacaatncnagcaatggaaggaggaacttgatgttcnnnnnnnnnnnnnnnnnnnnnttctactgttgctgggatggcagtggcagatnagcctaaaccaggaacctcagaagccaaganaaagtatgccccggtttgtgtca

SEQ ID NO: 32667 - DNA, 294 bp, Glycine max
  unsure (1)..(294): unsure at all n locations; Clone ID: 701105628H1
ctgttctaccgattagtgntctcagaaatttgaggatcctgcagnaggggaagctgntttgggntgctcanatttcagaagttanacgaggacctgactaatggtttccgcaaccttgaggacgaaacccgatgattgaagatttggtatggtagtttgctcaaataatgtgttatttccaattgtaagaggcagtctagcatcgcagggttacaccgtcccgagtgttcttatatttgactgtttgattcattcatatcacatttatttccttcttggtgctggtttggcttc

SEQ ID NO: 32668 - DNA, 290 bp, Glycine max
  unsure (1)..(290): unsure at all n locations; Clone ID: 701105629H1
attgttgtaactttttgattcctaaattctctaaaattcgaaattctaatttcgttaggggaaagagattgtcctgtgtgtgagtnagtatggctggaaaaggcgagggtcctgctatcggaatcgatttgggaacgacgtactcttgcgtcggcgtgtggcaacacgatcgtgttganatcatagccaacgatcagggtaanagaactaccctntcctacgtggctttcancgacacagancggttgatcggcgatgcggcgaagaaccaggtcgtatggnnccaaccc

SEQ ID NO: 32669 - DNA, 266 bp, Glycine max
  unsure (1)..(266): unsure at all n locations; Clone ID: 701105631H1
tncaatctctcgtcgttctttctatttgcggtttcttcttcttctcacgttctacctaacattttctaaaacatgtctggggaagaggaagaaaacgccgcagagctcaaaattggagacgagtttttgaaggcaaagtgcttaatgaactgtgaagtttcattgattcctgagcacangtatgaggcagcttnaacagncatccgangnncccatgaacnagtttctngggtnttnaaaagcccccgcnatttggggggggntcc

SEQ ID NO: 32670 - DNA, 296 bp, Glycine max
  unsure (1)..(296): unsure at all n locations; Clone ID: 701105632H1
canannacagcgttctgagtcttttcttcttcgttaccctcttcacatgccttntctctgntacttcccacgatgacnatattttcctancgantcaactccatgacgatgactcagtgagttgcactgcaancgacccaagccttaactanaagncggtgatcggaatcctgacccaccccggcgacggtgnctctggccggctcagnaacgccaccggggtttcttacatcgncgcctcctacgtnaaatncntggagtccggtggtgctagagttattccctaatcccanang

SEQ ID NO: 32671 - DNA, 284 bp, Glycine max
  unsure (1)..(284): unsure at all n locations; Clone ID: 701105633H1
cagaaggaggagaagcagaangaggagaacaagnaatgggcgccgaagaagccccgaaaccacgtcgaggaaccctgatttggtcaggggaattggcaaatattcgaggtcgcagatgtaccacaagangggcatctgggccatcaaggccaaaaacggcggtgttttgctcctccacgatcccaagcccaaacccgnggctccggcccagaanccgcncaagtttanccggccgatgactgaagaagcccctggtcaacaagcacaagnccaagccgcgaaat

SEQ ID NO: 32672 - DNA, 284 bp, Glycine max
  unsure (1)..(284): unsure at all n locations; Clone ID: 701105634H1
ctaaaacatctccagtgggttcttcttctnctatnanaacaacgtanagaannancatgacgatgngccatgggccacgatnnctgcctcctgttcacngtnttcgaggttncatcggccctagacatgtcgataatctngtangacaacgccnangncgcnangtcnngcaggaaannagctgatgtccatgnacgagcagtggntggtgaagcacggcaaggtgtncaacgcgctcggggagaaggngaagagggtccagatcttnaaagaanaangggatt

SEQ ID NO: 32673 - DNA, 284 bp, Glycine max
  unsure (1)..(284): unsure at all n locations; Clone ID: 701105636H1
caataatggaacatttatttaaactggaaaaaaaaataatctagaggttttagatttctnacccaatagttttttatttttgggaaggaggggagtggggataaaggaaaacggggtgtccttgcctccttggtcacaaacgccgacgaccaccggcgagtattttcccggctagaacatcgacgacatcaacatggcttcnacttcaatcactaccttgtccatctactctcactcncaaccaaagttcctcaatctgcttcaacacccactcattcacaccc

SEQ ID NO: 32674 - DNA, 283 bp, Glycine max
  unsure (1)..(283): unsure at all n locations; Clone ID: 701105637H1
aaacttatggaagggtatcctagtgatgaggaccgagatgccatcttccaagcctacattaagggcattgaaggnagatccagancaatacagaatagacgcacgaaagttggaagagtgggctcgagttcaaaagccaacttcccttgttgagttttcatccaaagaaggagaagttgagggaattttaaaggacattgcagaaagagctggaggaaaaggagaattcagttatagtcgtttttttgcanttggactgtttcgncttctggagttggcaaat

SEQ ID NO: 32675 - DNA, 281 bp, Glycine max
  unsure (1)..(281): unsure at all n locations; Clone ID: 701105638H1
gagaatggcaactatgactggtgtgagcntttcatgcnccagggttttcttcaacgcatcagnctcanngcaaaacgcgcatgctgtaaagttctcanttncacacagccaagaannganaacgggtagtatcaagttgggtcgcgtgatgaggatncgacncgttcgagntgcgnctgagcgcatatcggagaaggtggaggagagnaaagnaacgcgnaggaggcgtgngcnggngatccgacgagcggcgagtncgtngcggngtggngagaggtgga

SEQ ID NO: 32676 - DNA, 280 bp, Glycine max
  unsure (1)..(280): unsure at all n locations; Clone ID: 701105639H1
tctcacttgactcgattgcaagtgatccacgacacactgttcgcttcacaaacgtntcgaatccaattcctccagtnacatcntgcatgaagtcttaccccttcaccatggccaccaaagcctttagactatgggtcaataaatgaaaacgtgaagaagagtcaatatgctgtcagaggtgaattataccttcgagcttctgagcttcagaaagagggcaaaaagattatatttactaatgttggcaacccacatgcattgggacagaaaccactgagct

SEQ ID NO: 32677 - DNA, 289 bp, Glycine max
  unsure (1)..(289): unsure at all n locations; Clone ID: 701105641H1
caggcctcctccggaagnccatggtacgggcccagaccgcgtcaagtacttgggcccattctctggccgagnccccgtcctagctcactggcgagttcccaggtgactacggctgggacactgctgggctttcggccgacccagaaaccttggccagaaancgtgagctcgaagtgatccactccaggtgggccatgctacggggcctggnctgcgtcttccccgaactattntcccgcaacggggtcaagtttggagaancngtgtggttcaaggccgggtcccagat

SEQ ID NO: 32678 - DNA, 284 bp, Glycine max
  unsure (1)..(284): unsure at all n locations; Clone ID: 701105642H1
cgagntcagcaatggtgtagtcaaggctcagncatcagaagcctnccnttcaagagatatnaagtntagttcnagnnaagangagagggaaaaanggattatcgtgccangnttcggttgattaatcaggacaagaacaaatatancanttccgaaataccgatttgtgggtcgctttagaacaaggacattgttgnnacaaataatatctgctagcatgccggcgatttagttctgctacagcatattcacatgagtgncacgatatggtcttgaagnaggct

SEQ ID NO: 32679 - DNA, 278 bp, Glycine max
  unsure (1)..(278): unsure at all n locations; Clone ID: 701105643H1
cgcaacagcagcagccacctcgtccttcatggggacgcgcctnctgnaggcccattccggngcggtgngggtgcangcccgattcnngtttngcaagaagaaagcngncgggccntagaaantntccagggggtcnggctctagctccnataggcccctgtggtatccnggngccaangngtcgngtacctggatngnagncttgtcngagatnacggttcgacccattcgnctncgnaancccgccgtgtactgcanttcgcatngnatcagtgnac

SEQ ID NO: 32680 - DNA, 289 bp, Glycine max
  unsure (1)..(289): unsure at all n locations; Clone ID: 701105644H1
gcgaaatcatagttagaagtcttaaacattcaacctcaatttgcagagttctaatattacattggcagagagaatgtncttgattccaagtttctttggtggcagaaggagcaatgttttggatcctttctccctcgatgtgtgggacccttttaaggattttccttttcccacttctcttctgctgaaaattcagcgtttgtgagcacacgagtggattggaaggagacaccagaagcacacgtgttcaaggctgatattccagggctgaagaaggaggaactgaagc

SEQ ID NO: 32681 - DNA, 284 bp, Glycine max
  unsure (1)..(284): unsure at all n locations; Clone ID: 701105646H1
gctgagttcattgccactttgctcttcctctacattactgtgctcacagttatagggtanaagcaccagacggatcatgctgatgcgtgtggtggggttggcattcttggcattgcatgggccttggtggcatgatcttcatccttgtctactgcactgctgggatttcangaggtcacattaacccagcagtgacatttgggcgttnttggctcgcaaggtgtctttgatccgagncancatgtacatggtggctcatgccnccgccgctatccgtngagtgg

SEQ ID NO: 32682 - DNA, 217 bp, Glycine max
  unsure (1)..(217): unsure at all n locations; Clone ID: 701105654H1
caaacacatagcacccaatcacagctcaccagctcatccanngcntttttgtttctctccntttggtggtgcctctcctttgaggagaagagagagagtagcaaagtttgttttaagtttcntctgcttttcagttcataaattccttnttcatggggtctntcattgtgtattnnttcttcctntttgtgtcgacagaaggattnntttnnaatgt

SEQ ID NO: 32683 - DNA, 290 bp, Glycine max
  unsure (1)..(290): unsure at all n locations; Clone ID: 701105660H1
cctgaacttgatgatgtctgatgttccagggattgaagaagaggaaaaacaaagngctgttacactgtgtggttgtcggangtggtcccactggagtggaattcagtggtgaacttagtgatttnattgtcaganatgtccgtccagagatatgctccatgtgaaggactacatccacgttactttaattgaggccaatgagatattgtcttcctntgatgtccgactcaggcagtatgccaccaatcaattgacaaagtcaggagttcgacttgtccgtggcattgtga

SEQ ID NO: 32684 - DNA, 153 bp, Glycine max
  unsure (1)..(153): unsure at all n locations; Clone ID: 701105661H1
gtttgttgtgagctataagctagtttatcgtgaggagaatatgnagttgtttgttctctttgtnnctgcagtagtnttggtagcatggccatgccatggcgcaggctaccaaaggttccctctccgaatganaactggctatggtgagcgttc

SEQ ID NO: 32685 - DNA, 281 bp, Glycine max
  unsure (1)..(281): unsure at all n locations; Clone ID: 701105662H1
attcatggctgaacacaacgacccaccccaagaatatgatttggtgaatagaagacnattagggtnttggnnnnnnnnnnnnnnnnnnnnnnnnnnnnnnnnnttaataccggcggcaacagtctctcgagtctcagggactgtcacaccgaatgaatggcttgccttagtacaaaaccctaatttcttctattcaccaaatcatattcatggctgaacacaacgacccanncccaagaacccacattgccctccaagcgcatgtccgatcccgacttcca

SEQ ID NO: 32686 - DNA, 134 bp, Glycine max
  unsure (1)..(134): unsure at all n locations; Clone ID: 701105666H1
aagaggngaggaagnanannagangaggnggtgcgcaccttagnatggattcctctccgtcancatntctactccctctctggcttacgtccccacggcaccatngtcctcnctaccanttgagnaangcacng

SEQ ID NO: 32687 - DNA, 281 bp, Glycine max
  unsure (1)..(281): unsure at all n locations; Clone ID: 701105668H1
gtcctcttctggtggtctactcgtggggtacacacccctttcatncatncctgttctacaaaagtcttcaagtaccccacttgactttctcccttgtctcctcccaatttcgattccctcaatcctaccaggtggagggccctgaagaaacttcggtgtgaggttttntctttacatgaagtgaggtccattagggtttctctcgattaaagccatctttataggctaataggaatggagaaagatcacaactattcggcaccaccaccatccatgcctcc

SEQ ID NO: 32688 - DNA, 256 bp, Glycine max
  unsure (1)..(256): unsure at all n locations; Clone ID: 701105669H1
gnatgacaatatctgtnttcttaacttncttcgacgcctcacttgtgtnactacagaatcacatggcnaattnccacttacccttctctttcttcttctaanttaactgtttcactgtgctctccttnccctccaacatctgttatcgaagagggtccttctcctcagcagaattgaccagtggttgtaaggcgtgtggaagagnngaagtngagcnangntgcaaggngaaagaaggatttcgggtcgggntgcc

SEQ ID NO: 32689 - DNA, 282 bp, Glycine max
  unsure (1)..(282): unsure at all n locations; Clone ID: 701105670H1
gacgagtggcacctcaggcgtcagcttcttccttttcatactgttgtacttttaccaaataagagcgaanaaaaaacaaatccacacactccattttntcnttcctttccatttctccgttccccttggaacgttttctctctgtgtgtctcgctagggnaaaaaccatgaacatcttcaggctcgccggtgatatgacccatcttctcagnattctcgtcctcctcctncaaaatctacgcnaccaaatcatgctcagggattctcgcaagactcaagagc

SEQ ID NO: 32690 - DNA, 267 bp, Glycine max
  unsure (1)..(267): unsure at all n locations; Clone ID: 701105672H1
ataaaagtcactttcccctgctagattctcgctagtacaancatcngaatccgacntttttntgggttgcantgttgtgagaagatgagaagagttggtgatgatgtnttgaacgtggatttggctgctgcagtgaacaacctncttacaattcttcctgaaactatggagaagttcatgtttccttcttgctcgtgctcatgatcaccaccatgaaaccagaggggtctctagcatcatnccagtggacatttgggcactcccnag

SEQ ID NO: 32691 - DNA, 295 bp, Glycine max
  unsure (1)..(295): unsure at all n locations; Clone ID: 701105675H1
acatataagaacannanccngancatagtaaagcagcnagtgctagganttgttagtgaagcaatgggtcaaaccatggtggctcatgtgcnagtgtactctagcagttattccgtggatttgaagagagnaccttttcctccaattgacagagtgcanagtttaaggcctaagtncntcagcttctcattncaacccanttgcatcatcaacttcttccggtctnnaccccgtanattcacaaanctgaggcctncttnaaancnaagancaaagnngctcctgntaaaganac

SEQ ID NO: 32692 - DNA, 287 bp, Glycine max
  unsure (1)..(287): unsure at all n locations; Clone ID: 701105677H1
cacacatattctttgttgcaatatcacaaanacctcnntccgtcacaatgcagtagctgtggcggccaacgctgtncgtttcaccgtcgccgttccgagntcatccccttctccggtacatccttctccggcgtctccgttaagctcantcnccaatccataaggttntcacgcttgaagcccctcanngtcttcgccgcnaccaagaaggncgtcgctgtcctcaaggggacctncgccgtcgaaagngtcgncactctnatccaagaagacgatggnccgncgac

SEQ ID NO: 32693 - DNA, 241 bp, Glycine max
  unsure (1)..(241): unsure at all n locations; Clone ID: 701105679H1
tctntattnaagnanncaaagnntgtctatnanngaaaaggggctncnaagagttngnatgncagaatcgaagggtgcgacacncgcaactatagtgtttgcncatggctatggaacggagcagtacgatatggganaaaatncatcctttggntcnngctntaaattancgtcttgtgacgtatgattggggcnttgcaggaantatgaaggatcagagcctcnatganccccaaaagta

SEQ ID NO: 32694 - DNA, 287 bp, Glycine max
  unsure (1)..(287): unsure at all n locations; Clone ID: 701105680H1
cncgtncaatcgtactcggcgcattttccgtgtctcatcnagcncttgtncggtcaaaaggcgaagtcacggttctatttngncgatcgaanaccgatctggtttcagggatcgttaatgcaagttctgttgaatctatttcgncggaggtttcggnggcgccggtgatgatcgtactggttttcctggcggtggatgntgatggccncgtgtcgactagacgcgaaaccagagtaattaaactngcgatncttgggtntttaagantatntaggnaagtccctnng

SEQ ID NO: 32695 - DNA, 280 bp, Glycine max
  unsure (1)..(280): unsure at all n locations; Clone ID: 701105681H1
cttcaggtcaccanctagactgnaatcatggctgatggaccanncgcatccatcagttgnttcagacnctagctggacnatcttacctggtgtccaggccttagccccaactttaactctaggaattattctgcaactggttcttacgtcaatggcggnatgcactcgcctgggttggctgttgtgtcaccngtatctccagttactgtgcatgctccagcagagaaaggagtgagtggatnctagtggatttctgatgggtggagtatccgctgctgta

SEQ ID NO: 32696 - DNA, 282 bp, Glycine max
  unsure (1)..(282): unsure at all n locations; Clone ID: 701105682H1
tcaanagctcaacaaccacatgncatgggcaacancgtcaatgtgtatgagcttcaacctgggcaacagcattcaagggtctctctttatcttcttcttcatcgttcttcggtggaagtagtggttctctccgcgcgggtcctgcctcggtggtgtcgctgcnccggcnctgnncgctgaccatagagaacgcgcanaagaagggggcgggcagcaccaagaacggccgcgactcgcagggcaagcgcctncggagtcaagatttacggcgaccaggtcgcc

SEQ ID NO: 32697 - DNA, 281 bp, Glycine max
  Clone ID: 701105683H1
agaaatttatataatattttctatgagtgattctaaatttataatttgttgaaacatccttcaaaactgaataattactcactactcatctttttgctaattgataactgcacactccccttggctttcttccccctcttcttcctgcttctccttcttgcccccacccctttctattccggcttctcctttacgcacacgagaaacctttgttgtggacaattgcatcgaagtgagaagattattgtggtgaacttagattattatggtatagtgtctaa

SEQ ID NO: 32698 - DNA, 280 bp, Glycine max
  unsure (1)..(280): unsure at all n locations; Clone ID: 701105684H1
gctgttgcanacaagggtgctggtggaaggtccagtgcaaagangcgnccagnacatgggtggaaaaaatgnntccacaganagagaggatccttcagagttcatcacanacagngctancagattntctctctagcataaaggatatagagcataggttcattcgagcttctgaatctggtagggaggtcttgaggttgttagaggctaacaaaatcaaggtgggatattctgaggncaaagggaagtcgtctaccatgctttgttgtctgctgtccag

SEQ ID NO: 32699 - DNA, 274 bp, Glycine max
  Clone ID: 701105685H1
ggctctgcagaaccagatagatgagcttgcagcgttttctgactctcctgctccatcagtaacaagggtcttgtatactgacaaggatgttttaggtcgcaggtatgtaaaaacccagatggaacttgctggtctatctgtgagagaggatgctgttggtaacatatttggtcgttgggatggcgttgaacctgagcttgctgcagttgcaacaggttcgcacattgatgctatacctactctggaaaatatgatggagttatggtgttttagg

SEQ ID NO: 32700 - DNA, 281 bp, Glycine max
  unsure (1)..(281): unsure at all n locations; Clone ID: 701105688H1
tntccttcctatggttggggagggtctcttcatcgtaggagttgttcagtcaatgatgcttgtntgggcactgagggaccctaattctgggttgggatggaagccttgtctttactttgctagagggtactgtaaaaatgggactagttgcaggttccttcatggtggacttggagatgctgatgctgcaatggttggctctcctagcaagattganatgatggagcagtgccatgagctcttaagatccaaatctggtcagcaacaaagattggctgctg

SEQ ID NO: 32701 - DNA, 282 bp, Glycine max
  unsure (1)..(282): unsure at all n locations; Clone ID: 701105689H1
tagctattggctttggagcccctccttctccacttccgtttcatcttcgcctggcttcctcnnccttctccttggcctncccaataatccncaaattccaaaacgcaggcaagtcagtgataacactctgttcaangaaaaatgctcaatcaagggtggtcactctctgctctgcacctgtgcaagttgatatgcaggagcaggaggttagtgatattactttgagagagagaagtgtttcggttgtcctatcggctggagggcagggcaagaggatgggac

SEQ ID NO: 32702 - DNA, 295 bp, Glycine max
  unsure (1)..(295): unsure at all n locations; Clone ID: 701105690H1
gagannangagagnaaagngtgatganaataaaggtcctngtnttcttngtnacntagaattattagtagcatggnatgncatgcgtacgatatgtaaccctctccgaatgaacactggctatggtgcccgtactccggaggtgaaatgcgcaagttggaggcttgctgtggaagcacacaacatctttggctttgagaccattcctgaagagtgcgttgaagcaacaaaggaatacatccatggcgaacaatatagatcagactccaaaacagttaaccaanaagttattttta

SEQ ID NO: 32703 - DNA, 283 bp, Glycine max
  Clone ID: 701105691H1
ccggctaataagccggtgaagtagaaagttgagtgagtgcttactctcaactcgaatgctgaaacatattgagtgagctagcagctgcttaaccacttctctcttcccaaaccaccttattcagatccatagttggcttattagtaacacacgcagaaggtggtttgcactttgcaacacttgtagcaaaagcatgacctacattaattatctactttcaagtatgaatggaagattgacttaggtccattttttcccatcgtagtttgcaaaatgcaaacat

SEQ ID NO: 32704 - DNA, 284 bp, Glycine max
  unsure (1)..(284): unsure at all n locations; Clone ID: 701105692H1
cagnatctgagaaactaaaccccacanaaatcctcgtccctccctcancgtatacggttccganactgcancaggattcngagttcgcngctantccgcnacnctaccctatcaattttcgnacntcttttcgtaattgcagcgangaatggngaagangnaggagcngattcagantncgganccattcnatccgtanngcgccgaccccgcgaagangnagaagcgttcgaangcgccgaagcggnaccagcaggaagagcagttcattgcccccaaactca

SEQ ID NO: 32705 - DNA, 282 bp, Glycine max
  unsure (1)..(282): unsure at all n locations; Clone ID: 701105694H1
ctttattccttttgtaatttcattcattcttaatctttgtgaaaaataatgttcatcgagattttaaggttgagtgtctaatgtgaagtacaccgagactgagattcagtccgtgtacaactacgaaaccaccgaacttgttcacgagaacaggaatggcacctatcagtggattgtcaaacccaaatctgtcaaatacgaatttaaaaccaacatccatgttcctaaattaggggtatgcttgtgggttggggtggaaacaacggctcaaccctcancggt

SEQ ID NO: 32706 - DNA, 288 bp, Glycine max
  unsure (1)..(288): unsure at all n locations; Clone ID: 701105695H1
gcttcaacttgctccctcagaancgaagaagaagnnacagananctantctcctactctcacccgcaagaanaaaatngcatctcacatcgttggatacccccgtatgggtcccaagagagagctcaagttcgctctcgagtctttctgggatggcaagagcagcgcngaggatttgcagaaggtgtcttctgatctcagggcatccatctggaagcagatggctgatgctgggatcaagtacatccccagcaacactttctctcatatgcaccaggttctcgaagcc

SEQ ID NO: 32707 - DNA, 117 bp, Glycine max
  unsure (1)..(117): unsure at all n locations; Clone ID: 701105696H1
gagcaaaactgtntgagtctgagagancttgaaacaacattggctntagntnccctctctctctacananctataacancancctcactctcttcacatgcatcctccatcttcttc

SEQ ID NO: 32708 - DNA, 299 bp, Glycine max
  unsure (1)..(299): unsure at all n locations; Clone ID: 701105701H1
gttttttagtaccccacttggaatcctcggattctcgtgcttctgccctagctcttcagatcactctttncccccaacaaaggcttcagcattggcatcagcatccaccatgctgctgttgatggaagatcttccaccatgttcatcaaggcttgggctctctgtgccaacaaattattatgaacgatgaaacaacatcacaaagtgtggtggtgncatctttggtgccggagttggagcttcttttgacagaacactcatcaaagacccgggaaattgggaacggcttcttgttagca

SEQ ID NO: 32709 - DNA, 297 bp, Glycine max
  unsure (1)..(297): unsure at all n locations; Clone ID: 701105704H1
aacctcatcctccaattcccacacccactcgttcntnnntcccactaagctagcagaatttcatcgagaaattttgtatttttttggcatattatcctgctgaaaatatattagatggccattgcaccttttggtaatacatcagctactcaatgggggattcatcctcagattttcgcagggtcaactgggttgggaaagattgcatcatccaggaacaatgctacaagaaggataaggtttatggctgccccatgttcgagctttttttctcgagattccttgcatgcactattg

SEQ ID NO: 32710 - DNA, 340 bp, Glycine max
  unsure (1)..(340): unsure at all n locations; Clone ID: 701105705H1
ttggatagagcacttnattgtcaagataaatgagggtcaaagtaagcgcattagatgcatggaacacaagtgcaattccatatgtgatgatgccncttgtaagaacctctacttcagtagagaggcaccctcatatgggcagagaaatatcgaaacgcttttctggcttggaatcttnacattggaagacaatanaggagcagttanaatgggtggccccaggcacnaccttcatttgtggggaatggcaatnacggggttcgagggattgattgaaactngtgtggagggtagaaatgttncatggtgggtggtaacaatttttgtttttnagtttgtc

SEQ ID NO: 32711 - DNA, 289 bp, Glycine max
  unsure (1)..(289): unsure at all n locations; Clone ID: 701105707H1
anactatatcttctgcttgtggcttttcttgcatccatctgaaggatttcagagtcgtgtgaaagtttgctagaaacaaactaagagaaggtaacttatgaagctctttctaggactcaactgaaaaggaagatgatcaaggtgtgcttggtgattatnatatagttgaaacttgaaagcacattaaatgatctcataatggagccccagacacttgaaatagaggttaccaaggatgatgtctccatcaatcgggccaacaaagatgagtccagctctaggatggaag

SEQ ID NO: 32712 - DNA, 287 bp, Glycine max
  unsure (1)..(287): unsure at all n locations; Clone ID: 701105708H1
aagaggtcgagtttcacagcagcaatggtgtacgtcaaggctcagaaatcaaaagcctacttcaagagatatcaagtcaagttcaagagaagaagagagggaaaaaccgattaccgtgccaggattcggttgattaatcaggacaagaacaaatataacactccgaaataccgatttgttgttcgctttagcaacaaggacattgttgcacaaataatatctgctagcattgctggcgatattgttcttgctgcagcatatgcacatgagctgccacgatatggnct

SEQ ID NO: 32713 - DNA, 285 bp, Glycine max
  Clone ID: 701105709H1
cacactcagatctctcttctctttcttcaattccattgttgtttggttcccttcactctcacaatgcgaatcctcgtcctgctctctctcgccacccttctcctcttctcctccttctctcccaccttctgcgaccacctcgccgacgacgaggacctcagcttcctcgacgagccctccgccgcgccggagcacgaccaccactacggcgccgatgactccaatttcggcgactttgaggacttcgaggaggacgacgcggaggcgtacaagcagcccgaggtg

SEQ ID NO: 32714 - DNA, 275 bp, Glycine max
  unsure (1)..(275): unsure at all n locations; Clone ID: 701105710H1
cggnnngagggagaacaccgagggatccagatctgngangaacggggncnngcnnctggcgngcaaggtggcatngatnacnggaantacnggncaagacggntcgnacctgacggaattcctnccagacaagggacaanggnngcacggnctgatccgtcgctcctcgaacntcaacacgcagcgcatcgnacacatctatgtggatccccacaacgcccacaanngcncgcatgaagctccacnacgccgatctctaagacgcnncctccctt

SEQ ID NO: 32715 - DNA, 285 bp, Glycine max
  Clone ID: 701105711H1
gagcagagacacacacacacatcctaatcacaaagcgttggccatggcaaacatgattgtggcttccaccaaacctctggttccagtctgcaccagttcccgttcccccacacccaaagtccccattctccaaatttcactccccaaagccccaaccttgaaactgaaactcccgatttcaaagccccagatgctgtccctccttggagggatagcaccactggtcttggccagaccctccctcgcagaagaaattgagaaagcagcatctttgacttcaacctc

SEQ ID NO: 32716 - DNA, 284 bp, Glycine max
  Clone ID: 701105712H1
ccaatctacaataaacgatgattctcattatctccctcattttttctcttctctctttctcccatgcttctgtcctagatttctgtgttgcagattatgcaggtcctattggacctgcaggatattcctgcaagaagccttcaaaggtcacagcagatgattttgcttacagtggccttggcattgctggtaacacctcaaacattatcaaagctgcagtgacccctgcatttgatgctcagtttgctggtctcaacggtcttggcatttccgcagcacgtttg

SEQ ID NO: 32717 - DNA, 287 bp, Glycine max
  unsure (1)..(287): unsure at all n locations; Clone ID: 701105713H1
atcgtatcgtatcgctctcttatatcttcagacaaaacaaaccaaaaaccaaaccacccccaattcccgaaaccctaaccctacctcctcgcccccatgcccatggctaagaaacgaaagcttcgatcctccaacccagaacccaccaaacccgtcgagccacagcaacagaaccatgagactgttgaactcgaccaacagcaacccatccccganccaaccctagaagactccaacaccatggccatcgacgaaccaaaacatgaacaagaagaagaaccgcaaaa

SEQ ID NO: 32718 - DNA, 286 bp, Glycine max
  Clone ID: 701105714H1
aaagcctgagactagaagaggaagagcagtttctgatatcaagcttagaggacaacatgccgttccttcagatgcttcagagtgtggaatccccacagtttttccctttgaaagagccaaactttcaaacacttctgaggctgcagcacatgaagaagccatgggagggaatagcctacattccaagaatggaagcacaagtgcaagcagcattggagctagagagttgtgtgacacatgacatgttggagatgcagtcaccagtgaagtcagaaagcaatgaact

SEQ ID NO: 32719 - DNA, 308 bp, Glycine max
  unsure (1)..(308): unsure at all n locations; Clone ID: 701105717H1
cngctttcgcggggaattgctcgcttcaactctgnacggtgctccnaattcatcnccaatctcaccagattccattcaatgttgatccnccgnactgttcagttattcaaggtgagtcccgntctatcggtttgcttggtggaaggatccgatgttggtaaaaagacattgtattccaggggagtcacaatccagtttagaaatgatgaggagagtgcagccttccattgtgtagttcaacagtggaagaaggaagtaanatgctccaaggaatggacggatngaactattacaanttctanacgcnt

SEQ ID NO: 32720 - DNA, 298 bp, Glycine max
  unsure (1)..(298): unsure at all n locations; Clone ID: 701105718H1
cattttcagaggaaaatggcgggtacggtttcgacttgtttcttcttcgtgtttcttctttctctccttcttccttttcagatctccgctgaggaatcctcggagaaggagttcgtactcacattggatcactctaactttcacgacactgtcagcaagcacgatttcatcgtcgtcgagttctacgccccatggtgtggtcactgtaagaagcttgctccggagtatgagaaagctgctnctatcttgagtagtcatgatcctcctattgttttggctaaagtagatgccaatgagg

SEQ ID NO: 32721 - DNA, 297 bp, Glycine max
  Clone ID: 701105719H1
gtgttaaagttccttcaagcatacttggaattcacccattgcttttcattagagttttgcagatgtgccagtggcgttttcctccagatgttcctcccccttataagggatacagggatgaggactggcaagacaatgatggagcactaaatacaatatccatgactcatcctcgcctcccaattgaacaccccaactgcttggttgaaaaggaatcagactgccaaccattacaacctggcatctggtactacaaatatgtggagggtgatcacatactattcattattaatcgtg

SEQ ID NO: 32722 - DNA, 294 bp, Glycine max
  unsure (1)..(294): unsure at all n locations; Clone ID: 701105720H1
cttctccctcttcttcacactgagttgactgagtcttcgtaactcgctctctantctctctgctactcatcgcattctctgcatttctcctccgatcacattttctctctcttcatttgactatagctgacaaggatgtcggagaaagctcttagggatctcaatacaattcttggtactgaaaggaagaatgaggactccagtaaggcatgtttatccaagccttctgttgataatgctgatgaaaatattgaagaatggcaaaagaaaaagaacagttcctccttggtttct

SEQ ID NO: 32723 - DNA, 281 bp, Glycine max
  unsure (1)..(281): unsure at all n locations; Clone ID: 701105723H1
ctcattntgcaagcnttctttggtttcacaccattncnctatncgncnnanncacaatataanagnngactagtgtcggtattatcaccaccatattcttttggacttcctctgctatttctaggtttcgntttatttggcntgatgttctctgcaacatcaancaacgaaactatccgganactgagtntaanttnncctgccacagtttgccttgtttacctgagctctgtttttaactggtctttgatcaaggatggccataaaggcaatgagttgtt

SEQ ID NO: 32724 - DNA, 282 bp, Glycine max
  unsure (1)..(282): unsure at all n locations; Clone ID: 701105724H1
gagaactgatttgacggacgatgagaatgctcttctacagcaggcccntgcaatgtcaatggatgatcccacaattaaccatgaagtgagagatacagatatgtctgaagcagctgctgaagatcccgagttggctctagctctccaattgtcagtagaagacagctcaaaggactcggcaagccagtctgacgtgagtaaactgttggcagatcagtccttgtatcttctatccttgcatcgcttcctggggttgacccaaatgacccatctgtcaaagat

SEQ ID NO: 32725 - DNA, 194 bp, Glycine max
  Clone ID: 701105725H1
cagaacaatgtattttacctgaagatagatgctggttgggaggaatggcaaagcattagtgtataactagtcttggtagttggtattactagtgagtaaacctttgtattcttttgtagctgcttccaaagggttaataaccagctgcaaatcaataatatagtcaacaataattgaaagtcatgctctgtctc

SEQ ID NO: 32726 - DNA, 282 bp, Glycine max
  Clone ID: 701105726H1
gatgaaatgaaatggagttccaagataagcgtttatctctgagatcgagcttgacgttcagcgagacgctgtgcgcagtgttcattccgttcataggaatagtcgaagctttggttttcacattcactagttgcttcgatttccaatctcccaggaataagaagaaacattcttctaccttcgacgacattctcaccctcgccgaggattctccatttagtattaatgaaatcgaggccttgcgtgagttgttcaagaagttgagtagttctatcattgatg

SEQ ID NO: 32727 - DNA, 283 bp, Glycine max
  Clone ID: 701105727H1
aaagaaagagaagagaagaatcgaagacgaagatggaggacgcatcagcatcaaagttcattccacaccaaatcggaggggtccaaaacgacgcgcttcgattcggtctccatggagtcaagagcgacatcgttggttctcaccctcttcaatcttcactccaatctacaaggagaatggatgaagcgatgaagaggcaatgcaaagttaacctgtacggaactgcttttcccatgaaggaggagcttgacaggcaaatcctgtccaggttccagcggcctcc

SEQ ID NO: 32728 - DNA, 264 bp, Glycine max
  unsure (1)..(264): unsure at all n locations; Clone ID: 701105728H1
atgaacttggaagtgtttgaganaccgatcagttgaataanggttcatacatttgttgangtcgaaggcttctccaaacccccaaaccccnnnnnnnnnnnnnnnnnnnnnncagtgcttttctaatgaaccctgccaagattcctcatgccatgatgcagaggcagttcatgttggtgaaccgtgccattcatcccatcaaaaccccttcgtttcatttcctcaagaaaccaagacaatatggaatctcttcatctttttgtt

SEQ ID NO: 32729 - DNA, 282 bp, Glycine max
  Clone ID: 701105729H1
catgatgttgttcttgtcggtggttctactaggattcccaaggttcaacagttgttgcaggacttcttcaacggaaaggagctttgcaagagcattaacccagatgaagctgttgcctatggtgcagcagtgcaggctgccattctcagtggcgagggtaatgagaaagtgcaggatcttctgttgttggatgttactcctctctcccttgggttggagaccgcaggaggagtcatgactgtgttgattcccagaaacacaaccattcccaccaagaaggag

SEQ ID NO: 32730 - DNA, 213 bp, Glycine max
  unsure (1)..(213): unsure at all n locations; Clone ID: 701105730H1
anagangatgaccccgggagcngcgagattgacggangtgaggaggatcgtccgtttgggattaacaatgggcacagtgagggcgctgatggtgttgttgatgctgatgatgaggaggagagtgacgcggatgaggaggagacggagtctcgaggcggatggttgttaatggggagggccaccgggagaacggttttcgggttgcncccgtcg

SEQ ID NO: 32731 - DNA, 287 bp, Glycine max
  Clone ID: 701105731H1
attacttttctcaaaagggtgtagagcaagcaattcaaagtggaagcataacacttcctggtggtgaatctgttcctctcatggatgccattgtcattttcagttgcgaaagttcttctcttcaccaaagctgagaaaatcaccatgtgctgaaaacaaagggaaagagactgtggaagatgaaagttctagcctctctttggatctgaacatagccattgaagatgaaagtggaggtgtggcattcggtggagacaatggtatcctagagttagttgataaacaaa

SEQ ID NO: 32732 - DNA, 270 bp, Glycine max
  unsure (1)..(270): unsure at all n locations; Clone ID: 701105732H1
ctcacaaacaactcttgagaaagacngaatggctgccaacncattgatgagttctgccanctcagccttcccatctctcctttcctcctcaaaatccagatttgccgcagcagttcctctttccagctttgttgtcaccaatgcctcttcttctcgcttttccatgagtgctgactggatgcctggccagcctagacccccctaccttgatggttcagcacctggtgactttggattcgaccctcttcgtcttggtgaagtaccagagaa

SEQ ID NO: 32733 - DNA, 298 bp, Glycine max
  Clone ID: 701105734H1
aaattctcaaagatttaaactttgtctcagagtttccaaattcacccaaccccagagagaaaatgtctctaatcccaaatttcttcggtggcagaaggagcaacgttttcgatcctttttccctcgacgtctgggaccccttcaaggattttcctttcccaaacactctttcttcagcttcctttcctgaattttctcgggaaaattctgcattcgtgagcactcgtgtggattggaaggagaccccagaagcacacgtattcaaggctgatattccagggctgaagaaggaggaatt

SEQ ID NO: 32734 - DNA, 291 bp, Glycine max
  Clone ID: 701105735H1
gaccttcgttctcaattggagaatgacttcgtgcattctcttcgcgatgaggttgttgaaggaggtgaaacggaggctattcggccgttgctgtggtaccctgggaacttcgcttggcattcaaatttttctcggatgcagctcaggaagaaccaaacgcttgagaggttccatgaattcttaaaactagaaaatgagattggaaatatcacaagacaggaagctgtcagtatggttcctcccctcttcttggatgtgcatcagatcatttgtgcttgatatgtgtgctgc

SEQ ID NO: 32735 - DNA, 289 bp, Glycine max
  Clone ID: 701105736H1
gaggatatggtggcatgtatgggtcatccgggatgtacgggggtggaatgtataacagtggcttagggggtccaatgggtggttatggcatgggtggtggtccttatggagaacaagaccccaacaatccgtatggtgcccctccatccccacctggattttggatttctgccctacgtgtgatgcaaggtgtggttaacttttttggtcgaatatcaatactcatagaccagaacacacaggcttccatttgttcatgactgcacttctccagctgtttgaccgctct

SEQ ID NO: 32736 - DNA, 243 bp, Glycine max
  unsure (1)..(243): unsure at all n locations; Clone ID: 701105737H1
tttcagaatttagagagagaattttattttgttttttcggttatcnttattggtttctcttacatcgtttttgtaggcgctgaggaagaagcttggcagcataactttgttggggagcataaaattcaggcaagccctgaagttggagagtattagatgggaatcttagaattttctctttagaccanagaaatggangtatatgggaaattcnatgggtgcagctccttcnaaatgttattt

SEQ ID NO: 32737 - DNA, 287 bp, Glycine max
  unsure (1)..(287): unsure at all n locations; Clone ID: 701105738H1
caattttctctcttttccatttctcatttccaaaaatgccaccggcgaacgcaaagnnnnnnnnnnnnnnnnnnnnnnnnnnnntatgagagtcactcgtgcggcggcagcgcgagccgccgaggtggctccgccggcgtcggaggagaagaggaaggcgaagaaggccaaagttgcttctaagcagcagaaaaagaaagaaaaagaaagcgaaactgtcgttgagagtgagaacaaagtcgaagaaggagacgcctctgagaacgttctagacgcttcgaacaaaa

SEQ ID NO: 32738 - DNA, 282 bp, Glycine max
  Clone ID: 701105739H1
agagagggagattctttgtttgctaccttctctcggaaaaatggttacgttcaggtttcaccagtaccaggtggttgggagggctcttcccacggaagcagatcagcaccccaagatctaccgaatgaagctctgggccaccaacgaggttcgcgccaagtccaagttctggtattttctgaggaaactgaaaaaggtgaagaagagcaatggccaagtgcttgccatcaacgagatttttgagaagaacccaaccaaaattaagaactatggtatatggtt

SEQ ID NO: 32739 - DNA, 262 bp, Glycine max
  unsure (1)..(262): unsure at all n locations; Clone ID: 701105741H1
annctccgnagcccgaaatcggcttcgnagttttatnctncttcctctgtntgaagnggactcgnncntngaagatcancaaantnggnacaaatgggtggaagggcnacttggacgtcttncttggcaagacaagtgnacgggtgtcaacntgggnanctnaantcnactttgggtttcaaggaggggnaagtgggtccaanccaatcngtaaactgggatgctctttgcctggggcttaaggcctgggtcttccaatggt

SEQ ID NO: 32740 - DNA, 216 bp, Glycine max
  unsure (1)..(216): unsure at all n locations; Clone ID: 701105742H1
gaggggatgatggacaagggggtgttggatgatgtgataagaaggcttctggaagggaaaggagggaaacaggtgcaactctcngagtcggagatccgtcaactctgcgtcaacgccagacaaatcttcctctctcagccaattcttctcgacctccgtgctcccatccgcatctgcggtgatatacatggtcagtaccaggacttgctgaggctt

SEQ ID NO: 32741 - DNA, 262 bp, Glycine max
  unsure (1)..(262): unsure at all n locations; Clone ID: 701105743H1
ctttaaagttacatagtttttcaacnttttacttaatctaccaatggctgcttcaacaaacgactctctcttcatcatcattggctggccaagctatcaagcttgccccctccacccctgagcttggtgttggaagggttagcatgaggaaaacagcctccaagactgtttcctcaggaagcccatggtacggcccagaccgtgtcaagtacttgggcccattctctggtgagcccccatcctacctcactggtgaattccc

SEQ ID NO: 32742 - DNA, 279 bp, Glycine max
  unsure (1)..(279): unsure at all n locations; Clone ID: 701105744H1
gttgatcgagataactagaaacagtgtgatgaaaatgaaggtccttgttttcttcgttgctacaantttggtagcatggcaatgccatgcgtacgatatgttccctctccgaatgaacactggctatggtgcccgtactccggaggtgaaatgcgcaagttggaggcttgctgtggaagcacacaacatctttggctttgagaccattcctgaagagtgcgttgaagcaacaaaggaatacatccatggcgaacaatatagatcagactccaaaacagt

SEQ ID NO: 32743 - DNA, 279 bp, Glycine max
  unsure (1)..(279): unsure at all n locations; Clone ID: 701105746H1
tctatctcactttcctattacagtatctttacctcaatggcaccaagttctgcagtgccagatgaacaggttgttgttggagaggagattgagcatgtaagantggtcactttgaacaggccaaggcaattgaatgccatctcaccagaactggtttctcagctagcaacatatttggaaaagtgggagaaggatgagaaagcagaactagttattataaagggagctggtcgggctttttgtgctggaggagatttgagagtctctatgatggaagaa

SEQ ID NO: 32744 - DNA, 284 bp, Glycine max
  Clone ID: 701105747H1
aaatcttaaaaatattcagtgaagatcaacctcaatggcatctcttggcgtgcgaccagttcttccccctccattaacttccatctccgacccacctcctcttttcgatggcaccaccaggttgtacatcagttattcttgcccctatgcacaacgtgtgtggatcgctaggaactacaaggggctacaagataagatcaatttggtccctattaaccttcaagacaggccagcttggtataaggagaaagtctaccctgaaaataaggtgccatccttggagc

SEQ ID NO: 32745 - DNA, 285 bp, Glycine max
  Clone ID: 701105748H1
caggctacaatagtcatgcagttgcggataaaagagttgttatttagttaggataaatttgtataatgaagagcaaaaggagaagaaagagaatgtagtggaaaaagataaagaaaaaggtaaacatgcagaaattatggaaaaattattgtatgaatacattattcttttcaaaaatacaatttattcaatatcatgatttcacttattaagatcctcttgttgatttcttttctttttatttattccttgatttcgatgaatcaatgttaattttaactcaaa

SEQ ID NO: 32746 - DNA, 296 bp, Glycine max
  unsure (1)..(296): unsure at all n locations; Clone ID: 701105749H1
cagttccaaggaacttcagattgctggaggagcttgagaagggagaaaaaggaataggagatggcacagttagttatggaatggatgatggtgatgacatttacatgcgctcttggactggaaccattattggtccctataatactgtacatgaaggaagaatttatcaattgaagctgttttgtgataaagactaccctgaaaagcccccgagcgtccggtttcattcacggatcaatatgacntgtgttaatcatgaaactggagtggtacagttcatagttttcacatgctcc

SEQ ID NO: 32747 - DNA, 293 bp, Glycine max
  unsure (1)..(293): unsure at all n locations; Clone ID: 701105750H1
tagagtagagcagcaccaccaagccacacaacacaaccacnatggttcccatggccggcaccaccgccaccggcagtagaaaaatcgaaacatacgaagagtttgtgaaagttcacgcgctgctcctcgcggcgtcggggctaccggagcggctacaccggcgcctcttcgagaagctctcctgcgagcactttgacggaggcgatcacttccagatcgagccgtgcgaggagggccgccagaggcgcctcgtctcacgtcggcgtccatgccgcgggactccgacgtcttct

SEQ ID NO: 32748 - DNA, 291 bp, Glycine max
  Clone ID: 701105751H1
aatctctctctctccaatggccaaagacctcgaaacggagattcaaagtgggttgcctcacaaggactaccacgacccaccccccgccccattctacgaccccgccgagctccgaaagtggtccttcttccgagccctcatcgccgagttcgtcgccaccctcctcttcctctacgtcaccatcctcaccgtcatcggctacaaccaccagacagccaccgccgccgagccctgcagcggcgtcggcgtcctcggcatcgcttgggcctttggaggcatgatttttgtctc

SEQ ID NO: 32749 - DNA, 282 bp, Glycine max
  unsure (1)..(282): unsure at all n locations; Clone ID: 701105752H1
tgagctttacattcatcgaattggccgttctggacgttttggaagaaagggtgttgcgataaattttgtgaagagcgatgacatcaagatcttgagagacattgaacaatactacagtactcagattgatgaaatgccaatgaatgttgctgatcttatataatttgtcacgtggtgtgctggatggagtggatttgtcatatcttgtggtagggagtagtgtttgaatgtggtttctgctatggaatgcattcgtgatgctntgtacactttgactttggt

SEQ ID NO: 32750 - DNA, 283 bp, Glycine max
  Clone ID: 701105753H1
ctggggaagacagaacaggcagtttaatttgttgttctaatggagcaatcatgggagaattggcctcttgatatgggaatggaggaagacagggatctgagggatgaggaggagttcctgagaaacatcctcagtgaaccttctgagagtgagatggtaaccgttgggtcagccaaaaggcctccgaggacatacattttgtcttttgataactccaccataataccagctactcctgaacccacttccagaaaacgcacacgccagccacaaaatctcaatt

SEQ ID NO: 32751 - DNA, 281 bp, Glycine max
  unsure (1)..(281): unsure at all n locations; Clone ID: 701105754H1
tttcatgtccttcgcctgcagatagcgcanaccccaagttacttctagaacctccgtgttccgcgaattacacccccacctcaaacaaaccacttgcacatattctgagagaaagagtattgaatcctcatcctcttccttccattcctcaagaaccctaatcncaatcagccatgcagcaaggagactacacctccgctccatctccatattatcaattccctcatctccaaaaccccaatcccaatccaatcccaatcccgatccacacccaaacaacc

SEQ ID NO: 32752 - DNA, 278 bp, Glycine max
  Clone ID: 701105755H1
ctgccatcgataacatatcacacttgagacagttatctgtatctacgcaagagaagaatagaaaatggatatcaggttgatggatttggactctccattgttcaacactctgcaccgaatcatggatctgacagaggacgcagagaagaacttgaacgctccgacgcggacatacgtgcgcgacgcgaaggcaatggctgcgactcctgcggacgtgaaggagtaccctaactactacgtgttcgtgatcgacatgccaggcctgaaatccggggaca

SEQ ID NO: 32753 - DNA, 274 bp, Glycine max
  Clone ID: 701105756H1
atctattgacactgtaatggtgaattattcaagaggacccgacaatcccacaaagcagaaagagaggttgttatgttatggcgggcaaaggtgttggttcagtggctaaggcagtagcagaatatcagtatccttggcgtgagaagttggcgaaatataaggatgagtttgctaagggtgtgtggggatactgggagctgggggcatggaagccgctgagcatcggtgctcggcatcgcgctagaattcgcaaggaagtcctccttgctgggga

SEQ ID NO: 32754 - DNA, 185 bp, Glycine max
  Clone ID: 701105757H1
tgatttacaagtcggggaagttaactcattaaatttaaattctttgtatcaaaggatgtaaacagtaaccagttcagggagatagaatacatacaaaatgtggtgaagtcaaacatcaggttttaaaatgtatagaagatttttcatagttatttgctatatgtatggtggtttaaaggtgtttc

SEQ ID NO: 32755 - DNA, 278 bp, Glycine max
  Clone ID: 701105758H1
ctttataaggaggaatttgaaaagatgaaggagaaagcacctgacaacttcaggcttgactttgctgtgagcagagagcaaacaaacgaaaaaggagagaaaatgtacatccaaacacgaatggctcaatatgcagaagagttatgggaattactgaagaaagataacacttttgtctatatgtgtggactgaagggaatggaaaagggtatagatgacataatggtttcattggctgcaaaagatggtaatatcacttaactttagggccactttag

SEQ ID NO: 32756 - DNA, 275 bp, Glycine max
  unsure (1)..(275): unsure at all n locations; Clone ID: 701105759H1
gttgatcgagataactagaaacagtgtgatgaaaatgaaggtccttgttttcttcgttgctacaantttggtagcatggcaatgccatgcgtacgatatgttccctctccgaatgaacactggctatggtgcccgtactccggaggtgaaatgcgcaagttggaggcttgctgtggaagcacacaacatctttggctttgagaccattcctgaagagtgcgttgaagcaacaaaggaatacatccatggcgaacaatatagatcagactccaaaa

SEQ ID NO: 32757 - DNA, 281 bp, Glycine max
  unsure (1)..(281): unsure at all n locations; Clone ID: 701105760H1
agaagaagctgtaaagaaacgatgaatgcttcagactcagagaaagaagacgcagaaattgaagcaacagaaactgcacccgatgaagagaatgcgaaattgaagaagnnnnnnnnnnnnnnnnnnnnnnnagctncgtcgaaggatgcagagaagaagcgcggcgtgtgctatatgagtcgaatcccccctcacatggaccacgtcaagcttcgccacattctctctcagttcggcgatattcaacgaatttttctcgctcctcaagattcttctgtcca

SEQ ID NO: 32758 - DNA, 278 bp, Glycine max
  Clone ID: 701105761H1
caggaagcgacttcgccaccactccccaaagcacccccgactttgttctaactcctccgacactcacccacttgactcgccccagtttcaactctcccgcgtcgacccggaccttctcaacatgctcaatgatgccgagaacgtcacggagcgtgaccctaccatgcagggtcttgactctgttattaagagtttcgaggaagaaatactttctccgcttccgaacccgaatctagcgtccgaagcagaggtgtttaatccgaacctagggtattgtt

SEQ ID NO: 32759 - DNA, 280 bp, Glycine max
  Clone ID: 701105762H1
aataaactgctaagctaactgaactctccctctctccttcctcgttcctttcgcctctcactacaaatacacatctcatctcatccgtctctcacttttaatttttctctgcaatctgaaccttccggatttcgtttttctttgttccggtagccagccagccagccatggtgctcttcaatgtttcacgcgttgagaccactcccttcgatggacagaagcctggaacctctggtctccgcaagaaggtgaaagtattcgtgcaacctcattacctcca

SEQ ID NO: 32760 - DNA, 257 bp, Glycine max
  Clone ID: 701105763H1
acttattcccccgcatcttttgatccgtgctctgtgattcccagaccttattttttctgtcatttgcttcaaatttcaggagattaattatggctcaacccacaacaagaataggccttgctggattggctgttatgggccaaaatctggcactcaatattgctgagaaaggcttcccatttctgtttacaaccgaaccacttccaaggttgatgagacagtagaacgagcaaaacaagaaggaaatcttccagttt

SEQ ID NO: 32761 - DNA, 287 bp, Glycine max
  unsure (1)..(287): unsure at all n locations; Clone ID: 701105764H1
ttcttcgaatgcaaccgcaaccaaagnncacttattactataccancctccactcaaaccctaacnaagaanccctgaacccaccacgacaaatttcccantctcactttcatnccggcacgaacaaaaccntaacccgatggaganccgaaccacccaggttcggtgcccggagaaccaggagctggccacctacgtgtggaacaagtggaaggaaatggcgcagaacccaaaggcatttctgacaacatcgacantnacctttccaaggcccantttaatnactg

SEQ ID NO: 32762 - DNA, 296 bp, Glycine max
  unsure (1)..(296): unsure at all n locations; Clone ID: 701105765H1
caagaaatggcgcaagacttggcattggatttggaggagcttcgccgcctccacagcatcgccaaaagacctcgaaccctctctcttctctcctccgaaattcgtaacctcgaaaagttatcgtcagaggaagctctgcgcagattccggcgccgatttcgaccggaactaaagtggcgccttcacctgcgctgaagtatgcggcactcgcgtcgttcagttgggaccaggatagtgacaaagttaagattatgtgntaatggagggatcgatgagaataangttgaatccgagtt

SEQ ID NO: 32763 - DNA, 291 bp, Glycine max
  Clone ID: 701105766H1
acatttctgaacaacaattttggacagcctcagcttgtggtttaatgggatacttgcaatttgatgagcttgtcgaaagaggcattattcccttccaagatgaaagtttcactactgatgggtcattggatacaaatctagactggatatctggaatgaaaaatatgcgaatcagagattgtccaagtttcgtgagaactaccactctagatgaaaccagttttatttgctttggtatagaagcaaaaacctgcatgaaatcatcttcaatcataattaacaccatccaag

SEQ ID NO: 32764 - DNA, 288 bp, Glycine max
  Clone ID: 701105767H1
tcaatggtgactgctctctgtcaaccaatcacaaaatttagaattttcaatgtatcatttttaacttaaatactgtgagactctgtgtcagagtttgtgaagtgaatcccataatcatgaagaaaggaaacttgggacttggtctcaaactctcagttcctgtgtctgatcaatctaattttgccaggttcctgactgaaagtgggacttttaaggatggggatctgcttgtcaacagggatggagttcgaattgtctctcagaatgatgtcgaagctccacctccaa

SEQ ID NO: 32765 - DNA, 196 bp, Glycine max
  unsure (1)..(196): unsure at all n locations; Clone ID: 701105769H1
gtttttagggaaattattgtcaattgggttattcgcaaganactctgtgaagtttttggtgcgtcgttttagtttgccatccgaaatcgagggttttcttgttagatctctgctagtgccacacttttttnttaaatttttttttaggtttttatatttttctttccttttcatcttgtatccttctgttattctg

SEQ ID NO: 32766 - DNA, 276 bp, Glycine max
  Clone ID: 701105771H1
agagagagggaggagggagagtgttgacgctccatcaagatgggtatttctagggattccatgcacaagaggcgtgccactggtggcaagaagaaggcctggagaaagaagagaaagtatgagcttgggcgtcaggccgcaaacaccaagttatcaagcaacaaaactatccggaggattcgtgttcgaggtggcaatgttaaatggagggcattgaggttggataccggcaattactcatggggtagtgaagcagttactcgcaagactcgtatt

SEQ ID NO: 32767 - DNA, 273 bp, Glycine max
  Clone ID: 701105772H1
aaacacttagcatctgctgagggtaccttggtagacaccacactacccataatatggtcgaaaacaacaacccaagggtttttggttcttctatgtttctatgtttgcttgtgttgatgatttggaacaagattgttgttgttgttccacaagccgaggctcgagcattttttgtttttggtgattcgctagttgacaatggcaacaataactacctattcaccactgctcgtgccgactcatatcctatggcgttgactatcccactcacag

SEQ ID NO: 32768 - DNA, 275 bp, Glycine max
  Clone ID: 701105775H1
cattacttgcaacgattttggatggtttagtttcttggagtaatatcaaagacaaaatccatcatgatgaagaggtggttggtgcagccagtgaggtgattaacagtattgacagagaagagctagcaaaattttttgctctaaaaaatgatccagaagatgaggaagcggagaatatcaggaaaaagatggagttaacccgagaccaattggcagatgcactgtaccaaaaggggcttgcgctggcagagattgagtcttaaaggacgtagata

SEQ ID NO: 32769 - DNA, 275 bp, Glycine max
  Clone ID: 701105776H1
cttgatgtccgtccctcaaatgaacacaaaaaggcatgggtgagagcttcaacctggattccaatatttgatgttgataataagctagattttggaaccattcccagaaaagtcacaagctttgttatgggaggttggtggagtggcatgcctacactgtcttatgacagtcagtttttagccaaagttgaggagaagttccccaaagatgctgaattaattgttgtatgccagaagggactgagatcacttgctgcctgtgaactgctgtataa

SEQ ID NO: 32770 - DNA, 259 bp, Glycine max
  unsure (1)..(259): unsure at all n locations; Clone ID: 701105777H1
gtagaactgaaggctccatggatgctgctaatctattcaaacanatgcttgacacgcggccagcttaggtgcattggtgccaccacgcttgaggagtacaggaagtatgtggagaaggatgctgcattcgagaggaggttccaacaggtttttgtggcggaacctagtgtggttgataccattagcattcttcgtggcttgaaagagagatatgaaggccatcacggtgttagaattcaggaccgtgctttggttatgg

SEQ ID NO: 32771 - DNA, 275 bp, Glycine max
  Clone ID: 701105778H1
tcgagataactagaaacagtgtgatgaaaatgaaggtccttgttttcttcgttgctacaattttggtagcatggcaatgccatgcgtacgatatgttccctctccgaatgaacactggctatggtgcccgtactccggaggtgaaatgcgcaagttggaggcttgctgtggaagcacacaacatctttggctttgagaccattcctgaagagtgcgttgaagcaacaaaggaatacatccatggcgaacaatatagatcagactccaaaacagtt

SEQ ID NO: 32772 - DNA, 240 bp, Glycine max
  Clone ID: 701105779H1
ctcgtgtcgtacagtgaaacaaattcaattcccagaaggaaacatgtttactatttgcaacccctcttctctttctctgcaaccgggtatcgtggctccgattccggtaaaacctatcaaacactcttcgaatctctctgtcaccaactccgcctcttccggcgagagaatcagcagtagcaccaggcgaagaaccatttcacccttcgaatcccgaatctcactcatcttcgccctcgc

SEQ ID NO: 32773 - DNA, 283 bp, Glycine max
  Clone ID: 701105780H1
gcagaaagcaagctcatcctagagttttaaaaatggcagcagcctcctccatggctctctcttccccatccttggctggcaaggccgtgaagctgggcccatcagcccccgaagtcgggagggtcagcatgaggaagaccgtcaccaagcaggcctcctccggaagcccatggtacggcccagaccgcgtcaagtacttgggcccattctctggcgagcccccgtcctacctcactggcgagttcccaggtgactacggctgggacactgctgggtttcgggc

SEQ ID NO: 32774 - DNA, 290 bp, Glycine max
  unsure (1)..(290): unsure at all n locations; Clone ID: 701105781H1
cttcnttctaaaacaattctctaaaactatcacactatcatctaatcaactaccaacagtggtatcagagctacgttcggtcatacattgggcgtagttatattacctacctaccattccaaaatcctcccaactacttcaaaaatttcctttgtactattaacccactccaataatatatttttttctaagctatggataacactactcaatcgttaactatttctgtcctatcttcaatggtgaaaatatgatttctggcgtgttaaaatgggaacatatttcatctc

SEQ ID NO: 32775 - DNA, 283 bp, Glycine max
  unsure (1)..(283): unsure at all n locations; Clone ID: 701105782H1
tcttttntctattaaccnncttttcgaagaagctaacgccaaaacgatgtcgtatgtgcctccgcacctcagaaacccgagttccacaaaagnnncgantgtnnagaaagggntgacgtaangctagacaaccannancancnttaccacaagtcgcattcgcntcnaanancaccaccaattgctctncatctctctcctccttccacaacaatggcctctnttnggagttngnngngctccctcgncgggatctnggcaaaccganacatttccccnatgg

SEQ ID NO: 32776 - DNA, 285 bp, Glycine max
  unsure (1)..(285): unsure at all n locations; Clone ID: 701105783H1
ctcttgtatctgagctnanacagatgtcaaaagaggttgaagatantgagttggcagatgtggcagcagtcagtgcagggaacaattatgaagtaggaaatatgattgctgaagcattgagcagagttggtagaaagggtgtcgtgacccttgaggagggaaagagtgctgataacagtctgtatgttgttgaggggatgcaattcgaccgtggttatatttctccatacttcgttactgacagtgagaaaatggctgttgagtatgagaactgtaagttgctgt

SEQ ID NO: 32777 - DNA, 213 bp, Glycine max
  unsure (1)..(213): unsure at all n locations; Clone ID: 701105784H1
cctcttcgctttagcaaattccaattcccaatccaaaaccctaatttcgttcaaagaaccaattgtgatggcaccaaaggcagagaagaagccagcggagaagaagcccgcggaggagaagaagtcgacggtgggagacaaggctccggcggagaagaagccgaaggccggaaagangcttcctaaggagggaggagccggcggagaaggggg

SEQ ID NO: 32778 - DNA, 280 bp, Glycine max
  unsure (1)..(280): unsure at all n locations; Clone ID: 701105785H1
acggaggaagggaggagggtgcgaccggaagggcacaatcagccgcgacgncctccgcgccttctacgccggagtncggcggcggaggagatgacgtgatcggggcaatgatgacagtggctgacnccaataaggacgggttcgtggagtacgaggagttcgagcgcgtggtctcggcggacagaaagcccgtggggtactgtngggccatggaggacgtgttcagggtcatggacaaggacggcgacggcaagctcagccaccatgatctgaagactta

SEQ ID NO: 32779 - DNA, 270 bp, Glycine max
  Clone ID: 701105787H1
ttctctcacacactcactctccttctctctcctattgcggctagggtttgggtttttcactttcagcctctccattccttcaaccttcttcttctctttgatctctgatggagacgttccgtgtttagtagcaagggttagttgaggccttgtgtttggaaacgtacggtgtcgttttggagttgggaaaacaaataattctgagagatggcaaccacgaacccttttgatttgttgggtgacgacgctgaggacccttctcagctcatc

SEQ ID NO: 32780 - DNA, 272 bp, Glycine max
  Clone ID: 701105788H1
atccaatccagtggtagatgagatgaggtgaaatgagactggatcatagcattgatgatagttgagagtgagtgagttaatatgttatcattgttatggtgaaagtgaaaccaaacaccgaagctgttgagtgattttcattgatccagatcgtgtctgttctacgtacgatgtacagcggctccagcgacggcgaaagccatgacgcccctcagagtcagaggaaaattccgccggcatcctccatgctttgggtccgcaatcttcgccgt

SEQ ID NO: 32781 - DNA, 261 bp, Glycine max
  unsure (1)..(261): unsure at all n locations; Clone ID: 701105789H1
tgccatcgataacatatcacacttgagacagttatctgtatctacgcaaganaagaatagaaaatggatatcaggttgatggatttggactctccattgttcaacactctgcaccgaatcatggatctgacagaggacgcagagaagaacttgaacgctccgacgcggacatacgtgcgcgacgcgaaggcaatggctgcgactcctgcggacgtgaaggagtaccctaactactacgtgttcgtgatcgacatgccaggc

SEQ ID NO: 32782 - DNA, 272 bp, Glycine max
  Clone ID: 701105790H1
cttagtattgtttagatataggatacatttttctagttcatccacaatgtcattgaaacactgccatagagttccatgatttctgtgttccccaaaaccctaatcgccactcgtttcctttcccgaacccgacctcgaatacatactcccaaactaaccgccattagaaccatgagctcgtccacccagcgcatgttccagctcaagcttgacccaataacgggtaactctgaatgggtcgtcatcgaagacaacgacgacggagacgaaag

SEQ ID NO: 32783 - DNA, 273 bp, Glycine max
  Clone ID: 701105791H1
caaagcacaaagcaaagctcatccttgagttaaaaaatggcagcagcttcttccatggctctctcatccccatccttggctggcaaggccgtgaagctgggcccatcagccccagaagtgggaagggtgagcatgaggaagaccgtcaccaagcaggtctcctcaggaagcccatggtacggcccagaccgagtcaagtacttgggcccattctctggcgagcccccgtcctacctaaccggtgagttcccaggcgactacggctgggacact

SEQ ID NO: 32784 - DNA, 247 bp, Glycine max
  unsure (1)..(247): unsure at all n locations; Clone ID: 701105792H1
tttctaagttgcttgnaggaggctctagtgacgactgcaacacatgagcaaggattatctaatcatactttctctccttctttccacggtgcttgcaactaacaagnnnnnnnnnnnnnnnnnnnnncctctatcttgggaagggcttctcccatcgcaaattgtctcccagttatcacattcacaaaaccattgacgaatcctatgncagttatcttcgatgctggtagcacgggaagccgtgtac

SEQ ID NO: 32785 - DNA, 272 bp, Glycine max
  unsure (1)..(272): unsure at all n locations; Clone ID: 701105793H1
cagatgtgtgtnagagtgaagaaagaggttgacattaacaaatcatagcatnnnnnnnnnnnnnnnnnnnnnnnnnnnnnnnnnnnnnnnnnnnnnnnnnnngtttgagggaagacaatgaagagggaagggatctgaagaagccatttcttcacacgggaagttggtatcgtatgagtgggagacaatccagtgtgttcggttccacacaggccatnccttnctcctccatctcngtctttgcttgtgttctaatcgttgctttgggtcca

SEQ ID NO: 32786 - DNA, 276 bp, Glycine max
  unsure (1)..(276): unsure at all n locations; Clone ID: 701105794H1
tcttcttcttcactctacaaccactannctaagtggttggttttggtttagtttcatttttttgaagctcttaaacttaaggcttaagccatggcatcctcatcctctctgcatctatctcaggcccttctggcacgtgctgtgtaccttcatggctcttcttcttctgaccgngtctcactctccttcccatcattctctggcctcaagtcacattctacatgcaaagcagcancagccacgtcctcgcgtagaaggggtgcttgtccatccacc

SEQ ID NO: 32787 - DNA, 113 bp, Glycine max
  Clone ID: 701105795H1
acgaaatgacttttgagagtttttagatttgtgtttggtgaagtacttcagataatgtgaattatcttgtgtatccgaatccaacttaatgttacttgctttttacaaaaaaa

SEQ ID NO: 32788 - DNA, 260 bp, Glycine max
  unsure (1)..(260): unsure at all n locations; Clone ID: 701105796H1
gcaataccaacggtattggtgcttncagtgatagaacaagacgntatactcaactccacttactgtnacttccacaacttcttcngcgnngggtccctntctgaagtggaaaagataaagcagaagtgccttacatggcagtggaagggtcaatattccatcaactactttgtannntctgattctcctcagcagttgcatggnagccaccctcctctcttacttgttcatggcttnggtgcctccattcctcactggcg

SEQ ID NO: 32789 - DNA, 217 bp, Glycine max
  Clone ID: 701105801H1
tggcgttgaatcctcaactgtttccaaatggaatgcccgttcctttcgtgaacgagatgtttgtgttggccagagacggcgtcgaattcgaggtcgataagattcctgcctctggcaatcatgggggtaatctcaaaacaaagggaatcgtgtatttgtcgaatattcggatggtcttcgttgctaaaagtccagttggacacttcactgcttttga

SEQ ID NO: 32790 - DNA, 272 bp, Glycine max
  Clone ID: 701105802H1
ctcgcaagcaaaaagaaagaatcccaggcgaggagaaagatggaggggaaggagcaggatgtgtcgttgggagcgaacaagttccccgagagacagccaattgggacggcggcgcagagccaagacgacggcaaggactaccaggagccggcgccggcgccgctggttgacccgacggagtttacgtcatggtcgttttacagagcagggatagcagagtttgtggccattttctgtttctctacatcactgtcttaaccgttatgggagtc

SEQ ID NO: 32791 - DNA, 272 bp, Glycine max
  unsure (1)..(272): unsure at all n locations; Clone ID: 701105803H1
ctgagaatttactcagagctgccactttaaagtttgaaaaattgangagggagtgctataggcatgccatgaagctcgatggagaagaatgccaacaagctaatttaggtttggaagagaatgaagaacttgataatggtgaagatgaagaggaggcagctgagggtaatgatagtgatgaagaatgggaagaagagcatgatttggctggagataatgaaatgcctctgccatctgattcctacatcaactttgagaatctttcaaggact

SEQ ID NO: 32792 - DNA, 271 bp, Glycine max
  Clone ID: 701105804H1
catgatcgttgccaaaatattttttgaattaaatgaatggacgagtcttcctcctaatttgttggagacatttctagaattttttgaaaatgctttgcttgggaagttctgcagggctacacagtctggtaaggctgtctgggaagagtgtttagttcagctcctttcatttattcctaaatttctttcacgtggggcaagctcttggacatcacgtcttcttcaggcttttacccagacatttagggaaagcaagccaggttccttgctg

SEQ ID NO: 32793 - DNA, 274 bp, Glycine max
  unsure (1)..(274): unsure at all n locations; Clone ID: 701105806H1
ctaaaggttccgctatttcaattcccaaatctacaggctttgtctaccaaaacaagcagcgccaacctttcactctgtgcaccgcccatcgcaaacttacaataccacaccacatacatattcnataatatctctcgctatggttagcttcgttcccttcccattatttcaatcaaacacttatcatattactaacaaaaatggaactaacattccctcatcaagacgaagatgattccgttgtttctgattgcgagagggtgtttcgggcagt

SEQ ID NO: 32794 - DNA, 273 bp, Glycine max
  unsure (1)..(273): unsure at all n locations; Clone ID: 701105807H1
ctaattcatggggtgatgagtgggtttttacaagaaaagacgaaagtncacttaggtccattttcacaatggaacataagtggaacttacagagggaattggaagtttttagatactacaaatggttctaccggatttccagacatcagaaaaataaatggaaattctgtaattgaattagttagtatgcccacaaagataactggtgtacattatgtgcagggggtagtcatattccatgatgtatttgacaatgaatacaatgttggtgga

SEQ ID NO: 32795 - DNA, 272 bp, Glycine max
  Clone ID: 701105808H1
tttgttctgctcagctcgatctacctaccttggttcttctctgttctgttatttcagtgcagcagcagaaaatgaccatcctcattgagcaacctgcccttgagttacaagttgaaggcaacaatgtgcatgctgaagaaaccaatgagcttgtattggatggtggatttccattgccaaaggatggatatatggccccagaaatcaattcatttggccactccttcaggaattaaagtttaaagtttctttataacgaaaccgacactgga

SEQ ID NO: 32796 - DNA, 255 bp, Glycine max
  unsure (1)..(255): unsure at all n locations; Clone ID: 701105810H1
accactcttaatttctctctgcctannctcatttacacaccncttccaacctttcactttcanctttatttgaatccctctctctcctttccaaatggccagcgttgaggttgcacatcaaacaccaacaacagttccagaaaatgaaacanccgaggtaatcaagacccaggaaacaaccccggaaccagtaccagccactgaggctcctgcnacagaacaagcagcagctgaggttcctgctcaagaagaaca

SEQ ID NO: 32797 - DNA, 272 bp, Glycine max
  unsure (1)..(272): unsure at all n locations; Clone ID: 701105811H1
ttttggcggtctatccaggaactactgcactttataaagcaacagttgttcaaggccatcgcagaaggaagaccgaggattacgtgttggaattnnnnnnnnnnnnnnnnnnnngatctttaccacaaaggacagtgcccttccacaaagtggttcctcttccagaaggacatcgccaatgagtgagtttaagctacttatagttgtgtataaagtagaaactagactattgcatatgtgccacttgtgtaatatgctccatgtgttgtggt

SEQ ID NO: 32798 - DNA, 267 bp, Glycine max
  unsure (1)..(267): unsure at all n locations; Clone ID: 701105812H1
ctcttcctcaccgattgcncagantggaatttcgatgctcagtcatcnccttttaccattctcttctctcttgctcttgcaggagagagccatgtccatgcatcgctacctgaggaagattattgggaagctgtttggccaaacactcccattcccactgcactgcgagagttctaaagcctctccctgcaggtgttgaaatcgatgaactccctcaagcaaattgatgatacacagtacccaaaaacattcttctataaagaagac

SEQ ID NO: 32799 - DNA, 267 bp, Glycine max
  unsure (1)..(267): unsure at all n locations; Clone ID: 701105813H1
ccngctttgcgtcccaaaagtcccacagccattgtttggtcctcatcagtgtgctgcaaccgaagagaacttggcctctcgagcttctaatgaagcagcactcaagatgggtgactatcgtgacattttgagcctacaaganttctcatacgtggtccccaaagcaaagcagatgctgatattgtcattgaaagatgtgcaggtgcagggcatctacgagatgatattctttattatcataaagatttgagaagttacagatggtga

SEQ ID NO: 32800 - DNA, 269 bp, Glycine max
  Clone ID: 701105815H1
cttgaatcaacaatcatgtcggacgaagagcaccatttcgagtccaaggccgacgccggagcctccaaaacctaccctcagcaagccggtaccatccgcaagaacggctacatcgtcatcaaaggccgcccctgcaaggttgtggaagtttcgacttccaaaactggaaagcacggtcacgctaagtgtcactttgttggaattgatattttcactgccaagaaacttgaggatattgtgccctcttctcacaactgtgatgttcctca

SEQ ID NO: 32801 - DNA, 272 bp, Glycine max
  unsure (1)..(272): unsure at all n locations; Clone ID: 701105816H1
ggcggncgagtgaactcagtgggttttggattgggttgtggttcgtttatctactcctcctcttgttcgtttcatctntctcgcactacaatcaaagaaagccatgagagcattttgttgatagaataatttggtctttctattggattagggtttgtttttccatcgctctccattcanagatgattcccgcactgtctcaattcaaggttaaccatgtgggtgtggggttcaattcgccgtcccctaaccccattcccatgcttcccacg

SEQ ID NO: 32802 - DNA, 274 bp, Glycine max
  unsure (1)..(274): unsure at all n locations; Clone ID: 701105817H1
cttggctaacccagtgcaagtgaaggtggggaaagtgagtagccnnacaactaatgtttcacaaactcttgtgaaaatttctgaaaatgagaagattgatcggcttctagatttgcttgtagaggaggcatcacaggctgaaaaatgtggtcatccatttccattaacaattgtgtttgttgagaggcnagacaaggtgtgatgaagttgctgaagcgttggtagctcaaggattatctgcagtttctctcatggtggtcgcagtcagagtgaa

SEQ ID NO: 32803 - DNA, 271 bp, Glycine max
  Clone ID: 701105818H1
tcccaattcgcttctccacctcttcctcttgtcgttctatctgttcgcttttcagtttctagggcttattattattaacgtttcatcttccgccatgtttctcgcgccctaacagtttctccccgaaatctcgcgccgacgcccgataaactcgccaatcgatggcggcggaggagatggctcctctcgttggcggcggcgattcctcgtcggcgaggcgagggctcagtcgtcgttcgtgaggaaaggcgaccggcaaatgttcacggtg

SEQ ID NO: 32804 - DNA, 271 bp, Glycine max
  unsure (1)..(271): unsure at all n locations; Clone ID: 701105819H1
ggttcccaaaactgtagcgaaaaccatcacaacctggtggtggatcggttcgatctgcgtcttcctctgctaaactgcgttcttcataaccccccaaaagagaattttttttaaaaaatttggagagagaaaaacaaagaggtgaagatctgaaggctttgttgtacccgcttataacactgaaaaatgcaaggtagatccccagaccaggaatcagtagggtctgggacaaagnnntccagtgtatcatcggggggtaggcctcgaaatc

SEQ ID NO: 32805 - DNA, 269 bp, Glycine max
  unsure (1)..(269): unsure at all n locations; Clone ID: 701105820H1
tgacattcctctctcgcccaaacctctcacactcccaaacctcttgaggcttagcctctcgtcactgttggcactgtcatcatgtcgaaactactctcaagccctcgcctctcatcatcgttgatgttgagtttccttcagcttggatctctgacaatccacctaaaatggcgatgtatagcgggatctgcaagcatggagggcgagaacgcgagcnaggtgaccgagttggtgaacgagatagccaacatctccgagtacatgcctcc

SEQ ID NO: 32806 - DNA, 275 bp, Glycine max
  unsure (1)..(275): unsure at all n locations; Clone ID: 701105821H1
gtcttngctctaactaatcaaaatcctnccnntctccganaccaaaccacatgatactaaaaactcctaatggaaganaagcagttagattttaatcagcctcttttatcggtaaggcgaatctcatcaacggcggcctctgaaaatgacaataaaagaaaacctgataaatcagtgcggaaacgacctcctcttccgttttacaaatcagagttaaaatcaggtccagtgactaaccctggaactgttccttttgtatgggagaagactcctgg

SEQ ID NO: 32807 - DNA, 272 bp, Glycine max
  unsure (1)..(272): unsure at all n locations; Clone ID: 701105822H1
cttgaagaaagcgctgtggtcatgcaagacattttgccttctgatncatctcangatgctcctatggagattgccccccaacatactgcaactttgactgttgtggtggctgatgatgcttttgatcaagatgttgctggctcgcttcctatgtcacctgtcaatgatactccagagaacataaaggaatttgttgagtgcaacactgatgatgatcaaggcatcagtaagggtgacgataaccaagatatgaacgatgaaactgaagattt

SEQ ID NO: 32808 - DNA, 271 bp, Glycine max
  unsure (1)..(271): unsure at all n locations; Clone ID: 701105823H1
gggcaagcagcaagtcctatcccaaccctaaccctaacttcgaaccttcgtcctttctctcttcttccttcagattcatccgtaccgttagttactactggattcgcggttgattgctgctaccgggtttctcctctttcacgtataagatgcacttccggtcatcattttaccaacatgcagattttgagtnggtttctgaatataaatggacgccaaacggtttatccagctggttgaggagaagaagaagaaaattatggagagaaag

SEQ ID NO: 32809 - DNA, 273 bp, Glycine max
  unsure (1)..(273): unsure at all n locations; Clone ID: 701105824H1
ctttcttccatcttcttctcttttcacgtcattatcctaaacttgcagattttcacatcccaagcaacatgaaggggaggttcatgtttctgtcggtgctcctttgtgccacctttcatgtctccttctccattactgacggcttagtagcaaacggcaacttcgagctgggtccgaagccctccgccctgaaaggaactgtggtgattngtggcagccactcgatcccagaatgggagatctctggcttcgtggagtacataaagtccggcc

SEQ ID NO: 32810 - DNA, 276 bp, Glycine max
  unsure (1)..(276): unsure at all n locations; Clone ID: 701105825H1
caaaccccaaaatctgaaaaccgtcctattcgtccgttcgaattagnggcatctctgaactggaacaaccagatgccagcgatttgagcgatgcacagtcnagangaagctgcgtagtgcgtttgcntttcgttcttccaaatggcggtttccgncagtcccagcggcggctccacgccacctcatcaggaacaacaagccaacagcaagtacggtttcaccaagcccctctctctcgcgggtcccaccgacgctgatctccagcgtaacaacgat

SEQ ID NO: 32811 - DNA, 267 bp, Glycine max
  unsure (1)..(267): unsure at all n locations; Clone ID: 701105827H1
gattatcctaagtctttgggaatagtgctgcaatggcttcaagtcaggnggnggtgacccttttgggagctactggaagcccatttgtgtgcagggttcatattgccctcaagttgaagggagttcaatacaaatatgtcgaagaaaatttgaggaacaagagtgaactgcttctcaaatccaacccagttcacaagaaggttccagtgtttattcacantgagaagcccatagcagagtctcttgtgattgttgaatacattgatg

SEQ ID NO: 32812 - DNA, 50 bp, Glycine max
  unsure (1)..(50): unsure at all n locations; Clone ID: 701105828H1
cactcgcaagcaanaancaagaatcccatgcgaggnnctngatggaggng

SEQ ID NO: 32813 - DNA, 269 bp, Glycine max
  unsure (1)..(269): unsure at all n locations; Clone ID: 701105830H1
ctcttgaccaaatcaatgagcccaagangccctcagacaagccactcaggcttccattgcaggatgtctacaaaattggtggtattggtaccgtgccagtgggacgtgttgagactggtgtcgtgaagcccggtatggtggtgacttttggtcccactgggctgacaactgaggttaagtctgttgagatgcaccatgaggctctcacagaggctcttccaggtgacaatgttggctttaacgtgaagaacgttgcagtcaaggatctc

SEQ ID NO: 32814 - DNA, 263 bp, Glycine max
  unsure (1)..(263): unsure at all n locations; Clone ID: 701105834H1
tccttaagcacgcggtatttgtctcngtctcctcggtgcaacattacgtncccacacacactactactnccaataggggatcgagaaaaacaaacagcatcatcccagtgacgacgacgatcacattttaatgagaatccgaatttgagattgttggaattttatctttcaagattttggatctgcgaggatgaagtcttggtcactggacgagtggaggaatacttcgggtctgcgaattcggatatattcgagataattga

SEQ ID NO: 32815 - DNA, 266 bp, Glycine max
  Clone ID: 701105835H1
gtaaagaagccagtgctaggatttgttagtgaagcaatggctcaaaccatgttgctcatgtctagtgtctctagcagttattccgtggatttgaagaaagaccttttcctccaattgcagagtcaaagtttaaggcctaagttctctcagctctcattcaacccacttccatcatcaacttcttccttttcttcaccccgtacattcacaactctggccctcttcaaatctaagaccaaagccgctcctgctaagactaaggttac

SEQ ID NO: 32816 - DNA, 266 bp, Glycine max
  unsure (1)..(266): unsure at all n locations; Clone ID: 701105836H1
cgcgatctctctctattctttgaaaccaaagttcaaactctgtcttccctgggttctatttcgaaatcaacgacgatgagttccacagaggcagcagccacagagaagaaaggtggaaganggaaaccgaagacttcaaagtccgtttcccgttcctccaaagctggccttcagtttcccgtcggccgtgtcgctcgctacctcaaggccggtcgctacgcccagcgcgttggctccggttcccctgtttatctctccgcggttct

SEQ ID NO: 32817 - DNA, 265 bp, Glycine max
  Clone ID: 701105837H1
gagccgtatgttattgcaaccaacaggcaacttagtgagttgcaccccatatacaaattgctacaccctcatttccgttatacaatggagattaacgctatcgcacgagaagcacttatcaacgctgatggcaccattgagagctcatttgcaccaggaaagtactccatagagattagctctgctgcttatgctctcgaatggcggtttgacaagcaggcactaccagcagatctagttagcaggggaatggctgtgaaagatc

SEQ ID NO: 32818 - DNA, 264 bp, Glycine max
  unsure (1)..(264): unsure at all n locations; Clone ID: 701105838H1
ganntgcacgctgggttggcatcagaaggtggttctaanctcaaaatgcttataacatttgttcataatctccctaatgggactgagaaaggaacatattatgcactagatcttgggggnacaaattttagggttttgcgggttcatttgcatggtcaacaatcgtctgttttggaacatgaagtagagcgacagcccattcctcaacatctaatgaccagcacaagtgaggatctctttgatttccatgcttcttcattaaag

SEQ ID NO: 32819 - DNA, 266 bp, Glycine max
  unsure (1)..(266): unsure at all n locations; Clone ID: 701105839H1
aatttctcatctcatcatttctaattctacctcttttctcttgcactaacaatccaagatgaataccaacaacgacaccgaaaaaaaccaatcatttccagaagcacaaggnnnnnnnnnnnnnnnnnnnnnnnnnnncaatgttgggactgagaattggggaactcacataatgggcacccctgctgttccaagcagccacccagataacaaaaaagcagctttacaaagtggacaacctcaaccagttcaatactaccatgacc

SEQ ID NO: 32820 - DNA, 262 bp, Glycine max
  unsure (1)..(262): unsure at all n locations; Clone ID: 701105840H1
cnaaactatacaacgttgcttttgttttgttttgttttgtctctctctaatcattccaatggccaaagaaggacccaactgggacgggttgctcaaatggagcattgctcattccgatgggactcgncccactcgcaattnangtgaggaggatcnnanntggtntatggcagcgnnccggcntagacnanngangtngtgaacgtatgcnaganacacattgtgatgcaaatccagaacaagtcttgaaagaccaaggagt

SEQ ID NO: 32821 - DNA, 273 bp, Glycine max
  unsure (1)..(273): unsure at all n locations; Clone ID: 701105844H1
agagcattaatgaaccagaggaatgaaaaatcgtctcgatgacctgcatataaaatggttcaggaaactgctctaaaccatatattcagctgtgggggaagtcagaacgattttggagctactcaggaaatggaccttcgcaatctcgatcatttgggttgttattcgttttcaggttcaagtaaagagatatantaaatggtaaacatgtatctatccatttatatacaagatgcttatgattaccactttcccaacctcttatactactta

SEQ ID NO: 32822 - DNA, 277 bp, Glycine max
  Clone ID: 701105845H1
gtcttctctattattgacctgtgcctataaatctttgttttgtaacaacaaacagatctataatgtaaagggaagggaggttcacattcacattacaagcaacaacttaacgcttaacaacagcactctccctaatccttctgtgtatgcaaaatgagaccatgcaaatgcaaatgcaatgttctctctgctctcattcttcttgtcacattcctttttattgcttcttccgtccactgtgaagacccatatcggtacctcacttggaaggtcacct

SEQ ID NO: 32823 - DNA, 276 bp, Glycine max
  unsure (1)..(276): unsure at all n locations; Clone ID: 701105846H1
aaagaaagaganataccaaaaccttgggcgcatcatattctttattccctcacttggatcgttaattccgcgaacgagcttctgcccttcaaattaaccatggagaatattggtgaggagtacggctactggccggagaacgacatgcttttccaaaacgaagaccttggcagctgggcgataatggatgaggcagcgttatcagggtcagggtactatgattcaagctccccggacggtactggtgcttcttnntcggtggcatctaagaacatt

SEQ ID NO: 32824 - DNA, 216 bp, Glycine max
  Clone ID: 701105847H1
gggtccatgccgttttatggccccagttcttgcagagattgcaaagaaaactcctgaattgatcttcctcaaagtggatgtggatgaagtgaggcctgttgctgaggaatattccattgaggccatgccaaccttcctcttcttgaaagatggcgagatcgtggacaaggtggttggtgctagtaaggatgaccttcaagccaccatagccaagca

SEQ ID NO: 32825 - DNA, 266 bp, Glycine max
  unsure (1)..(266): unsure at all n locations; Clone ID: 701105849H1
ttagaagtcttaaacattcaacctcaatttgcagagttctaatattacattgcagagaaaatgtctttgattccaagtttctttggtggcagaaggagcaatgttttggatcctttctccctcgatgtgtgggacccttttaaggattttccttttcccacttctctttctgctgaaaattcagcgtttgtgagcacacgagtggattggaaggagncaccagaagcacacgtgttcaaggctgatattccagggctgaagaagga

SEQ ID NO: 32826 - DNA, 264 bp, Glycine max
  unsure (1)..(264): unsure at all n locations; Clone ID: 701105850H1
ctatagtgagtctncgtgtttganaganaggttgagctatagcctaaagggagagacacataaatagtttctactttctattcatagatagatggctggcccaattatgagacctcagattgtgctatttggctcctccataattcaaatgagcttcgacaatggtggttggggtgctattctagctaacttgtacgctaggaaggcggacatcatcttaagaggatactctggttggaattcaaggcgggctttggaggtttt

SEQ ID NO: 32827 - DNA, 265 bp, Glycine max
  Clone ID: 701105852H1
caaagtttcagtttttggtgttccatttttcttcctccatctttatcttaaacataacttgaactctccattccttaaattttagctacgagctagttccgacacagacaaagcaatggcaaagaccgagttagaggtgactgttgagagcaagaacaaagacctcaagcacctggggtttgtgaggattgctgctattcaaacatttgtgattgtgtcaaatctgtatgagtacgcaaagcagaattctgggcctttgagatcc

SEQ ID NO: 32828 - DNA, 268 bp, Glycine max
  Clone ID: 701105854H1
ctttccattcgttcaccgccccaatctctgcagcgccttcgatctacgaaaacatgactaagagaacaaagaaggctggcattgttggaaaatacggtacccgttatggtgccagtctgcgaaagcagattaagaagatggaagttagtcaacacagcaaatttttctgtgaattttgtggaaagtatgctgtgaagaggaaagctgtaggaatatggggatgcaaggactgtggtaaagtgaaagcaggcggtgcttatactttgaa

SEQ ID NO: 32829 - DNA, 266 bp, Glycine max
  Clone ID: 701105855H1
cagtggtaagttcttgaggaagttcagattgccagaaaacgctaaagtcgatcaagttaaggcttctattgaaaatggggttctcactgtcaccgttccaaaggaagaggtcaaaaaacctgatgttaaggccgtgcaaatctctggttaaaagtccaatatatagaaaatactgtgttttgcttcttgtgagttataaggaagatcttacaatgtaaactgtacctgttgaaataagcgtcagttgttcttgttgagtggcattc

SEQ ID NO: 32830 - DNA, 267 bp, Glycine max
  unsure (1)..(267): unsure at all n locations; Clone ID: 701105856H1
tagattttgataagtaccctttatcaaagaagcgaattccactagataccttaagagattactcccaatttcgacctcgaacaaccacggnggcaactgtggtgcggatccgtagttctctttcttttgcaacccacacatttttcaatgagcatgcatttattgatgtgcaagtacctattataactagcacagactctgaagggtttagcaacatgttgaaggttaacaccctggaacagaaagcagagaaggagaaactagaca

SEQ ID NO: 32831 - DNA, 268 bp, Glycine max
  Clone ID: 701105857H1
ctaattctcatttcttcatcgttcgattcttctcctcctaaagatgcagatcttcgtgaaaactttgaccggtaagaccatcacccttgaggtggagtcctccgacaccatcgataacgtgaaagctaagattcaagacaaggaagggatcccacctgaccagcagagacttatctttgcgggtaaacagcttgaggatggtcgaacccttgccgactacaacatccaaaaggaatccactctccacctcgtgcttcgcctcaggggt

SEQ ID NO: 32832 - DNA, 266 bp, Glycine max
  unsure (1)..(266): unsure at all n locations; Clone ID: 701105858H1
cacagagaaagcattggggagtancagtagaagcttcacttcactctgttcagttcttattgttgcatagataatttgtctctatttttgtnattttctttctctctcctctttgtgcattttaatagcaactcttagtttccaatgtccaagatgttgggagtgtttgtgggacttttgctgttggtggggttggctgcctctgccaagtttgatgaactcttccagcccagttgggctatggaccatttcatccatgaaggaga

SEQ ID NO: 32833 - DNA, 275 bp, Glycine max
  Clone ID: 701105859H1
gacgcttcgcaaatctcaatcgaatctcagaaaaatgagagaaatcatcagcattcacataggtccaggccgggatccaggtcggaaactcctgctgggaactctactgcctcgaacatggcatccagcccgacggcatgatgccttctgactccaccttcggtgtagcccacgacgccttcaacaccttcttcagcgaaaccggatctggcaagcacgtcccccgtgctgtccttcgtcgacctcgaacccaccgtcatcgaggaggtccgctg

SEQ ID NO: 32834 - DNA, 256 bp, Glycine max
  Clone ID: 701105860H1
aagaatatcaaattggtctcttgacttcctcctcatctctaccactactccacatagagcacagcctctcaagcccaagcccaagcccaagcccaagcccgttcataaaatcctcctgcagcagcacccagtacccagccctctgcgtctcatccctctccgtctacgcctccagcatccaacaggaccctcaccaactggttcagacagcactctccctctccctgaaccgcacccaagccaccaaaaccttcgt

SEQ ID NO: 32835 - DNA, 274 bp, Glycine max
  unsure (1)..(274): unsure at all n locations; Clone ID: 701105861H1
ggtgagggccttccatggcttccgcttgtgcttcctctgcaataaattgctgttgccatctctacgccgagttccgggcagaagaatggatanngaggttgttnncttagtggaaggaaattgagggtgaaaaaggagagagcagcaattggaggacgatcgatgggcactacagtgtgcgcagttgctgagcctgacagacctctatggttcccaggcagcacccctcctccatggcttgatggcactctacctggagacttcggctttgacc

SEQ ID NO: 32836 - DNA, 256 bp, Glycine max
  unsure (1)..(256): unsure at all n locations; Clone ID: 701105862H1
gagataactagaaacagtgtgatacccaatgaaggtcttacttncttcgttgctacaatnntggtancatggcaatgccatgcgtacgatatgttccctctccgaatgaacactggctatggtgcccgtactccggaggtgaaatgcgcaagttggaggcttgctgtggaagcacacaacatctttggctttgagaccattcctgaagagtgcgttgaagncacaaaggaatacatccatggcgaacaatatagat

SEQ ID NO: 32837 - DNA, 281 bp, Glycine max
  unsure (1)..(281): unsure at all n locations; Clone ID: 701105863H1
gttcttcttcttctattacnacaacgtcgncccaagaccatgaccatggccatggccacgatcctgcttcctgttcacggtcttcgcggtttcatcggccctagacatgtcgataatctcgtacgacaacgcccacgccgccacgtcgcgcagnanaagggagctgatgtccatgtacgagcagtggctggtgaagcacggcaaggtgtacaacgcgctcggggagaaggagaagaggttccagatcttcaaggacaactgcgattcatcgacgaccacaa

SEQ ID NO: 32838 - DNA, 273 bp, Glycine max
  Clone ID: 701105864H1
tttttcattgtttcatttaatctacaatggctgcttcaacaatggctctctcttcatcatcattggctggccaagctatcaagcttgccccctccacccctcagcttggtgttggaagggttagcatgaggaaaacagcctccaagactgtttcttctggaagcccatggtacggcccagaccgtgtcaagtacttgggcccattctctggtgagcccccatcctacctcactggtgaattcccaggtgactatggttgggacatgctgggct

SEQ ID NO: 32839 - DNA, 274 bp, Glycine max
  unsure (1)..(274): unsure at all n locations; Clone ID: 701105865H1
ttngngntggcacttctcgtgttgctcaacacagacaacaatggcgtcggtttcagtaatggctacgaccagcnacancaggtggtccatggcttccttgcgctctgctttgccctctcatnctccttctgtntcctctncattgcgcttccctgtattgccatcttcctcttcatccaagctccgnattnctcgnaccanacccaaatcccttctcacccctttcacnggtctggttcctcttaancncctcntcctctcntcnccttctnca

SEQ ID NO: 32840 - DNA, 265 bp, Glycine max
  unsure (1)..(265): unsure at all n locations; Clone ID: 701105866H1
agaaacagtgtgatgaaaatgaaggtccttgttttcttcgttgctacaattttngtagcatggcaatgccatgcgtacgatatgttccctctccgaatgaacactggctatggtgcccgtactccggaggtgaaatgcgcaagttggaggcttgctgtggacgcacacaacatctttggctttgagaccattcctgaagagtgcgttgaagcaacaaaggaatacatccatggcgaacaatatagatcagactccaaaacagtta

SEQ ID NO: 32841 - DNA, 247 bp, Glycine max
  Clone ID: 701105867H1
caggttgtttgtgctgaagaggaaataatgtgcattgagagggagagggaagcactcctcttattcaaggctgcacttgtggatgactatggcatgctctcttcttggaccactgctgattgctgccggtgggaagggattcgctgcagcaacctcactgaccatattctaatgctcgaccttcacagtttatacctcagaggagagatccccaagtcgttaatggagttgcaacaattaaactatt

SEQ ID NO: 32842 - DNA, 265 bp, Glycine max
  unsure (1)..(265): unsure at all n locations; Clone ID: 701105868H1
taatatctcccactcattcacttactttgacattcacattcagaacacaagcagaatgcagagaggcacgccggtgagaaagccacacaccaacacctccgatctcctcacttggtcggaaactcctccgccggattnnnnnnnnnnnnnnnnnnntcgctctggccagccttccgatagaatcagtaaggttctccacggcggccagctcaccgacgaagaagctcagacgctagccaagagcaaaccatgctcagggtataaa

SEQ ID NO: 32843 - DNA, 228 bp, Glycine max
  unsure (1)..(228): unsure at all n locations; Clone ID: 701105869H1
ctctttggcgatgagactgaggaagacaaaaaggcagcagaggaaagggaggctgctaagaagtctaccaagaagaaagagagtggcaaatcttctgttctgcttgacgttaanccttgggatgatgaaacagacatgaagaagctggaagaggctgttcgcagtgttgagatgcctggtctattgtggggagcatccaaactggttcctgttggttatgggatcaag

SEQ ID NO: 32844 - DNA, 242 bp, Glycine max
  unsure (1)..(242): unsure at all n locations; Clone ID: 701105870H1
gcataatagcagcgnacaatggtgaagcnntacagacccccggggaagaaaaaggagggnaatgctgccaaatttgtcattaggtcacaagcaatcaagcagcttcaaatcagtctaccccttttcaggaaactatgtattntgaaaggtgtaactccaagggagcctaagaaaaagttcaagggaactcatcagacttattaccatgtcaaggatgtttccttccttcatcacgagnnctt

SEQ ID NO: 32845 - DNA, 266 bp, Glycine max
  unsure (1)..(266): unsure at all n locations; Clone ID: 701105871H1
cttatctatctaatatactatacaaaaagttcttatcagtgacagagtaaaggaggcataccgatgacgatggcgatgacggcgtcgcagttgcggtgcggttgggggtggaggccaacgccgaatcagcagcagcaacgacgtcgtatggttccggtggtgtgttccatcgctataganaacgcgaagaacaaagagagagcgaaactgaagaagctcttcgatgaagcgtacgagaggtgccgcactgctcccaccgaaggcgt

SEQ ID NO: 32846 - DNA, 260 bp, Glycine max
  unsure (1)..(260): unsure at all n locations; Clone ID: 701105872H1
cactaagatggcttcctttgtatccttcctagtgctgcttcttgcagcccttattcnccatgcctcaagggcttgctacttactacaaaccaattaagaagccaccagtgtacaagcctccagtgtacaagccaccagtgtacaaaccaccggtttataagccaaaaccaccggtttacaagccgaaaccaccggtttacaagccaccatataagaagccaccatacaagaaaccaccttatggaaagtaccctccagta

SEQ ID NO: 32847 - DNA, 248 bp, Glycine max
  unsure (1)..(248): unsure at all n locations; Clone ID: 701105873H1
aaacgagccatttggnagtnaggtncctgcacgntctgcttacccgcnagtgttctttcttcacttcaacaccttaatttncacacgctgcttcttcngcttgaganatggcacaagaaacntttctattcacatctgaatctgtaaacganggtcaccccgacaagctgtgcgaccagatctctgatgcagtgctcgatgcgtgccttgaacaggaccctgacagcaaggttncctgtnagacatgc

SEQ ID NO: 32848 - DNA, 265 bp, Glycine max
  unsure (1)..(265): unsure at all n locations; Clone ID: 701105874H1
gtggccacagcaacaataacaatggcagcctcactacaagctgcagcncancttcatgcaacccaccaaggtgggcatggccactcgcaacctcaaatctacacaatgcatntctaaggctttnggcttnnaacccgctgcagctaaactcatttgctcncttaagcccnatctggaagatttnntcaaaaatgtgtcgacgccaccaaaattncannannngngaaancnactcagtctcgttgtnnctggagcgagtgcagaa

SEQ ID NO: 32849 - DNA, 267 bp, Glycine max
  unsure (1)..(267): unsure at all n locations; Clone ID: 701105875H1
gttacatagtttttcattgttttacttaatctacaatggctgcttcaacaatggctctctcttnatcancngtggctggnnangctatcaagcntgcnccctccacccctgagcttggtgttggangggttagnatgcggaaaacagttccaaaactgtttcctcaggaagtccanngnacggcagtannaccgngtcaggtcacttgggncnattctacaggtgagcccanatccnatctcnctggtgnantcccaggagnttatg

SEQ ID NO: 32850 - DNA, 97 bp, Glycine max
  unsure (1)..(97): unsure at all n locations; Clone ID: 701105876H1
cttcacaccattctcacaaaacaactttcaaactctgagnaagaatggctgcnaanacattgntgnntnntgctatcncanncttcgcatctctcct

SEQ ID NO: 32851 - DNA, 258 bp, Glycine max
  unsure (1)..(258): unsure at all n locations; Clone ID: 701105880H1
gctaggctaagcgaagtacgaaccaaactctncacgcagattgtggcatgcttagcgacgacatntgcntcnncgttntnnacnaccagaaccacnatgtatcctgnnactgnntnnaacactttcggccatntccacgngttcncttantnagctgtcaccacgcagttccnttcctgtgtatccatgaatctcaggtcatagngacnggngattgaggagtgnagagctgancagtttccatgatcntnagagang

SEQ ID NO: 32852 - DNA, 266 bp, Glycine max
  unsure (1)..(266): unsure at all n locations; Clone ID: 701105881H1
aaagaatggcagcttgcactgtctactcaacacaatctctgagcnccaaattgctccatctcaaccccatcaaagacgcaactcagttttttccaccaaaagcaggtantcnttctggaggaacagcaagaagggcagctgcagcagcagaagaagctatgtgataacatgtgcagcaggtgactcacagacagtggtgattggcctggctgcagactcagggtgtgggaagagcaccttcatgaggaggctgaccagtgtgtttg

SEQ ID NO: 32853 - DNA, 98 bp, Glycine max
  unsure (1)..(98): unsure at all n locations; Clone ID: 701105882H1
cgtgggaggccgccaccggaaaatncnccgtccaaacggagaagaagacgnactccgnnggaatgngtaagagataggaatcnnnccaaaantcacna

SEQ ID NO: 32854 - DNA, 260 bp, Glycine max
  unsure (1)..(260): unsure at all n locations; Clone ID: 701105883H1
ttagcacttcttcttttcacactgccgctgcaacaatggcttcagagaagaaactttcgaacccaatgagggagataaaagtgcagaagctcgttctcaatatctctgttggcgagagtggagatcgtctcaccagagccgccaaggtgttggaacaacttagtggccaaaccccagtgttttccaaagcaaggtacactgttcgttcctttgggattagaaganatgagaagattgcatgctatgtcatgtcagaggtg

SEQ ID NO: 32855 - DNA, 261 bp, Glycine max
  Clone ID: 701105884H1
ttagcacttcttcttttcacactgccgctgcaacaatggcttcagagaagaaactttcgaacccaatgagggagataaaagtgcagaagctcgttctcaatatctctgttggcgagagtggagatcgtctcaccagagccgccaaggtgttggaacaacttagtggccaaaccccagtgttttccaaagcaaggtacactgttcgttcctttgggattagaagaaatgagaagattgcatgctatgtcactgtcagaggtg

SEQ ID NO: 32856 - DNA, 291 bp, Glycine max
  unsure (1)..(291): unsure at all n locations; Clone ID: 701105885H1
caagaattcatttttttgggaaggtaccaaaccaaaagtggtaatcactgaccctgagcaaatcaaagaagtcttcaacaagatnccaagactttgagaaacccaagttgagtacctattgtcaagttgttgggnctctggaacttggcaaatttagaagggcgagaaatgggcgtaacaacattcgaaaagattattaaacncctgattttccatttnagaaaaaattgnaaggttcatgttnaaccaatattttcttggaatggttggtgnacgattatgggttttccc

SEQ ID NO: 32857 - DNA, 263 bp, Glycine max
  unsure (1)..(263): unsure at all n locations; Clone ID: 701105886H1
tgaagaaagacagancgaatctcttatcgccatctttatctttctagcagtgctctcaactattatcttattatatataatacatatctttcttctcttctgctctttgctatcatagccacttctacataaaactgtgctgccaaccttaatcctaagaagacggggtaggactggagtctgagggatctctttcgaatgtggtgtgcccttggccggggcaaaaagaccaaaatgattctctaaagtggtagctctacgaa

SEQ ID NO: 32858 - DNA, 265 bp, Glycine max
  unsure (1)..(265): unsure at all n locations; Clone ID: 701105887H1
gataactagaaacagtgtgatgaaaatgaaggtccttgttttcttcgttgctacaattttggtagcatggcaatgccatgcgtacgatatgttccctctccgaatgaacactggctatggtgcccgtactccggaggtgaaatgcgcaagttggaggcttgctgtggaagcacacaaccatctttggctttgagaccattcctgaanagtgcgttgaagcaacaaaggaatacatccatggcgaacaatatagatcagactccaa

SEQ ID NO: 32859 - DNA, 265 bp, Glycine max
  unsure (1)..(265): unsure at all n locations; Clone ID: 701105889H1
ctctctttccgcttaaattcttaaccctcctctctctagtcttttctcctttgttcagtcacccaaactaagaaaattccacctacccctgttgtntactaaaataataatccttgttcatttaaataaatatttttgatgagataatgcaaggatctgtagctgaagcagaagcagaagcagaagcaggggatgaggaagtgaagtctacgctccttttcaatggcaaactctaagctgaatatcattctcattcacattctct

SEQ ID NO: 32860 - DNA, 266 bp, Glycine max
  unsure (1)..(266): unsure at all n locations; Clone ID: 701105890H1
ctcttttatatataaaaancagaaaaggatctataactttgtctacacaacacaattanntagcattcttgcaccaaccagaaagatgttgtntgaggcatgatacctgctgtaaccgttttcttgtgcaaaaagcaaattttgtggcacatatgatcatagttttggaagtttcaaaataaccatgccatgcaattcttttaagcccgtgtcaatactgctctgctttagtgtcactctatgcatgttctctgattatggaactg

SEQ ID NO: 32861 - DNA, 259 bp, Glycine max
  unsure (1)..(259): unsure at all n locations; Clone ID: 701105891H1
caccgagcaactaccatngctaccgctccttcgcttctacactcatctgggtcctcttttttctctccaatttcgagcctttcaattctcttcttcttcgctgttccctcatggaaacaggcatgggaatgccgtggtctctgtgaaggcctctgcttctggggttgtgttggtggagaagtctgaggcagagaaggccaataggctcaaaacagcttacactgagaaaattattcccttgctcatggaagagttctct

SEQ ID NO: 32862 - DNA, 269 bp, Glycine max
  Clone ID: 701105892H1
ttccgccttacccaaattcctcaaccaggacaccgattgtcctaattcgggtaattgctagctacttcatggctattgtgttcacattgtggtggtaatagccacaagtttttcacatctcttcacacagagaaccaaaaaggtttcatcttttcaccacccttatcccaaagctttttcatttttggtgggtttttttctcgttcttatttgtagcatattttaaggtttgtttgaaggggttttagcagctattaatatctgtgttg

SEQ ID NO: 32863 - DNA, 269 bp, Glycine max
  unsure (1)..(269): unsure at all n locations; Clone ID: 701105893H1
cttcatttgctaaagaaggaaatctaagtgacctatttgctagagnngaggctatttcaattctgtttaatgttattggaattggaattggaattcaattagcatctactgtatgtgcctcaatgcagggaaagttggttgtggggcctccactatcaattaaacacatatacagcgtttctgaagaaatgagaacaactcctgtcnataccntgaatccacaaagaactgcaatgattgtggctgattttctcaagccaggctgaaag

SEQ ID NO: 32864 - DNA, 269 bp, Glycine max
  unsure (1)..(269): unsure at all n locations; Clone ID: 701105894H1
gatgtttggaaggaaggggcaaaaganaaaggggacagtggtgttgatgccaaagaatgtgttggacttcaacgccataacctccgtcggaaaangcagtgctaaggacaccgccaccgatttcttgggcaaaggcttggacgcattaggtcatgcagttgatgctctcactgccttcgctggccatagcatctccttgcagcttatcagtgctactcagactgatggtagtggaaaaggaaaagttggaaacgaagcctatttggaaa

SEQ ID NO: 32865 - DNA, 278 bp, Glycine max
  unsure (1)..(278): unsure at all n locations; Clone ID: 701105901H1
agaatgggatatacgatttctggaactggtttgatgatcgaacttggtatcccctcggtcgtgtaattggtgggactgtctatcctggtttgacgttgacagcaggcaccttatggtgggtactgaattccctaaacatacctctcncagttgaaactgtttgtgtgtttactgcacctatattctcagcctttgcttcatgggcaacttatcttctgacaaaggaggttaaaggtgcgggggctggcttgacagcagcagttcttctggctatggtc

SEQ ID NO: 32866 - DNA, 271 bp, Glycine max
  unsure (1)..(271): unsure at all n locations; Clone ID: 701105902H1
gctattatcatccgcagctgcttttattcgcaccgcaaacagtgagccatggccgtcggaaagaacaagcgcatctccaaggggaagaagggtggcaagaagaaggcagctgatccctttgccaagaaggattggtatgacattaaggctcctctgtttttcaagtgaaaaatgttggcaaaacctcgtctntcgtactcagggtaccagattgcttctgnaggactcagcataaangtttgagggctcctggctnatctcaaagggngag

SEQ ID NO: 32867 - DNA, 263 bp, Glycine max
  unsure (1)..(263): unsure at all n locations; Clone ID: 701105903H1
caggattcaggacagatttcttaagggcatttagtgtggttggcaacggcgcatctaaagggcattttctagatggttcgctatgnacactggccaaactggaatacaagagacatggctgagaaatgactccccagtggtggncnagacagtaagaaacngncatttntttctcccttctacagaatattngctcttttgcggnnttgggtttaanaaaatatantggaccccaaattancncccntngngcanagaaaaaa

SEQ ID NO: 32868 - DNA, 273 bp, Glycine max
  Clone ID: 701105904H1
agagaaggcaatggatatgaggttgatggatttggactctccattcttcaacactctgcacagaatcatggatctgacggaggacgccgagaagaacttgaacgctccaactcggacatacgtgcgcgacgccaaggcaatggctgcgactcctgctgacgtgaaggagtaccctaactcgtacgttttcgtgatcgacatgcctggcctcaaatctggggacattaaagtgcaggtggaggacgacaacgtgcttctgataagcggcgagag

SEQ ID NO: 32869 - DNA, 270 bp, Glycine max
  unsure (1)..(270): unsure at all n locations; Clone ID: 701105905H1
tttcacgagagaacaaacaaggccttcttcttcaccttttcacattgtgttgcatcatcaccatccatttccattgttagctcctcttaatggttatggcaactgtggggtctgaacctgcttgtgcaagaacggttcatgatgttgcatcttctttcagctctaaatggcagcactcttctacggttaagaagcagccacgtgctcgaattcttcaatgttctctcaggatagagcactnnttcaatagctaacaaaaaggatatctac

SEQ ID NO: 32870 - DNA, 271 bp, Glycine max
  Clone ID: 701105906H1
gtagaacccttccacggtggtgactgcgcgatgggtgcctacaagtatgtttcagagctatggcgcaagaagcagtctgatgtcatgcgcttcttgcagcgggtgaggtgctgggagtataggcagcaaccttccattgttcgcttgacaaggtcgacccgccctgacaaggctcgtcgcttgggctcaaggctaagcagggctatgtgatataccgtgttcgtgttaggaggggtggccgaaagaggccagttcccaaaggtattgttta

SEQ ID NO: 32871 - DNA, 275 bp, Glycine max
  unsure (1)..(275): unsure at all n locations; Clone ID: 701105907H1
ctcctctctccttctacattactntctcttctcctaaaaatttcnaatgcttccattgcttcatctgactcactcatcaatggctctgagactgaaccctatccccacccaaaccttctccctcccccaaatgcccagcctcagatctccccgcttccgcatggcttccaccctccgctccggttcncaaagaggttgaaaatataagangccattcactcctcccagagangtgcatgtnccaagtnanccacttcatgagtccncagangatt

SEQ ID NO: 32872 - DNA, 274 bp, Glycine max
  unsure (1)..(274): unsure at all n locations; Clone ID: 701105908H1
caacgacggcgatggcaaggacccgttttcctcccgcgtgtggaaggatttccgggagaccgaggagaagctcgacgcgttcttcnnnnnnnnnnnnnnnnnnnnnagcggaagcctcgtcagaatgaacgacncacggcggaagcactggtgggaggagaagggatgaacgggggtggctgcaagaggaggaacaagggtggttgcaacagaagggtttggacgatgcagatgaagatgctatatttaaanngatcgacgaggaaagcggagg

SEQ ID NO: 32873 - DNA, 277 bp, Glycine max
  unsure (1)..(277): unsure at all n locations; Clone ID: 701105909H1
gttctgagctgctagaagcaatggagaggaaaagaagccatgcttctttcaccatgtttgcaatgcttgttggattgctctctcagagccttgtcattcctgtaatatccaccactgttgcagatcagaagaactacncacaccccagatccacatgctggaagtccccccacaggctcacacaatagtagtcctccatctcatggccatgggagctctccaccctcacatcacaatagtccaagtactccatcaacaccctcaggtggaaatgtgg

SEQ ID NO: 32874 - DNA, 273 bp, Glycine max
  unsure (1)..(273): unsure at all n locations; Clone ID: 701105910H1
aacaaccccttcttcactttcattcaaaaccaaagtcccacaccgaaaaaaaccntaaaattttagctctccacgtgtatttgaatcaaagtcttttctaatggtttatctgctattattgnaagtgttgggatacaagtcccaagcagaactttatcaagacagcngctttnagntgaggccatcatcataggatggacttgaatcagttttcaagnttcaacgtaattagttcagcaggattccctgcgcatcatcttgtactcctatttc

SEQ ID NO: 32875 - DNA, 276 bp, Glycine max
  unsure (1)..(276): unsure at all n locations; Clone ID: 701105911H1
gtctcttagctttgattctctgttctctgttttgttctgtttcgcntacaggaacttaaacaancgaagactgcaaagggcaagggagcagcgaggccctcaaatcaatcactgaagcctgttgatgaccgaaaggttggaaagcggaaggcttctggtaagcctgagaaaagcagagcaccaaagaaggagaagaaggccaagaaagaccccaacaagcctaaaagaccaccgagtgctttcttcgtgttccttgaggagttcaggaagaccttt

SEQ ID NO: 32876 - DNA, 276 bp, Glycine max
  Clone ID: 701105912H1
gttgaacactgcatagcaaattctgaatggaaatgtgtggagccacagctctgacatggtctcacaccatctgtcccatcgcttcaccttcctcgatccgtctctaccagggaggctaggaggagcttcagtgtttggtgtgtctctgatcaagaccccaagggaaataaaatgatcatatctgtaactggagcaacaggttttattggtagaaggttggtgcaaagattacatgcagacaatcacagtgttcatgtcttgacacgatccaaatct

SEQ ID NO: 32877 - DNA, 273 bp, Glycine max
  Clone ID: 701105913H1
gcttgatgatcaggactccaacgcatcaattgcacatcgaaaccggtcctttggccgcagcactggtagcagagacagtcatagtcatggtaacaatcatagcaataataatacctatcaccatcggtcattggggcattttcgatcactttcgtggagtgtttctcggacttggtctgctgctaggcagctccaagcaattgggaacaacatttatccacctaaggcaaatgagcttatggctctggtggccttgcaatgcctgtgttcatc

SEQ ID NO: 32878 - DNA, 273 bp, Glycine max
  unsure (1)..(273): unsure at all n locations; Clone ID: 701105914H1
gcagtagtgctaagtgctaacacctgcagtgaacaatggcctctgcatcagcatctctgctcaagtcttcacttgttcttgacaagtctgagtgggtgaagggacaaacccttcgccaaccttctgcatcagttgngagatgcaaccccaccaccccatcaggcctcaccatcagagctggttcctatgctgatgagctcgttaagaccgcgaaaacagtggcttcaccaggaggggtattttggccatggatgagtccantgctacctgtgg

SEQ ID NO: 32879 - DNA, 277 bp, Glycine max
  unsure (1)..(277): unsure at all n locations; Clone ID: 701105915H1
gaagaagtgaaaganagcatcagccgcggcggtgttaggtaggcggagcatgggcggcgcctgaatcccctctnctgttacgtcggtgtcgcgaggcaatccgctgcttttcgcctgatgaagcaaatggggtgggaagaagganaaggtcttggaaaagagaagcaggggatcaaaggacacgttcgagttaaaaacaaacaggacactattggtantggccttgagaagccaaacaactgggccttcgacaccactcagtttgataatattctta

SEQ ID NO: 32880 - DNA, 277 bp, Glycine max
  unsure (1)..(277): unsure at all n locations; Clone ID: 701105916H1
gactgcagtaggtgtgggaactgtggggtcatcagaggcaataatgttggcaggtctagcttttaaaaggnaatggcagacaaagagaaaagcagaaggcaaaccatatgataagcccaacatagtaactggggctaatgtgcaggtttgttgggaaaaatttgcaaggtactttgaggtagagctcaaggaagtgaaactcaaagaaggatactatgtgatggaccctgcgaaagcattgaaatggtagatgagaacaccatctgtgttgcagcca

SEQ ID NO: 32881 - DNA, 276 bp, Glycine max
  unsure (1)..(276): unsure at all n locations; Clone ID: 701105917H1
agcggggctcactgaaaaagcagtttcccgaattagtaagtaatgaccggaaaaccactgtcagggatactgaaaaccgccttcatctctgaaatcttgttcgtaaccattaatacaacgttggtagtaactcacaaaagcctctgttccctcccttccttcactttaccatgtccatgaaccaatagtagctacctttcacgancacaaacaaagccactctctcgttttatatggcggancancataacccccaagagttccattcaccattca

SEQ ID NO: 32882 - DNA, 74 bp, Glycine max
  unsure (1)..(74): unsure at all n locations; Clone ID: 701105918H1
ttgtgctgctgcgccactcaggatggtggaaccngcatatactgtganatctgacantgaaaccnntggtnang

SEQ ID NO: 32883 - DNA, 274 bp, Glycine max
  unsure (1)..(274): unsure at all n locations; Clone ID: 701105919H1
caattctccaaatacctaatatggantntcacattcttcncatcattacttttctcatgcttgttgtggcaacnantgcngatgctgcattanctcctgnattttnctggangtccangcttcctaccacaccaatgccgnnagncatcactganttgctacnacctgantngnaggaagagcnagagncctctgtggatgtanggaaaggtggagtnaangntggtgtngnanagggaaaccnaggaccnggngattgcactgatgttaatgt

SEQ ID NO: 32884 - DNA, 272 bp, Glycine max
  unsure (1)..(272): unsure at all n locations; Clone ID: 701105922H1
gggtaaggtcgcgttgtgttgctccgtgtcgtgcgctgttcctctgtctgtcgtttttgttttcagaccaaaccctagctccgcatcgcaaccatgtcgaccaagcaaggtggaaaagctaagcctttgaagaaacccaagtctgataagaaggattacgacgaggttgacatggctaacattcngaagaaaaaggaagaggagaaggcgctaaaggagttgaaagccaaggcgcaacagaagggaagctttggncgttctgggctcaagaa

SEQ ID NO: 32885 - DNA, 189 bp, Glycine max
  unsure (1)..(189): unsure at all n locations; Clone ID: 701105923H1
cccttttgtatttctgggttcgatattgttatcggttatttgtgcactgcttccgccggggctattcaggaatcatggctagggttttggctcagtctgntaatgtccctggtctagtggctgagcataggcatggtcagcaaaagggatcaggaaaattaaaaagatcgaccaanatgatgagtgctt

SEQ ID NO: 32886 - DNA, 275 bp, Glycine max
  Clone ID: 701105924H1
tcctcttcctcttcctccttcttccccgcccatatcaccaccgaccaagaattctccctcatacgttgccgccctcaccaacgtcgtctccggctctacctccagctcctccgtccctgaattccgcttcccgcactcctccccgcctctttcttccgccagccttatgccgccacccccgcctagcatccacacgtgtcgcgagtgcaacatcgcaggatgcctgggatgcaactttttccccgaggaacaaaggaagaaatacagaggagtta

SEQ ID NO: 32887 - DNA, 145 bp, Glycine max
  unsure (1)..(145): unsure at all n locations; Clone ID: 701105925H1
cnacaacttgctcacngtcatttactngatcnggtgagagancnccnactctctnnatacaatcatcttcatgtntntctccaatctgacttantgtacantacatatgcactgagatattaaggcattnggntttgnnccttgg

SEQ ID NO: 32888 - DNA, 275 bp, Glycine max
  unsure (1)..(275): unsure at all n locations; Clone ID: 701105927H1
gatggatgactgttgtgccgtttgcnctgagcctttggaatgggttgcgtacggaccctgtttgcaccgggaggtgtgttccacgtncctcgctcgnacaccgtttcatctgcnacgatcgccgttgctgcatctgcaagaccgaatgcaacctcgttttcgtcaccaaggctctaggtgattatacgaggatgatcaatgattttncgacccttcctttggaggcgagggagggcaaggttngatcatattggtaccatgaggatacaaatgca

SEQ ID NO: 32889 - DNA, 275 bp, Glycine max
  unsure (1)..(275): unsure at all n locations; Clone ID: 701105928H1
caagagaganaaaaaaaatcacacaatttctgtnaagctaaagcttgtggtttctttctcattctctcaaccaacggtgaaagaaagaagagagtgagagaagagaaggtcctgaggtaaagatacaagctttgctcttctgctcactggatcgggttccaggaattcaagggtaggttcaaaaggggttgtgttgatctgcaccaagatgcttaatttgcgttgaaaaatccattcntttgcgagacttagctcggagatgaaccagttagttg

SEQ ID NO: 32890 - DNA, 274 bp, Glycine max
  unsure (1)..(274): unsure at all n locations; Clone ID: 701105929H1
tcttcaaggattagcaacgcaaaaatcattctaattatagattgtgnacatgtactcaaaccattcacaatcagtgagagatgccctttgttttntcatggatgaagagaaaggccaagaaattgcttttgtgcagtttcctcaaaattttgagaacctcggtaagaatgatttgtatgggaatgctatatcagcaactgtggaggtggagctccatggtgcggatggttatggtggcccttgtttattggaacttgttgctttcatagaagag

SEQ ID NO: 32891 - DNA, 275 bp, Glycine max
  unsure (1)..(275): unsure at all n locations; Clone ID: 701105930H1
gtgagctataagctagtttatcgtgaggagaatatgaagttgtttgttnttctttgttgctgcagtagttttggtagcatggccatgccatggcgcaggctaccaaaggttccctctccgaatgaaaactggctatggtgagcgttcttcggaggtaaaatgcgcaagttttaggcttgctgtggaagcacacaacatccgagcctttaanaccattcctgaagagtgcgttgaaccaacaaaggactacattaatggcgaacaatttagatcag

SEQ ID NO: 32892 - DNA, 274 bp, Glycine max
  Clone ID: 701105931H1
atccttgttagcagctgcagctgccggcaaccatgtcaagcccagcagccatggctttggttgatgagagactcagcactgaaggaactgggctccctttgggcttagcaacaacctcttggttggatcctgtttggtgtctttggtctcatatgggctctcttctttgtctacacttccacccttgaagaggatgaagagtctggattgtccctctaaacccccatgtgatgatgcatgtattgtagaaattgcaaagagttatgtcctttct

SEQ ID NO: 32893 - DNA, 272 bp, Glycine max
  unsure (1)..(272): unsure at all n locations; Clone ID: 701105934H1
gaatcttagtgcatcaagatctctgtctctctgtctctctgcaatcgaaaatgagcaagggaccgggtctcttcaccgatatcggcaaaaaatccaaagatcttttgactaaggactacagctccgatcagaaactcaccgtttcctcctacagcgtctccggagtgaccctcacttcaacatctgtgacgaaaggagggatctcaacangggatgtggcagcctggacaagtataagaacatggtattgatgttaacntgacacgnatnaa

SEQ ID NO: 32894 - DNA, 80 bp, Glycine max
  unsure (1)..(80): unsure at all n locations; Clone ID: 701105935H1
ctttttgtacttggtgcctttatttaatcagcatataaaangagattngtccttctaaccacgaatncnctannanccat

SEQ ID NO: 32895 - DNA, 269 bp, Glycine max
  unsure (1)..(269): unsure at all n locations; Clone ID: 701105936H1
ggaccaaacagcatccgcggcagcgacggtaaccctccaacaacaacacttccgctgcgaaaaatgtctctggtggcgaacgaggatttccagcacattctgcgtgtgctgaacaccaacgtggatgggaagcagaagataatgttcgcaatgacctccatcaagggtattggaaggagattcgccaacatcgcttgcaagaaggctgatgttgacatgaacaaaagggctggtgagttgactgctgctgagntggatagtgtgatgat

SEQ ID NO: 32896 - DNA, 266 bp, Glycine max
  unsure (1)..(266): unsure at all n locations; Clone ID: 701105938H1
ttctgcttgaagcaaagtttttggctagaaatttagtgtntttnctctgtncactatcctcttngaagacatngtgaatccgggattgttttctgcgaataagtctacnaattcggtgaaagtaagctttcggataccgtattncacccaatggggtnagnncttgctggtntgtggtctgnnccanttcttagntccnggaatgtnnagaaggtgtgtgctcagccccgttcatnaangggctgagctcanatggggtngaagtt

SEQ ID NO: 32897 - DNA, 270 bp, Glycine max
  unsure (1)..(270): unsure at all n locations; Clone ID: 701105939H1
gatcattctctctcagtgctctcgatctccatctgcaacttccttgtctgacagatcctgtgttccggagaaaggaaaggaaaggaaagatgtcggggcaaacgcagcgtctgaacgtggtccccaccgtgacgatgctgggagtggtgaaggcccgattggtcggcgccacgcgcggccacgcgtacctgaagaagaagagcgacgcgctcacggtgcagttccgccagatcctgnagaagatcgtctccanaaaagaatccatgggcg

SEQ ID NO: 32898 - DNA, 272 bp, Glycine max
  unsure (1)..(272): unsure at all n locations; Clone ID: 701105940H1
gtggaaattaaaagaaacttctgcatcgaccacctcgtcacttcttcttcctcttccatttccatttctcggtgttgttgttcttcatccatggctttccctcagcaccacttccaacggcactaccaaagcnnnnnnnnnnnnnnnnnnnnnnnnnnnnnnnnnnnnnaaaccaaaaacttcagaaatctgcaaacaatcgatggtcagatgtcacagcaggtggcgttttacaaccccactgatttgcaagagcagtcccaacatccacc

SEQ ID NO: 32899 - DNA, 270 bp, Glycine max
  Clone ID: 701105941H1
accaaacaccttgtccgtggacttcatcaatttggttgaggcggaagtagctaggttagaagcgttaaaatcaagcaagatgaaagagcttgtattaaagaaaagaacagagctggaggagatttgtcgaaagactcatttgattccagaaatagataatgcagtggaatccgctgttgatgccatagaatctggatctgtggaccctgcttgcattcttgaacaaattgaacttcagatttcccaagtcaaagaggaagcttttggcag

SEQ ID NO: 32900 - DNA, 234 bp, Glycine max
  unsure (1)..(234): unsure at all n locations; Clone ID: 701105942H1
tatgcaagcttcntgcaggtttaatgcngtttctgtggggtggtcaagntgcactnanttcnatcancttcantgcnagctcacaanttggatcggctctcgnatgaaaccattattcattgttttaatgntgaatatatngtgtatgacnnctaagacgtcggtngcaacantagnagaaattctatgtgnngnataagtatgcntgntagtctgntgcngnataaatcaagg

SEQ ID NO: 32901 - DNA, 274 bp, Glycine max
  unsure (1)..(274): unsure at all n locations; Clone ID: 701105943H1
attttttccgactcggagtttgagccaggttctgaacatgatggaccaggtcatggacaattccgttcctctccgcgtcgcgcgggatcggagctggcgctggagtgcgtcgcggatgggacgcgagggagacagaggatgctctgcatctgcncgtggacatgcctgggctcggcaaggaagacgtaaagatctccgtggagcagaacactctcattatcaaaggtgaaggtgctaaagaaggcgatgaagaagagagcgctcgtcgctacac

SEQ ID NO: 32902 - DNA, 273 bp, Glycine max
  unsure (1)..(273): unsure at all n locations; Clone ID: 701105945H1
cagaatgttgtcaagaaaccaaagacatttgaatcaactccaangaaaaaatatttcatggttatagggatcaatacagcttttagtagcaagaagcacagagatactgttcatgcaacttggatgccacaagttgtggaaagaaagaagttggaggaagaaaagggcataatcatacgattggtcacggttctacatctggtgcattcttgacaaagctattgaagtagaggagaggcttcatgctgactttttgaggctgaaccacattga

SEQ ID NO: 32903 - DNA, 277 bp, Glycine max
  unsure (1)..(277): unsure at all n locations; Clone ID: 701105947H1
ctcncccgacnccatgctccaagaaatcncgntccnnattntcgcccaatnggcttcattacatcggccaaacccnactccctcaaatctccactctccactccgtcttccttccgctcccttgactcctaccagcccctccgncgtcngcatcgnngtcctcgttcgnngccatcaacttcanccaatggntcncgnnnncctcngacagagatggcttncaatanctgtccctctcatgatgcanattctnaccgnggcgctganttcggccngg

SEQ ID NO: 32904 - DNA, 272 bp, Glycine max
  unsure (1)..(272): unsure at all n locations; Clone ID: 701105948H1
aagtnagaagagtgtattgtgttgaagtatcaaagatgttgattgnttctctcttaaacaggcgncctaanatcaaggggactgtggtgttgatgaccaanaatgtgttcgacgtcaacgacttcatggcgactactaggggcggaccagccgctgttgccngcggcatctncggtgccgcccaggacatngttggtggaatagttnagggtgctacggccatcttnatccgtnncattgccatncagttnatnngtgncaccangncngac

SEQ ID NO: 32905 - DNA, 273 bp, Glycine max
  unsure (1)..(273): unsure at all n locations; Clone ID: 701105949H1
aatggagaaccggttaagaggaagtggtcacggaattgcagctgcaaggatggatgcaaaactaaatggcagcaggttggatgtcagaaaagatgggaggtctcagttaccttgaattcctccgaacacttgaagagagagttgatcaagattgggccgatatctcatcatctcttgaggagatccgcaaatctatatttccaagcaaggctgcttgataaatgtcactgctgataagnnaaacttgcaaagacagaaaagntctgagcaatt

SEQ ID NO: 32906 - DNA, 271 bp, Glycine max
  unsure (1)..(271): unsure at all n locations; Clone ID: 701105950H1
gcgacgttcttcttgcgtttgatgaggaagnaagcgacaataagggagaccaaaacgacaccggannactgcacctgcgacggcggcaagagttcttgtggtgtcgctgcttttcttttttgagttttcaacaggagccttgggggtttgtaaaggaaggtctgggttcggtccggcaagattacctgttgattcgttaattttgaagagttcaagggcgtttattgtncgtccttgangttgcttgagggtgaggatgcagttcagtgaa

SEQ ID NO: 32907 - DNA, 261 bp, Glycine max
  unsure (1)..(261): unsure at all n locations; Clone ID: 701105951H1
gcctaatttccagaggccactattgagaaagaatgtagctggacgtgtgtctgctngnagcaggaggagttttgatgatagccaattatctcttggagagatgtcaaattatgcagatggcccagcatctcttcatgaagctctgagtgaaggacttagctcaggttctgactggtccgctagggttgctgccttaatatcttcactctttgtttgagccaggtcaaaagggaattcaagaagtagtccagaattttgaat

SEQ ID NO: 32908 - DNA, 267 bp, Glycine max
  unsure (1)..(267): unsure at all n locations; Clone ID: 701105952H1
gaataattcgatacccctctcgtctcgtaactaaccatggcagcgttccgatggaagagcttcgaggagaatgaggatcgcccagccaagcctcgtcattttggcgtcaccgagattcaaagcccccatgcactctcttctcccacaaccttcttcaggatatttttgaatctatgggagactatgtagatggngtaaagtttctggaggttctcacagcatgatgccaaaggtactatcaagcaaatcatgacatgggccatcagc

SEQ ID NO: 32909 - DNA, 272 bp, Glycine max
  unsure (1)..(272): unsure at all n locations; Clone ID: 701105956H1
gtgccatcaagtgtgcctggagaagaaagcccttcaactaacggagagggnnatattagtagtgacaatggtaatggtaataatgaaaacaaggatgaaaccggaggaaattcgccgcagaaggttgccaacaacatattcagtattcctctctcgaatgtggagcgtctaaagtcgacactttccacagtttcattgacncaattgattganctgctaccgcagctggggagaacatctaaagaccatcctgataagaagaaactaatctc

SEQ ID NO: 32910 - DNA, 274 bp, Glycine max
  Clone ID: 701105957H1
gcaaccatggcaatggcaacccaagcctctctcttaaccccacccctctccggtctcaaagccagcgaccgcgcctccgtgccatggaagcaaaactccagcctctccttctccagcccgaagcccctcaagttctccagaacaatcagagcagcagccgccgacgagaccacagaggcaccagcaaaagtagaggctgcaccggtcgggttcaccccaccagaacttgacccaaacaccccttccccgatcttcgggggcagcaccggcgggc

SEQ ID NO: 32911 - DNA, 273 bp, Glycine max
  unsure (1)..(273): unsure at all n locations; Clone ID: 701105958H1
tcgcaacagagcagtagcgagaactcctccacccgctggaacanncaggagcactggatcagncaggagtcaagagatattccggtgctttacctacttcaaanctctccaataatttttcttccatgaaattacatcctcctttagcttcaggtgtgcaacggaagctggatatggtaaatcaggatggaattaagaacgaaaaaccaatgaggactactaaaccaaaatatcgtcagccaggaaaggacagcccaacttctatgaacaaag

SEQ ID NO: 32912 - DNA, 265 bp, Glycine max
  unsure (1)..(265): unsure at all n locations; Clone ID: 701105959H1
caagggtgagggccttccatggcttccgcttgtgcttcctctgcaattacagctgttgccatgctactacgccgagttccgggcagaanaatggatcaggaggttgttttcttagtggaaggaaattgagggtgaaaaaggagagagcagcaattggaggacgatcgatgggcactacagtgtgcgcagttgctgagcctgacagacctctatggttcccaggcagcacccctcctccatggcttgatggcactctacctggaga

SEQ ID NO: 32913 - DNA, 273 bp, Glycine max
  unsure (1)..(273): unsure at all n locations; Clone ID: 701105960H1
ggcgcaagtnaggaacaagcaagtgcttctaaaggactatgttaccggttttcccaaagaatccgacatgantattgttcgaaagtaccataacattgaagcttccacaaggttccaatgatgtcttgctcaaaaatttgtatttgtctgtgatccgtatatgaggaatctcatgaacaggcccgaaggccctcccaatagtcgtgcttacactcctggctctccattaataggatatggtgtgtctaaagtcctggaatctgggcacccaga

SEQ ID NO: 32914 - DNA, 270 bp, Glycine max
  unsure (1)..(270): unsure at all n locations; Clone ID: 701105961H1
ggggttcaattctagctagttctattacatcgtccgcnaccatgaacatggcgatcgtgcttctgttcatggttttcgcagtttcatcagctttagacatgtcaataatatcacntgacaacgctcatgcggatagggccacgaggcgcaccgacgacgaggtgatgtcantgttcgaggagtggctggtgaaacacgacaaggtgtacaacgcgctcggtgagaaggagaagaggtttcaaatcttcaagaacaatctgcgctttatcg

SEQ ID NO: 32915 - DNA, 250 bp, Glycine max
  unsure (1)..(250): unsure at all n locations; Clone ID: 701105962H1
gttcatcgtcccactttcttctcacnttagggtttcctttactgtttctcctttccagatangcatcttccattttttaggattaagcggtgagattcgtgaatctgagaaatgtcggattcttctcgggaggagaatgtttacatggcgaaattggcggagcaggccgagcgttacgaggagatggttgagttcatggagaaggtagcaaagactgtggaggttgaggagttgacggtggaggagagaa

SEQ ID NO: 32916 - DNA, 272 bp, Glycine max
  unsure (1)..(272): unsure at all n locations; Clone ID: 701105963H1
gtttttcattgtgcattattcaatggccaccacagcagctctatccggaaccatggtgagcacctccttccatgaggaagcaacctatgacgaccaagagcctaaagacattccccaacgctctttttggtctgaaaggtggacgaggtggtcgtgtaacttgcatggcctcgtacaaggtgaagntcntaaccccagangggaagtggantttnaatnnccnnnngtgtttncattgttgacaaggctgaggaagaaggcttgancttccc

SEQ ID NO: 32917 - DNA, 267 bp, Glycine max
  unsure (1)..(267): unsure at all n locations; Clone ID: 701105964H1
ttgtctcagagtttccaaattcacccaaccccagagagaaaatgtctctaatacccaaatttcttcggtggcagaaggagcaacgtnttcgatcctttttccctcgacgtctgggaccccttcaaggattttcctttcccaaacactctttcttcagcttcctttcctgaattttctcgggaaaattctgcattcgtgagcactcgtgtggattggaaggagaccccagaagcacacgtattcaaggctgatattccagggctgaag

SEQ ID NO: 32918 - DNA, 277 bp, Glycine max
  unsure (1)..(277): unsure at all n locations; Clone ID: 701105965H1
ctcgggntccaaanagagcntttgattcccaaatccctcgtcccattgaacagtgatcagttatattcgcgttgcgatctattccaattccatgacgacaccaccgncttcctcctcagcttcgcactcgcaattcgcctattcaaacnnnnnnnnnnnnnnnnnnnnnnnggtccctntcaccttcagnaacccggaaccantcatacgctgcgccctacgncggtgncccctcngtgcaaattcccgctctcccgntgtggggccatggttccgg

SEQ ID NO: 32919 - DNA, 136 bp, Glycine max
  unsure (1)..(136): unsure at all n locations; Clone ID: 701105966H1
gccgtgcctcanattttggtctgatgaggatagacaacaagggaaggntcctttcatntagtgaaaagcccaaagganangngttnaanccaangcaantggnnccaacgtnntggggccttnnaaagattaagct

SEQ ID NO: 32920 - DNA, 246 bp, Glycine max
  unsure (1)..(246): unsure at all n locations; Clone ID: 701105967H1
gatggagtctctggtaatcatgctacctaaggaactgattcanttnncctccnncagaactcctccnttaaggaattaggnttgnntcttatagagaaatgcttacgaagattgaactnngntcagtttgtacataggagagttctgaagaggaaaatgatggagtctctggtaatcatgctactaaggaatgattcatttagctcnaatggggcaaaatttatcggggaagtactcaatngtcaa

SEQ ID NO: 32921 - DNA, 267 bp, Glycine max
  unsure (1)..(267): unsure at all n locations; Clone ID: 701105968H1
aagagagagagagatggcatcgttttgtgctgcaaggactttcaacattccggcgatgaacgccggcgttcttcgccgccgggcatcgtgggccgccggaatagtcggagcctcggtggccggcgctgcacttttgcgctcttgttcgtctaagcgctctgcgccattcgcttgcatgagcctctcncactgataccagtttaaaggaagctgtcccaaactgaaaangccccagcggcattggggccatatctcaagcaatcaaag

SEQ ID NO: 32922 - DNA, 237 bp, Glycine max
  unsure (1)..(237): unsure at all n locations; Clone ID: 701105969H1
cattcgctctcatttttcatttttctttttctattctttgcttcagtggccttaccagtgtgttgctcactgagaaaccaccaattttcagcatgacaaagataagtcctgaagttgaaatcaggatgccaatggaggcatttccaccagtttcagctgatgtgagctttatttctaatagttttccgaaatacaaacttgatgngttccaatcaagttctggaagagccagttgag

SEQ ID NO: 32923 - DNA, 266 bp, Glycine max
  unsure (1)..(266): unsure at all n locations; Clone ID: 701105970H1
attcctaattgtttaancctaattctcatttcttcatcgttcgattcttctcctcctaaagatgcagatcttcgtgaaaactttgaccggtaagaccatcacccttgaggtggagtcctccgacaccatcgataacgtgaaagctaagattcaagannaggaagggatcccacctgaccancagagacttatctttgcgggtaaacagcttgaggatggtcgaacccttgccgactacaacatccaaaaggaatccactctccacc

SEQ ID NO: 32924 - DNA, 267 bp, Glycine max
  unsure (1)..(267): unsure at all n locations; Clone ID: 701105971H1
caccacttcatcaactttacttgacaacaatattgtaaaactcaaaatctagtttcannnnnnnnnnnnnnnnnnnngaaatggctctccaggctgcttctcttgttcctgcttctttctcggttcttaaagagggaaagagtggtgtgtctctcaaggactccaccttgttcggtctttcattttcagaacctatcaaagctaacttcagctcttctgcattgaggtgcaagagggaattcgaacaaaagctctgtgctgtgaggg

SEQ ID NO: 32925 - DNA, 267 bp, Glycine max
  unsure (1)..(267): unsure at all n locations; Clone ID: 701105974H1
gtcgtggccgtgtcgcagcaaaaccaaaccacatattancttgtntgctctaagtcatggctctgatcttgcacgcaaccaaagcaaacaagaatgctttcaagactctgattgcggcagagtacagtggcgtccaagtggaattggcccctaatttcgagatgggtgtctctaatagaactcctgaattccttaanatgaatcccataggaaaggttcctgtctggaaacgcccgatggtccagtctttgagagcaatgccattgc

SEQ ID NO: 32926 - DNA, 268 bp, Glycine max
  Clone ID: 701105975H1
aaagaccatgtcggtgaaggagtgcgagcaccacaaggggaagaagaggaagatcttccggcaagtgttctggtgcttagtggtgttccttctcatcgtgctggtcacaattcttttgatatgggcaatccttagacccaccaaacccaccttcacgctccaagacgtcaccgtctacgccttcaacgccaccgtggcgaacttcctcacttcgaattttcaggtcacgctcatctcgcgtaacccgaacgaccgcatcggtgtttac

SEQ ID NO: 32927 - DNA, 267 bp, Glycine max
  unsure (1)..(267): unsure at all n locations; Clone ID: 701105976H1
cactctcaaccctccttaaaccctaacnaatccaaccatggcttcttcttccacatncantgaaantnaaaantgnaagctctcctcctncgccgcnatntcctccttccccttncgnngncgctcnaacgcngtngttntgtngnggcgcacgagacgtcagggtctccgccatngccaaggagttgcacttnaacaaagacggcaccgcaattaagaagntccagagcggtgtgnacaagtcgnggatctagttggggtcagctt

SEQ ID NO: 32928 - DNA, 269 bp, Glycine max
  unsure (1)..(269): unsure at all n locations; Clone ID: 701105978H1
gaagtttggttcagcattcgtgggggaagataagagaactccacaccatatccgttctcgctcctctacgaattttcatatccattcatatttttctcatcatggacttggccgcgaagttcaccgtttncacctcaccggcgtggtcatttnggacgcacgaaagccctccgtactccgccaccttccgccacgcatcctcaccaaaacaaacaccaatttaatctacacgaaccggttctcgggcccaccgaggcccaattccgctt

SEQ ID NO: 32929 - DNA, 266 bp, Glycine max
  unsure (1)..(266): unsure at all n locations; Clone ID: 701105979H1
ggcagcgtcatcagcatgccttgtagggaatggtttatctacacggggtaatagaataactctcaagaaggacttcaatggaagatatctctactcaccttggagactttcatcatngancaataaggcatcagaagcattttccataaagtctcctggagcaaaggcaacaacaagaagggagaagggggtttctaaaactgttgctngaaatgtgggagttggtttgcctgcactattggcaatggcaaagcttatgcngatga

SEQ ID NO: 32930 - DNA, 272 bp, Glycine max
  Clone ID: 701105980H1
ctttcctggaaaaaaattggaacctgcctctcttaaagtttgtatctttttgagtgggtgggttgattgagagtactgtgcaagctttggaactttgtcccaacctgctacttcaatggctactgcaagaggttaacaaacctcaatcacttcctccataccctgagatgatagtgaaagcacttgaagcactgaatgagccaaatggatcgaacaagtcagcaatatcaaagtacatagaaaccacctacggtgagttgccagacgcaacc

SEQ ID NO: 32931 - DNA, 269 bp, Glycine max
  unsure (1)..(269): unsure at all n locations; Clone ID: 701105981H1
gccaaccttcctgttcttgaaagaaggcaagctggtggacaaggttgtgggtgccaagaaagaggagctgcaattgacaatagccaaacatgccgcaattgctgctgcttgaagtgccatatgaatatgttaagaataatagactattgtcttcgagtcagtttgcttttattactattaatctgttattgggtctgtttgcatgatttcagaacggatttagagtnagtaaaacanggatgggttatgtgtaatgnnttgttgcacta

SEQ ID NO: 32932 - DNA, 266 bp, Glycine max
  unsure (1)..(266): unsure at all n locations; Clone ID: 701105982H1
cagattttcatgctcctcctttcattaaattaaaggtagagattccanaaacaagncaaaanaaaangagcaggaagagattttnnnnncttnncaanttgaatcatntatnatctatgaaaagcccttgactgatgcgncccaaatccaaaatngctatanttnctgttcagntctggctagtggctacaaaancngtgtacaaattncnggtaatgcattcatgccctgtntgctagaaggnaannagaaancaatntgtactc

SEQ ID NO: 32933 - DNA, 250 bp, Glycine max
  unsure (1)..(250): unsure at all n locations; Clone ID: 701105983H1
gagaaacattgcataacagtttcgtttctttggttgtacttctgctcttaaactttgtttaataggcttagtaatttatgttaaattgtgagtttgtctgaatatccaagtaattattacttggctatgtggaaacccattattggcccaattggtgtacgactttcattgcatattcgattctatgcaatcaacttagttcagttgtaatttggtcactaaatgaacttgaattggtgttatagtaana

SEQ ID NO: 32934 - DNA, 264 bp, Glycine max
  unsure (1)..(264): unsure at all n locations; Clone ID: 701105985H1
ttcctaattgtttaaacctaattctcatttcttcatcgttcgattcttctcctcctaaaggtacgtctctggtttccnctctctcttgttcattcttttcgtaatagcaaccttattagccttcgtttattgatttntctcctaattacacttnaattttctcgntttgtgtntgttacgtcaatctgtatatcnnttatgtngtcgncgaatccgaaactnnncattcgcnttnctgattccgnnnnncgtttgtnaagtgca

SEQ ID NO: 32935 - DNA, 199 bp, Glycine max
  unsure (1)..(199): unsure at all n locations; Clone ID: 701105987H1
tcgaaccgaatcggntcgnncaaccctcnaaannanaacaccagaacggaaacaacnacagtncantgngagttttacaactctcatagtagnagtagnactactacttcanacnctctctctctgagtgcctcacacnaacgattcagtgatatatntancaatggaggnnctcaatgctgctggcttgacnnctcta

SEQ ID NO: 32936 - DNA, 250 bp, Glycine max
  unsure (1)..(250): unsure at all n locations; Clone ID: 701105988H1
atggatccgaatccgaaagcctccncggagttccgacccggaacccgcttcgcgtgaagaggaaccccccttgaggccgtgctcttgcagtgtcagagagctctcgaattgattaacgctacttcttctactgctgctgacgtggacgaagaggattccgaggttgaaggtgaagccagngcttcagctgatcccgatgccgacgagttatgtgatctgctgaaatctagagttgaatgcccggcctttc

SEQ ID NO: 32937 - DNA, 267 bp, Glycine max
  unsure (1)..(267): unsure at all n locations; Clone ID: 701105989H1
ctcttgcggctagggttttagcgcanttcttctagatttaaggaagatgggtaaggaaaaggttcacatcagtattgtggttattggccatgttgactctgggaagtccactaccactggccacctgatctacaagcttggaggcattgacaagcgtgtnattgagagatttgagaaggaagctgctgagatgaacaagaggtctttcaagtatgcctgggtgcttgataagcttaaggctgagcgtgaaagaggaatcacaattga

SEQ ID NO: 32938 - DNA, 263 bp, Glycine max
  unsure (1)..(263): unsure at all n locations; Clone ID: 701105991H1
tttgaaaaaaccatatatgaaagagctcccatcttattgtttcagtgatatattaataataaccanaacagcagagagaaggagaagggtacacanacaccatcnctaatggcnctcaggatgtgggttcttccatgccnatgcactcaaactctcttctgtctccagaactcatctctgcctccttttcttttncagangcttatntccgtctggatggactnagtacgcngantccctgaatgggtcaagcacgaagntca

SEQ ID NO: 32939 - DNA, 268 bp, Glycine max
  Clone ID: 701105992H1
aacaaagaaaaaaaaaacccttagccaacacaaccatcatggccacctctgctattcagcaatcagcattcactggtcaaactgctctgaagcagctcaatgagttcgtccgcaagaccggtggcgccggcaaaggtcgcactaacatgcgccgcaccgtcaagagtgctcctcagagcatttggtatggccctgaccgtcccaagtacttgggtccattctcggagcagattccatcatacctgaccggagaattccctggtgacta

SEQ ID NO: 32940 - DNA, 267 bp, Glycine max
  unsure (1)..(267): unsure at all n locations; Clone ID: 701105993H1
gttggagcngagattncnaagcaaancatgnaggaatcagatgtagacagaaataatgatttaacactccgtcattctaagatgcatngcaattccagtgtctcagaaatanntggcaaggagggccaagattgtctggacaaaaaatgntctagctcncttacaaacacaacagatagacntatngaaatgattagaaattctgaaattacagaagcagttatcattgatagcaagtgtgatagcttaactttgaatggtgaaggc

SEQ ID NO: 32941 - DNA, 268 bp, Glycine max
  unsure (1)..(268): unsure at all n locations; Clone ID: 701105994H1
ttggtttagagagaagaaaacgttggtcggagaacattaccggaaagagaatctttgttgattccagaaatgtctagcatcgcttcctcacaccaaagcttcctcaccaacgcccttattccactaacgcacaacccaaagttcaggaccactgttactttcccttcttcactcaaaactgtctcttgcagttccccacaacatgaacagnaacaatctccaaggaagaagaatgagaacaagttagcaaagttggcaatagttgcat

SEQ ID NO: 32942 - DNA, 256 bp, Glycine max
  unsure (1)..(256): unsure at all n locations; Clone ID: 701106001H1
aagatcgatcatggcttctatatcctgtctatcctctttctccctctccaatttctctgcacctcttcccatttccatttgttcttcatcttccancttcntaactncttcaataccatgnaaacccancaaacgtagcaaaccanaacgccancacgtttcgaaagtganatgcaacagtaaccnanacannccnncancaaanccagaannaganagaccatcatagaanattntagggaatatagatggnngt

SEQ ID NO: 32943 - DNA, 251 bp, Glycine max
  unsure (1)..(251): unsure at all n locations; Clone ID: 701106002H1
ttcaaggccgggtcccagatcttcagcgagggtgggctggactacttgggcaacccaagccttgtccacgcccagagcatcctgcgccatctgggccacccaagttatcctaatgggtgctgttgagggttatcgtattgntggtgggcccctcggtgaggtcactgacccaatctaccctggtggcagctttgacccattgggccttgctgatgacccagaggcttttgctgagcttaaggngaaggaat

SEQ ID NO: 32944 - DNA, 250 bp, Glycine max
  unsure (1)..(250): unsure at all n locations; Clone ID: 701106003H1
agtgccaccctagggttggggcttggattcgctatgccaagtttganatgaagaatggcgangttgtgaggncgaggaacgtgtacgananagccgtggataagctctccgatgatgaggnancggngcagttntntgttgcttttgctgagtttgaggaaaggtgtaaggagactgagcgtgcaanggccatatataagtntgctcttgatcatattcccaangnaagggcggaanatttgtatcgtaa

SEQ ID NO: 32945 - DNA, 248 bp, Glycine max
  unsure (1)..(248): unsure at all n locations; Clone ID: 701106004H1
tgtaatatcattgttccttctccctctgacatccctttnnattncttcctcccntcctantagtattcagnaacttttgaannacacagctaatatgaagttcaaggattctgcagacaatcattgcctggcttctgaagacttatgtaaccaaaaagagaatctttttatggtacatagtaggaggggaggaagcaatcnnaagatgtatcntaatgaatggttggatactattgactggaaccnga

SEQ ID NO: 32946 - DNA, 245 bp, Glycine max
  unsure (1)..(245): unsure at all n locations; Clone ID: 701106006H1
tgaatcgtaggatctgttattctgttagcatgttccgttcatcgttccgccgcgcgttttcggcgagggcgtcgaagcactgcgagaaccacgagttcctctctcggaactcgttcctggggagctgggaggcgccacgggacccgaaggaggcggangcgaactggcgcggctgcgaagggaatacgcgaanaagtgaaggaggttcggaaggaatacataagagagatggaagcgatgaagat

SEQ ID NO: 32947 - DNA, 249 bp, Glycine max
  unsure (1)..(249): unsure at all n locations; Clone ID: 701106007H1
tcgccgcttcagcgtancaaacatgatcattcccgagaagaaccgtaaagagatctgcaaatacctcttccaagagggagtttgctttgcgaagaaggacttcaatctggcgaagacccggagattgatgtgccgaatctgcaggtgataaagctgatgcagagcttcaaatccagagagtacgtgagggaaacatttgcgtggatgcactattactggttcctcaccaacgatggaattgagttcctt

SEQ ID NO: 32948 - DNA, 247 bp, Glycine max
  unsure (1)..(247): unsure at all n locations; Clone ID: 701106009H1
acaagatggggttggaggctgcagtggaggcagcggcagaattccttaacaaggcagtgaaaccagtgctggtgggtggtcctaaactgagggtgncaacggcatctgatgcctttgttgaactggctgatgcgtgtggttatgcgcttgctgtgatgccatcggctaaagggcaggttccagagcaccatccccatttcatcggaacttattggggtgctgtgagcactgccttctgtgctgagat

SEQ ID NO: 32949 - DNA, 246 bp, Glycine max
  unsure (1)..(246): unsure at all n locations; Clone ID: 701106010H1
ctctctagagttcttatttcctctctctagaattttctatccgttcatccccctgcacaaattagggtttntgngaatcttttattgtctgaaatcgnatccanngtttnagccatggtntccgattcaancgccgcngtgccgattccctccgncgcaaacaccagnannccggggnanaagaagangannaacaggtncgcgaaattgangcagtanaaaatcgatncncgcngcgancaatng

SEQ ID NO: 32950 - DNA, 246 bp, Glycine max
  unsure (1)..(246): unsure at all n locations; Clone ID: 701106011H1
gtttatcgtgaggagantatgaagttgtttgttttctttgttgctgcagtagttttggtagcatggccatgccatggcgcaggctaccaaaggttccctctccgaatgaaaactggctatggtgagcgttcttcggaggtaaaatgcgcaagttttaggcttgctgtggaagcacacaacatccgagcctttaaaaccanncctgaagagtgcgttgaaccaacaaaggactacattaatggcgaa

SEQ ID NO: 32951 - DNA, 192 bp, Glycine max
  unsure (1)..(192): unsure at all n locations; Clone ID: 701106012H1
tnttaggtgggattcaggagtcaatgacaganatagaatgcgggntggaggatcgacacaaccatntagagattttgctgctggtaantgcagaanacgnanccaatgccattttcntcatgataatcnnaatcatgangatanntgggannataagtacanggaatntggnactcncaganatnctgctcc

SEQ ID NO: 32952 - DNA, 250 bp, Glycine max
  unsure (1)..(250): unsure at all n locations; Clone ID: 701106013H1
ctgcattactctctcactctcttttaggctcactcaccaacactnntttcactactttcattacgaacgtatattatatggctcctgaacttgtccccaccgttgcgttcacgaaacccgcaacccttccaaggcgtgcctacgtgacattcctcgccggaaacggtgactacgtgaaaggggtcgttggtcttgccaaagggttgcgaaaggtgaaaaccgcgtacccattggtggtggcggtcctccc

SEQ ID NO: 32953 - DNA, 250 bp, Glycine max
  Clone ID: 701106014H1
acattctcagtctctgcacacacctcagaagaacagaacagaaccaccagtgcttttcaaagacggtttcagcaatggcgttcttaaataaaattggaaatctggtcaagaattctgctgtcaagcacatcaatcaagatttttcagtgtctaccccatcacttttccaagcaattagatccatgtcatctgcaaagctttttgtcggaggtatttcttacagcactgatgatatgagtttgcgagagtc

SEQ ID NO: 32954 - DNA, 244 bp, Glycine max
  unsure (1)..(244): unsure at all n locations; Clone ID: 701106015H1
ctccaaatacaagccaatagaaattgaaatatagatgcatcataagatattaanataaggacccatttcctcttctaagctatatagtgctcgtctagcctacccactacaagcaacattgttaaccattctcttcactttaaagttacatagtttttcattgttttacttaatctacaatggctgcttcaacaatgactctctcttcatcatcattggctggccaagctatcaagcttgcccc

SEQ ID NO: 32955 - DNA, 254 bp, Glycine max
  unsure (1)..(254): unsure at all n locations; Clone ID: 701106016H1
ttcaagttcccagcttgtgccatttttcccactgttnattgagaagaactncagaacatggcacagattttggctccctctacgcaatggcagatgagaatctcaaaatcctctcccaatgcaactcccattacatcaaacatgtggagttcttattgtggaaacaaaataagaaagtttcacctaccagttctgctaaatttagagtgctggcaattaagtctgacaatagcactatcaacaggctcgagggt

SEQ ID NO: 32956 - DNA, 253 bp, Glycine max
  unsure (1)..(253): unsure at all n locations; Clone ID: 701106017H1
gacttgagnataatgcccagtatactaaatgtcttagtcttaagangggggaaaaactggaattccaatgattctaatttcttacaatccaatctgcaaactgagtgagatatataacttgtntttgatttcttcctcatcattttgcatatacaaagattaaaatggaagggntttttggaaattgcttcaatatgatttngctgatgttgtgctcaccaacttgagnanagcttttgtcanagtcatatga

SEQ ID NO: 32957 - DNA, 251 bp, Glycine max
  unsure (1)..(251): unsure at all n locations; Clone ID: 701106018H1
tcagagacaaagtaaatctttggggaatccgttgatcagaaatagtgttattgtgaatgataattccggcatcttgactttaaaaaataggttggntactactatgctcctagcggcaagccttaccctgataactggatcattacggatgtcgtttatgagtttgaaggatctctaatctcaaggtcagggaatctggttgaagggaaccctggagcaataagtggcgatganacggtgccatatctctc

SEQ ID NO: 32958 - DNA, 246 bp, Glycine max
  unsure (1)..(246): unsure at all n locations; Clone ID: 701106019H1
ttaacaataatgtctcctatttcgcttatgtcaatttctgtgatcttagggtttacaagaattgaggttatagaatctttaatttgtaattgtggttgtttgtaggtttattttactctgtgtnttnccgtggttgctgcggctgtcggggcttaccttcatgtcctcttgaacattgggggttttctactacagtggcatgcatgggaagcagcttttggttactctccacacctcctttgaaga

SEQ ID NO: 32959 - DNA, 249 bp, Glycine max
  unsure (1)..(249): unsure at all n locations; Clone ID: 701106020H1
gctnntctagaggtacctagacctcaaacgctaggattcatagagcagaaccactgctcataacagtcaaggacgtgctatatcaccncattacttggggcctttttagcttattcaaatatgggaagatactggaaaattgctagttnctcaactatctatgtccttgaatgttatcactgattcactggcctagtgccagctaaccaccagagaaaaactcccaaattcnacacactanacacngcc

SEQ ID NO: 32960 - DNA, 250 bp, Glycine max
  unsure (1)..(250): unsure at all n locations; Clone ID: 701106022H1
cngaagcacacgtgttcaaggctgatattccanggctgaagaaggaggaantgaagctggagattcaagangacagaattcttcagataagtggagagaggancgttgagaaggaagacaagaacgacacgtggcaccgcgtggagcgaanagtggtaagttcatgaannatttcagattgccagagaatgctaaagtggatcaagttaaggcttccatggaaaatggggttctcactgtaactgttcca

SEQ ID NO: 32961 - DNA, 248 bp, Glycine max
  unsure (1)..(248): unsure at all n locations; Clone ID: 701106023H1
cgacactcgcgtctcagnctcagtttcggatctctcccttctctcaccaatttccaggatttgaaaaatggcagattccaaaccaggattgaggaagccagtgttcaccaaggtcgatcagcttcgtccagggaccagcgggcacactttaactgtgaaggtggtcgatgctaagatggtgatgcagaaaggtcgttctgatggtcctcaatcccgccaaatgcgaattgctgaatgtttggttggtg

SEQ ID NO: 32962 - DNA, 248 bp, Glycine max
  Clone ID: 701106024H1
ctctctccagaatttcctcctcccactgcttctttcttccttgcagcgcgattgctgcatcctcctccaataagagctcgctgctagcgaaccctaacacggcggcaacgtgaggtgttcggttgaagttcagatcagccatggccgcagcaacccccacttctctgcggttcctcctctccgtttccgtaaccctaaccctaaccctgcttaacctcgccgcctcaaattccgaaggcgacgctctc

SEQ ID NO: 32963 - DNA, 247 bp, Glycine max
  unsure (1)..(247): unsure at all n locations; Clone ID: 701106025H1
gtgattttaggtgttgcagtgaaggtgacactgagcaacacttacccatcccatggaatccgcaacatcatggagtaacccttctcccactttccagtctcccttccccttggcattcnacgccacccctccgccttcaaatttatggctttttccaactcttcacactttctcactcccttccctttcttctccctcttctttncgaccatnccgcctttctntctntctgcgngccgcattnttt

SEQ ID NO: 32964 - DNA, 243 bp, Glycine max
  unsure (1)..(243): unsure at all n locations; Clone ID: 701106026H1
gatccgccgcatacgcctcccttcaaaaactacgcagangcattagcggatgccaaaaagacagttgaactcaagcccgactggtccaagggttacagccgtctcggtgccgcgcatcttggcctttcccaatacgatgatgctattttggcttacaaaaggggtctcganatcgaccctcacaacgagccccttaagtctggtttggcagatgcgcaganngccttggccgcggntccaggc

SEQ ID NO: 32965 - DNA, 238 bp, Glycine max
  unsure (1)..(238): unsure at all n locations; Clone ID: 701106027H1
caatttaatcaccattgtacaacccaattcccttcgtcgttttcgattaagagancaatggcacgtaccaagcaaaccgctcgcaagtccaccggnggaaaggctccgaggaagcaattggcaaccaaanncgctcgcaagtcagccccggcgaccggcggagtgaagaagccccaccgcttcaggccaggaacggtggctctgaggganattcgaaagtaccagangagcaccgaac

SEQ ID NO: 32966 - DNA, 247 bp, Glycine max
  unsure (1)..(247): unsure at all n locations; Clone ID: 701106028H1
cttttcttcagttcggtgnagggagggagccgtagcagcggaaganctagcttgggtagcgaatcacaatggcgagaggattaaagaagcatctgaagaggcttaatgccccaaagcattggatgcttgacaaactgggtggtgcatttgctcctaagccctcatctggaccacacaaatcgagggaatgcctgccactcatactcattttgcgaaaccggctgaagtatgctctaacataccgtga

SEQ ID NO: 32967 - DNA, 232 bp, Glycine max
  unsure (1)..(232): unsure at all n locations; Clone ID: 701106029H1
gcttttggaacttagagttaagcacnntaccttcctccaacacntaatatctccatcccaatcacnacccttttctcaatnnnnnnnnnnnnnnnnnnnnnncacaataagtgtcgattttttcctaaataagtgaaagtgtagttacacctttttttgtgtgtttaccacttttgagtgccacagagttctgagtttcataggagaaaaaaaatgacagaagaacaaacca

SEQ ID NO: 32968 - DNA, 250 bp, Glycine max
  unsure (1)..(250): unsure at all n locations; Clone ID: 701106030H1
cggtaaaganatgtatcttgcaaagggacttggtgtagagtgctgtggtgatggcataggtggttgtagaggtggtgntggaggtggtggtgatcataatcccttgggttctggaggaaatgatggagaaaggcatggagtggaagaatattacaagaaaatggttagggaaaatcctggggatcctttgtttctgaggaattatgccaattttttgtatcaggttagttccatatcctagtttgaaacc

SEQ ID NO: 32969 - DNA, 256 bp, Glycine max
  unsure (1)..(256): unsure at all n locations; Clone ID: 701106032H1
anancnccctctggctttggtccttcgctagggttcggggattcaccatttcccattttcgtcgcttcttatttacccccagaaatcccatgatcctcttctctcgtttcgacacttctcaacttctgagggaaattcaatgcagctgtttctgaggggtctcatgtgatttctgtggttctggttcggtttatcgctgatcttgaggaggctttgctgangtctgtgaactctgtgacaatgcctctacagaaaa

SEQ ID NO: 32970 - DNA, 252 bp, Glycine max
  unsure (1)..(252): unsure at all n locations; Clone ID: 701106033H1
gtgaatggtgacaaagctgctccactgtacaagtatctaaaatcaagcaaaggtggactctttggggatggtatcaaatggaacttctccaagttccttgttgataancagggaaatgtggttgatcgctatgcacccacaacttctcctctgagcattgagaaggacttgctgaagttgttggatgcatgaatgaagctatgaatgactggagctgccaataaatgaattgngattagaatataaattatg

SEQ ID NO: 32971 - DNA, 251 bp, Glycine max
  unsure (1)..(251): unsure at all n locations; Clone ID: 701106034H1
tgaaccaaaccacaaacacttaatttctcatctcatcatttctaattctacctcttttctcttgcactaacaatccaagatgaataccaacaacgacaccganaaaaaccaatcatttccagaagcacaaggnnnnnnnnnnnnnnnnnnnnnnnnnnncaatgttgggactgagaattggggaactcacataatgggcacccctgctgttccaagcagccacccagataacaaaaaagcagctttacaaa

SEQ ID NO: 32972 - DNA, 250 bp, Glycine max
  Clone ID: 701106035H1
gttgcagggatggcctccactctctctatatcctcttcatccacccttgttgatgccaagcctccaactccaagacaatgcgtcacccttcccactcttccccctccaccttttcactctcagactcgtccttggaagaccactgctttctgtcgtaggcttgctcgcaattttatggcaatggccaccacaagagaggcagccgcagcagaagttgccgccacaactgacctctctattgccgagacgc

SEQ ID NO: 32973 - DNA, 249 bp, Glycine max
  unsure (1)..(249): unsure at all n locations; Clone ID: 701106038H1
anaaatggaggngaaganatcgggtttgaatctcccagctgggatgtccggaacctcactccggctggacactgcagcagcatcttccatctcgaccctcaattctccttcttctctccgttccatctctaatctcacctcgccttcgaaatccaactcggcttgcaacccacaggttcattccgtgccggtcctcctcgaggttgcacacgttcgggctcctggacaggccctcgccggtgaaggaag

SEQ ID NO: 32974 - DNA, 248 bp, Glycine max
  unsure (1)..(248): unsure at all n locations; Clone ID: 701106039H1
ctcttgcacccaaaccctggaattaagcacgttatttcattagggttggttttgttgaacagaaaaaaagagaaaaaaaaattatgggaagcgatggcgtgaggnaaccaagattcctatgccttcatgggttccgaacaagcggagaaatattgaaaacacagttacataagtggcctcaatcggttctagacaacctcgatctagtatttgtggatgctccttttccttgccttggcaaatccgat

SEQ ID NO: 32975 - DNA, 248 bp, Glycine max
  unsure (1)..(248): unsure at all n locations; Clone ID: 701106040H1
gagaagctgaaccttcctctggcacaatctccttcaaaaagcttctcatccatggcgaaaacgctcatttcgtctccatcgttcatcggcacgccgctcccctcgctccctcgccaccacctcccccaccgcaccaggtttgtcactaccaaagtccacgtcagcctccatgaaattccccctattcaatccttaagccactccattgacttcnccggaatcgttaccaganccgaagccttctctac

SEQ ID NO: 32976 - DNA, 245 bp, Glycine max
  Clone ID: 701106041H1
tttctcattctctgtttcgctttcaccgagtaacttcactttccccaactccacctgagaaaaagatacccataattcgcacgcacgcacgcacgcacttgttctgactcagtgcttgtgttggacgcagaagaaccagaaaagaaaaacaagcacgaggagatgattaacttcgaagaaaccgagttgcgactcggcctccctggcgggtctgcgagtgatcacaacgagtgcaacaaggtcaa

SEQ ID NO: 32977 - DNA, 243 bp, Glycine max
  Clone ID: 701106042H1
gggtgagccttagcaacaacatgctcatcactattctgtgtggaacctgttaaatgtgctatagcttatttcaacttctccatggcttcttttctttccttatctcttcccaaattaaacttaataaaggcctcttcagcagctaacaccaatacaacaaccactcttcccacagctgagacactcaatgagaaatttggcaggaaaggcatcaagttcttggagtctgataacattcccata

SEQ ID NO: 32978 - DNA, 242 bp, Glycine max
  unsure (1)..(242): unsure at all n locations; Clone ID: 701106043H1
ctttttgacagtttgagcatttcagacaaacatggggnntgatggaaagaagattagtggagagggggggttagtnaaggttganccaaaacccagcaatggtttcacctcaaaagtggttgatttgttggagaaattggtggtgaagttcttgtatgattctcactgccccatcactacctcactggtaattttgctcccgtgagtgagacccctccaaccaaggaccttcctgtcaaagg

SEQ ID NO: 32979 - DNA, 248 bp, Glycine max
  Clone ID: 701106044H1
ttgttgtaaagccttgttgctgccatggccacccacgcggctcttgcttctacaaggatcccttccaaacacaaggttcccatccaaggcctctcactctttcccaacccaatgcgccttaaagagacttgaggtgacagaattctctgggcttagatccacttcatgtgtcacatatgctaacagtgctagagaatcttccttttttgatcttgtagcttcccaactcacttcccaagaccaatgga

SEQ ID NO: 32980 - DNA, 249 bp, Glycine max
  Clone ID: 701106045H1
cgttctcgaagtggagaagaaagtaatcgaagaagatgttgtggcactaaagagaaaagactcgacggagattccatcgccggaggagaagccactggtgtctgctaggttcactcaccggaaattccttaaatccagttcagaaggtgggagagcgttgagagtggtggctaaggcaaaacgggacgagacgttggagagcacgtggaaggccataacggagggtcgatcaatggcattgagcaggca

SEQ ID NO: 32981 - DNA, 249 bp, Glycine max
  Clone ID: 701106046H1
ctttgcggactgctctgctgcaaatagcgcgttgcatctgctcccactcattcatattttcgccaaacagccgattccgttaagtgtttctaccgtagcgctcaggaaggaggcagtggctggtggtgttggttgtggtggaggtggttttgccgatcagttgtggtagagggtaggaaagaaaaaaaaagtggaaaatgagttcagacagccgcagcaggagcaggagcagaagcaggagcccaatgg

SEQ ID NO: 32982 - DNA, 250 bp, Glycine max
  unsure (1)..(250): unsure at all n locations; Clone ID: 701106047H1
tactgtagatatagagagatagttccaagctccaattcccagaaaaaaattaaaactttgcttcttncactttttctcttaccccttctgatctcatgcaatttcccctcatggatccctttgatttgattcgcaaagggtttggctgaagctatctggaatatttctgttacagtttttaaggtctatctatnttttagtcatttttgtccatattcttgtcaataatgagcttatccaagaaaggttc

SEQ ID NO: 32983 - DNA, 248 bp, Glycine max
  unsure (1)..(248): unsure at all n locations; Clone ID: 701106048H1
cctctgttctgttcatttgcatttccatttttcacactctctctgcttnccaccatgtggacacttcgtcgagcttctcttcgtctcagtacgagccaaggacttaacgcgggagctacccgtgcttcggctgtcaaattagtgccaatcactgttgaagaaaatgaggctggtatccctcagtctcgtcaaatcatcacagtagattcngtccgngacacattttgcggnagggtcgggtgtcctga

SEQ ID NO: 32984 - DNA, 253 bp, Glycine max
  Clone ID: 701106049H1
atcccaaaaccctaggtttcagatccttaatcggccaggaccaaacagcatccgcggcagcgaacggtaaccctccaacaacaacacttccgctgcgaaaaatgtctctggtggcgaacgaggatttccagcacattctgcgtgtgctgaacaccaacgtggatgggaagcagaagataatgttcgcaatgacctccatcaagggtattggaaggagattcgccaacatcgcttgcaagaaggctgatgttga

SEQ ID NO: 32985 - DNA, 250 bp, Glycine max
  unsure (1)..(250): unsure at all n locations; Clone ID: 701106050H1
ctgaagctaagtttcgttgccactgaggantgaaatggccaatggnaacaacattagtcatttcttcaagctcttgcttttccttctanntttccactcttgtctcgctgagattttcttccaagagagattcgaagatggatggaagagccgttgggtgctatccgattggaaaaggagcgagggaaaagcgggtaccttcaagcacacagcagggaaatggtctggggatcctgatgacaaaggtctc

SEQ ID NO: 32986 - DNA, 247 bp, Glycine max
  Clone ID: 701106051H1
tcgtttccgattaacaattctttgaataatagagactttactttctgaggttttaacccctttaaggctttccctaacttgaggctgtgctcatttgctgagagttttgctgcaaggacttgacacaaattgtgtaaatgtctgtggctttaccaacctctcttggtggttgtggagtggaaagcatcaagagccaagaatcccaaatgggccttctataaattcttccgccgattcaaatttgtgg

SEQ ID NO: 32987 - DNA, 250 bp, Glycine max
  unsure (1)..(250): unsure at all n locations; Clone ID: 701106052H1
ctattcccttcttcaacatttttagcttcttntctttctcaaatcnccctatcttgcaaaatttcaaggttatcactgctaaagacagattttnttcttaaatgactgtggctatggctgtttggagtgctggtcttcanttcagtgctncncanaagcctcatagtagcttgaggcctttggagaaaatcatttgcantgcccctttcttcaaggcctcatctgggtttgctgctactaagccattctg

SEQ ID NO: 32988 - DNA, 206 bp, Glycine max
  unsure (1)..(206): unsure at all n locations; Clone ID: 701106053H1
gcattattatggactctccgtttcttcttcngnttcttctcatcttnctnttcctctctccnactccctcctcctcctccattgntaatttccaccaagnntttcccatcgtngaacctgatcntggtcacacaaaacttcgtctttcaagagaaggtttggaggctattgagaaaataaccaaccccatgnagcagtggcagtga

SEQ ID NO: 32989 - DNA, 250 bp, Glycine max
  unsure (1)..(250): unsure at all n locations; Clone ID: 701106055H1
ancnangcggtatcggntccattngctctgnanntntgntctctcnacngantcctncgcgnaacnaatattattcaatattttacgttgngttgaatcccggggttgnagcgttgcagncatcacggctattctaagagtgtctcgctccctcattcatgtccgatctgtacgacggaggacgggtagttgcgtaactgccgttaacccttcgccgcanggtgggcgtggtgcnttgccttctgaaggt

SEQ ID NO: 32990 - DNA, 245 bp, Glycine max
  unsure (1)..(245): unsure at all n locations; Clone ID: 701106056H1
aagtccaacatggnggtggcgggtgtgtcccaagccatctcntncactaccgccannagaaccccctcttgcatcgatttccactccaaaaaancttgnacttttgggcntggnaactntnnccagcccaacctntcaatntccgccagaaggagccgcaacanccactgttgctgntgnancctcaattccgaaggcacntctctcanctgggattggaacgatggtggccgcnacttctcgat

SEQ ID NO: 32991 - DNA, 245 bp, Glycine max
  unsure (1)..(245): unsure at all n locations; Clone ID: 701106057H1
caaacatgcttgatcaggtccaacaccctacaatcatggacaaggttgctggccagctccatctccgttctggtgtttctggtattaggagtnatgaaggagcctactgccaccccacaatgtaccaaagaccctcttttgggaattactcgaatgctgcattgcagtatcctgtgatgccctcatgcaaagctactatggatttgtctgctgctgcaacaactgcctcccccgtcctttgttgg

SEQ ID NO: 32992 - DNA, 245 bp, Glycine max
  unsure (1)..(245): unsure at all n locations; Clone ID: 701106058H1
acaaaganaaaaaaaacccttagccaacacnaccatcatggcnacctctgctattcagcantcngcattcnctggtnaaactgctntgangnagntcantgngttcgtccgcaagaccggnggcgccgncaaaggtcgcactancatgcgccgaaccgtcaagagtgctcctacagagcatttggtatggccctgaaccgtcccaagtacntgggtcattctcgnngcagattncatcatacctg

SEQ ID NO: 32993 - DNA, 245 bp, Glycine max
  Clone ID: 701106059H1
gtcaacagtaatgagaatgctgggaatagcagtagtcaggctgcaccagcatctaccgaaccaatggagactgaaaagtctgagaacacaggctctgcctaatttttttgttgttggtttgctctcaagtctctactatttgtataagcaaaagagaattttgctgggttgacagtgagtgtggctccttggatatttggtgtaagtagaaccctctcggttggttggtaacctaagttttaatt

SEQ ID NO: 32994 - DNA, 245 bp, Glycine max
  Clone ID: 701106060H1
tgattgatcacacaagaagtggagaaccacttgttattggattagtgcttcgtagtcatttattggtaattctgcagtcaaaggttgatttccagcatagccctttaccctctgatccaagaggtgggggcagatcaattaggcatgattctggtgaatttgcaaagcctgtttctagtaaaggaatatgtattgatgatatacatctaagttcagatgacttagaaatgtacattgatcttgct

SEQ ID NO: 32995 - DNA, 248 bp, Glycine max
  unsure (1)..(248): unsure at all n locations; Clone ID: 701106061H1
gtnaattaactatgaagcctaccctactattatccctttccatcctgcctctcctttgctttcctggctctttcagaagatgttgaacaagttgtggacataagtggcaaccccattttcccaggtggcacatattacattatgccatcaacttggggcgctgccggtggtggattgaaactaggccggacaggaaactcaaactgcccagttactgttttgcaagattactcagaaatcttccgtgg

SEQ ID NO: 32996 - DNA, 249 bp, Glycine max
  unsure (1)..(249): unsure at all n locations; Clone ID: 701106062H1
gttgatcgagatnactagaaacagtgtgatgaaaatgaaggtccttgttttcttcgttgctacaatnttggtagcatggcaatgccatgcgtacgatatgttccctctccgaatgaacactggctatggtgcccgtactccggaggtgaaatgcgcaagttggaggcttgctgtggaagcacacaacatctttggctttgagaccattcctgaagagtgcgttgaagcaacaaaggaatacatccatgg

SEQ ID NO: 32997 - DNA, 243 bp, Glycine max
  unsure (1)..(243): unsure at all n locations; Clone ID: 701106063H1
ctcaattcccganaatttttccgtttagcttcntcatcttctatgtgactgtnatnatcaattcaattgcntcaactaagcctctgtctttcacagtgtaaaaacaaaagtgcttttttcggttggttcttgattcttccctttcantctactcnaatgcttagctgaanctgacccaactcgttatttcaacatttgcgtttgaatttgggccactttnattttgcccctctattggtatac

SEQ ID NO: 32998 - DNA, 257 bp, Glycine max
  unsure (1)..(257): unsure at all n locations; Clone ID: 701106064H1
agatcnagccgataaacgcngcccaaaaccatttatagggttttcttntctttgccaanaaaatgnnagagtgcatttcaatccacattggtcaggccggtatccaggtcggaaacgcctgctgggaactctattgccttgaacacggcattcagcccgatgggcagatgccgagtgacaagaccgttggangaggagacnacgccttcaacacattcttcagcganaccggtcgtcggaaagcacgtgatcgcgng

SEQ ID NO: 32999 - DNA, 246 bp, Glycine max
  unsure (1)..(246): unsure at all n locations; Clone ID: 701106065H1
aganttgaagaatgtaagangggatggaactggtgagcgcaaggaatgggatangatctatgattatgatgttctacaatgacttgggcgatccagataagggtgaaaagtatgcacnccccgttcttggaggntctgcctaccttaccctcgcagaggaagaaccggaagaggananactaganaagatcccaacngtgagangcccatgattttgtttaccttccgagagatgaagcatttggt

SEQ ID NO: 33000 - DNA, 226 bp, Glycine max
  unsure (1)..(226): unsure at all n locations; Clone ID: 701106068H1
ctgatttgctggggaacacgtgttcangattatgaggaattgacggnattatctccgtcttcgacggtcgtgaagcctacctgcagaaaagggtcagtttaattattatttgggaattaatcaaccattctccttatgtttgtttcttttctgttgcttcaattanntaacacatttgggggtgnggggttaaaagatttctactatttaaaagggagttttttgt

SEQ ID NO: 33001 - DNA, 241 bp, Glycine max
  unsure (1)..(241): unsure at all n locations; Clone ID: 701106072H1
gancttagctacaagctaaggaaggatcaaagagaatggctcaagcaatggcatcaatgactagcttacgtggttcctctcaggctgtgttggaaggtagccttggctccacacgcttgaatgtggggagtggaagcagggtggcctcagtcacacgtgcagggttcacagttagagcacagcaacaacaagtgaatggtggtgaggtacaaagtagccgtaggcagtgctttcacttgtt

SEQ ID NO: 33002 - DNA, 241 bp, Glycine max
  unsure (1)..(241): unsure at all n locations; Clone ID: 701106073H1
gcngacacaaanagcganaccanagaaganagcaanaaaatggatcanagagaganaatacctctcctcaccccatacaagatgggaaattttaatctatcccacaggattgtgttggcaccgttaacacgatcaaggncttacaacttcgttcctcagccgcatgctgctctgtattattctcaaaganctactaagggtggcttcttgatcggggaagctactggtgtatctgatacgg

SEQ ID NO: 33003 - DNA, 134 bp, Glycine max
  unsure (1)..(134): unsure at all n locations; Clone ID: 701106074H1
aaaaaaccactctacaaaactctccagtaattctgaaaattttattttctttnggtgnaattaanagctctgtgattgntcaatggcnacaaaggnangcnnngccatangcatcgatctnggcacnacntnca

SEQ ID NO: 33004 - DNA, 240 bp, Glycine max
  unsure (1)..(240): unsure at all n locations; Clone ID: 701106075H1
atcgagataactagaaacagtgtgatgaaaatganggtccttgtnttcttcgttgctacaatnttggtagcatggcaatgccatgcgtacgatatgttccctctccgaatgaacactggctatggtgcccgtactccggangtgaaatgcgcaagttggaggcttgctgtggaagcacacaacatctttggctttgagaccattcctgaagagtgcgttgaagcaacaaaggaatacatc

SEQ ID NO: 33005 - DNA, 253 bp, Glycine max
  unsure (1)..(253): unsure at all n locations; Clone ID: 701106078H1
accacnngtaagctgcatgaccttctaattgctctactgctctctcactttctgctacnatgcanatttntctncacaagatggcaggnatnatcagcangccttntagggaatggtttatctanacggggnaatagnctaantcttnagnaggacttcaatggaatgggatatctctanncatnttggcnattttcactnttgaannacnataaggcatcnnaagcagttccataaaggcntntttggagca

SEQ ID NO: 33006 - DNA, 248 bp, Glycine max
  unsure (1)..(248): unsure at all n locations; Clone ID: 701106079H1
aattcctattttnattttggtctcttctctttctgatcggcgattgtcggaagcncctattcatcgccgccaccttgcgccgaatcggacccacttcggatccgagggccacccgaatccttccttcacagtttntgtnnttccagagcaaaggnttcacctntaccatttaccacacaccactgtgnntatacaaattgggttntgtgtnttcccgtttttagcgaatgagatttcacacccaantt

SEQ ID NO: 33007 - DNA, 251 bp, Glycine max
  unsure (1)..(251): unsure at all n locations; Clone ID: 701106080H1
cagaaagcaagctcatcctanagttttaaaaatggcagcagccttctccatggctctctcttccccatccttggctggcaaggccgtgaagctgggcccatcagcccccgaagtcgggagggtcagcatgaggaanaccgtcaccaagcaggcctcntccggaagcccatggtacggcccagaccgcgtcaagtacttgggnacattctctggcgagcccccgtcctanctcannggcgagttacnaggna

SEQ ID NO: 33008 - DNA, 243 bp, Glycine max
  unsure (1)..(243): unsure at all n locations; Clone ID: 701106083H1
tctttattctctccttcctcttccttcttcttgtttcatctgccactgcttgtnatcgctgcttgtatcaatccaaggcttcctatttctccaaagcttctgctctttcatctggggcatgtgggtatggctcttggcactagacataagtggtggacaccttgcagctggtgtggattctctcttcaaaaatggagcaggttgtggtgcctgctttcagataagatgcaagaacccaatcta

SEQ ID NO: 33009 - DNA, 202 bp, Glycine max
  unsure (1)..(202): unsure at all n locations; Clone ID: 701106084H1
ctgtaagaagtnatggcttcaagannnantngacagacaaacaaaaggaaatgctagaggatgagantggttatggatttatatctatcanttcattctatgtnaggtgctgnttacacttgccnttgcanacaanatacnanggngaaaaaatntganagtnggngaggactatgcttaatgattttangagngagttgtt

SEQ ID NO: 33010 - DNA, 243 bp, Glycine max
  unsure (1)..(243): unsure at all n locations; Clone ID: 701106085H1
cgccataaacatcaacatgagcatgatcacagtggctgtaaattgcagcatctncatcttttcccccttnctcnaggttttngcngcggggnntttcnaaaccttccccttccccctccttcggtntttngntttncgggttnnnaangganaattgaaattggtggtggtggaatgggggnccatgaatctttccatngaaccgttgaaaaaacattcacccggtgnggcatgggnaagggt

SEQ ID NO: 33011 - DNA, 245 bp, Glycine max
  unsure (1)..(245): unsure at all n locations; Clone ID: 701106086H1
gggcaatgacctctaccctgggggccagtactttgacccactgggccttgctgatgacccagtcncttttgctgagctcaaagtcaaggagatcaagcaatggaaggctggccatgttctctatgtttggattctttgttcaagctattgtcactggaaaaggcccattggagaacctcttggaccaccttgacaaccctgtggctaacaatgcttgggtctatgccactaagtttgccccagga

SEQ ID NO: 33012 - DNA, 242 bp, Glycine max
  unsure (1)..(242): unsure at all n locations; Clone ID: 701106087H1
tctctgcaattcactctgtacaattcttcgttcgttctcngcagttatatcctttttgagcttcaatggnggacgcngaaaccttcgctttccaggctgagatcaaccagcttctaagtctcatcatcaacacattctacagcaanaaggagantttcttgcgtgaactcatcagcaatgcttctgatgctttggataagattcgattcgagagcntaaccgacaagagcnanctcgatgct

SEQ ID NO: 33013 - DNA, 240 bp, Glycine max
  unsure (1)..(240): unsure at all n locations; Clone ID: 701106089H1
cgacagagaatccgtgtatttggggcaagttcctagcttatttaaaaagttatgttgcaatgggacttgggcagggtataccctntaaatttttacataattttgtgccnnnaatcatgggatacttcctctcactagntctcacangtacatgctgtgagttgcgagcatggtcaggaattnttattgttatntntataatnngaatanatnaaaactaagtcccggcntcagaatctc

SEQ ID NO: 33014 - DNA, 242 bp, Glycine max
  unsure (1)..(242): unsure at all n locations; Clone ID: 701106090H1
cttttacgttggtttattcggtttgtgttgntctgttatgctgctcctccctgtttnatttcaagggtanaggataaagggatgatctacacagcaattgacacgttctacctcacagatgannagctagnaaactcaccttctagaaaagatggcatagatgangccactgagannacccttagaatctatggttgtgatctcatccnagaaagtggcattttgctcagattgncacaagc

SEQ ID NO: 33015 - DNA, 241 bp, Glycine max
  unsure (1)..(241): unsure at all n locations; Clone ID: 701106091H1
ttttctcaatttccgcttattttcgttccagccagagccagcttttccattttcccctttaaattttctccgaatccaaacggaaccgtaatcgtntcttannnnnnnnnnnnnnnnnnnnnnnnnnnnnnnnccccgccaggttcagagacttttccgattcctggaagaagagaagaganaacctaaatcacagatccatggcggaagaacaccgntgtnaanctcccgaagtnaccga

SEQ ID NO: 33016 - DNA, 249 bp, Glycine max
  unsure (1)..(249): unsure at all n locations; Clone ID: 701106095H1
gngaagatcaggttgttgaatgagaaanacatctgtgnttatcagcgcgccgattggttggtngacaagttgggtacaaaagtccattcntatntctggcttgatgagnactcagaaaaagatgantttgcgcgatactggnaaaatgaatggangagtggtttgacgtcatggcgcaaagcactgaagattccagatactgatgtcataatggaagatggatgtgctaaggtcactgatcaagataaa

SEQ ID NO: 33017 - DNA, 252 bp, Glycine max
  unsure (1)..(252): unsure at all n locations; Clone ID: 701106096H1
tttacattcatacagagagggaagcagcgaaancaagacaagagtggcatccttgttgttcgcttnaaattcaatgttctacagaggtnaatttgccgatggtggtgatgggcgtgaaatggctgcaaaacgccagcgcactgttgatccaggatcttcatctatggtgcttccaccggttccaattttatgtacnatccatctccttacggatatgtcagccaacctcctcctcctccacttttcctgttg

SEQ ID NO: 33018 - DNA, 253 bp, Glycine max
  unsure (1)..(253): unsure at all n locations; Clone ID: 701106101H1
cggncnatgcctcacgcagatggcanngcnnctgccatancaaccaggattcnatatgcaanatcctcangctgctgcagcagcaatggctcagcagcagcaaggaatgtttccccagaaaatgccattgcaatttggcaatccacatcaaatgcaggaacaacaacagcagctacaccagcangccatccaaggtcaaatgggattagactggagtataaataatggctgcatccatgcacagtgagctgtc

SEQ ID NO: 33019 - DNA, 286 bp, Glycine max
  unsure (1)..(286): unsure at all n locations; Clone ID: 701106102H1
caggtcgattgacataacacccgaatccaagtgaaacgaaaaacactcatcatcatggattcagttgcatnaaatggcaaaagcaatgataagcctcttcacgntgccatgctcccatggctggccatgggtcacatatacccttacttcgaagtcgccaagattcttgcncaaaagggtcactttgttaccttcataaacagccccaaaaanattgaccgcatgcccaaaaccccgaaacacttagaaccattcatccaactcgtgaagctacccttgccaaaat

SEQ ID NO: 33020 - DNA, 78 bp, Glycine max
  unsure (1)..(78): unsure at all n locations; Clone ID: 701106103H1
ataacacanagcacaaagcaaagctcatncttgaattnaaanntgggaacagcttcttnccattgggtcnnctcantc

SEQ ID NO: 33021 - DNA, 276 bp, Glycine max
  unsure (1)..(276): unsure at all n locations; Clone ID: 701106105H1
ttaanaaacccaaaacatgtttctcctttgatcttgttcttctctagtacgcctcatgcagttccacaantacgtgtncntccgaacataggaaacttntttgtggagtcgagagttcttacttatctgntaagtcatgggttcagaaggtgatgatagctctcccagtgactatgattggaacactgatgatgagcttgaggtgtttggaatacctccctcggatccaaccatttctagtcaagagagctgtgaagatagtgtgggggagagtat

SEQ ID NO: 33022 - DNA, 226 bp, Glycine max
  Clone ID: 701106107H1
ttttctcactccacagacccgatgttctccccatcaatgaccttggtgtcaggaaaggggttcagcttctctacaacctcgaggacttgccgcggccctcgcagatggaccagttgtgtgacaagtggaggccttatcggtctgttgcttcgtggtatatgtggagatttgttgaagccaagggaactccttcgagtgcggtgacggtagcgactggtgccggctt

SEQ ID NO: 33023 - DNA, 209 bp, Glycine max
  unsure (1)..(209): unsure at all n locations; Clone ID: 701106110H1
gggaatgaggtttgctattagggaaggtgggaagaccgttggtgctggtgttatccaatccattattgagtgaaaattctgtcactttatttttaattaattaattttntccgntttatacagcttctgtactttgctttccctttnncttatactttaattgcacttttaggatggatattattggataataaaaaaagaaanaaaag

SEQ ID NO: 33024 - DNA, 273 bp, Glycine max
  unsure (1)..(273): unsure at all n locations; Clone ID: 701106111H1
aagatcccctttatattcttcattcctctggggtgctgcacaacgaaactcacagaagaaagaagaaaaagaagcgaaactaaagtcagcattcgaaaaagatgagtagcatcggtacaggttacgatctatcggtcaccactttctcncctgatggccgcgttttccagatcgagtatgccgctaaagccgtcgacaacagcgggactgttattgggatcnngtgcanagatggggttgtgttgggcgttgagaagctattccgtcgaaaat

SEQ ID NO: 33025 - DNA, 276 bp, Glycine max
  unsure (1)..(276): unsure at all n locations; Clone ID: 701106112H1
gccatggcttctcttcccaccactttcgctataaccanatctgcatcctccataaacaaggtggaccactctctggtcaagatcaaaccatacaacttctctctcaatctaaatcgtcaagggaccatgcaaacatctttaaccagaaggcctctaacaattcaagctacgtntagtgatggtggaaggcccagcagtgctagtgtatttgttggtgggtttctcttgggaggattaatagttggtactcttggttgcgtgtatgcacctcagatc

SEQ ID NO: 33026 - DNA, 278 bp, Glycine max
  Clone ID: 701106114H1
cagcgctcctgatatggttcctgttataccaccaaatggtacaatgtcatctgtctcagaaatgcctgtgagtccgacatcagtagcatccagtggtcattttcccttcactgcatcagaaataccaggaatgggcgcagatacatcagctcttgatacagcatttacatctgatgtggcaagttcagtaggactacagcttgcagcagatggtggcaatggaatttctagatcgctggatcaaattcaatggattttagcctatctgatctaacggc

SEQ ID NO: 33027 - DNA, 269 bp, Glycine max
  unsure (1)..(269): unsure at all n locations; Clone ID: 701106115H1
tgatcgagataactagaaacagtgtgatgaaaatgaaggtccttgttttcttcgttgctacaattttngtagcatggcaatgccatgcgtacgatatgttccctctccgaatgaacactggctatggtgcccgtactccggaggtgaaatgcgcaagttggaggcttgctgtggaagcacacaacatctttggctttgagaccatcctgaagagtgcgttgaagcaacaaaggaatacatccatggcgaacaatatagatcagatccaa

SEQ ID NO: 33028 - DNA, 261 bp, Glycine max
  unsure (1)..(261): unsure at all n locations; Clone ID: 701106116H1
ctgttattgtcagctgtctggatactaatcaacgcaaccgttgaagtctatcatcacatangctgaacacctgtttctcatgtgtatgttatcattaatatttatgtttcgtctgtcaaaatcttgacagtatatgtatctcagcatatgaacttattcagcttggtgagtgacttatgttaataatgactttgtcagacttgtgtagtagtnagtaaatgccaataatgtnaaagatacgtcagatttgtgcagtagtat

SEQ ID NO: 33029 - DNA, 289 bp, Glycine max
  unsure (1)..(289): unsure at all n locations; Clone ID: 701106117H1
caacagtttcgatcgtctgcattnccancacacacacgcacacagaacacnagaatcattattcggttcagggttggaggcacgaanttgcaccggtagcnctatcacttggatcacgcggaaccctttgggctgaaacttttatcgcttctttncttgtgntntttccttggaaaatctaataatttgcncgctattctagtgacttactgagttaccaagantgatgcctgcatacagaagcntggactcgtacccatntcagagaaacgaatacctttgcctcatt

SEQ ID NO: 33030 - DNA, 281 bp, Glycine max
  unsure (1)..(281): unsure at all n locations; Clone ID: 701106118H1
tctagggttatnttctctctcttggnttccattcctagcntcttcatccagangtagcagccaatggaagcggcggcgacggcaacggcaacagttctcgnaccaccgtcggctttcctcggaanaccctccgtactcnccttccgttccaatcttcgcttctccactaagttaancacttctgtagctatctccaagcatggtcatgggagacatgtgttngnactagcaggggtttgtagttagagctgcatcattacaccagantcatccgaacgntt

SEQ ID NO: 33031 - DNA, 275 bp, Glycine max
  unsure (1)..(275): unsure at all n locations; Clone ID: 701106119H1
gggccttgctggaactaagctctctttcaagccctctcgccagantttcagacccaagaatttcagtttaatattaattacaggagtggtgctgtggtagcnaagtatggtgacaagagtgtgtactttgatttggaggatctaggcaacactactggtcagtgggacttgtacggctccgatgcaccttcaccctacaaccctcttcagagcaagttcttcgagacattgcctctccatcacaaaaaggggatgttactcaagttttgatnngg

SEQ ID NO: 33032 - DNA, 218 bp, Glycine max
  Clone ID: 701106120H1
acaatgtcttgctccaatctgacaatgttggtgtcctcaaaaccttccctttccgacccctcgaacctctccttccgctctgtcctgaacccttttcagctccctacacaaaacccagcttcatgcaccccttcacgctcctcaagcacccaaattcagtgtggtctgagagaatgagaacccgcattgagtctgtgaagaacacgcagaaaatcagg

SEQ ID NO: 33033 - DNA, 277 bp, Glycine max
  unsure (1)..(277): unsure at all n locations; Clone ID: 701106121H1
caaagagatatganaaggccataaagtttgttgagtatgattcctccttcagtgatgaggagaaacagaagactaaggcattgaaaatcacatgcaatctcaacaatgcagcctgtaagttgaagctaaaggnctacaaacaggcagagaagatgtgcacaaaggttttagagcttgatagtagaaatgtaaaagcactctatcggagggcacaagggtatctccatcttgtggacttggatctagctgagatggatattaagaaagcccntnnnat

SEQ ID NO: 33034 - DNA, 272 bp, Glycine max
  Clone ID: 701106123H1
gcaccaattggtggcatgatgggttcacttcgcgtgatagagcttcagcttgtcgctttcatcttggtgttctcagcaagtggccttgtcccactccttgacctagtgttccctgcacttgcctctgcatacatcttggcactctcgctattcgcatttccatcgtcatcttcttcttcaacgcgttcgttacacgactcggggactgagatcttcaaagggggcagattgttccgaatgtatgtcgttgttgggatcactgtgggatcttc

SEQ ID NO: 33035 - DNA, 276 bp, Glycine max
  unsure (1)..(276): unsure at all n locations; Clone ID: 701106124H1
cgagcttctgttttgcaaaggcagtggaaggaacacaatggcggtttctctatcggcgctcacaacctcccnctcttcactctccttctcttcccacatttcccagagaccctgcactctctccttcgccagaaccgaatnnnnnnnnnnnnnnnnnnnnnnnntccccaaaaccccctcctccctcgtcgtcaccgccaccgcactcgccgaaccggaaactgaggacctgaagaagtacgtcaagtcgaggctcccaggtggattcgccgcgca

SEQ ID NO: 33036 - DNA, 267 bp, Glycine max
  unsure (1)..(267): unsure at all n locations; Clone ID: 701106125H1
ggcaagganggcantgagagcacttaaagcattggtgaagttgcaagcattggtgaggggtcacattgtgaggaagcaaacttcagatatgctaaggcgcatgcaaacctggtganactgcagtcncgggcacgtgcaatncgtgggaacttgtcagataatatgcttcttcaagtctcactttctcattancctgtaagcaaagtgggactatatgtanatctttgtggtctttaaanaatggccagacatgatcctgatctatta

SEQ ID NO: 33037 - DNA, 273 bp, Glycine max
  Clone ID: 701106126H1
tttgagttgcattgttgcatcaccgcaagtccacaacatggctgccactgccgctgcaggcatagcttccttgttttcttcttctattaacagtgtcaaatgtcttcgttcctccaagaactgctccattatagacccccttataaccacagtgccctcaaaccgtggcatgtttgtgtcacacttggtggaacctttgtccattgggggtgccataattcgcacaagttgtgggggcctagaatttctgctgctgttgcacaagaagaggct

SEQ ID NO: 33038 - DNA, 266 bp, Glycine max
  Clone ID: 701106127H1
aaagaaatggagaatgcggaggagcagcagcagcaaaacgaggaggttttgtcggttgaacttccggctccttccggttggaataaactgttcttccctaagaaagtgggaacaccaagaaaaagtgagattgtattcattgctccaactggggaggagatcaataccaaaaaacaattggagcagtacctaaaggcacatcctggcaatcctgtcatttcagagtttgactggggaactggtgagacccccaggcgatcagcaag

SEQ ID NO: 33039 - DNA, 273 bp, Glycine max
  unsure (1)..(273): unsure at all n locations; Clone ID: 701106128H1
cagattcaaccagttaaacttggaacccaaggctttgaggtttcaaaattgggattcggatgtatgggccttactggagcgtacaatgaccctctccaagaacaggatggcatatctgttatcaagtatgcgttcagtaagggaatcacattttttgatactgcggatgtttatggagccaatgctaatgaacttttggttggaaaggctttgaagcagctgcccagagaaaagatcagatagccacaaaatttggtatgctncangaggttc

SEQ ID NO: 33040 - DNA, 279 bp, Glycine max
  Clone ID: 701106130H1
cgtgaatcctcttccatttctctgcaactgcattctcttcccctttccgccgcagcgattttcagagatttaaccttctttgttcgtagatatgcgcggttactgattagttgatgatagctgtcgacaaatttcacatggaaagagaacgaacacggaaacgccctcgtcttgcatgggacgttgcccctccctcagtgtccgaggcgcaacgggctctgccagtgcccggtgacgaagaattcgaaagaaagcacgtttcgcctccgaaaagggaga

SEQ ID NO: 33041 - DNA, 281 bp, Glycine max
  Clone ID: 701106131H1
agaacactaccctgaacatagtaaagaagccagtgctaggatttgttagtgaagcaatggctcaaaccatgttgctcatgtctagtgtctctagcagttattccgtggatttgaagaaagaccttttcctccaattgcagagtcaaagtttaaggcctaagttctctcagctctcattcaacccacttccatcatcaacttcttccttttcttcaccccgtacattcacaactctggccctcttcaaatctaagaccaaagccgctcctgctagataaggt

SEQ ID NO: 33042 - DNA, 285 bp, Glycine max
  unsure (1)..(285): unsure at all n locations; Clone ID: 701106132H1
tgcagatctaatagctatgaagcaccataccggacatgacacggtcaggtggacacatgtaatgtctaaaatattaaaatatagaacgtagtacgagtntcgtgtcggtgttagacactgatagggacgcgtgtcggacaccggacacgtgtcggacaccggacacgacaaaggacttgaagtgcttagaattgtttatgtttnagatctagttgatgagaggcagatagaggtcaacttgccaagataactacagttctatattagatgctttgtgcaaaaacg

SEQ ID NO: 33043 - DNA, 291 bp, Glycine max
  unsure (1)..(291): unsure at all n locations; Clone ID: 701106133H1
cttgaagtgnaganaganngaattgagaaaggatanggtttagggttngcaaaggaangcnagggatggaaagcanctgtngtggaccgtcggctgctaagctttctcaaagcggactttgnaattcctgaccagattcccgncatgataattcccnctcagatggagcaattnctcgatgatggatcagtcactgatagttcactggctgacaatgtcaccgttgatcccgtcgtgcgaggattattagagattgggatgccattgaaganntgttgcaccatgtnttgt

SEQ ID NO: 33044 - DNA, 284 bp, Glycine max
  unsure (1)..(284): unsure at all n locations; Clone ID: 701106134H1
gtgagtgtgagtgtncggtgctcaatcggcaccgcttcaggcaacacccaaaccgattatcccgccaaattccaacggtcatctttctcaactgccaacttcctccccgacaacgcttcttcagatttagcagtttcaatttcgagtagtagcagcaggagagggctaatacgcatagccacgttgccatgtcttcttcccctcataggttgcctcccagccaacgccatgcagccaggttcaaaggaatatcttctcattaaagaagaggtgaggaaggtctt

SEQ ID NO: 33045 - DNA, 274 bp, Glycine max
  unsure (1)..(274): unsure at all n locations; Clone ID: 701106136H1
gcnatangctagtttatcgtgaggagaatataaagttgttngtnttctttgttgctgcagtagttttnggagcatggccatgccatggcgcaggctaccaaaggntccctctccnaatgaaaactggctatggtgancgntcttcggaggtanaatgcgcaagttttaggcttgctgtggaagcacacaacatccnagctcttanaancattcctgaagagtncgttgaaccagcaagggactacatnnatggngacantnnagatcggntcnc

SEQ ID NO: 33046 - DNA, 271 bp, Glycine max
  unsure (1)..(271): unsure at all n locations; Clone ID: 701106137H1
caacaggtcacctggatactatgatggacgctactggaccatgtggangctgcctatgtttggctgcactgatgcttttcaggtgttgaaggagcttcaagaggctaagactgcataccccaatggcttcatccgtatcattggatttgacaacgttcgccaagtgcagtgcatcagcttcatcgcctacaagcccccaggcttctaagtcattgaaaaatttgcaaagcatctgtagccaccccactttgtttgttgtattaaactacat

SEQ ID NO: 33047 - DNA, 271 bp, Glycine max
  unsure (1)..(271): unsure at all n locations; Clone ID: 701106138H1
agcaagtacagaaagaaggagagaggggagagagagtagtactcattgaggagaggctggagccgaactggagggtaaacgaatgcnttttgtaagggaggcaatgattcggacatgccgaagacatctcacccccttcctccaaaacgccaatcttctcctctccactacttaaatatcnccctctttctatattccaccaaccacttctcgccntnccactaataactccttgctttcgcttccaattcccaatcctctttaattcanc

SEQ ID NO: 33048 - DNA, 271 bp, Glycine max
  unsure (1)..(271): unsure at all n locations; Clone ID: 701106139H1
cactgagaggnagagggagtgagagtgttcttcgtttgctaccttctctcagaaatggttacgttncaggtttcaccagtaccaggtggtcgggagggctctcccaacggaagcagatcagcatccgaagatctaccgaatgaagctctgggccaccaacgaggttcgtgccaagtctaagttncggnattttttgaggaagctgnaganggtaaagnagagcnatggtcaagttctgctatcaacgagattttgagnagaacccaaccag

SEQ ID NO: 33049 - DNA, 272 bp, Glycine max
  unsure (1)..(272): unsure at all n locations; Clone ID: 701106141H1
gaaatcgatccttgctgatcaaaatcacatttcctttcatttcttcgttatttcctaatcccaatggctcaagcactatcaacttcatcactactactatcacnaaaaacagggtcctacgtcaaaccacagaacaatgtaattgtaccctgcatggcctcttttccatcaaggaaggaatttccaaggctaggaagggtgagagctcaggcttctggtgataacaaagacaactctgtggaagtacaacatgttaacaagggtgacaagna

SEQ ID NO: 33050 - DNA, 271 bp, Glycine max
  unsure (1)..(271): unsure at all n locations; Clone ID: 701106142H1
tccataacacaaggcagaaagcaagctcatcctagagttttaaaaatggcagcagcctcctccatggctctctcttccccatccttggctggcaaggccgtnaagctnggcccatcagcccccgaagtcgggagggtcagcatgaggaagaccgtcaccaagcaggcctcctccggaagcccatggtacggcccagaccgcgtcaagtacttgggcccattctctggcgagcccccgtcctacctcatggcgagttcccaggtgactaggt

SEQ ID NO: 33051 - DNA, 263 bp, Glycine max
  unsure (1)..(263): unsure at all n locations; Clone ID: 701106143H1
ctcaacatttcaagagaaatgttgcaacagaacaagatcttgaaggtcatcagcaagaacttggttaagaagtgccttgagctcttctttgaaattgcagagaacaaggaggattacaacaagttctatgaggctttctccaagaacttgaagctaggtatccatgaggattcacagaacaagggaaagattgctgaattgctcaggtaccactccaccaagagtggtgatgaaatgacaagcctcaaggttatgnggccagg

SEQ ID NO: 33052 - DNA, 272 bp, Glycine max
  unsure (1)..(272): unsure at all n locations; Clone ID: 701106145H1
tcttcttatagcttcatcccaaaaagcnctttnccttctaaatttgattccttagttcagcattgctattattatatatggcttcttcaccttcctcagaaaacaaaaacctagagggagtagctggtggtgccggagagaaacccattccacttggtgagaacgttctgcagaagcatgctgcattctttgactgaataaagatggtgtcatctacccatgggagactttaaagggttgcgtgaaatcgggatggggttttgctgtccgtt

SEQ ID NO: 33053 - DNA, 277 bp, Glycine max
  unsure (1)..(277): unsure at all n locations; Clone ID: 701106146H1
cttcattcttctcctaaatcctaatccttcttcactttcagttctncagcatgggaagttctggaacaaccgactatggagcatacacataccaaaaccttgagagggaaccttactggccctctgaaaagctcagaatttccatcactggggctggtggtttcattgcctcacacattgctcgccgcctcaagaccgagggacattacatcattgcttctgattggaagaagaatgagcacatgactgangacatgttctgccatgattccatctt

SEQ ID NO: 33054 - DNA, 280 bp, Glycine max
  unsure (1)..(280): unsure at all n locations; Clone ID: 701106147H1
caaagttctctcctccataaagaattctccttcctatcaagtttctattcaaagtctccaatattcctaaacacttttcctanatataaaaagccttatttccaacaaagtggtatcagagcttcaagatcctcaaaagatggcgaatggaggttttcctttccaaatgccgatgctcacaangaacaactatgataattggagtatcaagatgaaggcgctactaggagctcaagatgtgtgggataccgtagagatgacttcgaggagcaagatgaag

SEQ ID NO: 33055 - DNA, 279 bp, Glycine max
  unsure (1)..(279): unsure at all n locations; Clone ID: 701106148H1
agtttgtgaatcccatcttccaaatccaaactttaagagtgatgtgctaagacatggcacttaaagttcctgctacgtaaggctgccganattncaattgggtccatcggccgtggttatgatatatcacttgatatnaggctaagtnttgtaaaggngattccataaattcacgtttaattgagatngntgaaaatgntgtaagacaggtggtantacctggtggngtttcaatacanatgttccaaatcaataanatgtgataaaggggaacgcaca

SEQ ID NO: 33056 - DNA, 261 bp, Glycine max
  unsure (1)..(261): unsure at all n locations; Clone ID: 701106149H1
gtcactttttttattttttctccactgaagatagttgttaaccagagtgatttgggagcttntgatatgtcgagtggatccgtgagacgggtttcccgtcaagatatccagctggtgcaaaatctcatagaacgatgtctacaactgtatatgagccagaaagaagttgtggaaacactattagctcaagcaaaaatagagcctggtttcactgaactagtttggcaaaagcttgaagaagaaatgaagattcttcaggtt

SEQ ID NO: 33057 - DNA, 280 bp, Glycine max
  Clone ID: 701106150H1
gtcaagttggcacgaaaaagaattaaaagcagattatgacactactaatagtagtccagttttaaaaacaccatctcctatggaaaaacaagctgcgagtctttacacgagaaagatattcatgaaattccaagaggagttagtagagactcttgcaaatcctgctataaaaattgatgattcaggaacaatcactacatatcgagttgccaaatttggggaaaaccaaaaatctcatgttgtgacttttaattctttgagatgaaagctagttgcagcg

SEQ ID NO: 33058 - DNA, 279 bp, Glycine max
  unsure (1)..(279): unsure at all n locations; Clone ID: 701106151H1
cacacaccttgttttcctttctatagagacacacagagagagcaataaacacccttcaatggctaccactaccactaaagtttacattgtttactattctatgtacggacatgttgagaagctagctgaagagattaaaaaaggagctgcttctgttgaaggagtagaagcaaagctatggcaggtacctgaaacactgcctcaagaggtccttgggaaaatgggagcacctccnaagagtgatgtaccaattattacacccaatgagctacctgaggg

SEQ ID NO: 33059 - DNA, 271 bp, Glycine max
  unsure (1)..(271): unsure at all n locations; Clone ID: 701106152H1
acagtttcgatcgtctgnattgcaacanacacacgcatacagaagactagaatcattattcgcntcagggttggnggcatgaatttncaccggtagctctatcacttggatnacgcggaaccctttggntgaaacttttatcgcttcttttcttgttntgtntccttggaaaancnaatantntgcncgctantctagtaacttactgngttaccaagaatgatgcctgcatacagnagcatggatcgtacccatgtcagaganaccanat

SEQ ID NO: 33060 - DNA, 272 bp, Glycine max
  unsure (1)..(272): unsure at all n locations; Clone ID: 701106154H1
gcagagtcaaaacttacactagtggatggtgaaccagttattggcgacaatcctgctaggttgaatagattgaaatcacatgctgaaaagacaaaggaggaggtggtgtctcttcaagaatctttagaagccaaggaagctcttctttcccgagcaattgaggaaaatgaggcattgtttctcttgttgtacaaaagcttcncaaacgtgttgacagagcgccttcctgaaggatctagaacactgcatgagttgaagtctgcacaagttga

SEQ ID NO: 33061 - DNA, 271 bp, Glycine max
  Clone ID: 701106155H1
cgcagtgttagggtttctgaagcctccaaccagaaagagagggaaatggctcccaaacatcctagtacgggtttgtttgttggattgaacaagggtcacgttgtcaccaagaaggagttgcctccacgcccttcagatcgtaaggggaaaacaagcaagcgagtgcactttgtgaggaacctcattcgagaggttgccggctttgcaccttatgaaaagcgaataactgagttgctcaaggttggaaaagataagagggcatgaaagttgc

SEQ ID NO: 33062 - DNA, 272 bp, Glycine max
  unsure (1)..(272): unsure at all n locations; Clone ID: 701106156H1
gttttcaccgcatctccacctattctcaatctccacaaatcnaaganaagagaatgagtagangctcgagcagaactgtctacgttgggaatctacctggtgatatccgtgaaagagaagttgaagatttgtttctgaagtatggacacataacacacattgacctaaaggttcccccaagaccacctggttatgcatttgtagagtttgaagatgctcaagatgctgaggatgcaattcgtggtcntgatggctatgattttnagggcacg

SEQ ID NO: 33063 - DNA, 241 bp, Glycine max
  unsure (1)..(241): unsure at all n locations; Clone ID: 701106157H1
gatatgggttcgaagaggtatgcgctattgatgtgcggtgaggattcggagtacttggtgaagatgcacggaggcaccnctggggtattcatgaagttgctccaagagcaagaggaaaagtgggacctctacaagctcgtccaaggagagttcccggagcagcatgacttgcctctctacgatggctttgtcatcagtggaagctgctatgatgcacatgccaatgacccatggntccttg

SEQ ID NO: 33064 - DNA, 270 bp, Glycine max
  unsure (1)..(270): unsure at all n locations; Clone ID: 701106158H1
gggcttgctgctatagatggggttgggtggtgctgagaatggaaaagtagtggtggantctttggatgtgtgtaaatcannnnnnnnnnnnnnnnnnnnnnnnnnnnntggggaagttgaagaggaagaagagactgggtgttggtttaggttgaggttcattgggagctgcatttctcaagatccaaagttgatagctcagttagtggcaccagcactaattatgctganagtanatcaactattgatacaagtagagatnaccaacac

SEQ ID NO: 33065 - DNA, 272 bp, Glycine max
  Clone ID: 701106159H1
atttctccatttccatttcctctctcacttttcaagaatcgtaagctatgggaaagtcttacccaactgtgagtgctgattaccagaaggccgttgagaaggcgaagaagaagctcagaggcatcatcgctgagaagagatgcgctcctctaatgctccgtttggcatggcactctgctggaacctttgacaagggcacgaagaccggtggacccttcggaaccatcaagcaccctgccgaatggctcacagcgctaacaacggtcttgaca

SEQ ID NO: 33066 - DNA, 274 bp, Glycine max
  unsure (1)..(274): unsure at all n locations; Clone ID: 701106160H1
ttgagtctttctttgaaactttttaagtcagagagtctttgttgagacgaaaaacaaaaacnatgtcatcatcaacaatacggagagatctagaaantggaggggcgaacaagaacatcaacaacataagctacagtgccgctcccacttcctatgtttacgatccggaagttcattggacatcgnggctcgtgccgctgtttntggcggttaacgttgtggtgttctttntggtcatgtatgtcaacgntgccncangaaaaatctcggcttt

SEQ ID NO: 33067 - DNA, 276 bp, Glycine max
  unsure (1)..(276): unsure at all n locations; Clone ID: 701106161H1
ccggtctttctgactctcttcacaataaaatccaatctcagcgcanaacttcacatcaaagcgcgtggtgagggcagaaatggcggcggctacggcaatttctcagcttggctgcttctccgccgtccaccgcagctcacacctccggcggcgctcgcttctattcccttgccctcgctccaagttatcagttgttatgagtctggagaggcatgacacagatactgctgggtctgataccaaaaatacactaagttatgcagctgatgtgtcaaa

SEQ ID NO: 33068 - DNA, 279 bp, Glycine max
  unsure (1)..(279): unsure at all n locations; Clone ID: 701106162H1
tnaaaattcctcaatntctncgccaatcccaatctggttcctctcgcgctagggtttnagtcttngctcactnctnatcacaaccctaacaacacanatttcccactttctanggtttcgnttcatccancatggccgagtggcantccctcctcnaatcgnttttcgtcggcctnattgtctcctacctnctcgncaagctnatntccatcngcgtttnnttcanagacgacaatctcaccgtcacgcgcgngccgccgncggaancaccacaaccac

SEQ ID NO: 33069 - DNA, 281 bp, Glycine max
  unsure (1)..(281): unsure at all n locations; Clone ID: 701106163H1
cgacagagggtgaaactgaaactcccgtgtcggggtgtttacactgcactgtcacaatgacatcctccaactctccgaaacctgaaaagaagataaccaaaaacacagaaatctccaaaacccaaaagaagaaaaccaaaaacgctgaaacccccaaaaccgaaaagaagaaaaccaaaaacgctgaaacccccaaaaccgaaaagaagaaaaacgctgaaatccccaaaatcgaaaagangaaaaccaaaagcgctgaaatccctctaaccgtggcaaag

SEQ ID NO: 33070 - DNA, 281 bp, Glycine max
  unsure (1)..(281): unsure at all n locations; Clone ID: 701106164H1
gttattcgcccgacacattttttctccgatcccctattcctctnccattctccgttgtgtcgatttttgttactcnaaagggaaattgatttgatagatagacagatagatcgtttctatgggttaaagtgaaatccgaatccgaatctgaatctgaatctgatctaatcattttcatgttcgggcgtgcgatctccaatcaagcgcggttgtgtttaggttncatttgttgggcgtgtgagtcgtaggggttcgnagagcatagaataatgcctcggtgg

SEQ ID NO: 33071 - DNA, 282 bp, Glycine max
  unsure (1)..(282): unsure at all n locations; Clone ID: 701106165H1
cttattagtattatnacactctctctccgcgttaacaaaactatcnctgaacttncctagttattacaatttattacacaacccatctctctttctggtttcgcttagatttagaaacacagacttttccaaagtgctcgttcgtttacctcaaacctcaaaganaagaanaaancnttgngttancnctngttttcttttttgggaagncnaaaacattgngttcagnttctcacttccatggctgaggccagactctagggcccccctntcattgganat

SEQ ID NO: 33072 - DNA, 278 bp, Glycine max
  Clone ID: 701106166H1
ctcgttgattcggatctagagtcttttttcactcttcagttctcgttgttgttcttcgctttcctgaaactagggttttcaatttcgattcattcgttaataattaaagatgtttgggagggcaccgaagaagagcgataatacgaggtactacgaaatcctcggcgtctcgaagaacgcttcgcaggatgatctgaagaaggcttacaagaaagccgccatcaagaatcaccctgacaaggcggtgatcccgagaagtttaaagagctggcacaagc

SEQ ID NO: 33073 - DNA, 272 bp, Glycine max
  unsure (1)..(272): unsure at all n locations; Clone ID: 701106167H1
ctttgtatcacgaaaactatacgattcgattccttgttttcaatggacaccttcttcaannnnnnnnnnnnnnnnnnnnngagaagccgctggagttacgatactctcaagaatttccgtgagatctctccgctggttcagaatcacatcaaacgggtttattttacgttatgttgcgctgtggtggctgctgctgttggagctttcttcatgttctgtggaacattgggggttttctcaccacgttggcttccatggaagcaggtttggtt

SEQ ID NO: 33074 - DNA, 267 bp, Glycine max
  unsure (1)..(267): unsure at all n locations; Clone ID: 701106168H1
gagggcttatgaccaggtggtgcatgatgtggatttgcagaagctgcctgtaagatttgcaatggacagggctggattagttggagcagatggtcccacacattgtggttcttttgatgtcacatttatggcatgcctgcctaacatggtggtgatggctcctctgatgaagccgaacttttccacatggttgccactgcagcagccattaatgatcgacctagttgtntccgatatccaagggnaatggcatggtgttcaanacca

SEQ ID NO: 33075 - DNA, 270 bp, Glycine max
  unsure (1)..(270): unsure at all n locations; Clone ID: 701106169H1
cgagaagaaccgtaaagagntctgcaaatacctcttccaagagggagtttgctttgcgaagaaggacttcaatctgngcaaancacccanagattgntgtgccgaatctgcaggtgataaanctgatgcagagcttcaaatccagagagtatgtgagggagacatttgcgtggatncactattactggttcctcaccaacgatggaattgagttcctcaggacatacctcaaccttccttccgaattgtccctgccatctcaagaagcag

SEQ ID NO: 33076 - DNA, 268 bp, Glycine max
  unsure (1)..(268): unsure at all n locations; Clone ID: 701106170H1
gtcatttccttcccttccctcacgatctgaggaagacaccaatcttctctccacgcccttcttgggtaaccgtctgaagtgcagcaatggcagatggattgcattcgcagcatccatcggtagttcagaagttatctggacagtcttatcttgtgtccaggcttgctcctaatcactccagaaactgttctaccactggtagttacttcantggaggtttgcagtcttcaggtttggttccagtcacggcacacgcgcggctgagaag

SEQ ID NO: 33077 - DNA, 226 bp, Glycine max
  unsure (1)..(226): unsure at all n locations; Clone ID: 701106171H1
gattatttccctttgatgagtgttgaacggccaagatggtaaacgnagacgagtgggtgcgagcggcgatggcggacgacaccgtcgtggtggagcttctgctacgcctcaagcaaggtaccgtttcacacaaatctcaccaccagcttatacctttctcctggggtgtcaaacanccgcgtcaagatcaaggcttagcgccggcgtctctcgtgcgacgccgngt

SEQ ID NO: 33078 - DNA, 268 bp, Glycine max
  unsure (1)..(268): unsure at all n locations; Clone ID: 701106173H1
gttttcttgtaactccatggctgttgctgcattatcatcccttgacccaactttcctagcacaatnagagtactgtcatatggttgtacattaacgacctccaattacaatgcttaaaatttcaaggtttaaattgatggtgtgtgtgagttttggagctcaagtttttactagttggaattgcattgtgttatgtgttttattacacctaatatgcaagtaactagggaaacactgtatttgaaatggatgcnattgatcctggaga

SEQ ID NO: 33079 - DNA, 269 bp, Glycine max
  unsure (1)..(269): unsure at all n locations; Clone ID: 701106174H1
gcccgatggctgaaatggaccagaacacgggcggtgagcatnaggcggaggnaacgattaagattgaggcggaagtgcacggtggtgaagangcggttgttgcggagaagaantgnccggggtggcccgnggagnntgtgtttcagatgttagttcctgcgcagaaggttnggggtatcattgnacgcaaaggagaattcatcaagaaaattgtcgaggagacacgagctcgagttaaaattcttgatggtcctccgggaactgtgcaa

SEQ ID NO: 33080 - DNA, 271 bp, Glycine max
  unsure (1)..(271): unsure at all n locations; Clone ID: 701106175H1
gtaattcccaatcaagtaaagatttagattagcaggaatgaagaagaatggagtatagtagtcatcaaccttgttagcagtctcagtcacactgtaaatttttggttacttatctctcaaaatctcaaatgcatatgcaattgcaaagcatttccgatcctgagggagagaacttttgtgacagctgtatccactccgattgttgattttttatnttctttctcgcggcaagatctcactctgcacctagggttagggttttggcatggcg

SEQ ID NO: 33081 - DNA, 261 bp, Glycine max
  unsure (1)..(261): unsure at all n locations; Clone ID: 701106176H1
tccaattgcaacatactaagtgggttggctggtttaanatctgagcaacagctnntaattttctncttgcttgaattttnttggaagccatggattgttcatcatggnttaacacttccttggatctcaacattaatccccgcagagttcatgaagaagttcccaaggaggtagaaagcgagcttttctctttgggaatgaccaagtttaacgtggaagangagtctactagtgacntggaggaggaactgancgggtgat

SEQ ID NO: 33082 - DNA, 274 bp, Glycine max
  unsure (1)..(274): unsure at all n locations; Clone ID: 701106178H1
gttccaactggagaacttcctagaaacctgcttctctctcttgatccgacatctggttcagacagtggtgcctggctcaagattgacaatcatgggaatttttagtatctaccaggcttctaactctaatacatctaacaaaggancagttgcaatnagacagccttatattagggntgtaggaatagaagancacaaatgagaccaattctcggggtccagctgcatttacacangatgagatagaagaattcaaaanattgctgtgnanctg

SEQ ID NO: 33083 - DNA, 281 bp, Glycine max
  unsure (1)..(281): unsure at all n locations; Clone ID: 701106180H1
ccgaacctcccaattccttcacacccaccataataatatctttattgttcttttcttctctggtaccatannnnnnnnnnnnnnnnnnnnnnnnnnnnnnnnaagaccatgtcggagtgcgagcaccacaaggggaagaagaggaagatcttccggcaagtgttctggtgcatagtggtgttcctcttcctcgtgctgcttcacaattcttttgatatgggcaatccttagacccaccaaacccaccttcancctccaagacgtcaggtctacgccttcaa

SEQ ID NO: 33084 - DNA, 280 bp, Glycine max
  Clone ID: 701106181H1
gggatgtatctgttaaacgcaaatctttgaatactgttcggttcccaacaactgagtttcttggtggtggaaggattgtggtttctctggctttgcctaaatctgataagcaagataggtttgtgttttcatcaattaaggcctggctgtggagttaacaagagaagcacatgcttatagggaagagaaattgcccaacagggataccaagattgatcgtggatttgatcaaaggcctgattcgtggcctcctgctaatagggcagataaaccgtcgctt

SEQ ID NO: 33085 - DNA, 277 bp, Glycine max
  unsure (1)..(277): unsure at all n locations; Clone ID: 701106182H1
cacccagcatatctctctattcctttntattagcacccctcacattaccttgtgtcaccaactactttgactcctttaccataccattacaataattatcaaacctaaccagtaaaaatggtgaccgtngaggaaatccgcaacgctcagcgtncccatggacccgccaccatcttggncttcggcaccgccacgccgtccaactgcgtctcccaagccgattaccctgactactacttccgcattaccaacagcgnacacatgatgatctcaaaga

SEQ ID NO: 33086 - DNA, 271 bp, Glycine max
  unsure (1)..(271): unsure at all n locations; Clone ID: 701106183H1
ctgcttntacntgcgggccaaggtantggctcagcgtgccccatatcttccaccctttggctattcctaaccattnagtacaacttcacattttagaagaataccccctcttttgctgcatcagaggagttgtaaattaagagcatggctgcacaagctcttgtatnatcatcntctcttaccttctcagcggaggctncaanacaaagtcttggaccaagatcatccaatctccatttggcttctccagaaaagcctcnttcttgtcagg

SEQ ID NO: 33087 - DNA, 272 bp, Glycine max
  Clone ID: 701106184H1
cttcttgaactcaaggagatggctctgggaagaggcagtgcagtggttctactactttgcttcttgctgcttcactcctcagatggctcgtgctgccacctacacagttggagattctgggggttggacctttaacactgttgcctggcccaaaggaaagctctttcgggctggtgacacacttgctttcaattatagccctgggactcacaatgtggtggccgtgaacaaggctggatatgatagctgcaagactccaagaggagccaaag

SEQ ID NO: 33088 - DNA, 268 bp, Glycine max
  unsure (1)..(268): unsure at all n locations; Clone ID: 701106185H1
cgttacagcttggtttttctccctgtctcanccctctggcaagaactaagaaaantctgccacggaaacttgttttcggcaaagacccttgacgcaagcacggaccttaggcgcatgaaaatgaaggagcttcttaccgatatccgccaaagangcctcaacggcgaagtggtggacattggaagagcagccttcatggcatgcattaactttttatcgtacacgtttctctctctggatttgttccctctgtaggtgatggcgatac

SEQ ID NO: 33089 - DNA, 218 bp, Glycine max
  unsure (1)..(218): unsure at all n locations; Clone ID: 701106190H1
cctccattagggttttcttaaggctgaatgcngcttccctcgccgcatcattgaccctgacacaccacaatgtccggccctctcgaccgtttcgcaagaccctgtaacttcctcttctctctctctnagggttttancttnnttctatcttcgcttatnntttngttttggttattttggcaggttttgaaggtttctccgggagtgatgagangaaa

SEQ ID NO: 33090 - DNA, 231 bp, Glycine max
  unsure (1)..(231): unsure at all n locations; Clone ID: 701106191H1
agagaatccgaggcgacgagaagagannaataccgatggaggggaaggagcaggatgtgncgctgggagcgaacaagttcccggagagacagccgattgggacggcggcgcagagccaagacgacggcaaggactaccaggagccggcgccggcgccactggttgacccgacggagtttacgtcatggtccttttacagagcagggtagcagagtttgtggccattttctg

SEQ ID NO: 33091 - DNA, 271 bp, Glycine max
  unsure (1)..(271): unsure at all n locations; Clone ID: 701106192H1
gagctataagctagtttatcgtgaggagaatatgaagttgtttgttttctttgttgctgcagtagttttggtagcatggccatgccatggcgcaggctaccaaaggttccctctccgaatgaaaactggctatggtgagcgttcttcggaggtaaaatgcgcaagttttaggcttgctgtggaagcacacaacatccgagcctttaaaaccattcctgaagagtgcgtngaaccaacaaaggactacattaatggcgaacanttagatcag

SEQ ID NO: 33092 - DNA, 273 bp, Glycine max
  unsure (1)..(273): unsure at all n locations; Clone ID: 701106193H1
tcggtgaacttgcctcaagagccaagatataaaaggaatttactctcaaatcagcttcctgtgtttgtnccctggtgggtttgagaatatccttcaacctcgatctggcatgaattagcttatgttgttttgagattccaatgagtggacaaagtttttgttggaatcgagaggatagtgaagagcaattaaaagngtctatgtggtagacacggttttagcctttcagaccatacaaatgaaaagtatggtgaacatctgactccaacaggt

SEQ ID NO: 33093 - DNA, 275 bp, Glycine max
  Clone ID: 701106194H1
cagtgcaggggctcaattatggagaaagcaattcaaagacagagagttctgcttgaacatcttcaacccatttcttcaagttcaaatttttcctctcaaacccatcaatctacggatctctcagcttcattatgttttgctgggaattcttcgcatggtcaaacaggtggatcagatgatgacgtggtgattgtagctgcatatcgtactgccatctgcaaagcaaagcgtgggggcttaaggatacccttccagatgaccttcttgccacagtt

SEQ ID NO: 33094 - DNA, 277 bp, Glycine max
  Clone ID: 701106195H1
aaagaggtccatgccctccccgctctaacaatatataatgtaaccaaaccccttatcaatactacttcagagttaagttgagaacataccaatctacaataaacgatgattctcattatctccctcattttttctcttctctctttctcccatgcttctgtcctagatttctgtgttgcagattatgcaggtcctattggacctgcaggatattcctgcaagaagccttcaaaggtcacagcagatgattttgcttacagtggccttggcatgctgg

SEQ ID NO: 33095 - DNA, 281 bp, Glycine max
  unsure (1)..(281): unsure at all n locations; Clone ID: 701106196H1
cactcactaagctaaacaatttcatcaagcctgccatggcttcctcgtgtgcttcctctgccattgcagctgttgccatctccacaccaagttcccagnngaatggatcactcttgggaagcacaaaagcttcttttcttagtgggaggaaactgaaggtgaacagttttacagcaccagttggagcacgatccagcactacagtgtgtgcagttgctgagcctgataggcctctgtngttcccaggcagcacccctcctccgtgctagatggcagtttgc

SEQ ID NO: 33096 - DNA, 292 bp, Glycine max
  unsure (1)..(292): unsure at all n locations; Clone ID: 701106201H1
tgcagtccacactctgtcaaccccanccattcccttatccccacttcaccacactctattcanatccaattctggtcatgcttctctctccgttcgcgcctccatcgccgtggaaacccccacggagacggtgaagctgaacaagtacagctcccgcatcaccgagcccaaatcgcagggcgcctcccatgccgtgctctacggcgtcggtctctccgaggacgacatggccanggccccaggtcggcgtctcctcggtctggtacgaggcaacacctgcaacatnnacctt

SEQ ID NO: 33097 - DNA, 283 bp, Glycine max
  Clone ID: 701106202H1
gctaactctacaagcttcgtctcgtaaagaaaattcgaaagctcaatagagagaactcaattgaatcatcaaatgaggacagtgatttcgcgcttgatccattccacgccttccatttccaggctcaatgccacggtagtgtcaatcagcgggagaaatctctgcacagattctaacaaagttgatgggccattcaaagttgaagaagcagagactgtaaatgtgcctccactcccaacagaaaagttgcttgtgttgggagggaatgggttgttggatcaca

SEQ ID NO: 33098 - DNA, 276 bp, Glycine max
  unsure (1)..(276): unsure at all n locations; Clone ID: 701106204H1
aaaaactcccgttttctctctctgtttttccatggccatctgatcaaacttttcttgattctctctctcagttttngctattctgagtgatgggtatgccctgccgctgttcccacacctcccacatcantgaaatcatcatcaccagcttcttccgccacaagtcttaaattacaacaatttccctcaattattcatcaaccaaccaccttaatagccttttccaatggttccttaaagattcaacttggtcggagtaaacatggcggctagtgg

SEQ ID NO: 33099 - DNA, 272 bp, Glycine max
  unsure (1)..(272): unsure at all n locations; Clone ID: 701106206H1
cttcccttctccaacatgccaaacgacagcgttctgagtcttttacttcttcgttaccctcttcacatgcctncctctctgctaattcccacgatgaccatattttcctaccgagtcaactccatgacgatgactcagtgagttgcactgctaccgacccaaaccttaactacaagccngtgatcggaatcctgacccaccccggcgacggtgcctctggccggctcagcaacgccaccggggtttcttacatcgccgcctcctacgttaaa

SEQ ID NO: 33100 - DNA, 267 bp, Glycine max
  Clone ID: 701106207H1
caaaatcttttctaatttgttcataactcaataattctcatcatgggctccttgattgttccaggtgaacatgatcacaaactaaagcttgtttctcttccctttgtatcaaccagtcacctcattcccgtagtagacatagctaggctctttgccattcatggtgttgatgtcaccataatcaccaccacagccactgccgccattttccaaagctctatcgatcgcgaccgtgaccgcggccacgctattagaacccagttgtca

SEQ ID NO: 33101 - DNA, 268 bp, Glycine max
  Clone ID: 701106208H1
aatttttcaacggtgttagttcatctccacttttcttcaacaccatccttctctttctttttatttttatatttttgtcaattgttcgattcttttggtgttccagggagatcgattgataccgtcccgttgattttccaattcgacgaataagggtatcacatctcttaatcaaccatgtttacccgaatttttggtaaacctaaaccggaagtcaatactctaaccgctttagacgagttaaatgacaaacttgaaatgttagaga

SEQ ID NO: 33102 - DNA, 230 bp, Glycine max
  Clone ID: 701106209H1
aatttgggttttctcaaaagtgaaaagcgaagtccgtcactgccacaatcaccacttagatcagtgatatacacacccatctcagaaaccccacaagaacaaaaactcagaactcttgagtgatagacttcgaatgaaatcctgtttttcattagtgagattcaattgaagtgaagtgattattcactggaaaacttatttttcatacaactgaagctgttagatttgtt

SEQ ID NO: 33103 - DNA, 271 bp, Glycine max
  unsure (1)..(271): unsure at all n locations; Clone ID: 701106210H1
actcgatcaaacacaaaatggaaaagaatgtngggattctcgccattgacatctacttccctgcccgcttgcgttcagcaggaagcattggagactcatgatggtgccagtaaagggaagtataccattggacttggccaagactgcatgtcattctgtaccgaagtagaagatgtcatctcaatgagtttgacagtggttacttctcttcttgagaagtatgggattgatcctaaacaaatcggtcgtctggaagttggaagcgagaccg

SEQ ID NO: 33104 - DNA, 270 bp, Glycine max
  unsure (1)..(270): unsure at all n locations; Clone ID: 701106211H1
gataactagaaacagtgtgatganaatnaaggtccttgttttcttcgttgctacaattttggtagcatggcaatgccatgcgtancgatatgttccctctccgaatgaacactggctatggtgcccgtactccggaggtgaaatgcgcaagttggaggcttgctgtggaagcacacaacatctttggctttgagaccattcctgaagagtgcgttgaagcaacaaaggaatacatccatggcgaacaatatagatcagactccaaaacag

SEQ ID NO: 33105 - DNA, 272 bp, Glycine max
  Clone ID: 701106212H1
atgagatcaatgagagagatcgtggaagccctgcttatcttagattgagccagaaaactgtcaattcccttggtgatctagtccccttcagcaacaagttgtattctggatgtttgcaaaagagggtggggataacagctggaatctgtgtcttgatccaaaacaaagccgagaagaagggagataggtatgaggcaatctacagcttctactttggggactacggtcacatttcagtgcagggttcatacctgacctatgaggacacttat

SEQ ID NO: 33106 - DNA, 275 bp, Glycine max
  unsure (1)..(275): unsure at all n locations; Clone ID: 701106213H1
ggggtatnnttngaagcagaagaggtcactaagttcttaaatcggatgcagttgcatggccaaactgtctacatactgataataagcagtgtaactttgtggtatctgtacctccttctagaagtgatgttcttcacccatgtgatgttatggaggatgtggcaattgcttatggattcaatgctattaaggatcaagcagtagtagataataaaggctcaaagaggttggctgcttccttgactctacttcctctgaatgagctcagtgatctt

SEQ ID NO: 33107 - DNA, 276 bp, Glycine max
  Clone ID: 701106214H1
cttcacattttagaagaataccccctcttttgctgcatcagaggagttgtaaattaagagcatggctgcacaagctcttgtatcatcatcttctcttaccttctcagcggaggctgcaagacaaagtcttggaccaagatcactccaatctccatttggcttctccagaaaagcctcctttcttgttaaggcagctgctaccccccctgtcaagcaaggatcagacaggcctttgtggtttgcatcaaagcaaagtctttcttacttggatggcag

SEQ ID NO: 33108 - DNA, 278 bp, Glycine max
  unsure (1)..(278): unsure at all n locations; Clone ID: 701106215H1
ctaaggttacaactgatcatgctattcctcagaatcacaagagnntgcctttgcatttagccttctaattcacatttnnctctatatcctcgaactcaaaataatgggctggtcctaaaacttgtaatagcctcacaaaaatcgaccttttttcccatcaatgttacttacaaactactcatttnttttctnctaattttctccctctctttcctttctggngtgcacctctcatcactttttgagccaatattcaaaggtgcctagtagtgtttgag

SEQ ID NO: 33109 - DNA, 287 bp, Glycine max
  unsure (1)..(287): unsure at all n locations; Clone ID: 701106217H1
gtgagtttgttgatcgagataactagaaacagtgtgatgaaaatgaaggtccttgttttcttcgttgctacaattttggtacgcatggcaatgccatgcgtancgatatgttccctctccgaatgaacactggctatggtgcccgtactccggaggtgaaatgcgcaagttggaggcttgctgtggaagcacacaacatctttggnnttgagaccattcctgaagagtgcgttgaagcaacaaaggaatacatccatggcgaacaatatagatcagactccaaaacc

SEQ ID NO: 33110 - DNA, 277 bp, Glycine max
  Clone ID: 701106219H1
caataatcgaaagtgttaatgctggtttgccaatggctacttggcctctgtttgctgagcagttttacaatgagaagttgctggctgaggtgctgagaattggggtgccagtgggggcaaaggaatggaggaattggaatgagtttggagatgaggtggtaaaaagggaagagataggaaatgcaattggtgttttgatgggtggtgaagagtctatagaaatgaggagaagagcaaaagcacttagtgatgctgctaagaaagctattcaggttgg

SEQ ID NO: 33111 - DNA, 120 bp, Glycine max
  unsure (1)..(120): unsure at all n locations; Clone ID: 701106220H1
gacagtgccagctccctcaagccaaagtcttgtgcttttcacatccccattttcccatttccctttctgcttcctctttcgccaaatgggtctcccataacacaatcttcacctttngng

SEQ ID NO: 33112 - DNA, 271 bp, Glycine max
  unsure (1)..(271): unsure at all n locations; Clone ID: 701106221H1
gganaaaattccgaccccagcccttcactcttctctctgcagcggaggtgtacttttgatctagtacctgctatccctatgtataagcatggcaagtatttttaaacgttgtgacatccattcttgttaggagttgttataaagctattcatccctgctcaatattctacaccccaagacaganaaggacaatagagatcaactaactatcccaacttgccaatataaactgtgaagagtttctataaatgcaggacttctagcatactgt

SEQ ID NO: 33113 - DNA, 268 bp, Glycine max
  Clone ID: 701106223H1
aaagagactgaaagaacagcaatggaagctgcattatgcagtgcacttgctctttcacccaatcaagtattcaatgcagcaaatcctggagataaaaatgttcctttgaaatatagcaaagatcggagtgttgtaatgacagtggcagccactggaatattagggaaaggtggtgggttgttggagaggccaaccatagagacaacatcacctggtcgggaatctgaatttgacttaaggaaatcgcggaaaacatccccaccttacc

SEQ ID NO: 33114 - DNA, 224 bp, Glycine max
  unsure (1)..(224): unsure at all n locations; Clone ID: 701106224H1
ccaactccacacaaccatcattgancaccttctcatcctccncttaagaagaaagccacccanccaattggcggagatcaagcacgcccgtctcgccatggtgggcttcttgggctttgcagtccaagctgccgccactggcaagggcccgctnaacaactgggccacccacttgagtgacccactccacacaaccatcattgacaccttctcatcctcctctt

SEQ ID NO: 33115 - DNA, 237 bp, Glycine max
  unsure (1)..(237): unsure at all n locations; Clone ID: 701106225H1
gttgtttgtnttctttgttgctgcagtagtnntggtagcatggccatgccatggcgcaggctaccaanggttccctctccgaatgaaaactggctatggtgagcgttcttcggaggtaaaatgcgcaagttttaggcttgctgtggaagcacacaacatccgagccttaaaaccattcctgaagagtgcgttgaaccaacaaaggactacattaatggcgaacaatttagatcagac

SEQ ID NO: 33116 - DNA, 252 bp, Glycine max
  unsure (1)..(252): unsure at all n locations; Clone ID: 701106226H1
tccagcctcaggcacattagttcaagccttcaagcacaaaaatnataaccanngttgcttcttacaatgtcactccaaatcagccaactcccagtgatcctatttggctatccgatagtgatcaaattgggcacctacgtcatgtaaacactatctatgcctacaaatcaagacccaacaacaccattgatattgagaggatgaagaactctcttagcaagattttggtgccatactatccaatagctggca

SEQ ID NO: 33117 - DNA, 271 bp, Glycine max
  Clone ID: 701106227H1
cttcctttgcggcagggaaacaccatcagttgctggaataattaaccctggttctgagggatttcaaaaacttttttttggtcaggaggaaattgccatcccagtgcatgctaccgttgaagcagcttgtgctgcacatcctactgccgatgtcttcatcaactttgcttcatttagaagtgctgcagcatcatccatggctgctttaaaacagccaacaattagagttgttgctattattgctgaaggagtacccgagtcagacactaag

SEQ ID NO: 33118 - DNA, 271 bp, Glycine max
  Clone ID: 701106228H1
aaactcagaaaacacagggaaagaaagagttgagtgatggcggcttgtctgcaactgtggcaatgcaaactagcgagaccctttgactcattaccggtgcgaaggtcaattcctttgagtctgaggtgttcggccgcgccctcttcttccaagccgacgcgctcctacagcatcactctcatccccggcgacggcatcggccccgaaatcatctcggtggccaaagacgttcttgtcctcgccggttatctcgaaggattaaatacgattc

SEQ ID NO: 33119 - DNA, 277 bp, Glycine max
  Clone ID: 701106230H1
gggcagagtggccttgctgccacgatccactgagattcagcccttgtcgctttgattcgtctgcaaaggattctacccgccgctcgatgggaattgcgcattggcaagcaatctggtttctctctcctctctctctctctgctctgagtcacaggttgtgaaccgttgttggcacttggcagataattattgcatctaatgagtcatctgcaaaaattgtgtctctgaatgaccatcaagtgatccagtgcgattggaaagaaccttcccaattaca

SEQ ID NO: 33120 - DNA, 280 bp, Glycine max
  unsure (1)..(280): unsure at all n locations; Clone ID: 701106232H1
aaatggtgactgtgaaagggacaatggatgttaaggctctggcagagaatctcatggagaagctgaagagaagggttgaggtggttcctccaaagaaagacaaggaannnnnnnnnnnnnnnnnnnagaaggaagtatcagggaagaagaagaacaagggtggtggtggaggagacaagaatgagaatattgaagatggaatagagaaaatagagtataacagaatggagtatttggcaccacctgcttttggctttggttatggaccttatggtggtgg

SEQ ID NO: 33121 - DNA, 281 bp, Glycine max
  Clone ID: 701106233H1
cacaacgctcaaattgttttcttttgctatcactgttaccgaatccctcactttcttcttcatcttcttctcctttgtcacttctcagcaccactcaatctcttcaatttctttcttctactggcaataagcatcagcacactgccacatccagttcccttctgtgtgttcctttcttctactctctccagtccagccaaaacgaagctccttccatcatttcagttttttcgtcaagtgttgttgcttcttctcccaaatcgtccaaacatgctggtaac

SEQ ID NO: 33122 - DNA, 278 bp, Glycine max
  unsure (1)..(278): unsure at all n locations; Clone ID: 701106234H1
cagtatcggagtccaaatctgcttctgtgcaacctcatgcagctgaatctttctctgttggatatattcagatgaagactgcagcgaactgttcttacctggtagttanctctacgagttgttcatcgcctaagttcactacggataagattggtattacgtttggcgatgcttatggcaaccaggtatatgaaccaagactggatgatccaatttcaaggacctttgagcagtgttcttcagatacatttcagatagatggtgcatgtgcatctcca

SEQ ID NO: 33123 - DNA, 277 bp, Glycine max
  unsure (1)..(277): unsure at all n locations; Clone ID: 701106235H1
ctgctccgcataactcctcacacanncacacanaacagaacacaacacatacacatacacatgttgttgatgagtggaggcaacaaaaaacacagatccatcacacacatgaacaattgatctttgtcctttgtatataatttgattctaatttntggcactaagagagccactcaaggctctgggatgtactatacgccattcggggttctgattttcggcggagagaaggttcaagagacccagtgggagaaggagcgatnagagagagcatggc

SEQ ID NO: 33124 - DNA, 270 bp, Glycine max
  unsure (1)..(270): unsure at all n locations; Clone ID: 701106237H1
caacaacaactatctctcatccttcttctttctgtatccgtaacacttgcaacacacatggctacaatcaccaacactttcatattcaaaccccccatctctcatcacccaaagcagcttctttattcccaccgctcttctctacgctttctcaccaaatttaaaaccccctccggagcgaatnctcggcggctggttccgaaagccacggcggctcccggggccaagaagacagaaaagccgcacgagagagtccagcgagtccacagc

SEQ ID NO: 33125 - DNA, 208 bp, Glycine max
  Clone ID: 701106238H1
ttacagaaacatgctggagaatcttcaggctcctccgccaacggaatcggccccagtggtgaagcgctatgctcctcccaaccagaggaaccgttctgccaacaggcgcaaatcatctgatcggcttgatcggacaaacagtatcgggaatgacttagaaaagaatcaagttgcttattcaagaagtgttcacattccagatcacgga

SEQ ID NO: 33126 - DNA, 265 bp, Glycine max
  unsure (1)..(265): unsure at all n locations; Clone ID: 701106239H1
gatcgagataactagaaacagtgtgatgaaaatgaaggtccttgttttcttcgttgctacaattttngtagcatggcaatgccatgcgtacgatatgttccctctccgaatgaacactggctatggtgcccgtactccggaggtgaaatgcgcaagttggaggcttgctgtggaagcacacaacatctttggctttgagaccattcctgaagagtgcgttgaagcaacaaaggaatacatccatggcgaacaatatagatcagac

SEQ ID NO: 33127 - DNA, 267 bp, Glycine max
  unsure (1)..(267): unsure at all n locations; Clone ID: 701106240H1
atgagattagctcttgcccttggagatgaaaatgctgtatcaatgccagtagcagctgctgcaaatgaggctttcaagaaagccagaagcatggggttgggagaccttgatttttcagcagttcatgagactttgaaagctcctgatcattcatcttgaccagatggancctctgaattgattaaaccactgttaggcaacagtgtgatgcgaaccatctatttatgaaacagcaatttgagcataggtcattattgtagaatcttg

SEQ ID NO: 33128 - DNA, 265 bp, Glycine max
  Clone ID: 701106241H1
gttgcgtgatgaaaataatttgcacaaatcttcagtaatggttacatcaggtgccaatcaggcatttgtgaatctagttcttactctctgtgatccgggtgattctgtggttatgtttgctccttactacttcaatgcgtacatgtccttccagatgactggcattaccaatattctagttggtcctggtagctcagacacactccatcctgatgcagggggttcacatattggttaaatgttggatggattgggtctgtataca

SEQ ID NO: 33129 - DNA, 267 bp, Glycine max
  unsure (1)..(267): unsure at all n locations; Clone ID: 701106242H1
caattctaaagtttacgaaaaggattgtnaacccatgantcgcaaacnaagtgcatgcttccttgattaggaatgtcttcaagagtcaaactcactaggaagantgcactttgtttgcaactcatgggtttacaattctaaagtttacgaaaaggatcggattttctttgccagtgagacatatgttccaagtgaaacacctggtccattagtgacatatagagcngcagaattgcaggctctaagaggaaatggaacagggaagcg

SEQ ID NO: 33130 - DNA, 269 bp, Glycine max
  unsure (1)..(269): unsure at all n locations; Clone ID: 701106243H1
ggcgaaaaccctaatcctgaggcactgaaagtgtgatatggcaagagtcatttcctcttcctgcgcacgcctcgcaatgcgcctcttnnnnnnnnnnnnnnnnnnnnnnnngttcnccgtcactttacccaaaccctcatcactctccctctcatcgcgtcgattcctcttccctctctcccatgccatcgtccctccctccacccgcgtcgccggaatccggtgccgcgttaaccgcgccgganactcggcgtactcaccgctgaaat

SEQ ID NO: 33131 - DNA, 271 bp, Glycine max
  unsure (1)..(271): unsure at all n locations; Clone ID: 701106244H1
ctacatgtgtctcttggcctgtgtaccccatgcatgctacatccacgtgacctagacaagccatccctttctcatacaccagaggttggaagaaatcgtgtagcttctgttccttcggagatactctnccccgtcacttgtagtccatttccatctatngcaattcccttatgtncctgcnatgatggtccatgtccatcatttgaacccagagaagtagaaacacaggatggattacctcatcactctcaagcatcaacagtggatcagg

SEQ ID NO: 33132 - DNA, 275 bp, Glycine max
  Clone ID: 701106246H1
cagtgtctttcatcatcctcttcgtgatcgtcttctgttgttgctccactcactatctttatttttcctattctatccttctcgcttcttaggttagccgagcgtcatcgatccagaaacgataaaggcagtcataaagtgagaatggatctgtgtgctgctcatgcgaagaaccttttccacacaaattcgtttttcccacagacccattccctccaatttgggaaggagcagagtgtttgagatcactgtttcgaggagaaacccttactcta

SEQ ID NO: 33133 - DNA, 276 bp, Glycine max
  unsure (1)..(276): unsure at all n locations; Clone ID: 701106247H1
cacaaaactcagtttccaattcaccaaactcacaatggttgatctagattggcaaacaaagatggttcactccaacatcatgcctccaatgtcccccaaactctctctcccggatcataacattccaatcccaactttgcaactcccccttcgccaaaacgacatcaccgcagcgtcgtctcctatctgcnctgcatacgacaactaccttcgtctccctganctcaganccctctgggcctccaaggacttccccaattgggccaagagcccatc

SEQ ID NO: 33134 - DNA, 244 bp, Glycine max
  unsure (1)..(244): unsure at all n locations; Clone ID: 701106249H1
acacaacacaacacagcataccgtgtttcattttctctcacacacaaacctccttcgttttcatttacttctcaggaggtataactactatttttcgcnnnnnnnnnnnnnnnnnnnttgattaaatcttttgccatgggaacccagattttgcgacctcaggactgcttggtagaacgaatcagggctcctccggctgacttttcccggcggaggagttccggtaattactgtaattattatt

SEQ ID NO: 33135 - DNA, 226 bp, Glycine max
  unsure (1)..(226): unsure at all n locations; Clone ID: 701106250H1
tgcgttgcatttccattnccagtttccacncatggctgctctcacttctctctctttctnagcagtgactcantgcncagaaagaaaagtaaccctttcctccactcgttttctcgctncctctnnagaactctttgggttncgaaccgatntctcgtaccactatgtnggtgttcgagcttccaattctgcgtctaaaatggttgttcaatgcatgtctctgcca

SEQ ID NO: 33136 - DNA, 274 bp, Glycine max
  unsure (1)..(274): unsure at all n locations; Clone ID: 701106251H1
aataagatgctatattttcaggcttgtcatataggcgggtgtttctattttgtataacaggtacaattagatgttgctaatgttttagatttctttctttttttgggttagacgacaccagattgtgggtgaactcgtgaactcgagtacgtttggatagagaattttaagtgaggaaagtaatttataagaaaatttaananannnannaaanaannanantnnnanaganaanaaaancnaaanaaaaaggggngcccccccctntnttncc

SEQ ID NO: 33137 - DNA, 250 bp, Glycine max
  unsure (1)..(250): unsure at all n locations; Clone ID: 701106252H1
gcgacaagatgctggaatcattggatatgaggaaagatgttcaaagacntttttcaagatgattccccatgantaagcaagtnatgatgttcnnagcaacacttcagcaaggaantncncccagtcctgnaagaaattantncaggnnccnanggaaattatgntgntgnntanggcnaattgacactttcaanggntttgnagcactacatccnattggnagangggnaaagaatcggaattngaatgg

SEQ ID NO: 33138 - DNA, 267 bp, Glycine max
  unsure (1)..(267): unsure at all n locations; Clone ID: 701106253H1
gtttcgctctctcagtttcttttccccaaattgtttttcatctaacaatttactttgcagaaccctaancctagccccttcgcctaccttgtaaccttcctttcgatccttcatctcgcagacaatgggtgaaactaaggacgnagcatacgaggaagagcttctcgattacgncgaggaagacgacaaggcccccgactccgccggagctaaagtcaacggcgaantaccaagaagggctatgttggaattcacagttcgggattt

SEQ ID NO: 33139 - DNA, 268 bp, Glycine max
  Clone ID: 701106254H1
cttgctcatcaagtccaagaaccaacctaccttttgcaatctcaattcaatggcgtcctctctcattgcgaaggcttcctctcctcttccctcctctccaggtccctcctctcgccccgccgcttccgcttcccaccgctctttcaacaccaacgccatgcgccagtatgacaaccgcgccgacgaccacagcaccgacatcgatcgtcactccgaacgctctttccctagcactgcgcgccgcgacgatatcttctcagatgtgttg

SEQ ID NO: 33140 - DNA, 265 bp, Glycine max
  unsure (1)..(265): unsure at all n locations; Clone ID: 701106255H1
atcagcagggctgcttcgccggcggcacngtactccgcctcgcgaangacctcgccgagaacaacaagggtgcgagggtgctcgttgtctgctccgagataaccaccgtgacgttccgcggcccctcngacacgcacctcgactcgctcgtgggacaggcactgttcnagacggcgccgcagcgttgatcatcggatcagaccccgacccagcagtggagcggccaatattcgagatgatatcggccgcccagacaatcctgccc

SEQ ID NO: 33141 - DNA, 259 bp, Glycine max
  unsure (1)..(259): unsure at all n locations; Clone ID: 701106256H1
cacacctcatcgtttctctctctagatctctgtttcttctttttctccaaccttcgtttcaccaccacacttacattactttgtcgaaatggctccaccaattgagaccccaaacaaggtttccagctatcaacagtccccaaaccctcgtcttaacgancggattctttcatccatttccaggagacacgttgctgcacacccgtggcacgatcttgagataggacccgaagctccaaagatcttcaactgtgtggtc

SEQ ID NO: 33142 - DNA, 267 bp, Glycine max
  Clone ID: 701106257H1
acttcacaacacctcacccattttccactctttcccttctaccttgttccacctcttaatttttctaacaaaatggaggaaagtgtgctaacaaagaggccaagagaagaagaacccctagagaacaaagatagtacttatgaattactagagtccttatcaaagaggcacaggtcatacaaccacatactctccctccttgaatcagaggaagatgactccacacaagacctatcttctctcatcacttccctccaacaagaaatc

SEQ ID NO: 33143 - DNA, 268 bp, Glycine max
  Clone ID: 701106258H1
ttacaaagtagtactacttggtttcaatcaaaacaaaaactcacactttggtggccacagcaacaataacaatggcagcctcactacaagctgcagctaccttcatgcaacccaccaaggtgggcatggccactcgcaacctcaaatctacacaatgcatttctaaggcttttggcttggaacccgctgcagctaaactcatttgctcccttaagcccgatctcaaagattttgctcaaaaatgtgtcgacgccaccaaaattgcagg

SEQ ID NO: 33144 - DNA, 269 bp, Glycine max
  Clone ID: 701106260H1
gagaaattgagtttctgagataaccacttttctctttgattcatcaatggcaaccgcgaggaccgtgaaggatgtttcgcctcacgatttcgtgaaggcttacgcctcccatctcaagcgttccggcaagatggagcttcctgagtggactgatattgtaaaaacagcaaaatttaaggaattggctccatatgatcctgactggtattatgttagggctgcctcaatggcaagaaagatttatttgagaggcggtctggtgttggggc

SEQ ID NO: 33145 - DNA, 278 bp, Glycine max
  unsure (1)..(278): unsure at all n locations; Clone ID: 701106263H1
gatattccaacttatgttgttggtgtaaatgaaggggactacactcatcagntctctaacattataagcaacgctttcctgcaccacaaactgtcttgctccctttgtgaagatcctggatgaagagtttggaattgtgaagggaaccatgacaaccacacattcctacacaggagaccagaggcttttggatgcttcacaccgtgacttgagaagagccagggctgcagcactgaacattgtcccaaccagcactggagctgccaaggctgtgtctc

SEQ ID NO: 33146 - DNA, 277 bp, Glycine max
  unsure (1)..(277): unsure at all n locations; Clone ID: 701106264H1
tcatcttcctctttttctcaacaaaaaggggttcaattctagctagttctattacgtcgtccgccaccatgaacatggcgatcgcgcttctgttcatggttttcgcagtttcatcagctttagacatgtcaataatatcacacgacaacgctcatgcggatagggccacgaggcgcaccgacgaggaggtgatgtcaatgttcgangagtggctggtgaaacacgacaaggtgtacaacgcgctcggtgagaaggagaagaggtttcaaatcttcaa

SEQ ID NO: 33147 - DNA, 278 bp, Glycine max
  unsure (1)..(278): unsure at all n locations; Clone ID: 701106265H1
ttcgttttgccctttcttcaagncaacctcttcacaactctnctttnttcctntcttcctctcactaccaccatacctcacagtaagcgtaagatggcaaaaggagattttcaaagatgtagaacttgacactacccagtctgcttatgtttttaaatgccanttgtatgatttgactggtgtgcctcctgaaagacaaaaaattatggtcaagggtggtcttttgaaggatgatgctgattggtcaacagtaggggtgaaagagggtcanaagctat

SEQ ID NO: 33148 - DNA, 272 bp, Glycine max
  unsure (1)..(272): unsure at all n locations; Clone ID: 701106267H1
cgatctttgnagtaagaagagtgtgttgtgttgaagtatcaaagatgttgattggttctctcttaaacaggcgtcctaagatcaaggggactgtggtgttgatgaccaagaatgtgttcgacgtcaacgacttcatggcgactactaggggcggaccagccgctgttgcnggcggcatcttcggtgccgcccaggacattgttggtggaatagttgatggtgctacggccatcttcagccgtaacattgccatacagttgatcagtgccacc

SEQ ID NO: 33149 - DNA, 268 bp, Glycine max
  Clone ID: 701106268H1
gaaaagaagatgaagaatgacccttcatttacatatgaggagacggttcagactgccatttctgccctgcaatcagttcttcaggaggattttaaggccactgagattgaggttggagtggtgcggaaggataatccagaattcagagttttaaccaccgacgaaattgatgagcacttgactgcaataagtgagcgtgactgagttcttgataaggatgtagttgttcaaactttctgatggtagagattatattatgtacttgttt

SEQ ID NO: 33150 - DNA, 266 bp, Glycine max
  Clone ID: 701106269H1
ggcagttcaggtggcaaaacagaacctctcttatcttctttgtaagaactacgacgaagtaacaacaatggtggcgggaactgcaaccttgaagcttagcctctccgctttttcttctccaatgtcaaatttcagcgcttcctcttcattcccctctcgtctcccaatgcgaaccccttcttcttctaaacctcgatttctcaggatttacgccttgaccagcaacgacatcaaggtcggcaccaacctcgaagtcgatggtgctc

SEQ ID NO: 33151 - DNA, 113 bp, Glycine max
  unsure (1)..(113): unsure at all n locations; Clone ID: 701106271H1
tgcaaagtgtgagagaaagacaatgccgaagtctcaatttcgaaccccatttctggtttcttttccccttttgtnattcatcttcaacctcaccccttcgcacgcactctatg

SEQ ID NO: 33152 - DNA, 153 bp, Glycine max
  unsure (1)..(153): unsure at all n locations; Clone ID: 701106272H1
attttaagtacaatttgttaaatatttgaanaggacaaaaaagagtttttagaaaaaatttaaaatagaaaaataaaaattggtcttggtctaatcctgagtgtgcaccaggctgcaccagcatatataccccttctcttctcacnctctcca

SEQ ID NO: 33153 - DNA, 262 bp, Glycine max
  unsure (1)..(262): unsure at all n locations; Clone ID: 701106273H1
gaagagagaaagtntctctccagtatccactcttggcgtttacaagaatcgttttatatttgatcatcnnnnnnnnnnnnnnnnnnnnnnnnnaaccccgattccagaatattccgaacgccatgtttcatcgccgtccagatccagagaattgagttgatggggggtaacaattccaaggaggatagcaattggaggcagaattcacctgtgcgttcaagttcttctgcgtctcttggggttcatatcctgaccccaactc

SEQ ID NO: 33154 - DNA, 264 bp, Glycine max
  Clone ID: 701106274H1
gtcaaacaatgccatgggtgaaaagggggttagagcttttcggtcactcctaaaatcacaaattaacttggaggaactttatttgatgaatgatggtatatcagaggaagctgcaaaagcagtttctgaattgcttccttccactgagaagctgagggttcttcatttccataacaacatgactggggatgaaggggcaattgctattgctgaaattgtgaaacgttccccagctttggaagattttcggtgctcatctaccag

SEQ ID NO: 33155 - DNA, 263 bp, Glycine max
  unsure (1)..(263): unsure at all n locations; Clone ID: 701106275H1
aggaagtgagatcagtgagcaagtgggagaggatttgggagcaaagaagaaagtttttgtagctggagccactggtagcaccggcaaaagaatcgttgagcagttactcgcaaagggctttgctgttaaggctggggttagagacgtcgacaaggccaagacaaccctttcatctgccaacccttctcttcaaattgtgaaagctgatgtcacagagggttctgataagctagctgaggccatngcaatgattcagaagcagt

SEQ ID NO: 33156 - DNA, 267 bp, Glycine max
  Clone ID: 701106276H1
attttactagatgagaattgggtggctaaggtttctgattttggactgtcaaaaacaggtccaactttggataatacccatgtaagtactgtggtaaagggtagttttgggtacttggatccagaatacttcaggaggcagcaactgactgacaaatctgatgtttactcgtttggtgtggttctctttgaggtattatgcgctcgcccagctttgaaccccacccttgctaaggagcaggtgagtctggctgagtgggcagctcat

SEQ ID NO: 33157 - DNA, 267 bp, Glycine max
  unsure (1)..(267): unsure at all n locations; Clone ID: 701106277H1
ggcaaacattgctttatccaaacagttaggattnggagctgcttcaatgaacattgaagataaatataaattcatgattactgccacaaacactaaaagagagggagcagcagatagtgcctgggatgattaatgaagtattttgttcttctcatatttgattgatgacaactgctaaagcctcttttaagtgctggtgcataattgatattgagtgcatttataggtttgttgcttctataagatgcaggagatggagaagtttct

SEQ ID NO: 33158 - DNA, 271 bp, Glycine max
  unsure (1)..(271): unsure at all n locations; Clone ID: 701106278H1
anaacacttgcggtgttgggatttgggaaggttggttctgaagttgctcgtcgtgccaagggacttggtatgaatgtcattgcgcatgacccgtatgctcctgcagaccgtgctagggccattggtgtggagcttgtgaactttgatgaggccattgccactgcggattncatctctctacatatgcctcttacggctgctacatcaaagatactcaatgacgagacatntgccaagatgaaganaggagttcgcatagtcaatgttgctc

SEQ ID NO: 33159 - DNA, 275 bp, Glycine max
  unsure (1)..(275): unsure at all n locations; Clone ID: 701106280H1
atatttgacaggttcatcatcataaccttcattgaaaagaaatggctgaggcaagcattngcagcaaaagcagcagatggtctttacagggaatgacagctctcgtcaccggtggatccaaaggaatcggatatgctatcgtggaggagttggcacagcttggagccactgtgcacacttgcgctcggaacgaagctgaactcanagaatccttaaatgaatggaacacaaaaggatacagagtaactggttccgtctgtgacgtggcgtctcgt

SEQ ID NO: 33160 - DNA, 277 bp, Glycine max
  Clone ID: 701106281H1
gtggttgtcttgggcgaaggaagcgccagtgcaaacgactataaagtaatgcaatgtagcaaagtccaagatcgcatcgttggtggctgatgtcttctccaacacagaggtagcagaaaacaaggttgtgaaagtgcactcggatcccagtgcccccttgaagcgtgtagatgaacttttcagccctattcctgaggatggaagaaggaaagcctatgctgaaatgcaggaaaaagcaaaggcagaggaagaagcaagagtggcagctgaaaaggcc

SEQ ID NO: 33161 - DNA, 275 bp, Glycine max
  Clone ID: 701106282H1
tgcagactgtggaggatctcattcaatcctgctctattatcatatggacagcttcggctctccatgcagctgttaattttgggcaatacccttatggaggttatatcgtgaaccgtccaactctagccagaaggtttatcccagaagaaggaaccaaagaatatgatgagatggtgaaggatcctcaaaaggcatatctgagaacaatcacacccaagttcgagacccttattgacatttcagtgatagagatattgtcaaggcatgcttctgat

SEQ ID NO: 33162 - DNA, 270 bp, Glycine max
  Clone ID: 701106283H1
ctcttttgtttcgtcctttccttcaccacttttcccttttcattttcaggataacaaaacaacactccttgcaggattaaacttcacttcaattgaactaacctatctgtgggttttttgtagattgattcaattcaatggcttcagtaatgctcagtggaactgaaaagctcactctcagaaccctaaccggaaacggcttaggtttcactggttcagatttgcacggtaagaatttccaagagtgagttttgttgccaccactagtgc

SEQ ID NO: 33163 - DNA, 266 bp, Glycine max
  unsure (1)..(266): unsure at all n locations; Clone ID: 701106284H1
gtagaaacgtgaaccagaaccagaatggatcttcaacaacgaccactgaaacttcactttattccttacctgtcaccggggcatggtgtcccntncngcgggcattgnaanactcttngcctcangcgggcagcacgtgacggtgatcaccactccctactacgcccaaatcctccgcaagncaagcccntccctccaactccacgtcgttgactttcccgccaaagatgtgggccttccgacggcgtngaaatcaagtccntgtc

SEQ ID NO: 33164 - DNA, 264 bp, Glycine max
  unsure (1)..(264): unsure at all n locations; Clone ID: 701106286H1
actcactcactggaagccttgttgtgagtaagggaaaggcttcctgcactgagcaccaagttgaaacctcttgattctttgcttagaattccacagaatatggagangnnntcttttcaatgactccccacctttggagttcaagggtatgagcaaggaggaggaagactcattgctagggcaagttgaaatatggaggnncatgacatgcttcacggactccgtggccttgaaatccgtcatagagctgcgctagccgacata

SEQ ID NO: 33165 - DNA, 264 bp, Glycine max
  Clone ID: 701106289H1
ttgcgttttctgcgtcatctccgattccccgacaatggccacccaaatgagcaagaagagaaagttcgtagctgatggagtgttcttcgctgaactgaacgaggttctgacaagggagttagccgaggacggatactccggcgtggaagttagggttacgccgatgcgcaccgaaatcatcatcagagccaccagaacccaagccgttctcggtgagaagggaaggagaatcagggaacttacctcggtggttcagaagaggtt

SEQ ID NO: 33166 - DNA, 221 bp, Glycine max
  Clone ID: 701106290H1
cttagatctcttctttctctacgccgcacgccgaaaccatggccggaaaaggagagggtcctgctatcggaatcgatctcggaaccacctactcttgcgtcggtgtgtggcaacatgaccgcgttgaaatcatcgccaacgaccaagggaacagaaccacgccgtcttacgtcggattcactgacaccgagcgtctcatcggtgatgcggccaagaatcaa

SEQ ID NO: 33167 - DNA, 267 bp, Glycine max
  Clone ID: 701106291H1
acagaatttcctgtttacgatctcattacaattttgcaactttcaaagcttattagctaaagtaacatcaaaagatgtcattgattccaagtattttcggtggcccaaggagcaacgtgttcgatccattctcactcgatatgtgggatcccttcaaggattttcatgttcccacttcttctgtttctgctgaaaattctgcatttgtgaacacacgtgtggattggaaggagacccaagaggcacacgtgctcaaggctgatattc

SEQ ID NO: 33168 - DNA, 269 bp, Glycine max
  unsure (1)..(269): unsure at all n locations; Clone ID: 701106292H1
gatcccccggttcatcaacataaaagatcctcccattcaggtccactgacccaccgtgcggcatgggctaataaagccgggaagaaccaggaagatgctccaaagatttcaatggggggtgacttatcaacagtatcgggcttagttgcagcaaggaggagtatgttgtctgacgatcgcagagaatggtctggatcatcacaagcagaggccccaaaactaataagcaggttcccaggatccttttgaggagcatgtgcatgangctt

SEQ ID NO: 33169 - DNA, 270 bp, Glycine max
  Clone ID: 701106293H1
gagaaagagagtgaataaatccagcattgttctgttctctgcaacattctccacttctcaaccatggcttcaaagcttttactcatcactgtcttcgtttttgatttgattgcttttggacttgccgtggctgctgagcagagaagaagcaccgctagtgttgtgacggacaatgaaaagaattataattactgtgtctataactctgatatagcaactggctatggtgttggagcatttttgtttctcttggttagtcaagtcctgata

SEQ ID NO: 33170 - DNA, 276 bp, Glycine max
  unsure (1)..(276): unsure at all n locations; Clone ID: 701106295H1
ctgagaagagcgagaganaagcttgagaaagagcagagggagaggaaggaaagagcaagattgaagcttctgaaggaaaagaaggccaaagaagaggctcagaagcaaaaagaagccatcgaagctgttcaaagatctcgtcgtattgatgccgcccaagctcaactcaaggctgaccaacagatgcaaganaacctacttgctggcagaggaatagtgttttaccgactactagaggcttttttttatgaaggtgctggagataagatcaagcta

SEQ ID NO: 33171 - DNA, 102 bp, Glycine max
  unsure (1)..(102): unsure at all n locations; Clone ID: 701106302H1
cacctccaaatctcatcgtgttngtntnaatcctncttcgataagaaaccctacacatcgcntcnntcatcacacacantgacanacctngaacatcnncga

SEQ ID NO: 33172 - DNA, 292 bp, Glycine max
  unsure (1)..(292): unsure at all n locations; Clone ID: 701106303H1
agaaacacaaccattcccaccaagaaggagcaggtattttcgacctattccgacaaccagcctggtgtgttgattcaggtctatgaaggtgaacgtacgaggactcgtgataacaatttgcttggcaaatttgagnttatctggaattcctcctgcncgagaggtgttcctcagatcaccgtttgcttngacattgacgccaacggnatattgaacgtgtctgcggaggacaaaaaccactggacagaagaacaagattacaattaccancgacaaaggaaggcttctaagg

SEQ ID NO: 33173 - DNA, 289 bp, Glycine max
  unsure (1)..(289): unsure at all n locations; Clone ID: 701106304H1
ttcctctctttattctcactatagagcccaaactccattccttttctttcttntttagtcacaagtgtagtgttgcattgagaaattaactaagactaattaaccaattagcaccaatggcgtcgaagaagaacacggttgtttttgaggactattccctgcaatgatggagaaactgggcactgaggggttcatgaaggagctgacaaacggatttcagttgctgatggacagagagaagaaggtgataacgtttgagagcttgaagaagaactctgcattgcttggg

SEQ ID NO: 33174 - DNA, 301 bp, Glycine max
  unsure (1)..(301): unsure at all n locations; Clone ID: 701106305H1
gattttgcaggccttaatcttctgtntctngcagaccttacactgttnctcactgaattgctgaagtagcctantcatngatggcaaagggncataaatttgtgctgtttgaggcntggaaatcaagagncagcttttanttccagagcnaagannattctntnacaattgggnatcacaaaanaagaccnagctgtgggtgcggttttaaanatnatngggaagaangcnggagagtgtgtcagagaagntgacagancttgacnaganttcagctgttccatcctgtaagtgatggaaa

SEQ ID NO: 33175 - DNA, 265 bp, Glycine max
  unsure (1)..(265): unsure at all n locations; Clone ID: 701106310H1
atcggtttgcaacttcatcccancccatccagaaacagaacttggtggtngcattgaancggagagggtangtaggtgggaagacgtgtcttgttttgtagnnnnnnnnnnnnnnnnnnnnnnnnttcccggccatgtgccggattagacgccaactgcttccataattcacctcctccaaccaaccaacacaagatttccctctggattggatggaggaagcatgtgaatttcgaagttgggctgaatgattctgatgcgctcg

SEQ ID NO: 33176 - DNA, 292 bp, Glycine max
  unsure (1)..(292): unsure at all n locations; Clone ID: 701106311H1
aacaaatcaaagccatggccacctccaacttctctattgttctctccgtctccctagccttgctttttggtgctacttaccaaggcacactcgaccgataccgtttnctttcaccttcaacaagttcaacccagtccaaccaaacattatgctccaaaagatgctagtatttcatcctctggggtgttacaactcaccaaagttgggcagcaacgggcgtgcccacctcggggtctctcggtcgggccctttacgctgccccaatccaggatttggggacagcgaaaccggc

SEQ ID NO: 33177 - DNA, 285 bp, Glycine max
  unsure (1)..(285): unsure at all n locations; Clone ID: 701106312H1
cggcaatccccgtcgccgacacagcggggcttcacggcggagtcaccctccgctacctcctcnggtgacgcngcagcctgagatcnccgcgantccattcgngtaccatggtgctgcttcaccgtacccgaaccctcccctgcattaccctcgtaccattaccccggttactatccttcggtgccacctcccatgcctcatcatcctcatcatcaccatcatcaanatcatcatccanacatggacccggcgtggattcaggggcgttacccttgtgggcccatg

SEQ ID NO: 33178 - DNA, 284 bp, Glycine max
  unsure (1)..(284): unsure at all n locations; Clone ID: 701106313H1
gatactgnnaatgctaatgcaaaganttgaagatggcaagtcanaagtagctcttaacaaagagaacganattatatntaaccatcacttctatcttttggagtattaagcaatctgaagatgtggttgattcatcaaaatcgaagaattcgatgccatatgtgaccttgggttagcaatcactaagcgactagtgcagaaggatgttgatttgcaaggattgtctcctttagtttctctacctgccaatgctatacaaagcatgtgagaaggaaagtgacccc

SEQ ID NO: 33179 - DNA, 284 bp, Glycine max
  Clone ID: 701106314H1
caaccaagtgcgatgacgatgactatggctgtaaggagggtacttggctttgcttgcaaaaaaacccccttttctgaatctctatcaaaatgcaaacttgcgccatattctcccttctcctcgtcatatctccgcattttcaggtataatgtacacttagtaatttctgtataggtgattcatgtgtaatccacaatggagtctgcattggtcaagatggatttggattttacgtggatggtgatggtaatatgataaagaagcctcaggttggttgtatgtct

SEQ ID NO: 33180 - DNA, 284 bp, Glycine max
  unsure (1)..(284): unsure at all n locations; Clone ID: 701106315H1
gttatttctcagcgcgtaaagcatggctttgttggtggagaaaaccacgagtggtcgcgagtacaaggtcaaggacctttncccaggccgacttcggccgcctcgagatcgagctggccgaggttgagatgcccggcctcatggcctgtcggccgagttcggcccctcccagcccttcaagggggcccgcatcaccggctccctccacatgaccatccagaccgccgttctcattgagaccctcaccgcccttggcgccgaggtccgctggtgctctgcaacat

SEQ ID NO: 33181 - DNA, 284 bp, Glycine max
  unsure (1)..(284): unsure at all n locations; Clone ID: 701106316H1
attcacgagaagaaacttcattcagacctcctttgaatgtggatgatgcaaattaattggctcctccctataacaaaatagtatcaaggctccttcctttntcctacgattatgtcctatttatttttattttagatagagttgatttaataaagtnattctaagtcatgtagcatgattaantgtatgtctaaatnaatctcagtcattcagtcgcaaatatatattaaaatgtgtatttgcgactgaatgactgagattaatttagacatacanttaatcag

SEQ ID NO: 33182 - DNA, 286 bp, Glycine max
  unsure (1)..(286): unsure at all n locations; Clone ID: 701106318H1
tctgaatgttgtagtcagcaagagtctactcttcaccttgtcttgcgtcttcgtggtgggttntgagtttgagaatggtctgcaggtcccttgtgtggtgtgaactgaagtatgtganagtctataatctggtcctttccttgtngatgttccgancttngtgtgtgtgtgcatcccgggtccattagcggaccttgaaaagctangaatgtggacaatttgcaatncagttttaatgaatttagnactttcaataaaanaaaaaaaaagggncgncgccgcnntt

SEQ ID NO: 33183 - DNA, 188 bp, Glycine max
  unsure (1)..(188): unsure at all n locations; Clone ID: 701106319H1
ggcggcngcggcggcagtgacggtgctactcccacctaggattccgaccgccancaacgttaccgctgctctgctttgcctctctgctctcgggaccacataaacattgtttacttcctcaacattctaggccgaaactctcgntcagacaactctcangganatctcagagtgcatgaggtcnagat

SEQ ID NO: 33184 - DNA, 295 bp, Glycine max
  unsure (1)..(295): unsure at all n locations; Clone ID: 701106320H1
ctcactccgttagaagcaccaaatccaagatggcaccaaaggcagagaagaatccagcggagaagaagnccgnngaggagaagaagtccacggtgggaganaaggctccggcggataagaagcccaaaggccggaaagaagcttccgaaggaggngaggcgccggcggcgaaggnnnnnnnnnnnnnnnnnnnnnnnnnagcgtggagacatacaagatctacatcttcaaggttctgaagcaggttcaccctgacattggtatctcaagcaaggccatgggaatcatgaacagt

SEQ ID NO: 33185 - DNA, 292 bp, Glycine max
  unsure (1)..(292): unsure at all n locations; Clone ID: 701106321H1
gaaatcgtgacaccaaccctacaccaccatggcctccgtanacaaattttgggcttttgcncttcgctcttctcctccttgcncncccctctcctccaagttgctaggtgtcagtcagactccgaagatgtagtggaggctgctgaagaatcaagtgaatcggcattgttggtgatgatgtccaagactttggtgatgggaccttcccttctgctccaggaattgaaacaataagtgtttttccaaaaaatagtgcgagattgataacagctggagaagagacagagctgct

SEQ ID NO: 33186 - DNA, 297 bp, Glycine max
  unsure (1)..(297): unsure at all n locations; Clone ID: 701106322H1
caaatgttgtacaatcaagtgtggctggcntgatatgtttagggacacatataatgcaancacccaagggaatcccatgtggaataatttatctgnnccaacggggcactcttacatgcntgggnagcctacancgacttatattcatgagncaccttattnagagatatgagcatgtctcccccaggctctcatggagtgaaggatgcttactgtttgctcaacttnggagacagtatcacaactgaccacatctgctccagctggcagcatacataaggacagtcctgcggccag

SEQ ID NO: 33187 - DNA, 286 bp, Glycine max
  unsure (1)..(286): unsure at all n locations; Clone ID: 701106325H1
gcagactcctacacactgttcgtgtttgagatggcactgatgggatttncagagcacagangattccaagactgggccaaaccaggctctatgggcaaacaatacttcctaggactagagaaggggcttggaggttctggtgagccagcttaccaggaggacctttcttcaacccactaggctttggtaaggatgagaagtccttgaaggatttgaagctcaaggaagtgaagaatggaaggttggctatgttggcaatcttgggttactttgttcaagctcttgt

SEQ ID NO: 33188 - DNA, 285 bp, Glycine max
  unsure (1)..(285): unsure at all n locations; Clone ID: 701106326H1
ctatgccggagattttagacggtgcaattnggcgagccgttgtcatcggaaacggcttcgccggcgctgagaatcagtgcattggtttggtccgtgctctcggtttctccaaccgccactccttatatcgcgtgacgaggcctcgaggaggatcaatcggtggcttaaatggcttccggtttctatccacaaaaggttagactccgttatcagaatgatctgtggcaaatcgcgttttcaaacgcctcataaaatcggcatttctaacgtgttggatgctgatgc

SEQ ID NO: 33189 - DNA, 283 bp, Glycine max
  Clone ID: 701106328H1
gaactgctgatgaagctgctgcagtggcaggagttgcttcagaggctactggccaagctactgagggagaagttcatcctgatggtgcagagcgttctcctaaatctgtaagtgctggcttaacagaagcagaagagttggagaagtatatgccattagagaagagatgtataagaaagctaaagagttcgattctaagatcattggttttgaaacagctattaggaggccctactttcatgtacggcccctcaatgttggagagcttgagaattggcataac

SEQ ID NO: 33190 - DNA, 283 bp, Glycine max
  Clone ID: 701106329H1
ctcagtctcaactctctccaacaaccacaatggctctcttgggcgccgcctcctcctccgctcgcatcattccctccgtctcactctcttcctcttctcgctccttcttctcactctcatcctcttcttccaaactccaatgcttgcgctctctcctcgtatttcgcacctctttctcaatcagcgaagagcggaggttcgcgtttcgagtggaggatacggaactgtgtcggcaccgaagtcagttgcgtctgatcctgatcagttgaagagcgccagagaa

SEQ ID NO: 33191 - DNA, 285 bp, Glycine max
  unsure (1)..(285): unsure at all n locations; Clone ID: 701106331H1
cataaccatgggtatctccaccatcgcttctccttttgactccatcatcttcgncttggacgacaccttgtacncctccagcaccggaattgacaagtgcgtcaagaaaaacatccaactctttctcatccagaaatgcggattctcagaatcaaagccttgacccaacgagttgagctcttcaaaacctacggaagcacccttgccggcttaagagtcagtaataataacaccactacacaattccgatcactaatttctancacgccaataacataatcatct

SEQ ID NO: 33192 - DNA, 287 bp, Glycine max
  unsure (1)..(287): unsure at all n locations; Clone ID: 701106332H1
gacanatcacaccttatcacgatatcgatcaccttcatcacnaatggagnttaantcctttcctcttcctctgcctnctcttgttcntctatctctacatccagttcctcgctagaaaaaaaccccggaacaacaaagccttcnaagnctacccctcatcggaaccctaccggagttcctcanaaaccgccacngtttcctcgagtggncnacccaagtctccgcgactcccccaccaacaccggcgtcttctctcgcccctacaaactccacggcatctnaacggc

SEQ ID NO: 33193 - DNA, 222 bp, Glycine max
  unsure (1)..(222): unsure at all n locations; Clone ID: 701106334H1
ggacgaagctgcccntgtgcatggaagtananatgttgnctcaagaggtgaagagggagatcaacaagtggtatctatggttgggatggtgcctgatgaatatagaatgggaaatgagcatcttgggaatggctgacttgacatgagcattgaggctgtgtgatatagtgggattctcaatttggtgatgagtgtcagactgcagtgcaacaggnacattnt

SEQ ID NO: 33194 - DNA, 292 bp, Glycine max
  unsure (1)..(292): unsure at all n locations; Clone ID: 701106335H1
tttnanataatagccccnccccccacacgcataaatcccccttacccttgttntnatntnctgaanaanaattcaattactcctanatnaaanaagntttcaanncnagttcgttnataggggtttcccaatccctattccatggacgtcgaaacgagggaagntccatccgatcaanactctgattcanaatgncanaccganntgccaannctcccctacgcctcngcngttgacctngaagaggcggcggcaaggncgncggaggctgtggncggttgaacccgnngcg

SEQ ID NO: 33195 - DNA, 290 bp, Glycine max
  unsure (1)..(290): unsure at all n locations; Clone ID: 701106338H1
agctgccatcgataacatatcacacttgagacagttatcnctatctacgcaanagangaataganaatggatatcaggttgatggatttgngatcnccattgttcaacatctgcaccgaattcatgggatctgacagaggacgcagagaagaactgaacgctccgacgcggacatacgtgcgcgacgcgaaggcaatggctgncactcctgcggacgtgaaggagtaccctaactactacgtgttcgtgatcgacatgccaggcctgaaatccggggacattaaggtgcc

SEQ ID NO: 33196 - DNA, 290 bp, Glycine max
  unsure (1)..(290): unsure at all n locations; Clone ID: 701106339H1
atggtatctgtttctctgctcttattcctatctttctntgcnttctttgcaccctctgaatcncangacaaagtctcgttggaattgtantacgaaagcttatgcncctacagcgncaacttcatcgtgaancacctcccaaaaancttnacccagatcttgcnccnatcgttcacctcaaantcgttccttggggcaatgccaaactccgtgccaacgccacctttgactgncagcatgggccatatgagtgcttgctgaacacagttgaagcctgtgcaattcanatc

SEQ ID NO: 33197 - DNA, 285 bp, Glycine max
  unsure (1)..(285): unsure at all n locations; Clone ID: 701106342H1
gagtanattaactatgaagcctaccctactattatccctttccttcctgcctctctttgctntcctgggctctttcagaagatgttgaacaagttgtggacataagtggcaaccccattttcccaggtggcacatattacattatgccatcacttggggcgctgccggtggtggattgaaactaggccggacaggaaactcaaactgcccagttactgttttgcaagattactcagaaatcttccgtggcacaccagtcaaattcagcatacctgggataagccc

SEQ ID NO: 33198 - DNA, 291 bp, Glycine max
  unsure (1)..(291): unsure at all n locations; Clone ID: 701106343H1
cagaacgctatggttntccaaatttacgcagttctctctagggcatttagcacgtccgtttctgtcaacgacnctccttcctacaagggtgttggctttaggaggattttgctctggcgctttgcagagcatggctgctctgcccctgttgagtagttaaaatttcgcctttcagcttcagaacacagggagcaatcccacagaaccacaaaagggtcccataaaggtcgccaacaacatatggaaaagagagggtcttcgtggcatttatcgaggacttggcatcactat

SEQ ID NO: 33199 - DNA, 282 bp, Glycine max
  unsure (1)..(282): unsure at all n locations; Clone ID: 701106344H1
tgtcaaagggtcctggtctctactctgacattggcaagaaagcccgagatctcctcttcaaggactaccacagtgaccagaagttcaccatcactacctactcacccactggagttgctataacatcctcagggaccaagaaaggtgatcttttgtggctgatgttaacacccagttgaagaacaagaacatcaccactgatatcaaattagacactnattccaatcttctcacaactatcactgtcaatgagcctgctcctggtctcaagactatttttag

SEQ ID NO: 33200 - DNA, 280 bp, Glycine max
  unsure (1)..(280): unsure at all n locations; Clone ID: 701106345H1
gcaaaaccctaatttcatatttcactctggagaatttgtgaaccagaatttttgtnttnctctgtaattgtanaatttctattttcaaaaattttgtgttattattntnttttgaagctctttccgctctctgcaatggtggagatttggttactgtgtcgcgtctttctcggagttcanaattctgcttctgggttttcgtcattncagacaaaagtttctatttttgaagttntttctgtgcagttacaactttttctgtgctcaaacatcactgtac

SEQ ID NO: 33201 - DNA, 247 bp, Glycine max
  unsure (1)..(247): unsure at all n locations; Clone ID: 701106346H1
tcggctcttctcttttcagcacnttaccttatnccaatccaatagcaaggagncaccanaatagtgtgattcatggctgcaacgaangcgtcaatctttggcatcttccacgcaatcatgcttgtacgtgtctcctaccatttaaacacgcttgttagtccttttctcaatgtttcgtcaccaagaagttaccttgtgaagaaaaagcatgtgaaatttagcaaacacatcagtgctgctgctgttg

SEQ ID NO: 33202 - DNA, 282 bp, Glycine max
  unsure (1)..(282): unsure at all n locations; Clone ID: 701106347H1
aatcaatcatcatcacatcacgacgacgcatgattctggtcttgctctgttccaaaactgaatcccaatcacgaagaaaagaatccctcgcttggatcttgcaacgtcgcgagagggatccatgatactcctgcagtctcattctagatnctgttccagaccttgttgaatcgggcccaaaatctcgaaaaaggagttgaactggatcaccactgggttgagtttgatgatgttcgatatcatattcaggtgtcaatgaagaatcctcatgttttgttgcta

SEQ ID NO: 33203 - DNA, 274 bp, Glycine max
  Clone ID: 701106348H1
atgaaatggatctcactcttgtggatttagaagggcttttaccctcggctattattatggttgtctctgttacagcatcaactacaactggcaagcctcttccagaagaagtgcttagcaagacagttgaggcctgcgatcagctcttgatcttgactcagcaaagaagaaagttcttgatttcgttgagagtaggatgggctacattgcacccaatctttctgctatagttgggagtgctgttgcagccaaactcatggggacagctggtggt

SEQ ID NO: 33204 - DNA, 293 bp, Glycine max
  unsure (1)..(293): unsure at all n locations; Clone ID: 701106349H1
cgcttacagtaagangtgagaaagagagacaaatcggcagaagcaagtgaggctgagagcgagagagcaactgcacgcactgtaactcctaacttcccagatcgtcttcttcctcttttctctccggtgattattggaactcagagagccttctttgatggancagtacnagnaagntgagangataggcgaaggaacatacgncgttcgtttacaagggtcgcgaccggttcaccangnggncatcgcgttgaagaagttcgcctcgagccaggaggatgnngggttccnac

SEQ ID NO: 33205 - DNA, 288 bp, Glycine max
  unsure (1)..(288): unsure at all n locations; Clone ID: 701106350H1
cttcaaatctcaattctattttggaaaatcagaatcaaagacagtnaaaaatacagaacaaacatctcactcaacatcaacacttcagatctacgttccactctcacaacaacgncnnaggaaagaaanaccgntctacagcgacaacaaggacganagaacgatcgatttctcgaagcgccctcaaaatggcgcgtgcacccttcacttctttccccttcgtcctcatnatccttctgtcaatcgtccacctttcgactgcaagaccctcaaacgtgacgttaaggt

SEQ ID NO: 33206 - DNA, 291 bp, Glycine max
  unsure (1)..(291): unsure at all n locations; Clone ID: 701106353H1
aaagtgtttaatattggtaagagcagcaagaatganaatanatttgatgcacacagaatggtgangactngtncttcaaaaagaaggatcannagtaattnttggtgtntcctaanaccgnggaacgnaaaggaaatttatggaagtaaggcaagcattcgtggcacatgnaaacngtaagatcagtgatagaaatgattcagttaaactgcaaatttcttgatgcctccaagttccggacctagaggntggaaaaatagttccaaaaatgatgccaaagagaaacatgga

SEQ ID NO: 33207 - DNA, 291 bp, Glycine max
  unsure (1)..(291): unsure at all n locations; Clone ID: 701106354H1
atctaagaaaacctagtgagagttagcacacattgatcagcaacaatggcaacctactcaagccatgctttganaaccatcccttctncgtccttngtgaagcctgtcagtacccaaaccaacatcatncttcncaccttcacctaccaaaccttcttacccttcacctcaccaaaccactttctcaccaaaaatctcaagctgaactccactttgccacacttttgcttgtcttcagttcccaagaaatctttcacttgtagaagccaggctgagcctgttgactcagaa

SEQ ID NO: 33208 - DNA, 289 bp, Glycine max
  Clone ID: 701106355H1
aaattatagtaatatttcatgcttctctatcactcttgtcaaattccacaaaaaccaagtactacaagggaagaagaacttagctacaagctaaggaaggatcaaagagaatggctcaagcaatggcatcaatgactagcttacgtggttcctccaggctgtgttggaaggtagccttggctccacacgcttgaatgtggggagtggaagcagggtggcctcagtcacacgtgcagggttcacagttagagcacagcaacaacaagtgaatggtggtgaggtacaaagt

SEQ ID NO: 33209 - DNA, 289 bp, Glycine max
  unsure (1)..(289): unsure at all n locations; Clone ID: 701106356H1
gtccggtccaggcttaatcttgatgttgctgtcgcatctgactctcctcctggcacctgctccaatagactcgtttangganatgngtgtgcatccgagtatcangaaggacattgcttaccatgaatacacccaggccaacttcgatccaggcaaggccatgccaattgctctcagtggaagggatctattgggttgtgctgnaaccggtagtggaaagactgcagctttcacaattcctatgatacagcattgcttggcccaacatcccattcggcgcaatgatggt

SEQ ID NO: 33210 - DNA, 285 bp, Glycine max
  unsure (1)..(285): unsure at all n locations; Clone ID: 701106357H1
atgaaactagagctaagggtataaggttcatccagagtaatggcaccttggatgaaacctatgaagcatacataaacaaagccaagaattcaagttcaaagggtgatgtcattttggcagcaggtgcattaggtagccctcaacttatgatntaagtggcatagggccaaaagaacagctgagaaggttcaacatttcaatagtgcatgaaatgaaaggggttgggcaaggaatgcaagacaacccttgcatagcagttttggtggactcaaagccacagaatag

SEQ ID NO: 33211 - DNA, 285 bp, Glycine max
  unsure (1)..(285): unsure at all n locations; Clone ID: 701106358H1
ctaagactgaaaaaaacccaatggatttgaattcctctccttccaacaacacaattgccntgaatggaacaatccccgtcgcttccacgttcgcaaccgccaccgcgccgtcggataaccctccgccggcggacagctccggcgaccggaacccatcgccctgtggccggggatgtaccattctccggtgaccaccgccctatgggaagctcgcagcaatattttcgagaggcttctggaccctcccagggacgctcctccgcagagtgaattgctcacgagaac

SEQ ID NO: 33212 - DNA, 284 bp, Glycine max
  unsure (1)..(284): unsure at all n locations; Clone ID: 701106359H1
aaaaaaacccttagccaacacaaccatcatggccacctctgctattcagcaatcagcattcactggtcaaactgctctgaagcagctcaatgagttcgtccgcaagaccggtggcgccggcaaaggtcgcactaacatgcgccgcaccgtaagagtgctcctcagagcatttggtatggccctgaccgtcccaagtacttgggtccattctcggagcagattccatcatacctgaccggagaattccctggtgactacggatggganantgcnnggantatcag

SEQ ID NO: 33213 - DNA, 261 bp, Glycine max
  unsure (1)..(261): unsure at all n locations; Clone ID: 701106360H1
ctattatcatccgcagctgcttacnattcgcaccgcaaacagtgagccatggccgtcggaaagaacaagcgcatctccaaggggaagaagggtggcaagaagaaggcagctgatccctttgccaagaagattggtatgacattaaggctccttctgtttttcaagtgaaaaatgttggcaaaaccctcgtctctcgtactcagggtaccaagattgcttctgaaggactcaagcatagagtgtttgaggtctccttggctg

SEQ ID NO: 33214 - DNA, 282 bp, Glycine max
  unsure (1)..(282): unsure at all n locations; Clone ID: 701106361H1
cgcttagtggcagcagcagtggcggcaagcaactccatccgcaatgggaatcgatttgaaggcaggaggtaagtccaagaaganccaagcgaaccgcccccaaatccgatgatatctacctcaagcttctcgtcaagctgtaccgttttctgttcggaggactgggagtaacttcaatgctgttgtcctcaagcgccttttcatgagcaaggtcaacaagcccccgctatccctctctagattgatccgttacacgaagggaaaggaggataagatagctgt

SEQ ID NO: 33215 - DNA, 232 bp, Glycine max
  unsure (1)..(232): unsure at all n locations; Clone ID: 701106362H1
aggctcttntnttcttntntgttggtttctcttgtntntttntttgtaggtactgaggaagaaagaccaaaacttnanccgcttgcttcactnagctcaaagcgtacaattcaggcaaaggccttgaagtcggagtgtgtgttaaggattncttaggagttncttctgncttgactgaagaaatggnggtatatggcaaatctatggttgcaggtcctgnaaatnttatttt

SEQ ID NO: 33216 - DNA, 273 bp, Glycine max
  Clone ID: 701106363H1
ggaagttgtttgactgtttggccccaaaagaggtcaaattggatgctcttatgattatttctgatcttgctcgcatggacaagggattctatgagtacattaaaggtgcttctattttggagttcttgaaagattttctttacacgaggatcccaatatgcgtgccaaagcttgcagtgctcttggaaacatgtgtcgtcatagtgcctatttttatagttcacttgcaagacatcaaattgttggtatccttattgaaagatgttctgatcc

SEQ ID NO: 33217 - DNA, 284 bp, Glycine max
  Clone ID: 701106364H1
caactatagagatgttgtggctgaaaatgtgaccatagctgctaggtttcaaggaatctccaatgatccctttacaggaatctgcattgcaaatgtgacactaaggatggcagccaaggccaagaagcagccttggacctgcactgatattgaagggatgacgagtggggtgacccctccaccttgtggtctgttacctgatcaagggccggagaagatcacagcatgtgatttcccagcagataatctacctattgacatagtggagcttaagaaatgtacta

SEQ ID NO: 33218 - DNA, 285 bp, Glycine max
  unsure (1)..(285): unsure at all n locations; Clone ID: 701106365H1
gccgcccagagaacgtgaaggcggcacaagatgcactccttttccgtgccaagtccaactcgctcgcccagcttgggaagtacaccggtgagggtgaatccgaggaagccaagaaggagttgttcgtcaaaggctactcctacnaagatgtagtagtgaatatgatacatgttaggcagcagcaacaaccagcagttatagtaggtgttgacggaggttgaattggaagaagctaatttgtctaaangtaatgttttatagcttggagactatttttgtttatgg

SEQ ID NO: 33219 - DNA, 289 bp, Glycine max
  unsure (1)..(289): unsure at all n locations; Clone ID: 701106366H1
ccccttctcacttcctttcacccttttccctcacaacacaatacaacaaaagagaacacgaataaaacgcaccgtaccgcacgcgaatcgcaattattagggtttangcaccctcacaattggtttgagatttgcgaattcggcgacgatgagggggaaggagcgagcaatggagggatgctgtaccacgaggtgcaggagtcgaagctctgcgcggtgcattgcgtgaacacggtgctgcaggggcccgttcttctcggagttcgatttggccgcgctcgcctccgat

SEQ ID NO: 33220 - DNA, 227 bp, Glycine max
  unsure (1)..(227): unsure at all n locations; Clone ID: 701106367H1
aaatttcaacttcttcatccattttgtgctccaaacagcacaaacactgcaatcacaccgtcttcgcttttctactcatctanaagatagagttcatgggttgctttggcttctgcaaaggagatgatagtgttacagttgctgacagaggacctttcatgcaaagcactcctactgggaaccccagttatcatggaagacacacagcagtaactgctcctcggact

SEQ ID NO: 33221 - DNA, 286 bp, Glycine max
  unsure (1)..(286): unsure at all n locations; Clone ID: 701106369H1
atactattcagtggagactgttacacttttggtggctttgaaagtccgttacagagatagaatcacaattctcaggggaaatcatganagtcgtcaaattactcaagtgtatgggcttctatgatgaatgcttgagaaaatatggaaatgccatgtctggaaatactttacagacttgtttgattatttacctctgactgccctcattgagagtcagattttctgcttgcatggaggtctctcaccttctttggatacactggataacatcagagcattggatcgt

SEQ ID NO: 33222 - DNA, 285 bp, Glycine max
  Clone ID: 701106372H1
aaagtcacagccctctgctcatgatgcttttgtcggcagctggaagcctaccaagaatgacactatggagaatcgggttcctggatttgggcactacaatgaacattctctatggggatggtgtttgtggacaaggtgatgtggactcaatgacaatattgtttcccattacctgtattatcttgaccttcttggtgttggtcgagaacaggctgggccccatgacatccttacatgcgctgagcaggttcctttcaacccatcttccaaacctgcttcatcatc

SEQ ID NO: 33223 - DNA, 282 bp, Glycine max
  unsure (1)..(282): unsure at all n locations; Clone ID: 701106373H1
ctcatcaagggttgtgaaagcagagaagtgagatacactaagttatcctcataaatacactctaattaggtggcaagataagtgtctaaccttagtaacattgccacatattgtgntcattttggaattgtgccactaaaattctattcattcatctatggctgcctcttcttatgctatgcaatcaatcctggcaaaccctttgatccgcatttccagcgggtctagggtgaaccaatttggcgttcctgctttgcacatgagaaggaatgttggcctgag

SEQ ID NO: 33224 - DNA, 283 bp, Glycine max
  unsure (1)..(283): unsure at all n locations; Clone ID: 701106374H1
ttgtctctatccttaaggttccgccaccgcaccaagtctcagcacccaaccaggtcttctttcattcatggcggaggaacttatttctcaattaaacaatatgctagaagaaaatggaacaccaagtcatgtagaaagggctgctgatctgatgctgatgctgagctttctccaccatcacaaaaaggagatgacactaaagaagtttcaaagaagaaaaagaaganatctaaaagcaagaaaaagaaagaactcttgcaacagactgatccaccatcaattt

SEQ ID NO: 33225 - DNA, 281 bp, Glycine max
  Clone ID: 701106375H1
cttcaaaacactcataacacaaagcacaaagcaaagctcatccttgagttaaaaaatggcagcagcttcttccatggctctctcatccccatccttggctggcaaggccgtgaagctgggcccatcagccccagaagtgggaagggtgacatgaggaagaccttcaccaagcaggtctcctcaggaagcccatggtacggcccagaccgagtcaagtacttgggcccattctctggcgagcccccgtcctacctaaccggtgagttcccaggcgactacgg

SEQ ID NO: 33226 - DNA, 281 bp, Glycine max
  unsure (1)..(281): unsure at all n locations; Clone ID: 701106376H1
tgaaaacccaaagtgcttctctcctctgtctttttctctctcttgctatccttttggctagtngcactgctggcaagtgcaactccaagaagcgcagtgccaagccaccatgtttcaacattcaacagaagcctttttccttccactttctctttggaattggttcttctgcttaccaggcagaaggagcagcaagtgtagatgggagaggaccaagcatatgggacacctacactagacagcatactgaaaagatttgggatcatagcaccggtgacatg

SEQ ID NO: 33227 - DNA, 112 bp, Glycine max
  unsure (1)..(112): unsure at all n locations; Clone ID: 701106377H1
tcctctgtcttatctctctcttccattaccttccttcactcttacgactatcgcnttcgcacttcctnctcctcttccgattttgattttnggtttgtntnngtaatntata

SEQ ID NO: 33228 - DNA, 241 bp, Glycine max
  Clone ID: 701106379H1
gacaaccccaacacttgtattgtctcaagcaaccatggcaatggcaacccaagcctctctcttaaccccacccctctccggtctcaaagccagcgaccgcgcctccgtccatggaagcaaaactccagcctctccttctccagcccgaagcccctcaagttctccagaacaatcagagcagcagccgccgacgagaccacagaggcaccagcaaaagtagaggctgcaccggtcgggttca

SEQ ID NO: 33229 - DNA, 272 bp, Glycine max
  Clone ID: 701106380H1
gagaattagagatggaaaagagcagagtgcttattgttgggggaactggctacataggaaaaaggttggtgaaggcaagtttagctcaaggacatgaaacatttgttcttcacaggccagagattggtgttgatattgaaaagttcagcttctattgtcattcaagagatttttgccctcggagtttggtactgatccggcaagaatggcgcatgcattggaacctggaagagtaacatttgacgacaaaatggtagtgaggaaagccattc

SEQ ID NO: 33230 - DNA, 266 bp, Glycine max
  unsure (1)..(266): unsure at all n locations; Clone ID: 701106381H1
agagaaccccttccatgagtgagttgaatgaaattctttatgggcaggaacaccttaaacaaagggatctgtcatttgtattcaggttacagggtgctgacaatcaacacttatgggtgttgtgtcttagttgangaactagtgcaaagcctctggattgcttctctgattctgataagcagcttctactcgcttgagacggcatatataaccactcagagatgttactgatactttcaagctccactttgattgccttgggnatg

SEQ ID NO: 33231 - DNA, 287 bp, Glycine max
  unsure (1)..(287): unsure at all n locations; Clone ID: 701106382H1
tgagtttgttgatcgagataactagaaacantgtgatgaaaatgaaggtccttgttttcttcgttgctacaattttngtagcatggcaatgccatgcgtacganatgttccctctccgnatgaaacactggctatggtgcnccgtaactcggcgtgaaatgcgcaagtnggaagcctngcngtggaagcacacaacatcttnggcttgagaccattcctgaagagtncgttgaagcaacaaaggaatacatccatggcgaacaatatagatcagactccaaaacagt

SEQ ID NO: 33232 - DNA, 286 bp, Glycine max
  unsure (1)..(286): unsure at all n locations; Clone ID: 701106383H1
aaagccttcctagaacgaaaaaaaaaagaagagcaattttccctcaccaaagaagaagaagcaaacaatggccgatcaacttaccgatgaacagatctccgagttcaaggaagccttcagcttgttcgacaaggacggcgatggttgcatccaaccaaggagcttggaactgttatgcgtncattggggcaaaacccaactgaggcagagctccaggncatgatcaatgaagtggatgctgatgggaatggtaccattgacttccctgagttcctaaatctcatgg

SEQ ID NO: 33233 - DNA, 286 bp, Glycine max
  unsure (1)..(286): unsure at all n locations; Clone ID: 701106384H1
tctgtctatctctcgttgtagcgtaggcaagcagttgaatttggaaaacaagatgtctcaccgcaagttcgagcacccgagacacggttcccttggctttctcnccaangaagcgagcttctcgtcatcgcggaaaggtgaangctttcccaaagacaatcctagtcaaccatgcagttgactgcctttgtgggctanaaagctggaatgacccacattgttagagaggttgagaaacctggatcaaagcttcacaagaaagagacatgtgaagctgttactatca

SEQ ID NO: 33234 - DNA, 286 bp, Glycine max
  unsure (1)..(286): unsure at all n locations; Clone ID: 701106385H1
gcaggtctcctcaggaagcccatggtacggcccagacngagtcaagtacttgggcccattctctggcgagcccccgtcctacctaaccggtgagttcccaggcgactacggntgggacactgctgggctttccgcagacccagaaaccttcgccaagaaccgtgaactcgaagtgatccactccaggtgggccatgctcgnagccttgggctgcgtcttcccggagttgctgtcccgcaacggggtgaagttcggagaagcgtgtggttcaaggccgggtnccaga

SEQ ID NO: 33235 - DNA, 288 bp, Glycine max
  unsure (1)..(288): unsure at all n locations; Clone ID: 701106386H1
cttggagttcggtccctggtgctggagcaggcacagtcacttcgaacaggtggaacttcactcacccttttcaaaaaacggatggagggtgctcgatgcaattgggagtagcnaatgacctcagaactcaattctnagaaattcaagggatggtgtgaagtccgtggatgggagggaactacgcgccttcaatttcaaacaagaggatccaagccaagaggtacgtgcagtggagaggagagtgcttttggaaaccttggctagtcagcnacctcgggataccattca

SEQ ID NO: 33236 - DNA, 289 bp, Glycine max
  unsure (1)..(289): unsure at all n locations; Clone ID: 701106387H1
gttgtcgcccncaagcacaccactgttaagcctctgggtgatagagtactggtgaaaattaaggntgcagacgngaagactgccaggtggtgantttactgncagcaactggctccaaggcaagcctcaaggaggtgaagtggttgctgttggggtnggaantcggttnggaagagcaaagtggatgtcngtgtgaagacaggtttgcaggttgtgtattcaaagtatgcagggactgaggtggagttcaatggttcaaaacatcttattctgaaggacgntgacatcg

SEQ ID NO: 33237 - DNA, 281 bp, Glycine max
  Clone ID: 701106389H1
gcaagtcatgtcttctcctgaggtttgctgatgattcataccttgacagctatatcagtaccattggagtggactttaaaatccgcactgtggagcaggatgggaagactattaaacttcaaatttgggacactgcgggtcaggaacgttccggacaatcactagcagctactatcgtggggctcatggcattattgttgtttatgatgtcactgaccaagagagcttcaacaatgttaagcagtggctgaatgaaattgaccgttatgcaagtgaaaatg

SEQ ID NO: 33238 - DNA, 282 bp, Glycine max
  Clone ID: 701106390H1
gataaggtgctcaagcttcagtggacaccaaccaaccactaacaaaaccaaacttcccatcatcgaagaacttgattacccatcccttccttccatcatcccttccccttaaaccacatagccctcttctaatcccttctcacaaactaaaaaacccttacactcatttcccttaatggattcgagtacaacaacctccacagacagtgaagtagcctatgacatcccacccatcctcaaagtctacaaaaacggtcgcatagagaggctagaaggcgtcga

SEQ ID NO: 33239 - DNA, 217 bp, Glycine max
  unsure (1)..(217): unsure at all n locations; Clone ID: 701106391H1
ggaaaccagttcgtaacgacgtcgctttacgtcggagatctcgacccgaacgtcacggacgcgcantctatgacttgttcaaccattggggcaagtcgtgtccgttagggtttgcagggatttgaccagccggagatcgctcggttatggttatgtcaactttagcaacccgcaagacgctgctagagcattggatgttctgaacttcactcctctc

SEQ ID NO: 33240 - DNA, 280 bp, Glycine max
  Clone ID: 701106392H1
gttgaagctgctcaagggtttctccaaattagggcttgcatcggatcccgagaaactcgccatgttctatgatcttcaacaaaacctcacctcggatgctggagatgtattactgagagagttagaagcagcaagagcaaaggagaagaagtgaagaagaaaaggaaacaagagaagaaggccaaactcaaagctgccaagatgaattgtgaatcttcttcatcttcatcgtccgaatcaagtgacagcgattgtggttgtgatcaagtggttgacatga

SEQ ID NO: 33241 - DNA, 258 bp, Glycine max
  unsure (1)..(258): unsure at all n locations; Clone ID: 701106393H1
ctggccatcgataacatatcacaccngagacagttatctgnatctacgcaagagaagaanagaaaatggatatcaggttgatggatttggactctccattgttcaacactctgcaccgaatcatggactgacagaggacgcagagaagaacttgaacgctccgacgcggacatacgtgcgcgacgcgaaggcaatggctgcgactcctgcggacgtgaaggagtaccctaactactacgtgttcgtgatcgacatgcc

SEQ ID NO: 33242 - DNA, 269 bp, Glycine max
  Clone ID: 701106394H1
ctcactttcatttctacatccctggctctgttccgtcgatgacgatggcgtttagggtgcgaaaccctgacctccgctttctcattcttctctctctcttgtccatcacttccgccaaggtcttcttcgaggagcgttcgatgacggatggggaaatcgttgggttaaatcagattggaaaaaagatgagaacctggctggggagtggaaccacacctctggccaatggaatggagacgctaacgacaaaggtattcaaaccagtgagg

SEQ ID NO: 33243 - DNA, 77 bp, Glycine max
  unsure (1)..(77): unsure at all n locations; Clone ID: 701106395H1
gttctanatcgcgagcggccgctcgcgatcnagatttgtttntncaaatcanaantgagaattcaatcnntaaatng

SEQ ID NO: 33244 - DNA, 282 bp, Glycine max
  unsure (1)..(282): unsure at all n locations; Clone ID: 701106396H1
ctgggcggcatgagttaccctcagcctcagcgtcaggancagccagagtcgctgttccaatgccaaatctgagaggcaaagcggttgttggtgttggttccagaatgataaggtgcatggctaaccccagaagagttcaaatggtggcaagcaaattaggagagagctttctcatatgcttctcaccgataaagtcttgcagtatgctgttcttcccgaagcctccttaggagccgaccgttacctctcttctctcaccaccatcaccgacgtccaagtctc

SEQ ID NO: 33245 - DNA, 284 bp, Glycine max
  unsure (1)..(284): unsure at all n locations; Clone ID: 701106401H1
attttggaaaatcagaatcaaagacagttaaaaatacagaacaaacatctcactcaacatcaacacttcagatctacgtttccactctcacaacaacgnaaaaggaaagaaaaaccgattctacagcgacaacaaggaacgaaagaacgatcgatttctcgaagcgccctcaaaatggcgcgtgcacccttcacttctttccccttcgtcctcattatccttctgtcaatcgtccacctttcgcactgcaagaccctcaaacgtgacgttaaggctttgaacga

SEQ ID NO: 33246 - DNA, 299 bp, Glycine max
  unsure (1)..(299): unsure at all n locations; Clone ID: 701106403H1
ggggatggaggacattgncgatttgntgattngaagtgcagctnccaccgggctttcgtttgccattagcagcggtgttggcgtggggacaaancggaatcaactctcttcttcttcgctttcgccttcacctgcaatccctggcactcagactatcttcataaagacctttggntgctctcanaaccagagtgacantgaatatatggctggtcagctttctgcttttggctattcattgagcgatgatcctgaccatgcagatctctggctcatcaacattgcacgggncaatcccc

SEQ ID NO: 33247 - DNA, 299 bp, Glycine max
  unsure (1)..(299): unsure at all n locations; Clone ID: 701106406H1
cacaagttcattcacagagagatagaatcactgaagagcttcaatggcggtttctctcnctgttactcctgctttctctctccaattcttctccttctctatcttccaagccaaagtttccatctttgtgctttctctctggcaacaacaccttgagggtcaaatgcccaaaaccttcgcactcaacaactgttgttcatgttgctccagaagcgttggattcttcacctgatcccttagacncacctccagaaacccttgatgatgactctgacgccaccactttgaggttggtgacc

SEQ ID NO: 33248 - DNA, 297 bp, Glycine max
  unsure (1)..(297): unsure at all n locations; Clone ID: 701106407H1
gctttctccacctcctgtctttcctcttctagcaacttagggncatgttggttggtattaaaaactcacaatgcaagggccgtgccagggaaactactacctggaaatggaaggagaagaatggcattaataaaagcagaagtgaagtatgtgaacgctgaaaaagctaaggaacttgtggaagctgatggatatacggttcttgatgtgcgggacaaaaatcagtttgagcgagctcacatcaaatcttgttctcatgtgcctctttttgttgaaaacaaagacaatgatcncggt

SEQ ID NO: 33249 - DNA, 298 bp, Glycine max
  unsure (1)..(298): unsure at all n locations; Clone ID: 701106408H1
caaggattgaagttttgtngctctggtacggcgttatgttcaaggattgaagttttgttgctctggtacggcgtttgtgngatntgtatgctgagaatttacatatggtctagaaattagaggtaccgtgccattactagtgcttactaccgaggagctgttggtgccttacttgtctatgatgtcacacgccgtgctacatttgagaatgctgcaaggtggttnaaagagttgagagatcacacagaccccaacattgtggtcatgcttattggaaataagtcggatcttcgacacc

SEQ ID NO: 33250 - DNA, 116 bp, Glycine max
  unsure (1)..(116): unsure at all n locations; Clone ID: 701106409H1
gcaaacgcaggaaaggggtttttgttncgcagtgagctgagcctattatcaacacaagcaataattnccagtaaatcaagacaattttccccngtttttnggnccccgnnatnncg

SEQ ID NO: 33251 - DNA, 291 bp, Glycine max
  unsure (1)..(291): unsure at all n locations; Clone ID: 701106410H1
atcaagtccaagaaccaacctaccttttgcaatctcaattcaatggcgtcctactctcattgcgaagggcttncctctcctcttccctcctctccaggtccctccttcgccccgccgcttccgcttcccaccgctctttcaacaccaacgccatgcgccagtatgacaaccgcgccgacgaccacagcaccgacatcgatcgtcactccgaacgctctttccctagcactgcgcgccgcgacgatatcttctcagatgtgttggatccattttttccgactcggagtttga

SEQ ID NO: 33252 - DNA, 279 bp, Glycine max
  unsure (1)..(279): unsure at all n locations; Clone ID: 701106411H1
cgaaaaacgaaaccgaataacccaatgtatcatcatcctctgaattcnactcgctacgcacatgggaatttattgaccagcatcaaccagatctgtgactgtgttcgattgggtaccaactattattcaataggctgtcagtaacgtaaaagtaatccctgtgccccagccatggctgcaccgtttttctcaacgccctttcagccttatgtttatcagagtccgcaagatgcaattataccttttcagattttagggggtgaagctcaagtggttcag

SEQ ID NO: 33253 - DNA, 294 bp, Glycine max
  Clone ID: 701106412H1
ctcttccgtgcacagcttgaacacaccgcgtttcggagagagacgtcgcaatggggaggaggcctgcaaggtgttatcggcagataaaaaacaagccataccccaaatcacgcttttgccgtggtgttcctgatcctaagatcagaatttatgatgttggtatgaagaagaaaggtgttgatgagtttcccttctgtgttcatctggttagctgggaaaaagaaaatgtttcaagtgaagcattggaagctgctagaattgcatgcaacaaatatatggcgaaatttgctggaa

SEQ ID NO: 33254 - DNA, 249 bp, Glycine max
  unsure (1)..(249): unsure at all n locations; Clone ID: 701106413H1
attttctcacttctccagcactacgcagcgatatcagttgaagacnacagaaccaaacaaaagaggcagaagatgttgtgggtggacaaatatcgtcccaaaaccctcgaccaggttatggtccacaccgacatcgctcgcaatctcaagaaattggtaacggaacaggattgcccccatttactcttctatggcccatctggctccggcaagaaaaccctaatcatggctcttctccgccaaatgttc

SEQ ID NO: 33255 - DNA, 294 bp, Glycine max
  Clone ID: 701106414H1
ggtcaattgatgaagggagtcgggaagaacaagcacgactataccatgagggagcaattgggtataatacattttgtggttatcctcctgagattgttaagaaaatgccaaaaaaggaacttgctgaggaggtttggagactccaggcagctcttggcgaacaaactgaaattacaaagttcagccaacaggagtatgaaagacttcaaaatgagaaagtgttatgcagagtttgtttcgagggagagattaacgttgtactgctcccatgtaggcatcgtgttctttgcagca

SEQ ID NO: 33256 - DNA, 96 bp, Glycine max
  unsure (1)..(96): unsure at all n locations; Clone ID: 701106415H1
gtattggaaggttctaagtttcaancctttgaggtgtaaccttaggnnncactncactttnnanccccaattccctctccctaaggttacacctca

SEQ ID NO: 33257 - DNA, 296 bp, Glycine max
  unsure (1)..(296): unsure at all n locations; Clone ID: 701106416H1
gctctcgctcttcttctcatcaagcacagagttacagactcaccgatcttccgatnctctttcgtcttggtttatgagctcganngagagacccactcttggtggcncgcggattaagacccgcaaacgaaatattgctgcgccgctngaccctgcagcattctcggatgcagtggtccagatttatttggataatgctggtgatctggaacttattgctaagagtattgaatcttcagaccttaacttttcaagatacggtgacaccttttttgaggttgctttcactgggggtc

SEQ ID NO: 33258 - DNA, 119 bp, Glycine max
  unsure (1)..(119): unsure at all n locations; Clone ID: 701106417H1
tgcacttgtactcactcaatccgagaccaaaacggcgccatgcctaccgtcagtgtggggcgggatcgcctgtttgcggctctaggaaagacttncanncaananncnanccngnncnt

SEQ ID NO: 33259 - DNA, 302 bp, Glycine max
  unsure (1)..(302): unsure at all n locations; Clone ID: 701106419H1
caaaaactgaaggcaaaacagaganagctctagctctgaatgatggatagaangcactgttacaaggatttgctngcctntggtgntgcttgttgccaacgaatgcaacaacacaggcttgttcactctcttcaaagcagccacactgcaagggatgagcaactatgtctttgtcacctatgcctattctgttgcccttcttgtactccttcctgtcacttttttctacagaagatccnagannggttcctccactcagttnttccatcttatccaaaattgctcttcttggagtgataggg

SEQ ID NO: 33260 - DNA, 288 bp, Glycine max
  unsure (1)..(288): unsure at all n locations; Clone ID: 701106420H1
anangttnctgtaggagataagattgcngtagtgctaantgctancacctacagtnaacaatggncctatgcatnagcntctctgnctnaagtgcttcanntgttcttganaagtctgantgggtgaagggncaaacccttcgtnaaccttctggatcanttgtganatgcnacccnaccaccccatcagggntcaccatcngcgctggntcctatgctggtgagcttcnttaagancgcgaaaacagtggcttcaccanggnanggtatnnangccatngatgcgct

SEQ ID NO: 33261 - DNA, 302 bp, Glycine max
  Clone ID: 701106421H1
ggcagaaatgctagcaagtgagcttacaactgccaaggaacacttgaaggaagcacaagcagagctgcaaggtgtgtcaaaagaattgacagctgctcttgaaaagaatgatagcctacaaaaagaattagttgaagtctacaaaaaggctgaaagcacagcagaggatttgaaggaacaaaaacagttagttgcttctctgaacaaagatttacaagcattagagcagcaagtctcaaaagacaaggagtcccgaaaatctcttgagagggacctggaggaggcgaccatatcactagatg

SEQ ID NO: 33262 - DNA, 289 bp, Glycine max
  unsure (1)..(289): unsure at all n locations; Clone ID: 701106422H1
ctagtattttatctaatctctgttaatcaaacatgttgtaaataaaaattaangccaacaatttggccaaaatgtttttttcttgggtattctcgataaaccagtcttaacaatatacatattgttagctcttgctgttttcacagtcaaactcttgcctattagttttgattcgatcaaaccataaaccctagctagctaagtagcgttcgagatggagatggagatggagatggagatggaggagaataatggattattgaatttacaggcagtggcaccggaatgt

SEQ ID NO: 33263 - DNA, 297 bp, Glycine max
  unsure (1)..(297): unsure at all n locations; Clone ID: 701106423H1
aacaaaaccacaatgtaagtaagtgttgagagaagagtncgtttgtttgnntcnnacttnngtagtaangatgtttggantgatcggaggnnacaagggtcacaagataaaggggaanttggtgattatgcgnaagaatgtgttggntatcaacancantaccantgttaagggngtcattgcnaacnggcattaacatcnttggaggngtcgtngacacgttatcctntngcgtngcanatctcnatccanctantcagnggcataangctgatggccatgggcnnggtacagttg

SEQ ID NO: 33264 - DNA, 299 bp, Glycine max
  unsure (1)..(299): unsure at all n locations; Clone ID: 701106424H1
caacctcagccttccgattcaaagtctccgcnatggctaccaccatcgccgccccttctaccaaggtggctcccgccgtctattgtcggcggcggaagagtgggtagggccttgcaggacatgggcaccggtcaanacctcctcgttcgccgaggagagtccgnacctcccaattttgagggtcccatttntgngtgcacaaggnacgatgatcttgaatccgtgcttcaatctacaccttcttctanatggcgtgantnggtgtncttccagaacggaatgatggagccgtggcttga

SEQ ID NO: 33265 - DNA, 296 bp, Glycine max
  unsure (1)..(296): unsure at all n locations; Clone ID: 701106425H1
tgtctttgtatcacgaaaactatacgattcgattccttgttttcaatggacaccttcttcaannnnnnnnnnnnnnnnnnnnngagaagccgctggagttacgatactctcaagaatttccgtgagatctctccgctggttcagaatcacatcaaacgggtttattttacgttatgttgcgctgtggtggctgctgctgttggagcttttcttcatgttctgtggaacattgggggttttctcaccacgttggcttccattggaagcatggtttggttgctatctacaccccctgt

SEQ ID NO: 33266 - DNA, 297 bp, Glycine max
  Clone ID: 701106426H1
cttcctcatatcttccaccctttggcttattagtgggagcaatacatatcattcattcagaggcaacaaaggagttgtaaattaagagcatggctgcacaagctcttgtatcatcatcatctcttaccttctcagccgaggctacaagacaaagtcttggaccaagatcactccaatctccatttggcttctcaagaaaagcctcctttcttgttaaggcagctgctactccccctgtcaagcaaggatcagacagacctttgtggtttgcatcaaagcaaagtctttcctacttgg

SEQ ID NO: 33267 - DNA, 295 bp, Glycine max
  Clone ID: 701106427H1
gcaccaacaccagcacttcaaagaagacagaatcaagcagaacttggagttggagagagagaattccgaccctaattgtaaaatggaggacgagacagagactatggtggagaagagggagataatcaacaacgtaatgtgtcttttgacagaccctgatggaactcctttgggtgctcctatgtacctacctcagaatgctggtcctcaacacctcatccagattgttaataagcttctaaacaatgaggagaaattgccgtattctttctatatatcagatgaggagctcctc

SEQ ID NO: 33268 - DNA, 293 bp, Glycine max
  unsure (1)..(293): unsure at all n locations; Clone ID: 701106429H1
agggttcaaatctcgaacccccatcgtgtccgtaatccttcttccaaatttccaacttccctctgcctcttctaatggtatcgtatctttcgatggaagggtttgtaagggtttaagntcaaccaaaccctaaaccctaaatttcccaatttcttctttcgatcttccactctctccctttccttctcataaatttcgaatccatacactctcacctcatgccctcagatccaatccgcacccttttatcactgaagtgagtggcgttgttgaggtgtggttcttggtggggt

SEQ ID NO: 33269 - DNA, 296 bp, Glycine max
  unsure (1)..(296): unsure at all n locations; Clone ID: 701106430H1
cgtagtttttaaaagctgagagcgtcgaaggcacagccgtcgcgtgggaaggnccccaaaataaattaggtttgattattaggggagggaaaatggatgaatcaacgaagaaggggtctgtgacctcactcgcctccctcttcccagtagaggaggcgcaaagggcggccaagcgcgtcgaagacaccattgccgacaagcagagcgagctcgaccgcctacgaggtttcgccaccgacaacaacagcctcatcaacctcgtccacaagctccccgaacagctctcccacgacatc

SEQ ID NO: 33270 - DNA, 218 bp, Glycine max
  unsure (1)..(218): unsure at all n locations; Clone ID: 701106431H1
ctctgctttcaacttgctccctcagaagcgaagaagaagccacanagaactagtctcctactctcacccgcaaganaaaaatggcatctcacatcgttggataccccgtatgggtcccaagagagagccaattccttcagctttggagcaggacgcggattcgaggcttgttaggacntgagatgttgtgtagatccagaattccnattnagttggac

SEQ ID NO: 33271 - DNA, 287 bp, Glycine max
  unsure (1)..(287): unsure at all n locations; Clone ID: 701106433H1
cngntcgancngttngagctcgagccgcaaaaacaaaaggttgaagaatttgacaacctgagaaacctnaggtagagtcagtcagagatatagaaatggcttcgtggtgcagtgttcgaagcttccaggttccggcgatggaaggcagcgcactgcgcaaccgtgcttcattggccgccagagtggggtgtttgtccgtggccggcacctccttctggcgttcctcttcgtcaccgaagcactctttgtcattcacatgcttgagcatttcttccgaaatcgtatta

SEQ ID NO: 33272 - DNA, 277 bp, Glycine max
  unsure (1)..(277): unsure at all n locations; Clone ID: 701106434H1
gcgcnatggcccaagagtatagttactgttgggtgtggcataggtgggcagctctaganaccnggccaagaaatttggagcaaccagtgtaggcatcactctgagtcctgttcaagctcaaagagcaaatgctcttgctgctgctcaaggattggctgataaggtttcctttcaggttgctgacgctctacagcaaccattctctgacggccagtttgatctggtgtggtccatggagagtggagagcatatgcctgacaaagctaaggttttaatt

SEQ ID NO: 33273 - DNA, 240 bp, Glycine max
  Clone ID: 701106435H1
aattgagccacttaccatccagatttagatctcccaacagagagtttctcaaaattgccaagtacccttttcaggatcaaggaagagaatcaagaaccaccaaaaggtgttgttctttgttgtagttgtttgtaactgtagcaacatgaagatggttagaaagttggttgtggtgaggcttgtgttggccatatctgtgttgagtctctccttctgacaacctcggcacagacagcatgc

SEQ ID NO: 33274 - DNA, 297 bp, Glycine max
  unsure (1)..(297): unsure at all n locations; Clone ID: 701106436H1
gnatctctcccagaaaagaggcatcagttgcaatggctcgttacggtgagggcgacaagcggtggatcgtggaggaccgccccgacggcaccaatgtccacaactggcattggtccgagaccaactgcctcgactggtccaagaccttcttcaccagcctcctcactaacctccctatcctcgacggcgagggtaacctcttcctcaaaacgacgtcgcttcgctccctcgacggcgaggcctacatcaatgtccgaaaggggaagatcatccccggctacgagatcagcctcactt

SEQ ID NO: 33275 - DNA, 300 bp, Glycine max
  unsure (1)..(300): unsure at all n locations; Clone ID: 701106437H1
aacaacatgaattntctaancttcgttactgttctactcttcatacnaccaaccaaccttcatcttcccagtatttggggaanaaccttctcactcatngcaagatattcctaaaaaaagacaacattattacctcgtangctgtcatctttgacggtggtagnannngaacccgngtgcatgtcttccattttgaccagaatttggatctcctncccgtnggtgatagtncttgagcttgannaaaggatcacgcccggtttaagtgnnntacgaggatgatnccgngncaagctgcag

SEQ ID NO: 33276 - DNA, 275 bp, Glycine max
  unsure (1)..(275): unsure at all n locations; Clone ID: 701106438H1
ccaaaacgctccatactcgatatanccttacaccacttgggacatcaaaccccaaccaattcnaaccatttcttttcgttccgatcagtttttcgnnnnnnnnnnnnnnnnnnnnnnnnntccgaaaccttaatctcttgcccgataagggaaaattatgaatcctgataagttcacccacaagacanacgangntctggtgagtgctcacgaaatagcaacaagcaacggtcacgcgcagttcacccctcttcacctggcgtcctctctgattt

SEQ ID NO: 33277 - DNA, 295 bp, Glycine max
  Clone ID: 701106439H1
cgagataactagaaacagtgtgatgaaaatgaaggtccttgttttcttcgttgctacaattttcgtagcatggcaatgccatgcgtacgatatgttccctctccgaatgaacactggctatggtgcccgtactccggaggtgaaatgcgcaagttggaggcttgctgtggaagcacacaacatctttggctttgagaccattcctgaagagtgcgttgaagcaacaaaggaatacatccatggcgaacaatatagatcagactccaaaacagttaaccaacaagcttacttttat

SEQ ID NO: 33278 - DNA, 295 bp, Glycine max
  unsure (1)..(295): unsure at all n locations; Clone ID: 701106440H1
tcaccttgacacttcttgtggataaagctcttttttttctgtactctaaaaaaaaaagcgtttctcctctcattttctttctgtncgagaaaatttagtgaacccaaaaggagagaactttctttggtttgtgtttcattttgttgtggttttcngtaagattaaatggctgaggttttgaccaaggcgagtttggtttcctcttctncttcttcatggcatggggttggtcaacggcatcancnaagggtttcaacggtttccaacacttgtagcttcggttctggcgtgggaa

SEQ ID NO: 33279 - DNA, 294 bp, Glycine max
  Clone ID: 701106441H1
gtgagttcttctcttctcgcaaagctctgtatcacattcttccgctgttatcgtaagagggtatcagcggttacggaacaatttgacaattgcatgaagaagcaagtagaagcaattgcgcgagttttgcatttatttcaatcctacaaagaggacaatattccgtgcaaaatcgacgagggtctctatttgggttcgattgccactgcagctaacaagcctgctttgaaagactgtaatattactcacgttttgactgtggctggtagaataccacctgcacatcctcacgat

SEQ ID NO: 33280 - DNA, 291 bp, Glycine max
  unsure (1)..(291): unsure at all n locations; Clone ID: 701106442H1
cttcagtgtgcattgcacaatttaggttcttcctcttcagagcagnatgttcgggcatgttcttcacttgatggttggaaacagcatattggttctggaaaccctaggattgagaaatgtggcagcattttggatgatcttctgcggtcacttgatcttccaaaggttaaaaagtccgctaaaggaaaggttttgatgcaagctatgtatggagtaaaggtgcagacagtatttgtatgcagtgtgtttgctgcggctttttcgggctctacaaagaatatgtcagatttg

SEQ ID NO: 33281 - DNA, 291 bp, Glycine max
  unsure (1)..(291): unsure at all n locations; Clone ID: 701106443H1
ggaaaaaagaaaaanatgtcatccactgctagcttgggttatggggctccaacctgcttcaacaacgttcatcacacaaagaagcagcaagcaatgaggaacagtttcttgagcaataagcacaacagtgtgagagtgatgaagggttggagaggaagacatggtaacactaacaacacatccaaaagggtaggaattgtgcagtgtagagggttaggggacttcataggtggagacttgataaagtttgatcttggacgttggctttcagatgttgaagagcacaaagcc

SEQ ID NO: 33282 - DNA, 293 bp, Glycine max
  unsure (1)..(293): unsure at all n locations; Clone ID: 701106444H1
ctcagtctcaactctctccancaaccacaatggcncctcttgggcgccgcctccctgcctccgctggcatcattccctccgtctcactctcttcctcttctcgctccttcttctcactctcatcctcttcttccaaactccaatgcttgcgctcctctcctcgtatttcgcacctctttctcaatcagcgaagagcggaggttcgcgtttcgagtggaggatacggaactgtgtcggcaccgaagtcagttgcgtctgatcctgatcagttgaagagcgccagagaagatatc

SEQ ID NO: 33283 - DNA, 290 bp, Glycine max
  Clone ID: 701106445H1
ctccctttcctctccgaaccctcgatcactctcacgcgctcctatattcgctcctccaccgtcgctctctcgaacaaccacaacaccatcttcatcacatggcaaacgcagcatctggtatggcagtccatgatgactgcaagttgaggtttttggagctgaaggcaaaaaggacacaccgtttcatagtttttaagattgaggagcagcagaagcaggtcattgtggagaagcttggtgagcctgcccagggctatgaagatttcactgccagccttcctgctgacgag

SEQ ID NO: 33284 - DNA, 290 bp, Glycine max
  unsure (1)..(290): unsure at all n locations; Clone ID: 701106446H1
gaacgccgcaacagcagctaatagcagtgtttattcacagacacagtgcagactactttccttcggatcttcgaagttcgattcctttcttgaatgaacgcaagtcacggttggtggtaagggctggcggtcgtcctcctcaaaatatgggcaaggacgaggatgagaagcagcagcagcgtgtcatnnnnnnnnnnnnnnnnnnnnnnnnnnnnnnnnctccgcccgtgtctcttagcctggacgacgtgaaccccgtagactgggtcgaagatcgcggcagttgttcg

SEQ ID NO: 33285 - DNA, 293 bp, Glycine max
  unsure (1)..(293): unsure at all n locations; Clone ID: 701106448H1
ctttctcctaaaacatctcaatgggttcttcttctattacaacatcgccctccaaccatgaccatggctgcgatcgtgctcctgttcacggtctttgccgtttcctccgccctagacatgtcgataatctcgtacgacagcgcccacgcggacaaggccgccacgttgcgcaccgaggannagctgatgtccatgtacgagcagtggctcgtgaagcacgggaaggtgtacaacgcgctcggcgagaaggagaagcgcttccagatcttcaaggacaacctgcgattcatcga

SEQ ID NO: 33286 - DNA, 299 bp, Glycine max
  unsure (1)..(299): unsure at all n locations; Clone ID: 701106449H1
caaaatcttcttagaagtgaatggttgccatttcggtcttcaagtcctttttccttttgttctcacaaaacccaacagtgcccacactcacacaccctaaccacggcanccaccacattctcttgcttcccccttcctttagccatgcttgaatcatgtggccatcgcctccttagctcgttgttgcatctcatttatctacaacgatgctccgaatctccgtaccccttccaagaatcgccgccctcgaccacggaagagctcacgcttctcctgactcctagaacatactaccatca

SEQ ID NO: 33287 - DNA, 294 bp, Glycine max
  unsure (1)..(294): unsure at all n locations; Clone ID: 701106450H1
aaaaataaagaccaccttgttcggttgtntttgttgttatgggtgccacctctatggtccgangaggagtcacgaggtttctaccccgaaggnnatatttggggtgcgagaaattacaacttggagatgtggagtttgaatttctcgatgatggtgagatcatgtcgttggccaaaagtgaaggttctggcgatgagtttcatcaatccaatgaaatggaattggatgatgaagatgatggtgacagggttgatggtggcagcgttgaggagaatagaagcttttgggataatc

SEQ ID NO: 33288 - DNA, 295 bp, Glycine max
  unsure (1)..(295): unsure at all n locations; Clone ID: 701106452H1
tgaaggtccttgttttcttcgttgctacaattttggtagcatggcaatgccatgcgtacgatatgttccctctccgaatgaacactggctatggtgcccgtactccggaggtgagatgcgcaanttggaggcttgctgtggaagcacacaacatctttggctttgagaccattcctgaagagtgcgttgaagcaacaaaggaatacatccatggcgaacaatatagatcagactccaaaacagttaaccagcaagcttacttttatgccagagacctcgaagtccatcccaagga

SEQ ID NO: 33289 - DNA, 136 bp, Glycine max
  Clone ID: 701106453H1
gtttcctcgctctcttttctgcaattttcttttttgttcgttctctgcggttatctttttgagcttcaatggcggacgctgaaaccttcgctttccaggctgagatcaaccagcttctcagcctcatcatcaacac

SEQ ID NO: 33290 - DNA, 277 bp, Glycine max
  unsure (1)..(277): unsure at all n locations; Clone ID: 701106454H1
catcttcctctttttctcaacaaaaaggggttcaattctagctanttctattacgtcgtccgcgaccatgaacatggcgatcgcgcttctgttcatggttttcgcagtttcatcagctttagacatgtcaataatatcacacgacaacgctcatgcggatagggccacgaggcgcaccgacgaggaggtgatgtcaatgttcgaggagtggctggtgaaacacgacaaggtgtacaacgcgctcggtgagaaggagaagaggtttcaaatcttcaag

SEQ ID NO: 33291 - DNA, 294 bp, Glycine max
  unsure (1)..(294): unsure at all n locations; Clone ID: 701106455H1
ctcgctctgcactctctctttctcatcctattctcttcgcttctctgttcgtgccacttcttctncgagcaatggcatctcatattgttggttatccacgcatgggacccaagagagaacttaagtttgctttggaatctttttgggatggaaagagtagtgctgaggagctgcagaaggttgctgcagaccttaggtcagccatctggaagcagatggctgatgctggaataaagnatattcctagcaacaccttctcactttacgatcaagtatggacacaacagccatgct

SEQ ID NO: 33292 - DNA, 292 bp, Glycine max
  unsure (1)..(292): unsure at all n locations; Clone ID: 701106456H1
tgcagactancccaaaccacaaccaatgttcagaacgtaacanacaaaaggaaaaacctcnngttcttcctttgttttctcaattgnccctcctattctcagcctttctgtctctccttcctcttgccatgattggaagtaaagatcgtgttgttgactctnaaggtgaaaactcnaggagcaagctctcanggcanaattttgaggccaacaaggagtacccagatgnaaaaggtgttgnatttctgagagnttcaaaagtgggtggtngtggtgttgatggggttttcnt

SEQ ID NO: 33293 - DNA, 293 bp, Glycine max
  Clone ID: 701106457H1
ataacacaaagcacaaagcaaagctcatccttgagttaaaaaatggcagcagcttcttccatggctctctcatccccatccttggctggcaaggccgtgaagctgggcccatcagccccagaagtgggaagggtgagcatgaggaagaccgtcaccaagcaggtctcctcaggaagcccatggtacggcccagaccgagtcaagtacttgggcccattctctggcgagcccccgtcctacctaaccggtgagttcccaggcgactacggctgggacactgctgggctttccgc

SEQ ID NO: 33294 - DNA, 289 bp, Glycine max
  Clone ID: 701106459H1
cttactctagactcttccttttctcttctctgtctaaggggtgccctgagatcacattgaacaatggtgaaggctgtggccgttcttggcagcagtgagggtgtcactggaactattcacttcgttcaggagggaagtggtccaaccaccgtaactggatctcttgctggtcttaagcctggtctccatggtttccatgtccatgccttgggggacactaccaatggttgcctctcaactggatcacatttcaatcctaataacaaggagcatggtgcccctgaggatg

SEQ ID NO: 33295 - DNA, 290 bp, Glycine max
  Clone ID: 701106460H1
agcaacaataacaatggcagcctcactacaagctgcagctaccttcatgcaacccaccaaggtgggcatggccactcgcaacctcaaatctacacaatgcatttctaaggcttttggcttggaacccgctgcagctaaactcatttgctcccttaagcccgatctcaaagattttgctcaaaaatgtgtcgacgccaccaaaattgcaggattcgcccttgccacctcagctctcgttgtttctggagcgagtgcagaaggtgttccaaagaggctaaccttcgacgaaa

SEQ ID NO: 33296 - DNA, 291 bp, Glycine max
  unsure (1)..(291): unsure at all n locations; Clone ID: 701106461H1
aantgtttaatattggtaagagcagcaagaatgaaaataaatttgatgcacacagaatggtgagnactggtcttcaaaaagaaggatcaaaagtaattttnggtgttcctaaaccggggaaganaaggaaatttatggaagtaagcaagcattacgtggcacatgaaaacagtaagatcagtgataganatgattcagttaaacttgcaaatttcttgatgcctccaagttccgngagcctagaggatggaaaaatagttccaaaaatgatgccaaagagaaacatggagc

SEQ ID NO: 33297 - DNA, 291 bp, Glycine max
  Clone ID: 701106462H1
gccgagcagcgagagagagaaaccctagcaaaaatgccggctggtcacggtttgagatcccgcaccagagattccttctctcgtcccttcaggaagaagggtaccatcgccctcaccacatacctcagaacctaccacgtcggcgattatgtcgacgtcaaggttaacggcgccgtccacaagggaatgcctcacaagttctaccatggccgcaccggtcgcgtctggaatgtcaccaaacgtgctgttggggtcgaagtcaacaagcaggtcggcaacagaatcataagg

SEQ ID NO: 33298 - DNA, 290 bp, Glycine max
  unsure (1)..(290): unsure at all n locations; Clone ID: 701106463H1
gccttcctctctgcagagtgcagagctttctctccccgttgcttcattcattctcaacaacaaaccaatctttcttagaaaatgagggggggcntgtggcaacttgggcaatcgatcactcgccgtcttgcccatggagataagaaggctgttgctcgtcgatgttttgcctcagaagctgagctgaaaaagacagtgtttcatgacttccatgttgctcatggtgggaagatggttccatttgctgggtggagcatgccaatccaatacaaggactcaatcatggactc

SEQ ID NO: 33299 - DNA, 292 bp, Glycine max
  Clone ID: 701106464H1
gttgctatggcaggagacacacaaggaatctgtaaagtggaaatttatgactgaccatcgccttactgaaatcatgacttctttgaaggatattcaggggaagtatggtgaattgatgatttggaaaactacagttgagcaacaacttatggaaataactgataaattgaatgatcttcaagcatctagggagtgcaccactaatagtcctccttcagaaaggtggaaagattggatagaaagtaccaacctagacaatattcaggaagatgcatttgcaacttggattggg

SEQ ID NO: 33300 - DNA, 295 bp, Glycine max
  unsure (1)..(295): unsure at all n locations; Clone ID: 701106465H1
acagaatctactctctattttcctagcttagattccttctccaatggctcttgccgtttccactacttcttcctctncnnnnnnnnnnnnnnnnnnnnnngtcgagntctttcttctcgcgccttggatcttcatcggacgctaaagctccgcaaattggttcctttcggtttccggagaggcctcaagtttcgtctggtgttgttaatttaactcaaagacgctcctcggtgaggccactcaatgccgaaccgcaacggaatgattctgttgttcctcttgcagcaactatcgt

SEQ ID NO: 33301 - DNA, 284 bp, Glycine max
  unsure (1)..(284): unsure at all n locations; Clone ID: 701106466H1
atcgagataactagaaacagtgtgatgaaaatgaaggtccttgttttcttcgttgctacaattttngtagcatggcaatgccatgcgtacgatatgttccctctccgaatgaacactggctatggtgcccgtactccggaggtgaaatgcgcaagttggaggcttgctgtggaagcacacaacatctttggctttgagaccattcctgaagagtgcgttgaagcaacaaaggaatacatccatggcgaacaatatagatcagactccaaaacagttaaccaaca

SEQ ID NO: 33302 - DNA, 292 bp, Glycine max
  Clone ID: 701106467H1
ggttgattagggtttcttcggctgcgtgctgatgctcttgttttctcacagtcacacaacagcaatggaagcaatcacagagggagtgaacaacatcaacatctctgattcttacaagaagaatcgcattcaggtctccaacaccaaaaagcctctcttcttctacgtcaatctcgccaagaggtatatgcaacagcataatgaggttgagctctcagcactaggaatggctattgctacagtggttactgttgctgaaatcttgaaaaacaatgagcttgctattgaaaag

SEQ ID NO: 33303 - DNA, 291 bp, Glycine max
  Clone ID: 701106468H1
taaatatcaatggccttgctaggcagtccctgattaacgcaggtggcattattgagcaaacatttttgcctggaaagtactccattgaaatgtcatcagttgtttacaagaattgggttttcactgaccaagcattaccagctgatcttgtcaagagaggattggcagttgaggatccctctgccccacatggtcttcgccttgtgatagaggactacccttatgctgttgatggacttgaaatatgggatgctattaagacatgggtccatgagtatgtctctgtgtata

SEQ ID NO: 33304 - DNA, 293 bp, Glycine max
  unsure (1)..(293): unsure at all n locations; Clone ID: 701106469H1
caagttacatccattgagaaacatgaaggtctcccccttagcattttnaatcctttttttgtccttcaccatagaactcttcattggcattgcttcagcagcacaagaaccagtgcttgacacctcaggccagaagctgagaacaggtgtcaagtactacattctaccagtcttcagaggcagaggtggaggcctaacagtttcaagcagtggcaacaacacatgccccctctttgtggtgcaagagaagcttgaagtctcaaagggcaccccagttaccttcacaccctaca

SEQ ID NO: 33305 - DNA, 291 bp, Glycine max
  unsure (1)..(291): unsure at all n locations; Clone ID: 701106470H1
ctcaagtaccacaacataaaagagcctcccattcgggtccgctggctcaccgaactgcatgggctaaatctgggaagaaccaggatgatgctccaaagatttcagtngggggcgacctatcaacaatctcaggcttagttgctgcaaggagtatgttgtcagatgatcgcagagaaagatctggatcgtcacaaacggaggcttcaaaattaacgaacagattcccaggatcattcaaggacttctctgaatcgtcaataaaacaagatcaaaggcatcatgtacagggca

SEQ ID NO: 33306 - DNA, 292 bp, Glycine max
  unsure (1)..(292): unsure at all n locations; Clone ID: 701106471H1
cttttttcgggtctcgtggtgttctctatttcttcacaaattaaaganncgtccaaactaaactcattattcctccctgcaactctgtgttcactggttcccttgatggtaaactcttcagctcctcttcaatcatttttaaagctctgagcttaaacaaaacattggatacgacatgggttttcagaggtttctcataatatgaccaatgtttgtggcaccggttcttttgggggaagtagatcagcttcaaagattgcagcttttcatttgcttattttccatattttat

SEQ ID NO: 33307 - DNA, 284 bp, Glycine max
  unsure (1)..(284): unsure at all n locations; Clone ID: 701106472H1
ttgcgactaagagttgctgcttcttccgccactcagccacttcgctccctctgtgcttcaccaaccatggccgaaatcgaagctaccgttccagatccctctcaaatcgacgtcaaacttttcaaccgctggagcttcgacgacgttgaggttactgatatgtctctggctgattacattggagtgtccccgtcaaagcatgctacatatgttcctcacactgctggtaggtactcagtgaagaggttcaggaaggcgcagtgccccattgttgagagactcnc

SEQ ID NO: 33308 - DNA, 290 bp, Glycine max
  Clone ID: 701106473H1
cacttgtgagggctgctactatcgaagaaattgaagccgaaaaagccgcaattgaaaaagatgctaaaaccaggatggataggactattgataatgtccgtacaaatttcagttccataaggacagggagagcaaacccatccatgcttgacaaaattcaggtggaatactatggaagcccagttagcttgaagagcatcgctcaaattagcactcctgatgccagttctcttttggtacagccatatgacaaatcaagcttgaaggctatagagaaagccatagttagc

SEQ ID NO: 33309 - DNA, 289 bp, Glycine max
  Clone ID: 701106474H1
ctcctctcaacacagatatttcattgcaccaatattcaagagcaatggccatgctcaatatcatcgccattgtctccctcttactcttaatgattccatcccaagccaaaattcccggcgtctattccggtgggccatggcaaagcgctcacgccactttctacggtggcagcgacgcctcaggaactatgggaggggcgtgtgggtacgggaacctatattcccaaggctacggcgtgaacactgcggcactaagcactgctctattcaacaatggtttcagctgtgg

SEQ ID NO: 33310 - DNA, 287 bp, Glycine max
  unsure (1)..(287): unsure at all n locations; Clone ID: 701106475H1
cacgaaaccgcgatagctctttccttatcttctccgaatccgaggagtggtagtaatttgtggtttttcacaatcactacctcgtttcatcttaattctgttaattgggtactaattaagctatctcaaacctcaatttttttgaggcttccattcattaaagtataaagtttgtggctttcaaacaattatatggggagttgtgtgtctaagaataaagctagggataatgattctgatcataatgtggattttgctgctgggaatgtgaaactntattaccacca

SEQ ID NO: 33311 - DNA, 287 bp, Glycine max
  Clone ID: 701106477H1
gaaagtttgagtagggatgaaggcattaagctagttgttgaggcgatatgcgctggaatatttaatgacctaggaagtggaagtaatgttgacgtttgtgtgataaccaagggacacaaggaatatctcaggaaccaccttctaccaaatcctcgtacctatgtcaatccaaaaggctttgatttccccaaaaagacagaggtcctcttaacaaagattaccccgttgaaggagaaggtggaagtgattgaaggagatgctatggaagagtaacaatcgttccaaaa

SEQ ID NO: 33312 - DNA, 289 bp, Glycine max
  unsure (1)..(289): unsure at all n locations; Clone ID: 701106478H1
gaaaccctagattgcagaggaaacggtgcaaaataagcccaacaanaaaagacanntntccgaggaaacaacgttactttcttcattatcgtnccaacatagcacaanacccttaagccgttaagcaccttcaacgccgccgtagtttgttattggtttggtttgatggagatggagggtgagaaacagcacaagtttgatgtggacctcggcaacctcatggctttcgattcctatcacaccttcccttctcaaccatctctttccagggaggacctcatcaaacagt

SEQ ID NO: 33313 - DNA, 288 bp, Glycine max
  Clone ID: 701106479H1
ggattctgcagacaatcattgcctggcttctgaagacttatgtaaccaaaaagagaatctttttatggtacatagtaggaggggaggaagcaatcaaaagatgtatcataatgaatggttggatactattgacttggaacctgatgtaatatcattgttccttctccctctgacatcccttttgacaagtatccgcgggagtggatttgtgagccatgccataaatctgtatctccgttacaaaccttcaattgaagaccttcatcaattttgtgagtttcagctacc

SEQ ID NO: 33314 - DNA, 291 bp, Glycine max
  unsure (1)..(291): unsure at all n locations; Clone ID: 701106480H1
aaattccaagcacaagttctctncagttgttttgtgagatagcacatagcatagcaaggaaggagtattacaaccgaaaccctgaagaaaaaaagagtagaggaagaaaaaacacctgcaccaccaacgatgggtgtggattactacaagatcttgcaggttgataggagcgccaaagacgacgacttgaagaaggcttataggaaacttgctatgaaatggcaccctgataagaaccccaacaacaagaaagaagctgaagctaagtttaagcagatttccgaagcatac

SEQ ID NO: 33315 - DNA, 292 bp, Glycine max
  unsure (1)..(292): unsure at all n locations; Clone ID: 701106481H1
gaataccttcgcggaatgtnngtggatcctagtaagagaccattgatggattatgttcagaagattcagagggatgttaatgctaacatgcgcggtgttcttgtggattggttggtggaagttgcagaagaatacaaacttgtttcggacacgctttatttctctgttgcttatattgataggtttttgtcgttgaatattttgtcgagacagaggttgcaattgctgggggttgcttcaatgctcattgcttcgaaatacgaagagattaagccgcccgaggtggaggatt

SEQ ID NO: 33316 - DNA, 293 bp, Glycine max
  unsure (1)..(293): unsure at all n locations; Clone ID: 701106482H1
aaggaagtgagatcagtgagcaagtnggagaggatttgggagcaaagaagaaagtttttgtagctggagccactggtagcaccggcaaaagaatcgttgagcagttactcgcaaagggctttgctgttaaggctggggttagagacgtcgacaaggccaagacaaccctttcatctgccaacccttctcttcaaattgtgaaagctgatgtcacagagggttctgataagctagctgaggccattggtgatgattcagaagcagtagtgtgtgccacaggctttcgcccgggg

SEQ ID NO: 33317 - DNA, 294 bp, Glycine max
  unsure (1)..(294): unsure at all n locations; Clone ID: 701106483H1
ctggttctcaagattttgagaagaacaaagtcaatcaaatggaaagagaattgtcatctgcttttgaagaagatcctaatgacattgatgcattgttgagcataggagcggatgaactagaagactttgacgaggaagaagtcagcacagcaaggactcgtgaaaaatatgaaagtttatccgatacttgctccagttattgctcaaaatcaaggaagaagaggnnnnnnnnnnnnnnnnntgtacagaagtcttctggggctgggggttactgccacaatgaagggaagcacc

SEQ ID NO: 33318 - DNA, 292 bp, Glycine max
  unsure (1)..(292): unsure at all n locations; Clone ID: 701106484H1
ctaaaaggtaaggaacggcgttgttgagcggaggaagatgagcgtttcacatttcgcggntctatcgtcgtgttgtcgtccacgcttcgccccttctttgtcgcgtgcttcagccctccgttctcgcatccggtgttgtactactctcacttctacttcttcagagactcccactccaacctccgtcaagaaacgagtagtgtcgggagttcagcccacgggctcaattcacctcggaaactattttggcgccatcaagaattgggttgcccttcagaatgtgtatgataca

SEQ ID NO: 33319 - DNA, 281 bp, Glycine max
  Clone ID: 701106485H1
ctctccttcctcttccttcttcttgtttcatctgccactgcttgtgatcgctgcttgtatcaatccaaggcttcctatttctccaaagcttctgctctttcatctggggcatgtgggtatggctctttggcactagacataagtggtggacaccttgcagctggtgtggattctctcttcaaaaatggagcaggttgtggtgcctgctttcagataagatgcaagaacccaactctatgtagcaaagaaggtaccaaagtggtattgactgatcttaatca

SEQ ID NO: 33320 - DNA, 293 bp, Glycine max
  Clone ID: 701106486H1
gcgagagacagtcgacgacgacgacgttgctgcacggcaagtacgagctaggtcgtgtgctggggcacggaagcttcgccaaggtctaccacgcgcggaacctgaagacggggcagcacgtggctatgaaggtcgttggaaaagaaaaggtgatcaaggtcggaatgatggagcaggtcaagagggagatctcggtcatgaagatggtcaagcacccaaacatcgtcgagctccacgaagtcatggccagtaagtccaagatctacatctccatcgaactcgtccgcggcggg

SEQ ID NO: 33321 - DNA, 291 bp, Glycine max
  unsure (1)..(291): unsure at all n locations; Clone ID: 701106487H1
gggacaagattggcaaaagtcgagtagaagctgctgaacagaagggaaacacctattctttgagcttactgctcggaaaaaagaaggccacttgatgcccatctgttcatgttctccaaaaatttgtatcaaatatttttagtcggaggttctctatcaaattgaataacaccctttctgacaattgacagaaaagttgtatggatttcctaattgaacaattaaggtttacaaatatccaataggcgctgccatgtgacaaaanaannangnggaanagnnnanngnnnc

SEQ ID NO: 33322 - DNA, 292 bp, Glycine max
  unsure (1)..(292): unsure at all n locations; Clone ID: 701106488H1
gagacatcagtgcctccttctggtctccctggtgttggtctcctacgctgcccggtcggaatcagcgctgggcggctggagccccatcaaggacgtaaacgacagccacgtggcggagatcgccaactacgcgctgagcgagtacgacaagcgttctggggccaagctcacccttgtcaaggncgtcaagggcgagactcaggtcgtttccggcaccaactaccgtctcgtcctcaaagccaaggatggatccgccacggccagttacgaagccatcgtctgggagaagcct

SEQ ID NO: 33323 - DNA, 289 bp, Glycine max
  unsure (1)..(289): unsure at all n locations; Clone ID: 701106489H1
gtttnttcctttctctgctctttgccttctctgacacatttggtgccttgtagagcgtgttttggcaggaaggtggtatggcgaaggacgttgaggttgctgagcgtggctccttctctgggaaggactaccaggaccctccaccagcaccactcattgatgctgaggagctcacaaagtggtccttttacagggctctcattgctgaattcattgccactttgctcttcctctacattactgtgctcacagtcatagggtacaatcaccagactgacctcaaggaaaa

SEQ ID NO: 33324 - DNA, 288 bp, Glycine max
  Clone ID: 701106490H1
gaaaatgaaggtccttgttttcttcgttgctacaattttggtagcatggcaatgccatgcgtacgatatgttccctctccgaatgaacactggctatggtgcccgtactccggaggtgaaatgcgcaagttggaggcttgctgtggaagcacacaacatctttggctttgagaccattcctgaagagtgcgttgaagcaacaaaggaatacatccatggcgaacaatatagatcagactccaaaacagttaaccaacaagcttacttttatgccagagacctcgaagt

SEQ ID NO: 33325 - DNA, 287 bp, Glycine max
  Clone ID: 701106491H1
gctttttcccagtccaagcagcctccaattcgtgccactctcttcaaaatggccgttaccttctcaaatctccacacagaatcaggtctcaagtccctcgacgacttcctctctgggaaggtctacgtttctggggatcagttcacaaaggacgacatcaaagtgtatggtgctgttttggagaagccaggtgactcttttcccaatgctgccaagtggtacgaggttgtctcatctcagcttgctgcaagcttccccggcaatgctcaaggggtgagattcagtgg

SEQ ID NO: 33326 - DNA, 289 bp, Glycine max
  unsure (1)..(289): unsure at all n locations; Clone ID: 701106492H1
caaccaacgaacaacgatgtcgtngtttgcaaggacaatcgcaaactcactcagactnnnnnnnnnnnnnnnnnnnnnnnnnnnnagtgacctaaaatcccctccgaagaaacccgattccgtatccacccccagtcctaccgcgcgcggcgtcaaagaggatttctccgagctcaccaaatccttttcccgccagctctggggcgtcgcctccttcctcgccccgccgcccgatcccctatctgaaaatcccgtcgccgatcccaatcccattcccaccgacgaagaa

SEQ ID NO: 33327 - DNA, 287 bp, Glycine max
  Clone ID: 701106493H1
tctctctcttggattccattcctgcgtcttcatcagaggtagccaatggaagcggcggcgacggcaacggcaacagttctcgcaccaccgtcggctttcctcggaagaccctccgtactcgccttccgttccaatcttcgcttctccactaagttaagcacttctgtagctatctccaagcatggtcatgggagacactgtgttggaactagaaggggttttgtagttagagctgcatcatttacaccagagtcatccgaaccgagttccaagattgctccacttaa

SEQ ID NO: 33328 - DNA, 290 bp, Glycine max
  unsure (1)..(290): unsure at all n locations; Clone ID: 701106494H1
accggaatagccaaccaaacccgtcgtcgtctagttatctatctcctccaccagcganaacancnncnaccctagaattcaagaatcgaaagcaatggacttcgacgnntacgattacttggagaaaacagtggaggagcaagaggaccacgacagcagccggangaagaaggagagcgagangagctacaggaagcgcgaggagatcgacgagggaatcnaagagangaagagcaagangtccaggggcgacgaagagaacggctccaagaaggataaggaccgcgaat

SEQ ID NO: 33329 - DNA, 289 bp, Glycine max
  Clone ID: 701106495H1
gatgaatcttctggatagagcagtgaagatggttgctgaattagatgaaccagcagagcaaaactatgtaagaaagcatgcattagaacaagctcaagcccttggagttgaagttcgagaggcagcaacaaggatcttctccaatgcttctggctcctactcctcaaacataaacctggctgtggagaattcttcatggaatgacgagaagcagctccaggacatgtatcttagcagaaagtcttttgcttttgattctgatgctcctggtgctggcatgactgagaaa

SEQ ID NO: 33330 - DNA, 289 bp, Glycine max
  unsure (1)..(289): unsure at all n locations; Clone ID: 701106496H1
agaaatttaagtgaggagctagagaatgatgatgaagtctgctatgtgtgcagtggtggttgtagcacttcttcttctggcggnggtggggcccatggctgaggctgtgacatgcaccccaacagagttgagtccgtgtcttccagcaatcacttccggtgctaaaccttccaatgcttgttgcacgaagctgaagcagcaaaaaccatgcttatgtggctacctcaaaaacgctagcttgaagcagtatgttaactctcctaatgcccgaaaaaccgttgcttcttgt

SEQ ID NO: 33331 - DNA, 270 bp, Glycine max
  unsure (1)..(270): unsure at all n locations; Clone ID: 701106503H1
actagaaacagtgtgatgaaaatncnggtccttgttttcacgcgttgctacaattttggnngcatggcaatgccatgcgtacgatatgttccctctccgaatgaacactggctatggtgcccgtactccggaggtgaaatgcgcaagttggaggcttgctgtggaagcacacaacatcttnggctttgagaccattcctgaagagtgcgttgaagcaacaaaggaatacatccatggcgaacaatatagatcagactccaaaacagttaa

SEQ ID NO: 33332 - DNA, 259 bp, Glycine max
  unsure (1)..(259): unsure at all n locations; Clone ID: 701106504H1
cccatgaccctcccttctatgctgttttcgtannttgcaaanncagtgatggagccagattcatccangcaactttagatatgaccatatctgatatcctctctcccgttgacgttccacccattgttcaatcnttgtttgaccaccacaaagctgtcaaccatgacggtcacacaatgccgttgttgtccgtccaagtcactgaatttgtggatggtgttttcataggttgttccatgaaccacactcttggtgatgg

SEQ ID NO: 33333 - DNA, 287 bp, Glycine max
  Clone ID: 701106506H1
aagagatcacatagcagaatggcttctactcaatgtttcttgcaccaccatgctcttaccacccctgccagatccccatcacaacgcatcatggttagcaccaagcctaaccagcttgtttgcaaggcacagaagcaagaggatattgatgtcagcccaatctctcgccggttagctctaaccgtgctcattggtgctgctgctgttggctccaaagtccaacctgctgatgcagcttatggggaagctgccaatgtgtttggaaagccaaagacagacacagattt

SEQ ID NO: 33334 - DNA, 286 bp, Glycine max
  unsure (1)..(286): unsure at all n locations; Clone ID: 701106507H1
gnaaaggtacctagactctgaagattctgagttggagaaagtgattgacttttatattagttctgagagtgatgttttcgtaccggcaatatcaggtctattttatgcaaatgtagctggtaagagaatcggctcgggtaaatcccagatactggttccggccaatattccagattcatctgcttctgcctccagtttcttgtcccattatgtctccaagaaaaaccactttgcctattcttgttactgttagttcgaagtgaagacattcttagcatccagtagg

SEQ ID NO: 33335 - DNA, 286 bp, Glycine max
  unsure (1)..(286): unsure at all n locations; Clone ID: 701106508H1
gtccanataatacccacatccgaaaccaaatgggtttgctctgagaaccgaaatgggtgacgaacaaccgtcgaccaccgccgtctccggtntccgtcgagtcatcacgctcatctcttccttgatctccctctccctctcgatcagagtcttcgccggaaagtggcaacttatccggagcaggnnggaggaactccactcggccctcgtcgccggagatgccacgtcactctccggcgagctcccggcgataacgggcaggcggaggagtgccacgagctggcgc

SEQ ID NO: 33336 - DNA, 133 bp, Glycine max
  unsure (1)..(133): unsure at all n locations; Clone ID: 701106509H1
ctcactcccacaataagtgtcgatnannctcctacaataagtgagcntgtagttacacctttanntgtgtgtttaccacttttgagtgccanagagttctgagtttcatagganaaaaaaaaaatgacanngg

SEQ ID NO: 33337 - DNA, 285 bp, Glycine max
  Clone ID: 701106510H1
actagaaacagtgtgatgaaaatgaaggtccttgttttcttcgttgctacaattttggtagcatggcaatgccatgcgtacgatatgttccctctccgaatgaacactggctatggtgcccgtactccggaggtgaaatgcgcaagttggaggcttgctgtggaagcacacaacatctttggctttgagaccattcctgaagagtgcgttgaagcaacaaaggaatacatccatggcgaacaatatagatcagactccaaaacagttaaccaacaagcttacttt

SEQ ID NO: 33338 - DNA, 282 bp, Glycine max
  unsure (1)..(282): unsure at all n locations; Clone ID: 701106511H1
tgacctatcttggaagagttttgaagtttaaaccttcaaacccttttgcctttagattctgattctgagtctctgctgctatatatggcgccacgcgtatttcttgtgtnggggatgtngctgatggtgtgccttgttaaggtttcgtctgatccaaagagagaagaagaaatactggaagaagaactacattttcccgataacgagccagtatgtttttaaaaataaattatagcatcctagtctattttatgttttgtactcttcaacatgtttttcccc

SEQ ID NO: 33339 - DNA, 286 bp, Glycine max
  unsure (1)..(286): unsure at all n locations; Clone ID: 701106512H1
ctctcctcacattcgtggctcagacatcggattggggccaaagaagangaggaanaagaaacctcgtggganaaccaaggcgacaccgcgtggggaactgaagaaggtggccacgaanaagggngtttctctgaaaaagctgacgaagataagatcttcgttgggaacttgcctttcgacatcgacagcganaatttggcgtcgctcttcgggcaggctggcaccgttgaggttgctgaggttatttataatagggccactgaccggagtcgtgggtttggatttg

SEQ ID NO: 33340 - DNA, 285 bp, Glycine max
  unsure (1)..(285): unsure at all n locations; Clone ID: 701106513H1
cttagatgaatacagactttattttgagaaagatacggcattggntcgacggtttcaacctgtttgggttgatgagccgagtgaggatgacacaattaagatacttacgggtctacgtgagaaatatgaggcacatcacaaatgcagatacacagcagaggctataaaggctgcagttgatttgtcagctagatacatagttgataggtatctacctgataaagctattgacctcatagatgaagcaggaagtagagctcgtattgaagcctttaagaagaaaaa

SEQ ID NO: 33341 - DNA, 285 bp, Glycine max
  unsure (1)..(285): unsure at all n locations; Clone ID: 701106514H1
actcatattaattagttagcaaagtctcactacaaacattcccttctgtttcattaattgtgaccttaagcttttatattgaaccgtgtcaatggcngttcctgtgaggactttagctcttgttgctttgcttgttgccattaatgcaatggtgtgtgaaagtagagtggtaagaaaggaccttggtttggaccttggtggggtgggaattggggtgggtgctggggttggattaggccttggtggtgcaggttctggtgcaggtgctggctcaggctctggctc

SEQ ID NO: 33342 - DNA, 288 bp, Glycine max
  unsure (1)..(288): unsure at all n locations; Clone ID: 701106515H1
taagaantgaggtacgctaaaaagagtagggtttacagaaaggagatagcgttagtgaactgaagaaggtaacttaggagggaaacggaacgataaagtatttgattttgcacgcaaatgcgantggcatggcacatgttcttctacgtcgccctcctctgcttcgtgtcatcatggcctctcgcttcatcacctcctcttcctttcacatgcgcctttcttcatcccttcctctactctctccaaaaccaggacgagttttcctctganaaagntttngctccctgt

SEQ ID NO: 33343 - DNA, 286 bp, Glycine max
  unsure (1)..(286): unsure at all n locations; Clone ID: 701106516H1
gtgagcgatactaatcttctatgattgcctccaggatgttgttaggttataagttgttgtattaagcgctttctaagtnngagtgcatataatcctattgagttgaaatctttttttaacagttcattacattgcttgttacggttcagttacagagatttttttgaatcagtgtttgtttggttgtgctgatagtaattttgagaggaggcaggggtttcgtagtctcatgttttatctttagggctacgacttagttggaaatggaatgtgactttattcggga

SEQ ID NO: 33344 - DNA, 292 bp, Glycine max
  unsure (1)..(292): unsure at all n locations; Clone ID: 701106517H1
gtgttgtacgtgtgatttccattgnngccaccgattacccaccaactgntatacataacctcttcacctttccctccttccctaatttatcactnnnnnnnnnnnnnnnnnnnnnnnnngtccactaagttggggcacgtcacccatctcgccttcccctcgctcatctcaaatccatgcttcggaattagggtttccattcggatttcgtaagtctggtgcccaatttcgtgactccgagcgacgtaaaangggaagggaaanggatgangatttggggatcggagatcgt

SEQ ID NO: 33345 - DNA, 289 bp, Glycine max
  unsure (1)..(289): unsure at all n locations; Clone ID: 701106518H1
gntcaggaaggagatgattctgttattactgctcatgtccctcttaacaatatgtttggatactctacagctcttcgctcaatgacatncgggcaaaggtgaattcaccatggaatacaaggaacatttaccagtttctcatgatgtacagacgcaactgataaacacgtacaagggaaataaggnaggtgaataatcagcttttgtcgaagtacatgataaaaaaattttatgacaatcacttactaaaagaaaaaaaagttgtgacaataatataggatataggctt

SEQ ID NO: 33346 - DNA, 287 bp, Glycine max
  unsure (1)..(287): unsure at all n locations; Clone ID: 701106519H1
gcggngttgtcaacttcccttcacccaaccaccttccntctccaaacaaacatgggtcggaaacacgacgccgttttggccagcgaacctgtcgccgaagaagccccctgcagccctgagctcgattccgnnnnnnnnnnnnnnnnnnnnnnnnnnnnnnnaaacaaagacaagcaccaaaccgaaagcagccccaaacgaaagctcgacgaacacgacccccaaaacggcaccgaatcgaagaagaaaaagaagaagcaccacgagtccaaggggaacgccgagga

SEQ ID NO: 33347 - DNA, 283 bp, Glycine max
  unsure (1)..(283): unsure at all n locations; Clone ID: 701106520H1
tctttctctctctaaagggtttcctttgttctcttccaacttcnaagaaatgtcgattatatcacgcagaggcatctgttacatgccaagactagatgcagcaaaagtatctgctgctttgctanagaaaggccaaaatcgtgtcatagatgcttcacttacacttattcgaganagancaaagcttaagggagaacttgtgcgngcntngggaggtgctaaancaaccccagctcttcttggagttcctttgggacataatcatcgttccttcaagggcctg

SEQ ID NO: 33348 - DNA, 225 bp, Glycine max
  unsure (1)..(225): unsure at all n locations; Clone ID: 701106522H1
cnaaaagaaaaattccttcctctactaaagggcctnnatctatgtgttaaagcattacccttttgtttttgttaatagcttttgcttgaacatgctaatcatgatcaccatcgtgttataacactttattttattgtcctcgtgaaaaccctttaaagatattgccacttgcatatacatatatacatttcaataatcacatttctgatctgtatttggaaactt

SEQ ID NO: 33349 - DNA, 280 bp, Glycine max
  unsure (1)..(280): unsure at all n locations; Clone ID: 701106523H1
gatgtcttgattcattacccacaacataaagccgatgggatgattgcacaccttgcatcattggccaacaaccgattgattctgagttttgccccaaagacgttttattatgatctgctaaagagggttggagagttgttccctggtccttcaaaggcaacaagagcatatcttcactctgaggcagatgtagagagagcattgcaaaaggttggntggaccataaggaagagaggcttaaccatacccaattttactttgctaggcttattgaggctgt

SEQ ID NO: 33350 - DNA, 241 bp, Glycine max
  unsure (1)..(241): unsure at all n locations; Clone ID: 701106524H1
tcttagatctcttctttctctacgccgcangccgaaaccatggccggaaaaggagagggtcctgctatcggaatcgatctcggaaccacctactcttgcgtcggtgtgtggcaacatgaccgcgttgaaatcatcgccaacgaccaagggaacagaaccacgccgtcttacgtcggattcactgacaccgagcgtctcatnggtgatgcggncaagaatcaagtcgccatgaaccccatca

SEQ ID NO: 33351 - DNA, 286 bp, Glycine max
  unsure (1)..(286): unsure at all n locations; Clone ID: 701106525H1
cannccaaaaatanaannanagagnaataacanaaccttngcgcatcatattctttattaccctcacttgggtcntnantttccgcgaaacgagcttctgncccttcanattaacccanggagaatattggtgacncagtacggctactggccggagaacgacatgcttttccaaaacnaagaccttggnagctgggcgataatngatgaggcagcgtnatcanggtcanggtactatgattcaagctcnccggncggtactggtgcttcntcaaggtggcatcta

SEQ ID NO: 33352 - DNA, 280 bp, Glycine max
  unsure (1)..(280): unsure at all n locations; Clone ID: 701106526H1
cnaaaatggatgattctggaagtaaaactaaactgttnaatccatggatgatccacttccagaaactcgatctcgaactcaagtgccctctntgnttgagtttgttcaagaggccggtgttacttccatgcaaccacttgttntgcnattcangtttggctgattgcntaacggntgggactngntntgcngnttgnaaggcaacgtatncncaaacanatnnnangcatgtgccnattgtggaaaacgaggnggcaatatatagaagcntnggatgnca

SEQ ID NO: 33353 - DNA, 278 bp, Glycine max
  unsure (1)..(278): unsure at all n locations; Clone ID: 701106527H1
tttaattcagcacttgcttattttgtcaacctgaccaattttttggtcaccaaacataccagtgctcttacccttcaggtacttgggaacgctaaaggggctgtagcagtagtagtttcgattctgatatttagaaacccngtgtcagtcacaggaatgatgggttattcactcacagtcctcggagttgtactttatagtgaagccaaaaagcgaanaagtgatactgatggtgtcattcatgattctgtggaaatcagcagtgaaatccctatatt

SEQ ID NO: 33354 - DNA, 286 bp, Glycine max
  unsure (1)..(286): unsure at all n locations; Clone ID: 701106529H1
ttccctttctccaacatgccnaaacgacnggcgttctngagtcttttcttcttcgttaccctcttcacatgccttctctctgctacttnccacgattaccatattttcctaccgagtcaactccatgacgatgactcagtgagttgcactgcaaccgacccaagccttaactacaagccggtgatcggaatcctgacccaccccggcgacggtgntctggncggntcagcaacgccaccggggtttcttacatcgccgcctcctacgttaaattcgtggagtccgg

SEQ ID NO: 33355 - DNA, 283 bp, Glycine max
  unsure (1)..(283): unsure at all n locations; Clone ID: 701106530H1
atcgagttgaatgcgaacggattaaggantacagacagaaggttgaattggagctatcgaacatctgtaatgatgttatnagagtgattgatgagcaccttatcccttcggctgcagctggtgaatccactgtgttttactataagatgaaaggagattattatcgttatcttgctgaatttaagtcaggcaatgagaagaangaagctgctgatcagtctatgaaagcatatgagtctgctaccgntgcagcagaggctgatttacctcccacacatcccat

SEQ ID NO: 33356 - DNA, 288 bp, Glycine max
  Clone ID: 701106531H1
caagtggtggggtggccaccagtgaggtctttcagaaagaacattgttcaaaggagtaacaacaatgagggcgaaaaagccgccacaagtagtagcaacaatgtgaacacgggagcagctttcgtgaaggtgagcatggatggtgctccttatttacgcaaggtggatttgaagttgtacaagagctaccaagagttgttggatgcgctggctaaaatgttcagttcattcaccattgacaagtgtggatcccaaggcatgaaagacttcatgaacgagagcaaattg

SEQ ID NO: 33357 - DNA, 246 bp, Glycine max
  unsure (1)..(246): unsure at all n locations; Clone ID: 701106532H1
gagatatgtcgtagtggaccccacaaaaccgcacttttttcnatctgctcttacctcggaggccctgtccgaggctctgagaatccctaactcttctttttcttcttagattttnccttcagatttgattcagattatgctttttcttcttccatctccttgtgcaaantnaganaaaataaaaganagatattaggatgaagagagggaacgangaagagaagttgggggggcccatgtttccca

SEQ ID NO: 33358 - DNA, 197 bp, Glycine max
  unsure (1)..(197): unsure at all n locations; Clone ID: 701106533H1
attttttttctatcaattcacacgacaaaatttagcagagttcaaaacaccaaccaagtaaagtaaagaagggaagatgtcactgataccaagtttcttcggtggtcgaaggagcaatgttttcgaccctttctcgcttcgacgtatgggaccccttcaaggattgtctttcccntctgctgaagattcagctttct

SEQ ID NO: 33359 - DNA, 283 bp, Glycine max
  unsure (1)..(283): unsure at all n locations; Clone ID: 701106534H1
ttcactctgtacaattcttcgttcgttctctgcagttatatcctttttgagnctcaatggcggacgctgaaaccttcgctttccaggctgagatcaaccagcttctaagtctcatcatcaacacattctacagcaacaaggagancttcttgcgtgaactcatcagcaatgttctgatgctttggataagattcgattcgagagcttaaccgacaagagcaagcttcgatgctcagncagagtcttcattcgncntgtgnctgacaangataacaagactctt

SEQ ID NO: 33360 - DNA, 282 bp, Glycine max
  unsure (1)..(282): unsure at all n locations; Clone ID: 701106535H1
gttgatcgagataactagaaacagtgtgatgaaaatgaaggtccttgttttcttcgttgctacaattttggtagcatggcaatgccatgcgtacgatatgttccctctccgaatgaacactggctatggtgcccgtactccggaggtgaaatgcgcaagttggaggcttgctgtggaagcacacaacatcnttggctttgagaccattcctgaagagtgcgttgaagcaacaaaggaatacatccatggcgaacaatatagatcagactccaaaacagttaa

SEQ ID NO: 33361 - DNA, 282 bp, Glycine max
  unsure (1)..(282): unsure at all n locations; Clone ID: 701106536H1
gnaagagaatccgaggcgaagagaagagaaaaattaagatggaggggaaggagcaggatgtgtcgctgggagcgaacaagttcccggagagacagccgattgggacggcggcgcagagccaagacgacggcaaggactaccaggagccggcgccggcgccactggttgacccgacggagtttacgtcatggtccttttacagagcagggatagcagagtttgtggccacttttctgtttctatacatcactgtcttaaccgtcatgggagtcgccggggcta

SEQ ID NO: 33362 - DNA, 281 bp, Glycine max
  unsure (1)..(281): unsure at all n locations; Clone ID: 701106537H1
tcactcacagagtaatggcatccatggnggctataggttctctgaatgttccttgttctgcttcttcgngttcatcgaatgtggggagaaaaagctttccacgcagcntntcannnnangcatcacaactttgtggaganaagattcacacagattcagtttnattcgcaccaaaaatcggtcgcaatcctgtaattgttacccctaaaggcagtttctgattcccaaaactnccaaacctntcttgatcccgatgctagcagaagtgtgcgtggcattat

SEQ ID NO: 33363 - DNA, 257 bp, Glycine max
  unsure (1)..(257): unsure at all n locations; Clone ID: 701106539H1
cgcggcttcaaccttgtagttatacnctttcttcttttttngccacccctctcttgaaaantctagatctcgttcttccttgatctacgttacgcttttagtgaccggatctgtatggatctgaaccagatctacacgccgatggtggttttggcctggtctttcatagatctgatgcatggaggctcagatctactgtacagagatactgtagataatcgatgagaagaacgcagatccagccgcttccgcttgtt

SEQ ID NO: 33364 - DNA, 277 bp, Glycine max
  Clone ID: 701106540H1
taaaggcccttgaggagagtggtggttggttggatcgaacaactgttgaggacatggatattgctgttcgtgctcatctctgtggatggaagtttgtatttctcaatgatgttaagtgtctttgtgaacttccagagacctatgaggcatataagaaacaacaacaccgctggcattctggtccaatgcaattgtttcgcttgtgttttcttgatatacttcgttcaaaggttagttgggtaaagaaggtcaatttgatatttcttttcttcctcct

SEQ ID NO: 33365 - DNA, 281 bp, Glycine max
  unsure (1)..(281): unsure at all n locations; Clone ID: 701106541H1
gngaatcatccttccttttccgagaaanaggaagaaaacgcngataaaacacagaaaccgattttcgccatcatccatcnaagatcctcaannnnnnnnnnnnnnnnngcaatcccaattcattaatctgcaaaatgggttttggatgttgaagcgggggaggattgacaatttgcgatggaaanggaaaattggaganaacacatcaacagcaatagcnatgggnattattacgataggtttgtgtgtgattacgacaacgganaacgaagccctgcaaa

SEQ ID NO: 33366 - DNA, 93 bp, Glycine max
  unsure (1)..(93): unsure at all n locations; Clone ID: 701106542H1
gtgaaatccttnggtatctctgtggatgattatagnacagtacttgcttcaatatgccaagnagatacntcctaatgantnggnnnggaatga

SEQ ID NO: 33367 - DNA, 274 bp, Glycine max
  unsure (1)..(274): unsure at all n locations; Clone ID: 701106543H1
ttgcacagatgttattaattattattgttgctctttctctttgccctcatgctacttttctttcattcatagccaatgcttattagtatcttgcttgaacctgttcttcaatctctnctacattctgttcattaatgtttgcacaaccacctctgcttaacaattcaaatggtcaaagatatttaagctcataatgaggtttacattggattctttatatgagcaagttgctccttactccttgaaatactgcaaatagaagagtagaactttc

SEQ ID NO: 33368 - DNA, 107 bp, Glycine max
  unsure (1)..(107): unsure at all n locations; Clone ID: 701106544H1
gtgcggtgaaganagatgnngaatttgcagttacngattcactctcctccnccatccactcntattcatattcatcatgcatccactatccctcnatctttcggggg

SEQ ID NO: 33369 - DNA, 280 bp, Glycine max
  Clone ID: 701106545H1
agaaggttttctgaatttccaatgaagatatgtcactatttcaacaaaggattctgtaagcatggaactagctgcagattctatcatgggcaagttgtccctgagaatttctctcagatgtatggaaatgatgctattagtgaggatcaggtgatttcaccggggtcactggcacagttagagtctgaaattattgagctcctaagaacaaaaggtggtccaatgtcaattgcttccctgccaatggcatactacgataaatataaaaaggtactgcaag

SEQ ID NO: 33370 - DNA, 259 bp, Glycine max
  unsure (1)..(259): unsure at all n locations; Clone ID: 701106546H1
ttaaaactctcgaaagtgacacganncgaatgatgcagatnnagaacacccctttgtacannacaactcccttgggggtcatggctgacccttgttatcgcaaagcaccctctaaggtggtttccattcctgttcacttcgtgggctcagagcgcaccagaacaaattctgattctgccacaaagatccanagggtgctgagaggatttctcgtgaggaacaccttgaggaaaatcgctgccatgagggtggagttgga

SEQ ID NO: 33371 - DNA, 149 bp, Glycine max
  unsure (1)..(149): unsure at all n locations; Clone ID: 701106548H1
gattgcaagtgatccacgatacactctacgcttcacaaaaccttcaaacccaattccacagaaatttgactnncgggtgaacacagattcctcagggcacagtgcacagtgcacaagcttttgcttttttnttntttttttaaanggtg

SEQ ID NO: 33372 - DNA, 264 bp, Glycine max
  unsure (1)..(264): unsure at all n locations; Clone ID: 701106549H1
cccaaaccaacccaagtctcattcnntttcnctccatcagacnagaaaaacttcaacccaacaccccctctccaccctcctttttcttttaatttctcatcttatctattaatcttatatacatatatataaagacatagataatagtcatatagntataattatttcgttatattttccttgcatgggctgttaagatgtctcgcacgtgctcacagtgcggnaacaacggccacaatcacggacatgcaccgacggtggcgc

SEQ ID NO: 33373 - DNA, 280 bp, Glycine max
  Clone ID: 701106550H1
tctttgtgaaaaaggggagtttcttattctttctagacgcttccattgatcggcgatttcttagacatggcggagcatcacgaacacgaggaagtgaagggtgagtccttgttggagaagatttctgggaagatccacgaccacgattcgtcatcttcgtcggattccgacaacgagaaaaccagcgcttctgactccttgaagtcaaaggttttcaggctttcggcagagaaaagcccattcaccatgttcttggcggcggaaaaccggccgacgtttt

SEQ ID NO: 33374 - DNA, 271 bp, Glycine max
  unsure (1)..(271): unsure at all n locations; Clone ID: 701106551H1
attttatttcacatttttccctttgtatatggtagttgatttctttttaccttttttgtgtaggaagaagatcctggttggtattcaagagcatctaactccgttctagaccctgttgttgatgtgcaaatgaatcacnattccaaagttgagccagtanttgagaatgcaaacgcntatccagagataaaaaccatttccactgaaaatggaagtncatgttgganctcaggataaggatgttgtcatgaaggctttggctcagttggag

SEQ ID NO: 33375 - DNA, 278 bp, Glycine max
  unsure (1)..(278): unsure at all n locations; Clone ID: 701106552H1
ctctctctaaanggnnncctttgatntcttccaacttccnanaaatgtcgattatatcacgcanaggcatctgttacatgccaagactagatgcagcaaaagtatctgctgctttgctagagaaaggccaaaatcgtgtcatagatgcttcacttacacttattcgagaaagagcaaagcttaagggagaacttgtgcgtgctttgggaggtgctaaagcaacttcaactcttcttggagttcctttgggacataattcatcgttccttcaagggntg

SEQ ID NO: 33376 - DNA, 278 bp, Glycine max
  unsure (1)..(278): unsure at all n locations; Clone ID: 701106553H1
ggggaactgtgaaattctagagaaacattacaaggatatgatggatatcgaattcactgtccaagaaaatangttgtggatgttgcaatgtcgaagcggaaaacgtactggtaaaggtgcattcaaaatagctgtagatatggttaatgaggggcttgttgatattcgttctgcaatcaagatggtagagccacagcatcttgatcaacttctccacccacagtttgaggatccatctacttacaaggataaagtgatcgccgttggtttgcctgcat

SEQ ID NO: 33377 - DNA, 278 bp, Glycine max
  unsure (1)..(278): unsure at all n locations; Clone ID: 701106554H1
gncgactggtacatgatcagtanttccccaattttcagttagatanattattcncaccttcgtgaacacaggttgcatttgctgcggaggatcgatctcgccaatggatttcaacaaggagcaanagaaaaccatagaccaatccatcttattatgctgcaagttctttgtctccgaatcacgcaacaacgccaccctcaatgcnatagaacgagttgcnaggtcaaacccggaaactgtgattgtgaacatgtttcatgatcgaagttataacaggg

SEQ ID NO: 33378 - DNA, 275 bp, Glycine max
  unsure (1)..(275): unsure at all n locations; Clone ID: 701106555H1
caactttgagaagcgaaatcgcccactcttgatccctttcgancgtcatcggatctttctgcggccaccgtctatcgcacttcgttgccgtcatcggcgccggaattctgaatcttaatgaagttgtgaagtgatgatgagtggaagagctatccaataacatgacatgaattccanaattttctatacttgaaaattaagccagcttaaacaatacaaggatgttttcgttgttttatggactatggaagtacttgttcagcaagatggagctt

SEQ ID NO: 33379 - DNA, 275 bp, Glycine max
  Clone ID: 701106556H1
gttggtgccaaggtagacagacctgctgatgaaatagtggcagaggaacccactgaaattgttggagcttgatttcatgatgcattcagtttgttctaggttttctttttcttatgttatcattgaaaattaagttacaaacttctgtccaatgtttctgtgtaagccgagtgacacagttttgtttagacaatcagaagacatttttggcgcgtaatatatctgggttttgttcagaacccaaaatcagatttgcttgcttatataatcacata

SEQ ID NO: 33380 - DNA, 222 bp, Glycine max
  unsure (1)..(222): unsure at all n locations; Clone ID: 701106557H1
ctcatcacaaagacacaagctttcttcctcaactaccctacccaacttcttattccnctcatcacttcctnaccnaattgaaaccaccanaattgtntttttttttctccttcactcgtagtantattttgaaangtgttgtgctttgggttgagaattgnggcagggcctaatgggtaactgcctagattcttctgccaaggttgatgnagctcngagctc

SEQ ID NO: 33381 - DNA, 208 bp, Glycine max
  unsure (1)..(208): unsure at all n locations; Clone ID: 701106558H1
gtaaatgcaaaaaccaaagttaatttttaccaaaagcacttttattacacnnnnnnnnnnnnnnnnnnnnnnnnnnnnnnnnnnctcccaacaacaagatgaagaggtagaagaagaacaagaagacgaacacactccacttgcttgctacccctactttgagcttgcaactcctctttcncgaaaactctccttcatcactccatag

SEQ ID NO: 33382 - DNA, 277 bp, Glycine max
  unsure (1)..(277): unsure at all n locations; Clone ID: 701106560H1
ttatctctctccatanttctctctttggtnttgtnttgttgtcctaatgagttgnnttacttctgnaaaattccaccatgtcntcccagntccnaatggttctcctaagcagacttccgttaccanagggntaaggngtgacaaagggtgggatgangaaagggaaaggaggncaagaagctngttcaggtttagaagggttcccattaggagaangtttagactcaaaattncnagcttnanaagactttggagaaaaagggctaggnnggttctt

SEQ ID NO: 33383 - DNA, 276 bp, Glycine max
  unsure (1)..(276): unsure at all n locations; Clone ID: 701106561H1
gnaagaaagaaggagaaaggggtaagatagtattttgacatgcaggaaacgaagcggtagtagtagagagtagtgggaaggtaacnngagtttctctcccaccgctatatcatatgggggccaattgttttattttcatcattcattcaaattctgcttccaatcatatttaaatagaaacacacactcctcatcccaaaccctacattttcttcaagcgctgcggtggatcagattccccattaaggatggaggatggtgagaaacccagccatg

SEQ ID NO: 33384 - DNA, 275 bp, Glycine max
  unsure (1)..(275): unsure at all n locations; Clone ID: 701106562H1
atcaagtccaagaaccaacctaccttttgcaatctcaattcaatggcgtcctctctcattgcgaagggctttcctctcctcttcnctcctctccaggtccctcttcgncccgccgnttccgcttcccaccgctctttcaacaccaacgccatgngccagtatgacaaccgcgccgacgaccacagcaccgacatcgatcgtcactccgaacgctctttcctagcactgcgcgccgcgacgatatttctcagatgtgttggatcatttttccgatc

SEQ ID NO: 33385 - DNA, 282 bp, Glycine max
  unsure (1)..(282): unsure at all n locations; Clone ID: 701106563H1
gcttctctagggacatcatcatctgatggcatcccatcatcagaagcctcagacaggatcaaagctggtttcattcacttcaagaaggagaaatacgacaagaatcnagctttgtatggtgaacttgccaaaggccagagccccaagttcatggngtttgcttgctcagactcaagggtgtgcncatctcatgtgctagatttccaaccaggagaggcctttgtggtcagaaatgttgcnaacattgtcccaccatntgaccagtcaaaatacgctgganct

SEQ ID NO: 33386 - DNA, 276 bp, Glycine max
  unsure (1)..(276): unsure at all n locations; Clone ID: 701106564H1
tttcaaatcaactcaagagattcaaccaagaaatatagaagctagggttttgttnacatttgtgttagcacgcaatactttgcaaatatggagagcagcttaggagacatgttggttaaggttgtggtgttcattctagttcaaagcctggtttaccttatcctctccaattcatcaaacgtgttcaacaaagaacatgaagaaatctaacagcttcaggccggcagttcggtgagcattcgccggatgctcgctttgatctctgattttcctcca

SEQ ID NO: 33387 - DNA, 217 bp, Glycine max
  unsure (1)..(217): unsure at all n locations; Clone ID: 701106565H1
ggcaaattcgttacagatgagggggaggatgattagacactaacccttttgtttgtttgtgtttaaacaaatactcgtttgctcatctatcataaaatgcattgagttcatcataaacaacaaatctatatgatttttctccatagttgcacgcgtcatgattagacattattttttgctttggtanattaaaatcatagtgcttcgatttgccagt

SEQ ID NO: 33388 - DNA, 255 bp, Glycine max
  unsure (1)..(255): unsure at all n locations; Clone ID: 701106567H1
tgacctggaatattacctgcacttnntctcaattcctggcncnaaagacaccaagttgctgngtttccctctcatccttctataatgacaccgttgtaaactgcccaacctgcacctgtggttgccgaaacaaaacagaacctggcagctgtgtagatccaaattccccacatttagattcanttgtatcatcatctggcaaagctgcaaacacgcctctagtccagtgtacaagccatatgtgtctattcgagt

SEQ ID NO: 33389 - DNA, 276 bp, Glycine max
  unsure (1)..(276): unsure at all n locations; Clone ID: 701106568H1
anaataaataaatcaaagaacacaaacaaagaagaagcgcaaaatgaagagtgcgatttgtgggagaatcctctctcccaaccacgtcttcaaaccaggggacacacattcaatttgtaaaggaccatactccaatctttgtgtacccatggctgtattggcaacaggacctggtaaaggaggcggggtgctggaaaagcccgttattgaaaaagtcacccctggccgtgagtctgaatttgatttgaagtaagcaggagtttggactattgatct

SEQ ID NO: 33390 - DNA, 274 bp, Glycine max
  unsure (1)..(274): unsure at all n locations; Clone ID: 701106569H1
gnaaataagaggatgctggacaaatcaatcagagaaattgagcgcgagcgacaaggcttgcaaacgcaagagaagaaattgattgcggagataaagaaaagtgccaaacagggccagatgggagctgttagagttatggcaaaagatcttgttagaacaaggcatcaggttgagaaattttataagctaaaatctcagctccaaggtgtatcactcagaattcagactttgaaatcaacacaagcaatgggtgaggctatgaaaggcgtgacaa

SEQ ID NO: 33391 - DNA, 274 bp, Glycine max
  unsure (1)..(274): unsure at all n locations; Clone ID: 701106570H1
gtttctctgaaaaccaaaanaagaggaattaaagttcattccatttannaaagaaagtaaagataaaaataacatgcacaacaacatgagcantctctctttcttcatccttctttcaacactactnactgtnggnnanggtggtcgngacttaggagataaaaacccgttcaccccgaaggcttangtggcacgttactgggaccaacacgtccgcaacaacttgccaaagccatcgtttcttctctcaaaagcatccccaatgagcgttccg

SEQ ID NO: 33392 - DNA, 275 bp, Glycine max
  unsure (1)..(275): unsure at all n locations; Clone ID: 701106571H1
gcttctctagggacatcatcatctgatggcatcccatcatccagaagcctcagacaggatcaaagctggtttcattcacttcaagaaggagaaatacgacaagaatccagctttgtatggtgaacttgccaaaggccagagccccaagttcatggtgttngcttgctcagactcaagggtgtgcccatctcatgtgctagatttccaaccaggagaggcctttgtggtcagaaatgttgccaacattgtcccaccatatgaccagtcaaaatacg

SEQ ID NO: 33393 - DNA, 273 bp, Glycine max
  unsure (1)..(273): unsure at all n locations; Clone ID: 701106572H1
cnacagcttctaataaatccttgacaacttcctcctcttctaattcanttcaggctctagctatgagcaaaagcaataacaatataatgagctttaaagctctaaccttatggtgcattttgttgtctttgttgcaactatctctaggagctgtaaggcaccgtattaggtttaacgtagagtacatgtatcgtgagccagattgccatgagcacgttgtgatgggnatcaatggccagtttcctggcccaaccatcacagctgaagctggag

SEQ ID NO: 33394 - DNA, 272 bp, Glycine max
  unsure (1)..(272): unsure at all n locations; Clone ID: 701106573H1
gtaaagaggaagatgttaacgttggagcaaacaagttctcagaaaggcaaccaattggtacagnagctccagggtggnggtnacaangactacaangaggcacccccagctcctttgtttgaacctggtgagctcaaatcatggtccttctacagagctggaattgctgagtttgtggcnactttctngntcctctncattaccntcttaactgtcatgggngtcaacangtcaccctccgagtgtgctctgtnggcattcaangcatngct

SEQ ID NO: 33395 - DNA, 271 bp, Glycine max
  unsure (1)..(271): unsure at all n locations; Clone ID: 701106574H1
gcaacctccgaacactgaatcgngattcgcagtgtatgacgagcgcttcggagctatttcactccagaaggcatcgattgggacgaagtgctctcgatctagggntcgacaccgaactcaacgccgccgattctctccgccgccactaccacctccgcngcctccgtcaccacccggtacgtacatttccttttctttccgccgctattccactaattacaatttgaaatttcttatatttattaaattattattattaggagcggaaatt

SEQ ID NO: 33396 - DNA, 273 bp, Glycine max
  unsure (1)..(273): unsure at all n locations; Clone ID: 701106576H1
ttgcagtgatcaaatcctcatcttctttcncaatcctcaaccagtaacctttcaatttctctctnttcatgctctcactctctcacttgggggntgaagatgagaatntgnggancagcaatcagcagcagctanaccaccacgtcnaattngcttttagtgtttgcttcctnttncctctncagtnntgncaanaccaagttcgtgnccncactttctagattnnctgtcaagcgtctnngcttcctttcccaaactcgtncgcacntttcc

SEQ ID NO: 33397 - DNA, 276 bp, Glycine max
  unsure (1)..(276): unsure at all n locations; Clone ID: 701106577H1
gcgaccacacnactcttntccngccaagctcaccagttctcntaaacggngattcnattcttgtnctctntanagagttnntgagatttcataagatgggaatgtaaaatactgggatgttgcatcanattcatcatttntttaattatcttgatttgtgtgccttaatttaaaattnctctgaaaaccgaagtttttattaatgngcatgttttggtctttgtaacgaccatttgtgcctataggaagttacttctatgacaaagtctgcacatt

SEQ ID NO: 33398 - DNA, 274 bp, Glycine max
  unsure (1)..(274): unsure at all n locations; Clone ID: 701106578H1
tcccctctctcactcactcacactctcttctgtcatagctgtaccacgtttttcttntccatctccagcctctgtcccaacaccattctcatggctgctctngctctagnactgnttcttcnggctttcactggcacttcaagtgctacatggtgcgtttgcaaggatggaagcgacgcgatcctgcagaaaaccttggactatgcttgtggagntggtgctgactgtaatcctctccaccaaaacgggccttgtttccagcccaacaccgtta

SEQ ID NO: 33399 - DNA, 281 bp, Glycine max
  unsure (1)..(281): unsure at all n locations; Clone ID: 701106580H1
gcagcaacaactcttgnaggcaatgccacaacagcggtncccatctaccacnacaatttccaacaggcagnntatgcctatgagatctcctgtgaagccagcatatgaaccanggatgtgtgctangcggctgacacattacatgtatcagcaacaacatagacctgaagataacaatattgntttctggagaaagtttgttgctgagtattttgctctaatgccaaaaagaatggtgtgtttcaatgtatggaagtggaagacaaacaactggagttttc

SEQ ID NO: 33400 - DNA, 274 bp, Glycine max
  unsure (1)..(274): unsure at all n locations; Clone ID: 701106582H1
tttcaaaggcatgttttttcaacaaagttcattctacccacgagtcgattcaacaaacccagacgctaattctcccttctctatccccgcacnnnnnnnnnnnnnnnnnnncatttatccctcagtggaaacaacagagaatctcatttgggaagagccaaacacgactacagaagaagccatggaaaacgttctggtcacggtcccgggngcgattctgcatctgatagaaaaggattccagcgtgcaccttgcttcgggcgacctcaccata

SEQ ID NO: 33401 - DNA, 273 bp, Glycine max
  Clone ID: 701106583H1
ggcgacttctcgatattattttttctgacagagccaccgacagagaatggccgacaagtacaacctgaagaaccccgccgtgaagcggatcctccaggaggttaaggagatgcagtccaacccttccgacgatttcacgagcctccctctcgaggaaaatatatttgagtggcaatttgcgattagagggcctcgtgatacggaatttgagggtggtatttatcatggaaggatccagttgccttcagagtatccattcaaacccccttcatt

SEQ ID NO: 33402 - DNA, 271 bp, Glycine max
  Clone ID: 701106584H1
cagatttgactgtcagagtgaaggacttggagaagaaattagccaggagaaggagtaagagagtgaagacaaaacagtatagacccgcagcttccaaaatgtctacccatgaaatgaaatcctcctaatattccactccatgtgagagcctttgatgttgcaatgtaataatgtctcctttttatttcacggagtgtatgtatatgttgtaattgtgagatgtggtatgagtcatgttctactgaaaacactataataactatacttcttt

SEQ ID NO: 33403 - DNA, 242 bp, Glycine max
  unsure (1)..(242): unsure at all n locations; Clone ID: 701106585H1
gacggtagcagcaggaatcggttacgctctgganngcactacncnccctctctctccctcttcgtttccgtantttccaaaaaacccttcctcattctcacagttctctccagtacgttgttgtggcttattagtttgattgtgctgtctggaatatggaggggggttttgcctctcagcacaacagcttcgtggccttttggaatactcattttctcatctgttgcttttcaagaagccct

SEQ ID NO: 33404 - DNA, 270 bp, Glycine max
  unsure (1)..(270): unsure at all n locations; Clone ID: 701106586H1
tacacaagcaaaattaaattaattaattaagctgaaagcaagagaaaatgaagatggaaattgaggaagttggcaactgcgaanacttcccctgctttcactgaaccacgtgtcccttttgtgcagatcagtgtgggagtctatgaggttttatgaggatgtcttgggctttgttcccatcaaacgcccttcttctttcaagttcactggagcctggttttacaattatggtattggaatccacttgatcgagaatcccaacattgatga

SEQ ID NO: 33405 - DNA, 270 bp, Glycine max
  unsure (1)..(270): unsure at all n locations; Clone ID: 701106587H1
gngtaccgagacttcatcatcaacaagtacagagaagagccctccagaaggctcacattcagcgaggttcgaaagtcgctcgtgggagacgtcacgtttcttcacaaggtcttcctcttcttggagcattgggccttgatcaactacggcaccgcagaggatgtggaggaggaccattgcaaggttcgcttcgaagaaggcgcccccagtgggattcgagtcgccgccacgcccaattccttgaagcctatgctgctgcctcgcaatggg

SEQ ID NO: 33406 - DNA, 274 bp, Glycine max
  unsure (1)..(274): unsure at all n locations; Clone ID: 701106588H1
gtcgtttaagncgcaccggcgcgggaacagaaccaagacgnggaagcccaagtttgtcagcctgnggctttcagttattcgatcctaagaaaaagatgaaaacaaccnagcccaagcccaagccnaagcccaagcctaaggcccaacnnnnnnnnnnnnnnnnnnnnnnnnnnnnnntgaatctcttccctctccatccggaccaccatgacatgcacgaggagcagaacgtggcgcttctctttagctccgatggtggggccacactcaacgg

SEQ ID NO: 33407 - DNA, 107 bp, Glycine max
  unsure (1)..(107): unsure at all n locations; Clone ID: 701106589H1
cnagtttctagaaataaatggctccatatactctggcagcatcgatttattctgctagtacatgaaattttgagaactgagtacacaggtaggattatcagtgaatc

SEQ ID NO: 33408 - DNA, 268 bp, Glycine max
  unsure (1)..(268): unsure at all n locations; Clone ID: 701106590H1
cttgctcacagatatatttttttttttgtctccatcattttctcgagngctttcagtttctgtggttcatctttcttctncttaatctttccccccctctctgnaacatcccgcttctctgaatccctttctgctaatcatctgtctttcaagctaagattttctggtttgtcttncaattcaccaaaaagcaaacttagaaggatttttcgaaagccaggtgttttcagaaacgagatccaggttttattgtcgaatttcgctagtc

SEQ ID NO: 33409 - DNA, 268 bp, Glycine max
  unsure (1)..(268): unsure at all n locations; Clone ID: 701106591H1
gaggatgatagcgggttatgtttgattgatgtgttacagtgatcatcaatatganaatgttgcctgtttgctcagccaccccaagttattccacatcttcccagatnngcttgtttgggggattccacccaattcgaaaggatcttgagagcagatgtgtggctgaagaaggtgtgcatttggcttcacaatatggagctcattcactgagaaattcatttgcagtgcaagctacaaagannctattgggcagtttttcttctacaag

SEQ ID NO: 33410 - DNA, 79 bp, Glycine max
  unsure (1)..(79): unsure at all n locations; Clone ID: 701106593H1
gttccgagttcttgacactccttggaccaattcctcgttttgacattcattcccaggaaacttttccacacaacatang

SEQ ID NO: 33411 - DNA, 273 bp, Glycine max
  unsure (1)..(273): unsure at all n locations; Clone ID: 701106594H1
gnttgttccagtggtggatttccagaggctttcagaggaagaggagcgcaagaagctgagaaaaacatgtgagaaaccagggtgtttcagaatcatcaaccactcaattccactaacactcatggggaacatgaagtcagtggttaaatacttgcatgaccttcccacggaaatcaaaatgcgcaacaaaccctccgtccctgagagtggctatagggcggcaatgccaacaagtcctctatacgagggcatgggaatatatgacatgcatgc

SEQ ID NO: 33412 - DNA, 275 bp, Glycine max
  unsure (1)..(275): unsure at all n locations; Clone ID: 701106595H1
ttcaatcataagattattgtttgtttgcggttgcagagatgagtggatgaattaattnatgaatgaaattcaaatactaattgttgctatccacaattcacaagagattggattttggaatggaaagggtgttgtcagtagatgagatatccggagcaatactgggtggctgcatcnnnnnnnnnnnnnnnnnnnnnnnnnnnnntcaagtcaaagatgaaccggagcgaatccgaatgggcctttcagcagttcctacagcaggaagctgcttc

SEQ ID NO: 33413 - DNA, 232 bp, Glycine max
  unsure (1)..(232): unsure at all n locations; Clone ID: 701106596H1
gnaagagccaaaatcccagacccaagtgctgtgaagccanatgactgggatgangatgcacccatggaaatcttagatgaagaagcagagaaacctgaaggatggttggatgatgagccagaggaaattgatgacccagangcaactaaaccagaagactgggatgatgaggaggatggtgaatgggaagccccaaagattgaaaacccaaagtgtgangccgccctggttg

SEQ ID NO: 33414 - DNA, 259 bp, Glycine max
  unsure (1)..(259): unsure at all n locations; Clone ID: 701106601H1
ccactttccaacattcgntttctttctctcgcgtttcgcaatttccccaaatctacacgcctagggtttctatcgcaaaccctcactcccttcattaaggtcgcgcgcgaagggatttcgaagcttcggaaggaaaaaaaaaaagatgaaacctgttttctgcggaaacctggatttcgacgcgcgtcaatccgacntggagaggctcttcagaagatacggcaaggttgatagagtcgacatgaaatccgggtttgct

SEQ ID NO: 33415 - DNA, 269 bp, Glycine max
  Clone ID: 701106602H1
cgcatcgagtctgtcccggagctcccccttgtcgtcagcgactccgccgaaggagtcgagaagacaaaagaagcgatcaaagtcctcaagcagatcggagcattcccggacgccgaaaaggctaaagacagccgcagcattcgtcccggcaagggaaaaatgcgtaaccgccgctacatctctcgccggggaccacttgtggtgtacggaacggaaggtgcgaaagccgttaaggccttccgtaacgtccccggcgtcgaggtcgccaa

SEQ ID NO: 33416 - DNA, 262 bp, Glycine max
  unsure (1)..(262): unsure at all n locations; Clone ID: 701106604H1
atttcattgattctctcccttctctttctctctgcgacaacagatgatggagacgacggcgaacgaanacgctgtcgttgcgccaatcgcggcgttgttgttggtggtgctactcgcggcgagtgtggtggtggaggctcaggagaactcggacgtgaagacgctggtgaagcacatgcacgggaagaagtactgcgacaaaggatgggaatgtaagggctggtcaatttactgttgtaacctcactattactgattatttc

SEQ ID NO: 33417 - DNA, 262 bp, Glycine max
  unsure (1)..(262): unsure at all n locations; Clone ID: 701106605H1
gtaatctcaaagctcgtcgtgttttcgcatcaatggccatggccatggcngangcttcaagaatcacgttacactccactctcctccctttttttacccccaaaanccacgttggtcaccgccacttaagcctctcgtcatcacgcaagcaccaagtccagtgctcggtgtctgcaggcgcggcggctcagacgaacccagtggcttggggctgcgagattgactcgctggagaactcttcggctctgcagagatggctgtc

SEQ ID NO: 33418 - DNA, 262 bp, Glycine max
  Clone ID: 701106606H1
ctcacagaatcaagagttgggaaatccaaagttctctcgtctgcagtggatgaagtaaaaagggaagcattgagtgtgggttctagaactgtacctcagcatcaaaagggaggcatgtctaatgagcatcatgtccatgtttctggcaatgatgatatggccaagtcaatgagaaattatgctgatgttagtaacaatgctggagttaattatagttctggaaattttgcacctgatcagcaacttacgttgttaagtcctt

SEQ ID NO: 33419 - DNA, 261 bp, Glycine max
  Clone ID: 701106607H1
caaacaacagagtttatttctttttggttccttggttcacgctggctgcaaggcttgtgtttggtgggagcagcttctcaccgtgacgctgctctacgaagacgacgacaacctcgtgtgacaacatcaaataatgggaaaaggaaacatggaactcgagacaaacaaggtctatgactacgaggatgcacgaggggacgttgaagtcccagataccgctcatcagataagcactgattcatggtttcaagtggcttttat

SEQ ID NO: 33420 - DNA, 266 bp, Glycine max
  unsure (1)..(266): unsure at all n locations; Clone ID: 701106609H1
gtttcaccttctcttctcttctctcatagggttagggtttttttctcttcattgctctctctgtcgttttatttccatggctcagcaagatgctcagaatggtgggtcggagaatgccgctgctgcggtgtcgtttgtcgctttgaagccgcaganacctcatcgaagctcccaaagcgaacgacgccgttctgttctacaaggccgcgtttgccgctgaggaggttggccgtacgctcaaccctaagcgtaaagcggancacgag

SEQ ID NO: 33421 - DNA, 261 bp, Glycine max
  Clone ID: 701106612H1
ctttggttctggtttatagatctctgtgaagtcgctttataacactcaacctaagatgcagaacgaggaaggacagatcaccgagctttacattcctaggaagtgctctgccacaaaccgattgattaccgctaaggaccatgcttcggttcaggttaacattgggcatgtggatgagaatggcgtctacaatggccatttctccacttttgctctctgcggcttcatccgtgctcagggtgatgctgacagtgccctaga

SEQ ID NO: 33422 - DNA, 265 bp, Glycine max
  Clone ID: 701106614H1
gaaaattaatgcccctttcattttctctgcatctgtagtatctatcaccaatcaattccactcttcttcccatcaaacaacaaaaaatcaatctgggaaacaaaaacaaaatgccgtcattagaggaggaactcttcccatcaaccccaggaaagttcaagatcgagcggtcccaccacatgaaccgccaactctatcgctgtttcgcctccaccagcaccatgttcctgtgggccctcttcttaatcgccctcaccgcttccta

SEQ ID NO: 33423 - DNA, 265 bp, Glycine max
  unsure (1)..(265): unsure at all n locations; Clone ID: 701106615H1
ctttagccgaggtcaggaggagcactagctaagttcacaatttcaaaatggctaggggantaaagaagcatttgaaaaggctcaatgctcctaagcattggatgcttgacaaactgggtggtgcatttgcgcctaaaccctcatctggaccacacaaatcgagnctngngnntcaccctcattcttattctgcgaaaccggctgaagtatgctctgacataccgtgaagtcattgctattctgatgcagcgccatgttcttgttg

SEQ ID NO: 33424 - DNA, 246 bp, Glycine max
  unsure (1)..(246): unsure at all n locations; Clone ID: 701106616H1
tcagatctggagcaggagaatagcgttggcagcgtttgcgtttgctnctgctgttccaatcggcctcagcagacgacgtcgttgtgctctctgaagataacttcgagaaggaagttggtcaggacagaggagctctcgttgagttctatgctccttggtgtggacactgcaaaaagcttgctccagaatatgaaaagcttggtagcagcttcaagaaagccaaatctgttttaattggcnaggttg

SEQ ID NO: 33425 - DNA, 254 bp, Glycine max
  unsure (1)..(254): unsure at all n locations; Clone ID: 701106617H1
aaagaaaaaaaaaacccttagccaaccacaaccatcatggcnacctctgctattcagcaatcagcattcactggtcaaactgctctgaagcagctcaatgagttcgtccgcaagaccggtggcgccggcaaaggtcgcactaacatgcgccgcaccgtcaagagtgctcctcagagcatttggtatggccctgaccgtcccaagtacttgggtccattctcggagcagattccatcatacctgaccggagaatt

SEQ ID NO: 33426 - DNA, 266 bp, Glycine max
  Clone ID: 701106618H1
gagtttgttgtgagctataagctagtttatcgtgaggagaatatgaagttgtttgttttctttgttgctgcagtagttttggtagcatggccatgccatggcgcaggctaccaaaggttccctctccgaatgaaaactggctatggtgagcgttcttcggaggtaaaatgcgcaagttttaggcttgctgtggaagcacacaacatccgagcctttaaaaccattcctgaagagtgcgttgaaccaacaaaggactacattaatgg

SEQ ID NO: 33427 - DNA, 265 bp, Glycine max
  Clone ID: 701106619H1
ctcactcactgcagatctcaattgcatcgctgtccatggctaccatcgttagcatcaaggcccgccagatccttcgacagtcgtggcaatccaactgtcgaggtggatttgacttgctccgatggtacttttgccagagctgctgttccaagtggtgcatccactgggatttatgaggcccttgaattgagagatggaggatctgactaccttggaaagggtgtatcaaaggctgttgacaatgtgaacaccgtcattggccctg

SEQ ID NO: 33428 - DNA, 263 bp, Glycine max
  unsure (1)..(263): unsure at all n locations; Clone ID: 701106620H1
gaaggtccttgttttcttcgttgctacaattttngtagcatggcaatgccatgcgtaacgatatgttccctctccgaatgaacactggctatggtgcccgtactccggaggtgaaatgcgcaagttggaggcttgctgtggaagcacacaacatctttggctttgagaccattcctgaagagtgcgttgaagcaacaaaggaatacatccatggcgaacaatatagatcgnactccaaaacagttaaccaacaagcttacttt

SEQ ID NO: 33429 - DNA, 263 bp, Glycine max
  Clone ID: 701106621H1
aaagcacaaagcaaagctcatccttgagttaaaaaatggcagcagcttctcccatggctctctcatccccatccttggctggcaaggccgtgaagctgggcccatcagccccagaagtgggaagggtgagcatgaggaagaccgtcaccaagcaggtctcctcaggaagcccatggtacggcccagaccgagtcaagtacttgggcccattctctggcgagcccccgtcctacctaaccggtgagttcccaggcgactacggc

SEQ ID NO: 33430 - DNA, 262 bp, Glycine max
  Clone ID: 701106622H1
cacgttgttgttcgctctgtgtctctcactctctctatatttgcatcattcatcggaaatggctctcgaggttgctgttaaggctgctgttggggctccaaatgttctcggagattgtccattttcccaaagggtcctcttaactttggaggagaagaaaattccttacaaactccacctcatcgatctcagtaacaaacccgaatggtttttgggtgtgaatcctgaagggaaggtgccagtggttctttttgatggcaaa

SEQ ID NO: 33431 - DNA, 261 bp, Glycine max
  Clone ID: 701106623H1
ggaacagtgcagaaagcgatagaaaatggcttcccttttccccttttgtgctcgcaattgaccgtcgaatccaatcctgaaatcccccaataaatagagaagcgaagaaaccaaaccaaaccatcgagtgcgttgcgcccccaccgtaagtagagctatgtcgttgcgcaggcgaaccttgctcaaggtcattgttctcggcgacagggggttgggaagacctcgttgatgaatcaatacgtgcacaagaagtttagtcag

SEQ ID NO: 33432 - DNA, 263 bp, Glycine max
  Clone ID: 701106624H1
ctcaaccggcccaatttagcataagcccagcatggccaccgcaacagcagcagccacctcgtccttcatggggacgcgcctcctggaggcccattccggggcggggcgggtgcaggcccggttcgggtttggcaagaagaaagccgccgccccgaagaaagtttccagggggtcgggctctagctccgataggcccctgtggtatccgggcgccaaggcgcccgagtacctggatgggagccttgtcggagatacgggttcga

SEQ ID NO: 33433 - DNA, 264 bp, Glycine max
  unsure (1)..(264): unsure at all n locations; Clone ID: 701106625H1
ctctcgttgattcggatctagagtcttttttcactcttcagttctcgttgttgttcttcgctttcctgaaactagggttttcaatttcgattcattcgttaataattaaagatgtttgggagggcaccgaagaagagcgataatacgaggtactacgaaatcctcggcgtctcgaagaacgcttcgcaggatgatctgaaganggcttacaagaaagccgccatcaagaatcaccctgacaagggcggtgatcccgagaagttt

SEQ ID NO: 33434 - DNA, 261 bp, Glycine max
  Clone ID: 701106626H1
agttacatagtttttcattgttttacttaatctacaatggctgcttcaacaatgactctctcttcatcatcattggctggccaagctatcaagcttgccccctccacccctgagcttggtgttggaagggttagcatgaggaaaacagcctccaagactgtttcctcaggaagcccatggtacggcccagaccgtgtcaagtacttgggcccattctctggtgagcccccatcctatctcactggtgaattcccaggtgac

SEQ ID NO: 33435 - DNA, 261 bp, Glycine max
  Clone ID: 701106627H1
cttccactatcgccatggcctcccactcaaaccaaccaggtcccggagctgaagggctaggagagaaggaccccccaacaagtttccagaacccgctttctgagatatccccgtcgccgtctccgtcgtcggcgccggcgccggcgctggtgctgtcgaactcggggaagcgaatcgaccaggcggggaagaagaagtacgtgaagcaggtgacggggcgccacaacgacaccgagctccacctggcggcgcagaggggcg

SEQ ID NO: 33436 - DNA, 262 bp, Glycine max
  Clone ID: 701106628H1
aagttacatagtttttcattgttttacttaatctacaatggctgcttcaacaatgactctctcttcatcatcattggctggccaagctatcaagcttgccccctcccacccctgagcttggtgttggaagggttagcatgaggaaaacagcctccaagactgtttcctcaggaagcccatggtacggcccagaccgtgtcaagtacttgggcccattctctggtgagcccccatcctatctcactggtgaattcccaggtga

SEQ ID NO: 33437 - DNA, 262 bp, Glycine max
  unsure (1)..(262): unsure at all n locations; Clone ID: 701106629H1
gagntaactagaaacagtgtgatgaaaatgaaggtccttgttttcttcgttgctacaattttggtagcatggcaatgccatgcgtacgatatgttccctctccgaatgaacactggctatggtgcccgtactccggaggtgaaatgcgcaagttggaggcttgctgtggaagcacacaacatctttggctttgagaccattcctgaagagtgcgttgaagcnacaaaggaatacatccatggcgaacaatatagatcagact

SEQ ID NO: 33438 - DNA, 231 bp, Glycine max
  unsure (1)..(231): unsure at all n locations; Clone ID: 701106630H1
accctagcttaccttttcaactttcaagatgcaaatcttcgttaagacactcactggtaagacaatcacccttgaggtggagagttcagataccatagataatgtaaagtccaagattcaagacaaggaagggatcccaccagaccagcaacgtctcattttttgctggcaagcagcttgaggatggacgtacacttgctgattacaacatccnaaaggagtccactcttc

SEQ ID NO: 33439 - DNA, 268 bp, Glycine max
  unsure (1)..(268): unsure at all n locations; Clone ID: 701106631H1
gtgnttacatttcagcgcgcatcactttctctctccgaaatgaagcagtctcttctgctgagaggcgaaagcagtgaccagagttaccagtcgcggggaatattccggcgctccgatgctatcgcctacggcttccaactacgagaaagccgctgcgttcatcgatctggctgaagatggtgttggtctccctgaggaaattctcgactcaccaaacttccaaaattacatnagatgctattttatattcactaaatgcaatctantc

SEQ ID NO: 33440 - DNA, 269 bp, Glycine max
  unsure (1)..(269): unsure at all n locations; Clone ID: 701106632H1
gccttctctcctctattttggcttccaacctttttgctccattcattctcaacaacaaaccaatctctatatnttgcttagacaatgagggggagcttgtggcaacttgggcaatcgatcactcgccgtcttgcccatggagataagaaggctgttgctcgccgatgttttgcctcagaagctgagctgaaaaagacagtgtttcatgacttccatgttgctcatggtgggaagatggttccatttgctggatggagcatgccaatccc

SEQ ID NO: 33441 - DNA, 270 bp, Glycine max
  Clone ID: 701106633H1
caatcataacttttggtgattctgctgtggatgtagggaacaatgactatcttcccacccttttcaaggctgattaccctccttatgggagggactttgttaaccaccaacctactgggaggttttgcaatggcaaattagctactgatttcactgctgacacattgggtttcaagacctatgctccagcatatcttagcccacatgcatcagggaaaaacctccttattggagcaaactttgcttcagctgcatctggttatgatgaaa

SEQ ID NO: 33442 - DNA, 266 bp, Glycine max
  Clone ID: 701106634H1
ctagaatggaatttcgatgctcagtcatctcttttaccattctcttctctcttgctcttgcaggagagagccatgtccatgcatcgctacctgaggaagattattgggaagctgtttggccaaacactcccattcccactgcactgcgagagcttctaaagcctctccctgcaggtgttgaaatcgatgaactccctaagcaaattgatgatacacagtacccaaaaacattcttctataaagaagaccttcatccaggcaaaaca

SEQ ID NO: 33443 - DNA, 264 bp, Glycine max
  Clone ID: 701106635H1
taaaaggaggagacgacgacgcggggaatctccggtctccaccgacatcccttctcttccaaatcctgtgatcccattccaatccgttccgttcagctcaatctcaaaatctcaatggccgataatgagcaaccgaataacgaggaggcaagtcctcttctccaccagccccatccccaacccaaatccgaaccaccaacgccacctgagactcccgagtttctcctcggctggaccgctgatgggctccctctggcccacgcc

SEQ ID NO: 33444 - DNA, 260 bp, Glycine max
  Clone ID: 701106637H1
ttggaagccaatggacgcggttactgggagacttcagaagacaacatcgacaagctcaggcagttgtactcagaagtggaagacaaaatagaaggcattgatcgctgaagtgataattgagatgaacagcagaaacattaactgttttttaactatgccttctttgtatctggagcttctttcccacactgaattgaaagttgttgatggtgtccttttaatgtgattttgctcctctctcctttttccctgctgtaatt

SEQ ID NO: 33445 - DNA, 259 bp, Glycine max
  unsure (1)..(259): unsure at all n locations; Clone ID: 701106638H1
gaagcattagcaaaagcaagaagaantagtctaagcagaaatggcctcttcagtgatggcatctgtggccctcaaacctgcccctttcactgttgagaagtcctcagttagaggccttccctccctctcaaggaactcctcttcattcagagttgtggccagtggtggcaagaagatcaagactgacaagccttatggaattaatggnggcatggctttgagggaaggagttgatgcatctggcaggaaaggaaaggga

SEQ ID NO: 33446 - DNA, 260 bp, Glycine max
  Clone ID: 701106640H1
caaaaaccgatgactgaaccctaaggggaaaattgccgatgcggcaccgtaataccatttcccaattctagcactgttggctggggcaaattcctcacccaaaacgacacatgtttggggggccattttgatttgaggtgcgttgagacagaaaacattaggccaccatagttctcttctctctcgcaatttccatctggtctcaatttttctcgtgattccatctccattccggtgtaggctcctttgatttgaccatc

SEQ ID NO: 33447 - DNA, 265 bp, Glycine max
  unsure (1)..(265): unsure at all n locations; Clone ID: 701106641H1
aaaaaaagctgaganctttggcanaaanccancaagcccaccttcaaatcaccccatattccccattcccatgcagagattccatctgggtctccctcattcaccaccaatggacnccagcacaccntnnnnnnnnnttccagangcatntccaaagcncttcttcaaganaaccacactcacttccttcatcatgtcttcnacaccttccttcanggaaganacctncnacatctcccacctcaaatcctccgagaaaaaagcc

SEQ ID NO: 33448 - DNA, 260 bp, Glycine max
  Clone ID: 701106642H1
ggaagaggaaaaagaggattggagggtcgccacgtttagcaacaaccaaaccctctctactctttcttcttctcttcgctagggttttagcttcttcctcttcacttcgttcttctggcctctacaatgagcaacgacaaggacaccttcaacgtcgctgatctcacttccgctctcaacgaggacaatagagcagaccttgtcaatgctctcaagagcaagatacagagtttggctggacagcattctgatattctaga

SEQ ID NO: 33449 - DNA, 259 bp, Glycine max
  Clone ID: 701106643H1
acggcatcagattgcgagggtgctggtgaacagttctgcgttactaccttgataccaagttctcatgaaactactgattctcctgttgatgctattccaaaaacaaatgatggattaattgactggtcacaagacttctttggaaaaccagcattcttgactgtttcaggtcaactcaatggtgaaacttatgccactgctctctctgatgtgtatacatttggtcctacattccgagcagaaaattctaacacttctt

SEQ ID NO: 33450 - DNA, 260 bp, Glycine max
  unsure (1)..(260): unsure at all n locations; Clone ID: 701106644H1
ttggaatctgcatctgtgcaagattttgatgaaaganagatgttctacatgtattctttctcctggagatattcagagtcacaaggtattcaaaaaggacatcatattcattattgacatcagtggtagtatgcggggaaagctaattgangacacaaagaatgcactattgactgctctctctaagcttaatcacgatgattcatttaatattttagcctttaatggagagacttatctattttccaaagcgatggatt

SEQ ID NO: 33451 - DNA, 262 bp, Glycine max
  Clone ID: 701106645H1
ctcaactaagcgcaaaccaaaccaacacaaacaaaaacatctctcagcaaatgaatattctcggacaatcactccaccaatcaaacaacggcagctactcttgttcgtcgccggagactgcaaactcctctaaccttccgaccactccgaacgccgttcactccgacgaggaagtgaacacattagcatcggctcatcctaagaaacgtgcggggcgtcgaatttttaaggagacaaggcatcccgtgtacagaggagtgcg

SEQ ID NO: 33452 - DNA, 261 bp, Glycine max
  Clone ID: 701106646H1
caacactgtgccctctttctctctttccttcgcagaagccatggcctcatttgcacgtggagccgcatctttaacccgcattggtctttccacttccaagactccccttcaactcatccaccgccgtggcctcgccgatcaccatggccctcccaaagttgcctgctggaaagatccaatgagcccatctaaatggaaggaggagcactttgtgattgtctctttaactggttggggactactcatctatgggggatacaa

SEQ ID NO: 33453 - DNA, 262 bp, Glycine max
  unsure (1)..(262): unsure at all n locations; Clone ID: 701106647H1
ttaccattgatattgctttgtggaagtttgaaaccaccaagtactactgcacagtcatcgatgcccccggacatcgtgactttatcaagaacatgattactggtacctcccaggctgattgtgctgtccttatcattgactccaccactggtggttttgaagctngtatttctaaggatggacagactcgtgagcatgctcttcttgctttcacccttggtgtgaagcagatgatttgctgctgtaacaagatggatgccat

SEQ ID NO: 33454 - DNA, 249 bp, Glycine max
  unsure (1)..(249): unsure at all n locations; Clone ID: 701106648H1
cttaattccatcaacttcactgctagctcacaaattggatcggctctcgtataccaaccattattcattgttttaatgattaatttattgtgtatgactactaagatttcggtctcaacagtagangnnattttatgtgaggaataagtatgcatgatattctgctgctgaataaatcaagttttgtaatgtactcgaagttgtgcttgtaggtatgttgaatttgttagaaannaaaaaaacaanaac

SEQ ID NO: 33455 - DNA, 263 bp, Glycine max
  Clone ID: 701106650H1
caaaagcaaatccatcaagacattcctgatgcagatcttcgagaaatatggaaatactgacattgagggtgttgattcaactaatgcatgctatggaggaactgctgctctgtttaattgtgtcaattgggtggagagcaattcatgggatggacgctatggacttgttgtctgcactgacagtgcagtctatgctgaaggacctgcccgacctactggaggagctgctgctattgccatgctaattggtcctgatgctccca

SEQ ID NO: 33456 - DNA, 261 bp, Glycine max
  unsure (1)..(261): unsure at all n locations; Clone ID: 701106651H1
ccatcatcaaatctcccattattcttcaaattctctccaacgttataaaccaccttcaatcaacgtnnnnnnnnnnnnnnnnnnncggttattattaattttattttcacgtaatgggcaactacgtttcatgcactttggcgcctcctttgatgaagaactccaaggccacgagggtcatcattcccaccggtgaagtgaagcaattcagagagatcgtgaaggctgcggagtcatgctcgaacaccccagctatttcct

SEQ ID NO: 33457 - DNA, 261 bp, Glycine max
  Clone ID: 701106652H1
aaaacataaaacgagagagaaagatgataaagcctcaagtgtatcaatcacagaacaccaatcaaaccctcttgtttctgcagaggctatccgttcacagcagtactgcatctcttccactatggttggggagtaaagtgcagaggcaaaaaaagcttaaccacctcgttctggtttcacgcaacgttgaaactaattccactacaacagatactcatacagataagagtacagtgattaaggttaaggccatagttaagg

SEQ ID NO: 33458 - DNA, 261 bp, Glycine max
  Clone ID: 701106653H1
gagagaaagagatcacatagcagaatggcttctactcaatgtttcttgcaccaccatgctcttaccacccctgccagatccccatcacaacgcatcatggttagcaccaagcctaaccagcttgtttgcaaggcacagaagcaagaggatattgatgtcagcccaatctctcgccggttagctctaaccgtgctcattggtgctgctgctgttggctccaaagtccaacctgctgatgcagcttatggggaagctgccaat

SEQ ID NO: 33459 - DNA, 260 bp, Glycine max
  Clone ID: 701106654H1
aaagaattcatagcttcactccacaaacaaaagacagaactatttatggcccttattgagaaaaaactgttgcctcttcgtccaggtgttgcaaagattatcgaccaggcttttgctcaaggagtccaagttgcagtttgcagcacttccaatgagaaggcggtctctgcaatagtatcattcttgctgggacctgagagagcagaaaaaatcaagatatttgccggagacgtggttccccgtaaaaagcctgatccagc

SEQ ID NO: 33460 - DNA, 260 bp, Glycine max
  Clone ID: 701106655H1
attctaagaagtaagaatctcagcaacaccaattagacaataaacagcgacgatgaaagcaatgacagcaacgacaacgtttgatgtctctgccgcttgcttccgtgcccctccttcttgttcaccgaatccatgccacaccagtttttcagttataaactccctgaatcctcacaagggacgacggataagcgttgctgttccacctaagtttccaagcttccggagggaagcagctctgcaggggaatttggaggctg

SEQ ID NO: 33461 - DNA, 261 bp, Glycine max
  Clone ID: 701106656H1
ctctgcgccccccggttcagctcggcgagatcacagcggaggagctcaaggcctacgacggcaccgatcccgagaagcccttgctcatggccatcaaggcccagatctatgatgtctcccagagcaggatgttttatggacctggtggaccttatgccctatttgctggcaaggatgctagcagagccttagcaaagatgtcttttgaagagaaagatctgactggggatatttctggtcttggcccgtttgagcttgatg

SEQ ID NO: 33462 - DNA, 262 bp, Glycine max
  Clone ID: 701106657H1
ggtggatgtggctcatgctgctattagaaatgatcccagaatcaattggctcgccaatccagtgcacaagcacagagagctgcgtgggctcacctctgctgggaaaagcaacaggggtttacgtggcagaggacatctgtaccacaaagcacgtccatctcgcagggcaacctggaagagaaacaacaccctgtctctccgccgttaccgctaatttctgctgttatcatcttatttttgcttcattttctggaatactatt

SEQ ID NO: 33463 - DNA, 260 bp, Glycine max
  unsure (1)..(260): unsure at all n locations; Clone ID: 701106658H1
atggcacttgttcaaccctttgcttctctttcaatctcttttcgcgatgctcgtgttttcactgcaccaaaatgctctcccaccactcactttcctcatcggaatttggttccaactcgagcatcattcatcgctggttccccactgttgattcgaagaaatcatggaaggaatggtgcatncaaagcaatgcctgtttcaataagatgtgagcaaagtacccaggaagggaacagtttagatgtgtggctaggccggct

SEQ ID NO: 33464 - DNA, 258 bp, Glycine max
  Clone ID: 701106659H1
agcaacaccaattagacaataaacagcgacgatgaaagcaatgacagcaacgacaacgtttgatgtctctgccgcttgcttccgtgcccctccttcttgttcaccgaatccatgccacaccagtttttcagttataaactccctgaatcctcacaagggacgacggataagcgttgctgttccacctaagtttccaagcttccggagggaagcagctctgcaggggaatttggaggctgttagagtcccaacttcggt

SEQ ID NO: 33465 - DNA, 260 bp, Glycine max
  unsure (1)..(260): unsure at all n locations; Clone ID: 701106660H1
ggcaatttttcttcccttcagatggtgatgtttcagatatctccgtctgttataaattactatcgttaactactattctcattctcacacttatcatacntccaattttctctacccttccatattaaatatatagaaatattgcatattgattgctagtgtgtccaagaataaacatgtcggccaagttcctgaccgtgccgccatttgagtgcgcctggagagaggatttgaaattccgggaggcaggccggggttgc

SEQ ID NO: 33466 - DNA, 261 bp, Glycine max
  Clone ID: 701106661H1
gagccggtggagaaatgtttgagggatgctaaaatggacaaaagaagtgttgatgatgttgttcttgttggtggttctaccagaattcccaaggttcaacaactgctgcaggacttctttaatggaaaggagctgtgcaagagcatcaatcctgatgaagctgttgcatatggtgctgctgttcaggctgcaattttaagtggtgagggcaatgagaaggttcaggatcttctcctccttgatgtcacccctctatctctt

SEQ ID NO: 33467 - DNA, 262 bp, Glycine max
  Clone ID: 701106662H1
caaaggttgctgtaggagataagattgcagtagtgctaagtgctaacacctgcagtgaacaatggcctctgcatcagcatctctgctcaagtcttcacttgttcttgacaagtctgagtgggtgaagggacaaacccttcgccaaccttctgcatcagttgtgagatgcaaccccaccaccccatcaggcctcaccatcagagctggttcctatgctgatgagctcgttaagaccgcgaaaacagtggcttcaccagggagg

SEQ ID NO: 33468 - DNA, 265 bp, Glycine max
  Clone ID: 701106663H1
gcttctctagggacatcatcatctgatggcatcccatcatcagaagcctcagacaggatcaaagctggtttcattcacttcaagaaggagaaatacgacaagaatccagctttgtatggtgaacttgccaaaggccagagccccaagttcatggtgtttgcttgctcagactcaagggtgtgcccatctcatgtgctagatttccaaccaggagaggcctttgtggtcagaaatgttgccaacattgtcccaccatatgaccagt

SEQ ID NO: 33469 - DNA, 266 bp, Glycine max
  unsure (1)..(266): unsure at all n locations; Clone ID: 701106665H1
antccctaacccttctctcaaccatgtttccctcttcttcttactcttgatttggtttcgatattgtttttcagttggtgttgcttatatcatatatagttaagcttaacaacctccattcaaagttaaagatgcctcgtaccagcactctggagtgctccggttgccctccggttcgcgctctaacctttgacgcgcttggtctcatcaaaggtgatgattttttcatattatgtcactctctttttctcatccttatgggtttt

SEQ ID NO: 33470 - DNA, 260 bp, Glycine max
  Clone ID: 701106666H1
tttcttgctgttatagtgtggtgttttgattaatgcagccgcaacttgtttgaaaatgggtctagtggcggctgacaagggttcgatgcagacccaagaggaacagagcgacaatgcctccgctgttcagtgggaacgctttctgcctcggatggtgcttcgggtcttgcttgtcgaagctgatgattctactcgacagatcatttctgcacttctccataaatgcagttacaaagttgtcgcattttgtgacggcttaa

SEQ ID NO: 33471 - DNA, 237 bp, Glycine max
  unsure (1)..(237): unsure at all n locations; Clone ID: 701106667H1
tcccagtgatcaattcaacgatgttagagcagttgctgatattcacgcgcggagggctcatcctctggacctgcaaccacctcagcaacgccctgaggggatctccgatcgacacgttgatccgatcctgcctcctggaggagcgatccggtgcggcctccttcaactacgacgcacctggagccgcatactctctcaaatggaccttccacaacgacctaggcgncgtctttgtcg

SEQ ID NO: 33472 - DNA, 258 bp, Glycine max
  unsure (1)..(258): unsure at all n locations; Clone ID: 701106668H1
ctccctcacccacgtctctccccgcttcagntcttaaacgtctttncgctgttccaagatgggtgtggctgagaacattcccgatatggaggagggtaccttggagattggaatggaatacagaactgtatctggagttgctggaccattggtcattcttgacaaagttaagggacccaaatttcaagagattgttaatattcgtttaggagatggaactactcggcgtggacaagttctagaggttgatggtgaaaa

SEQ ID NO: 33473 - DNA, 257 bp, Glycine max
  unsure (1)..(257): unsure at all n locations; Clone ID: 701106670H1
ctcncctctctcactcactcacantctcttctgtcatagctgtaccangtttttcttctccatctnagcctctgtcccaanaccattctcatggctgctctagctctagcactgcttcttctggctntcacnggcacttcaantgctacatggtncgtttncaaggatggaagcgacgcgatcctgcnnaaaaccttggactaggcttgtggagctggtgctgactgtantcctctccaccaaancgggccttgttt

SEQ ID NO: 33474 - DNA, 258 bp, Glycine max
  unsure (1)..(258): unsure at all n locations; Clone ID: 701106671H1
gtggcacaatcatcttgatccaaccgtaaanaaggatgcatggacagaggaggaggaactaatacttgcttactattaccaaatatacggcagtaagtgggcagaaattgcaaggattcttcccggaaggtactttgtttgaatgttaatatgcaggcttcaaaacattcatcaatacgtatgtataaaatatgattttantcatgttaatatgatttgattttggttataatttttcaaaaaanaaaatctgtttat

SEQ ID NO: 33475 - DNA, 261 bp, Glycine max
  unsure (1)..(261): unsure at all n locations; Clone ID: 701106672H1
cgccgaaaaaagaagccgccgttgcggaaaaaccgccggagaagaaggcagaagacaagaagcctgaggagaaaaaancngaanaantacctaaagagagtacggtggttttgaagatcaaactacactgtgacggttgcattgcgaaaattcgaagaatcatnacctaggttcaaaggtgttcaattggtgagcctcgacggaagcaaggacttggtgacggtgaagggaacgatggacgtgaaggagatgttgccgtac

SEQ ID NO: 33476 - DNA, 259 bp, Glycine max
  unsure (1)..(259): unsure at all n locations; Clone ID: 701106674H1
atgaaaacgaagtgtnattgagtaatactccgttccctggttcctccatcgcgaaattagggttcgctcacttgtcttcaatttcccagattcacctagcaccatccataaatccccctattaacgtgtctttcggaccgatttttctacgtgacgcatcgcaattcttcagcggtttcgtttagggaacccgcgaaaccgaatcagatagtgcggcacggaaactaggaattaaagcaatggcagaagatctggtgct

SEQ ID NO: 33477 - DNA, 256 bp, Glycine max
  Clone ID: 701106675H1
ggcatcgttagcagttttgtagattcaacctcaatttgcagagttacgttctaatatatttacacaagactgataagagaaaatgtctctgattccaagtttcttcggtggccgaaggagcagtgttttcgaccctttctccctcgatgtgtgggaccccttcaaggattttccatttcccagttctctttctgctgaaaattcagcgtttgtgagcacacgagtggattggaaggagacaccagaagcacacgtg

SEQ ID NO: 33478 - DNA, 256 bp, Glycine max
  Clone ID: 701106676H1
ggaactgtggaagttcaggaccttcccttctttgacactgtgaaggttaagacttccaatgcacacgcaattgctgatgctgctctcaaaagtggaataaatttgcgagttgttgatggaaacactatcactgttgcttttgatgaaacaaccacattagaggatgttgataatcttttcaaagtttttgctggtggaaagcccgtctccttcacagctgcatctcttgcaccagaagttcagagtgcgattcctt

SEQ ID NO: 33479 - DNA, 261 bp, Glycine max
  unsure (1)..(261): unsure at all n locations; Clone ID: 701106678H1
tccaaatcagcacaaagcaccacgccatatggcacgagtcctttcacagtctccatcccggnagccaatagccccgtngaactgcaccgcatacaacctcaccggaacacnccccacanacctacnanancatcanancnctccnnctaccgcnacgtgtccagattacttccgttggatccacgaggatttgaggccttgggcccgtacgggcatcacgcaagacatggtggagagggcaaagcaaacggcaaattttag

SEQ ID NO: 33480 - DNA, 261 bp, Glycine max
  unsure (1)..(261): unsure at all n locations; Clone ID: 701106679H1
gacaattcagtgtgagaatggacatattgctngctctatttgctgtgtgagactcagtaacaagtgtcccatgtgttcaatgcccattgggtataaccgttgccgggctattgagaaggtcttggagtgtattaaaatgtcatgcccgaatgcaaattatggctgcaaagagacacttagttacagcaagaaaaacgaacatgagaaggaatgcatctatctgccatgttcatgcccttttactggttgtgattttattgc

SEQ ID NO: 33481 - DNA, 263 bp, Glycine max
  Clone ID: 701106680H1
tttttctctctcccttagtcaaagggattcatcgttcttcttcccaggttatttagaaaagcaaaatggtgaagatttgctgcattggtgctggatatgtggggggtcctactatggcagtcattgcacttaagtgcccatccattgaagtcgctgttgttgatatctctaaatcccgcattgcagcctggaacagcgaccagcttcctatctatgaacctggccttgatggtgttgtgaagcaatgccgtggcaagaacctt

SEQ ID NO: 33482 - DNA, 265 bp, Glycine max
  unsure (1)..(265): unsure at all n locations; Clone ID: 701106681H1
gttaagctaagcaaagcttccttacctttctctctttctctctttctctctttctcttcccttccaagcactgccataacncgatcgaatgacaacctcgttggagacaccgccttctcctctcgacctccacaacaacagccaggnggggatgcgcgtgatgggttctttttcttctcctcttttcagcccttcctctgataaacgtttctggagcactctcaggagcaggatcgacgcgctcctcgatgctcgtcaatccgaa

SEQ ID NO: 33483 - DNA, 262 bp, Glycine max
  Clone ID: 701106682H1
gcaagagtgaagagcgaagagaatggctcccaagggtttaatctttttggctgtgttatgcttctcagcactgtcactgagtcgttgtcttgcggaggataatggacttgttatgaacttctacaaggaatcatgccctcaggctgaagacatcatcaaagaacaagtcaagcttctctacaagcgccacaagaacactgctttctcctggctcagaaacatcttccatgactgtgctgttcagagttgtgatgcttcactg

SEQ ID NO: 33484 - DNA, 214 bp, Glycine max
  unsure (1)..(214): unsure at all n locations; Clone ID: 701106684H1
acagaatctatgcttgttcttttgttatcaacctataggctatanatagcaaatgttttggcaatagtcttcaagactatgtgtccacttgtgaaatcacattttgtgttgcatttccgtagtcagtgttactggtaatgtgaatattgcgtacctaaggccttgtcacttctatcagtctatatataataaaattgtggcaacaatttatgtt

SEQ ID NO: 33485 - DNA, 259 bp, Glycine max
  Clone ID: 701106685H1
cttggatttcacccacattaaaatcttcaacaactcttgtcaatctgtctcaaaaaaacctttttttctgtcttctatggctgctactccaaaacccaccatcaaatcttgcactcccaagaaactccccaacgctctaatctcagtttccaaggtgagggtcattgtcagggtcagacccttcctcgcacacgaaacctctgcaagaaacggcgacgtttcgtgcatctccgtcctcgatcaagattccgagtctccg

SEQ ID NO: 33486 - DNA, 258 bp, Glycine max
  Clone ID: 701106686H1
tagataaggagctcttgtgaagtctatatttgtcttagaattgttttcacaacttaaacttttgtttcttcttctgaagcaagtaacaagagcatggaggtggatttcaagtctccttcccttgaaaagacagaagctgctgagactgaagtagaagaaaacatgcactttcacaagtctcttcaggagctaagagaattgcagtctcagttgcaccatgccgcagattattgtgaaacaactttcttgaaaagtgaa

SEQ ID NO: 33487 - DNA, 256 bp, Glycine max
  unsure (1)..(256): unsure at all n locations; Clone ID: 701106687H1
ggaattcagaggttccctgcagccatatatctgctgtggacattggatttatctattgactttataatctaatgtccataccttatatgatttcattaatatataactcttgctgcttcttttttttttaatcatatgattcagtgtttgattatttttatttttgtgacttaggttgncaatgatccatctggaaaagcgatcaatgcactcgagcagcatattaaaaaccttttgtgtccatccactcccttgt

SEQ ID NO: 33488 - DNA, 258 bp, Glycine max
  unsure (1)..(258): unsure at all n locations; Clone ID: 701106689H1
ctcaccccttcctttctaactcctcaaattgtgtgttctgngaatggaaatgcctccttntccatcggggcattccgcactctccatcccataaaagtcncagatccaagatggcttaccacnatcaanaatcccttttggacnccctatactgctccgaagagcattngataggggaaggtgaatttgaccaagcagaggaggagtacggtancagtaatngcantagtagcagcaccttagtnaacaacncccctg

SEQ ID NO: 33489 - DNA, 246 bp, Glycine max
  unsure (1)..(246): unsure at all n locations; Clone ID: 701106691H1
ctttaatgatgatattcagggaacagcatccgtggttcttgctggacttgttncagctctgaagttggttgggggtaacttagctgatcacagattcttattccttggtgctggagaggctggcactggcatagcagaactcatagcacttgaaacatcaaaacagacaaatgctccactggaggaagtgcgcaagantatttggttggtggactcaaagggattgattgtcagttcccgcaaaga

SEQ ID NO: 33490 - DNA, 258 bp, Glycine max
  unsure (1)..(258): unsure at all n locations; Clone ID: 701106692H1
ggcatcaacaatcaacaatcaacaatcacaaatagaaactcactctttcgaaaaaaccagaatttgaatatgacgttagggtttgagggttatagttannccacaacacttggaaggaagagggtcgtgttattacacaatgaagcttcttctctcaactctaattcggcggtgaatccattgaagagaatgtgcagcggaaaattcacttttgactctgaaaggtctcgccttgaggcccttcctcttgatgttctg

SEQ ID NO: 33491 - DNA, 259 bp, Glycine max
  Clone ID: 701106693H1
cagaaagcaagctcatcctagagttttaaaaatggcagcagcctcctccatggctctctcttccccatccttggctggcaatgccgtgaagctgggcccatcagcccccgaagtcgggagggtcagcatgaggaagaccgtcaccaagcaggcctcctccggaagcccatggtacggcccagaccgcgtcaagtacttgggcccattctctggcgagcccccgtcctacctcactggcgagttcccaggtgactacggc

SEQ ID NO: 33492 - DNA, 261 bp, Glycine max
  Clone ID: 701106694H1
ggaaggagcatcctttccaaactatgcatttaacaatgcctattttagaaatgaagacaacattatgcagactccatttgaaactacaaaggaagatgaattcctaaatttaatcttagccgatgaaagtatagtgatcaatgaagaaaataagcatgattttgtcaatagctctacccaatcagagtcattgaaaagggtatactgtgtaagcagtgatacagatgctgaagtcatctctaaactggatgacaatattgt

SEQ ID NO: 33493 - DNA, 262 bp, Glycine max
  unsure (1)..(262): unsure at all n locations; Clone ID: 701106695H1
actccctcctcttcacacnttttcttancncctctccaacaatccctctcgttcacactttcagattgtntgaagatgggggctggtggccgaactgctgttcctcctgccaacaggnagtcagaggctgaccctttgaagcgggtaccatttgaaaaacctcagtttagtctcagccagattaagaaggccattccacctcactgtttccancgctctgttctccgctcatctcctatgttgtttatgactcaccatagcc

SEQ ID NO: 33494 - DNA, 288 bp, Glycine max
  unsure (1)..(288): unsure at all n locations; Clone ID: 701106701H1
cttctttccaaatcccaactactactcacactcactgcagatctcaatccatggctaccatcgttagcatcaaggcccgccagatctttgacagtcgtggcaatccaaccgtcgaggtggatttgacatgctccgatggtacttttgctagagctgctgttccaagtggtgcatccactgggatttatgaggcccttgaattgagagatggaggatctgactaccttggaaagggtgtatcaaaggctgttgacaatgtgaacaccanattgcccctgctttggttgg

SEQ ID NO: 33495 - DNA, 287 bp, Glycine max
  unsure (1)..(287): unsure at all n locations; Clone ID: 701106702H1
cacgttcactctcgattttgccttgcanattgcgatttctctgcagtttcttccatcctccaactctgacctttcttgacgcgattttggtttttgtcaacttcttattgaaacccttcttcagtcttctcccatttccagagttcttataaattgatgctttttacaagtctttctgaacattccgtttccttcctccagggaaaagttagcgtgtccttaggtcacataggattttgagaaatttactttttaatttgcctctgaattaattctgcaagaagaga

SEQ ID NO: 33496 - DNA, 264 bp, Glycine max
  unsure (1)..(264): unsure at all n locations; Clone ID: 701106703H1
acttcattcaacatttctccnccttagcttgtttcaacaatggctgctgcggttagtnctgcagtctcttttccatccaccaagtctacctctcttccaagcaggacctccctcattgccccagagagagttgtgttcaagaaggcttcattgcaaaacagagatgtttctagcagtggacgggtagtttccatcagagctcaagtcaccactgaggcaccagccaaggttgaaaaagagtccaagaaacaggatgaaggtgtg

SEQ ID NO: 33497 - DNA, 283 bp, Glycine max
  Clone ID: 701106704H1
cagttcgtcaatgtgagactctgtgtcagagtttgtgaagtgaatcccataatcatgaagaaaggaaacttgggacttggtctcaaactctcagttcctgtgtctgatcaatctaattttgccaggttcctgactgaaagtgggacttttaaggatggggatctgcttgtcaacagggatggagttcgaattgtctctcagaatgatgtcgaagctccacctccaatcaagcctacagacaaccagttaactttggcagacatagatgtaatcaaagttgttg

SEQ ID NO: 33498 - DNA, 285 bp, Glycine max
  Clone ID: 701106706H1
aaaatataacaaataatttgtactttcatccaaacaaaatcccgttgtatttttctcagatggctcgaacgaagcaaacggcccgcaagtccaccggcggcaaggcgccgcggaagcagctggcgactaaggcggctcgcaagtcggctccggcgaccggcggcgtgaagaagccgcacagattcaggccgggaaccgtggcgctgcgcgagatccggaagtatcagaagagcacggagctactcatccggaagcttccgttccagcgcttggtccgcgagatcg

SEQ ID NO: 33499 - DNA, 285 bp, Glycine max; identical to SEQ ID NO: 30903
  Clone ID: 701106707H1

SEQ ID NO: 33500 - DNA, 285 bp, Glycine max
  Clone ID: 701106708H1
ttgacatattaactcgtgggatggaatctatcatctgttcttcactgattgagtgcactggtcaagctaagaagtcaacagatgaagagcctccaggataaaggatgctgcaggagttagtatttatgttatgctcactctggttgcattcagattaagttgcccctgttttgaattctgtttgcttttcacctattctttgatctgcaattctcggaattgtcgtcggttgaagttaaagtgctagtctttcttagcatccacattttcactgagtggtaatta

SEQ ID NO: 33501 - DNA, 286 bp, Glycine max
  unsure (1)..(286): unsure at all n locations; Clone ID: 701106709H1
ctcatcttcctctttttctcaaccaaaaggggttcaattctagctagttctattacatcgtccgcnaccatgaacatggcgatcgtgcttctgttcatggttttcgcagtttcatcagctttagacatgtcaataatatcacatgacaacgctcatgcggatagggccacgaggcgcaccgacgacgaggtgatgtcaatgttcgaggagtggctggtgaaacacgacaaggtgtacaacgcgctcggtgagaaggagaagaggtttcaaatcttcaagaacaatc

SEQ ID NO: 33502 - DNA, 284 bp, Glycine max
  Clone ID: 701106710H1
cttcagttttgatctatgccgaagaaacgcaatgcttcaaaacaagggcctcaaagccccaacctttctcaaaactggcaccactattgtcggtttagttttccaggatggtgtcattcttggggctgatactagggcaactgaaggacctatagtggctgataaaaactgtgagaaaattcattatatggcacccaacatatattgctgtggagcaggcacagctgctgatacagaggctgtaacagacatggttagctcacagctgcaactacatcgctacc

SEQ ID NO: 33503 - DNA, 283 bp, Glycine max
  Clone ID: 701106711H1
gattatcctaagtctttgggaatagtgctgcaatggcttcaagtcaggaggaggtgacccttttgggagctactggaagcccatttgtgtgcagggttcatattgccctcaagttgaagggagttgaatacaaatatgtcgaagaaaatttgaggaacaagagtgaactgcttctcaaatccaacccagttcacaagaaggttccagtgtttattcacaatgagaagcccatagcagagtctcttgtgattgttgaatacattgatgagacatggaagaacaa

SEQ ID NO: 33504 - DNA, 282 bp, Glycine max
  unsure (1)..(282): unsure at all n locations; Clone ID: 701106712H1
attgctcttatatcaggcacacntgaacaaaagcgtgctgctgaaaacttgatccaggcttttataatggcaacctgaattattgaaattctttcccggggtattgaaggtgaaaagtttaattcttgaagtatgttcttgttcctccttattctgttaggttggtcctggagagacaatgttctctagtgttnttcagcttgacacctgcttcttccacaacagnggctngnaggaccgtgcctgaggatccatgctggttgttnatgtagaaantatagt

SEQ ID NO: 33505 - DNA, 282 bp, Glycine max
  Clone ID: 701106713H1
acagcatcggcggcgacagtcactctccgacaacaacacttccgcggcgaaaaatgtctctggtggcgaacgaggatttccagcacattctgcgtgtgctgaacaccaacgtggatgggaagcagaagataatgttcgctatgacctccatcaagggtattggaaggagattcgccaacatcgcttgcaagaaggccgatgttgacatgaacaaaagggctggtgagttgagtgctgcagagttggatagtgtgatgactgtggtggcgaaccctaggcatt

SEQ ID NO: 33506 - DNA, 284 bp, Glycine max
  Clone ID: 701106714H1
ggctattagagttggccggagaattgtggatatcccaccggaggctctagcgttcaatgctaacaccggcgccggcaccgtttttgattcgggtacggtattcacccgactggttgaaccggcctacaacgccgtccgaaatgagttccggcgacgaattgccgttcagaagaaactcactgtgacaagcctaggagggtttgacacatgctacacagtcccaatagttgcaccaacaataacattcatgttctccggcatgaatgtgacactcccaccggaca

SEQ ID NO: 33507 - DNA, 285 bp, Glycine max
  unsure (1)..(285): unsure at all n locations; Clone ID: 701106715H1
gaagaaccaccactaccttatccatttccactcctcaccaagccncaccatggcctcaaccaacgccctctcttcagcttccattctacgctctcccaaccgccagtctctgaccagaagagcgaaccacaacggaagagtaaattaccgtcaaccgaatagccgtttctccgtcaaagcctccgccaaagagattgcctttgaccagcattcccgctctgctatgcaggccggcattgacaagctcgccgacgccgtcgggctcactcttgggcccagggggag

SEQ ID NO: 33508 - DNA, 285 bp, Glycine max
  unsure (1)..(285): unsure at all n locations; Clone ID: 701106717H1
ttgtctttgtatcacgaaaactatacgattcgattccttgttttcaatggacaccttcttcaannnnnnnnnnnnnnnnnnnnngagaagccgctggagttacgatactctcaagaatttccgtgagatctctccgctggttcagaatcacatcaaacgggtttattttacgttatgttgcgctgtggtggctgctgctgttggagcttttcttcatgttctgtggaacattgggggttttctcaccacgttggcttccattggaagcatggtttggttgctatc

SEQ ID NO: 33509 - DNA, 283 bp, Glycine max
  Clone ID: 701106718H1
ctttgctgtatgtatctctattctctatcattatcatgtgactgatagattcttcttcacactgcaaacactgagtcattactcaaaaggactaaaaacttggttctatggagaaaggagcaatggtttttccttttccaatagcagtttcttgtctttttattatcgtccatatttttgctaattctgtttcaggtagcctagttttcaacttctatgcagcttcatgccccacagcagaactcattgtgagaaacacagtcagttcatcttcttcttctga

SEQ ID NO: 33510 - DNA, 282 bp, Glycine max
  Clone ID: 701106719H1
ctcgaagtccatcccaaggacacatttgtgttcagtatagatggcaccgtactctctaatattccatactacaaaaaacatggatatggggtggagaaatttaactcgaccttgtatgatgaatgggttaacaagggcaatgcaccggcactgcccgagactcttaagaattacaacaagctggtgtctcttggcttcaagattatattcttgtcaggaagaacactggacaaacaggccgtaacagaagcaaacttaaagaaggctggctaccacacatgg

SEQ ID NO: 33511 - DNA, 138 bp, Glycine max
  Clone ID: 701106720H1
gcaaaagaagaagcaaacattttattctcgtgagtgtgtgtgcgacagtaacatcgttttctcgtttgtgttttttccgttaaaatcataaaaaaataatggaaaaccacatctacgcctcctcttacagcccttcca

SEQ ID NO: 33512 - DNA, 281 bp, Glycine max
  Clone ID: 701106721H1
ttggcttctgcctttccttttctagggagctcattgacaatggctgaaacaaagtgggtcatgaaggacaaaagatggtctctccatggaatgacagctctagtcacaggaggcacccgaggcatagggcatgccattgttgaagagttagctgagtttggagcaactgttcatatatgtgcacgtaatcaagatgatatagataaatgtttagaagagtggaaaagcaagggacttaatgtgactggttcagtatgtgatttactatgttctgaccaacg

SEQ ID NO: 33513 - DNA, 284 bp, Glycine max
  Clone ID: 701106722H1
gtacgaggcaatgaacaacgctggttttcttgacaccaatcttattataatcttaaacgacaatgaacaagtttcccttcccactgcaaccattgatggaccagctccaccggttggagctcttagtagagccctcgccaggctaaatactagttctaagttccatcaactacgcgacctcgcaaagggaatcacgaagcaaattggaagccgagcatatgaatttacatctaaattggactcctaccttagagggatggtaggtggtgctggtgcatgtttat

SEQ ID NO: 33514 - DNA, 283 bp, Glycine max
  Clone ID: 701106723H1
agccattctcttcagtttaaagttacatagtttttcattgttttacttaatctacaatggctgcttcaacaatggctctctcttcatcatcattggctggccaagctatcaagcttgccccctccacccctgagcttggtgttggaagggttagcatgaggaaaacagcctccaaaactgtttcctcaggaagcccatggtacggcccagaccgtgtcaagtacttgggcccattctcaggtgagcccccatcctatctcactggtgaattcccaggtgacta

SEQ ID NO: 33515 - DNA, 290 bp, Glycine max
  unsure (1)..(290): unsure at all n locations; Clone ID: 701106724H1
ctctcttnttcttctctctccgcgggttgagttgaacttcaagaacctcataaaaccntttctctctgctctctctcncagatctgttcaaatccgaaacccatttccgntctaatttccangacgcaaaccctaancccgctctctctgtatganactagatttcccctcctcaaaggcgtagtnttgtgtcgatttgtaaattcattcggtagtttaggttagaattnttgtgtcaagttnttagggttttgaatcggtgagatgaatcacaacaacagcaacaatag

SEQ ID NO: 33516 - DNA, 281 bp, Glycine max
  unsure (1)..(281): unsure at all n locations; Clone ID: 701106726H1
gtttgataaaatattctacacataaatctagcncccaattcctaatcacctggttaatttcttcacatagagctatcaagatccaacgttaacatgaagaatgttttagtaaggtcagctgcgcgagctctgcttggcggcggtgggcggagtactaccgccagctctcaacggcggcgatcgtggaacagagacaccagcacggtggcggcgcgtttggaagcttccacttgcggaggatgtccactcttccagaggtaaaggatcagcattcagaggag

SEQ ID NO: 33517 - DNA, 280 bp, Glycine max
  Clone ID: 701106727H1
ctttggtcccgattctggcatctttcttagagatccctaactcacttgtctcttctcccacccttaaatccttccctctcctctcccgcaatcaattcatctctcacaacacaaaaattgttaaattcccaatccaatagtgttattagtccataaaaggaaaaaataaattaaaaatgaatgtgttggattctaatgtggaggctctagccttcaactacttgagcttcggcttgctcacagccctcaacaacttgtggacctggctcgtctcttaacc

SEQ ID NO: 33518 - DNA, 281 bp, Glycine max
  Clone ID: 701106728H1
ctctcttctgcggcggatccattcgtttcatacgaatttgaagtctcttacatcactgcatcccctcttggagttcctcagcaggtcattgctatcaacaacaagttcccaggtcctattatcaatgttactacaaacaacaacgttgctgtcaatgttcggaacaagttggatgagagcctcctcattcattggtctgggattcagcaaaggaggagttcgtggcaagatggtgttcttggcacaaactgtcctattcctgcaaagtggaactggactta

SEQ ID NO: 33519 - DNA, 281 bp, Glycine max
  Clone ID: 701106729H1
gaagatccagcacagtgaggtggaagtgaagggactgaagcttcacgtggcagagattggaagtggctccaaaacagtggtattcttgcatggattcccagagatctggtacacatggaggcaccaaatgatttctgtggcaaacgctggttatagggctattgcctttgatttcagaggctatggactttctcagcaaccagcagagcctgaaaaggaaaccatgtttgatctggttcatgaaattgtaggccttttggatgctttgaacatctccaagg

SEQ ID NO: 33520 - DNA, 282 bp, Glycine max
  Clone ID: 701106730H1
aaaaagaaaaaaatgtcatccactgctagcttgggttatggggctccaacctgcttcaacaacgttcatcacacaaagaagcagcaagcaatgaggaacagtttcttgagcaataagcacaacagtgtgagagtgatgaagggttggagaggaagacatggtaacactaacaacacatccaaaagggtaggaattgtgcagtgtagagggttaggggacttcataggtggagacttgataaagtttgatcttggacgttggctttcagatgttgaagagcac

SEQ ID NO: 33521 - DNA, 282 bp, Glycine max
  Clone ID: 701106731H1
gttttccacataggagacatgccttatgcaaatggatacatctcacaatgggaccaattcacagctccaagtgcaagaaatttcctcaacagtaccatacatgattgcaagtggaaatcatgaacgtgactggccaaacacaggatcattctatgatactccagattcaggtggagaatgtggagtccctgcagaaaccatgtattattttcctgctgagaatagagccaaattctggtataaagcagattatggcctgtttcgtttctgcatagcagatag

SEQ ID NO: 33522 - DNA, 276 bp, Glycine max
  unsure (1)..(276): unsure at all n locations; Clone ID: 701106733H1
ctctgtatagcttcattgctagattatttgcttgctctgcgaaaccataaccatgaggcaaagcagtaacgcagagactcgtttctctggcaccatttcatccccatccctcaaaaaatttcttcccagatcactctcttccaaacaacaacccataaaaaccctaacatccgaaattcagatgcagagaacactcctcccaccgatcccaacatcctgatcaaccatgaacaatcgctgttgccttccacacaacatacgacnnacgngnttnng

SEQ ID NO: 33523 - DNA, 282 bp, Glycine max
  Clone ID: 701106734H1
cgttgttgttctaaagcactcatccacacattctccgtcgccacgacaacaatggctccaaagaaaggtgcgaaaggtggagttgtagcagcaaagaagaaggttcaggagaaggtaacgaaccctttgttcgagaagcgtccgaagcagttcgggatcggaggcgcgctgccgccgaagcgggacctgacgcgcttcgtgaagtggccgaagaacgtccaaatccaacgcaagaagcgcatcctcaagcagaggctcaaggtccctccggctctcaaccag

SEQ ID NO: 33524 - DNA, 281 bp, Glycine max
  unsure (1)..(281): unsure at all n locations; Clone ID: 701106735H1
aaacatntctcattcacaactttncccactcttcntgcncagctcntcgaattcccantccaaanccctagtnccttntgagancctagnagtgaatcagtgntggcacctaaggcagagaagaagcnagcggagaagnagccggtggagnagntgnagtcgacggngggagantaggctccggcggtgaagaagccgaagggcggtnnagaagcttccgaagganggncgagncggcggagaangggggaagnagagnaanaggaanaagaanagcgtgg

SEQ ID NO: 33525 - DNA, 280 bp, Glycine max
  unsure (1)..(280): unsure at all n locations; Clone ID: 701106736H1
ctttcacaccaattttcctatctcctcttcctccttctaattctcttatcttctctcccaaacatttcccaagccacctnctcgtgccccaaatcgcatgttagctttggttcaaaaacaaccacttgtcctaaaataccacaaaggtccccttcttaagggcaacattacgctccatttgctatggtacggtacattcacccccacgcaacgctctatagtcatcgacttcctcgaatccctaacctccacgtcatcacctgantccccttcagtttcc

SEQ ID NO: 33526 - DNA, 279 bp, Glycine max
  unsure (1)..(279): unsure at all n locations; Clone ID: 701106737H1
cgaggttattaatgctggacggtttgatcaaagaacaacacatgaagagaggcgtttgactttggagacattattacatgatgnagaaaggtatcaagaaactgtccatgatgttccctcactgcaggaagtncnatcgcatgattgccaggagtaaagaggaaattgaactgtttgatcaaatggatgatgaacttgattggattgaggagatgacacgttatgatcatgtgcctaagtggcttcgagccaatacaagagaagtaaatgctgctattg

SEQ ID NO: 33527 - DNA, 281 bp, Glycine max
  Clone ID: 701106738H1
ccggaattcgcgagcgaggtgcaaagcgagcccaagtggaacgagtgggagaaaagcctcgaatttccatttaattacgtggatgccactctcaacaacagcttcatggcccaattccagggcaataatcagatgttgtcgccgctgcaggacatgttcatgtactggcccaacaagtccttttgagcacatcatgatggttttaaattacgatccgcaattgctcttaagattttctgactcaccatgcgaccacaatcgtaatttaaaaccatgtcaca

SEQ ID NO: 33528 - DNA, 279 bp, Glycine max
  Clone ID: 701106739H1
gccctaattcaagaagctggcattcggattttgtgattgggagagaaaccgacccagttgtgctactgcgaatgccgctgtcccgtgcaattcgaaggttctgaagaacaagggtttagaattagggtcttaaaccaactcaacctactttgtgggtaaaattagggattcaggtctaagttgaaaaattagggttttggcaagtcccctaaatgtcgacgggcaaacccagagacggtgagtttcagatggtcccggcgccgggaacctcaaagccgc

SEQ ID NO: 33529 - DNA, 251 bp, Glycine max
  unsure (1)..(251): unsure at all n locations; Clone ID: 701106740H1
ggtgtgcctcctggtacaagacctgaaacccgtaggcgacngtaaagggtcaggagtgacatttgtacaaactggcatatttaggatggagagtacttgtggtacatgtaagggaactggcaaaattgtatcgaatttctgcaagtcatgcaaaggtacaaaggttatcaaaggaacgaaatctgtcaaattggatattatggctgggattgacaacaatgaaactataaaggtttatagaagtggtggtg

SEQ ID NO: 33530 - DNA, 278 bp, Glycine max
  unsure (1)..(278): unsure at all n locations; Clone ID: 701106742H1
ggttttcactgatcaagcccttcctgcggatcttatcaagagaggaatggcagtggaggatccatcctctccctatggccttcgccttgtgatagatgactacccttatgctgttgatggactagagatatggagtgctatccagacatgggttaaggactacgtctccttgtactatgccacggatgatgcagttaagaaagactcagaactccaagcttggtggaaggaagctgttgagaanggtcacggtgacttgaaagacaagccatggtggc

SEQ ID NO: 33531 - DNA, 283 bp, Glycine max
  unsure (1)..(283): unsure at all n locations; Clone ID: 701106743H1
cactcccccactcatctcctgcaacaacaaacaancaaacaccaccaacaacaaccacttcctcttctttttcaccctcgaatccacgcttcctttacaccgcgtttggatctccgttaaacaaaaccattaaaatgtagcgagagaaaaacaaaaccgcaaaaganaatcagttaatttattaattttatttttttatgggctttccacgaccatctccagcncggaaatagcgttccagcgtttcacggaggagcaagagttgaccgagaacagagacatg

SEQ ID NO: 33532 - DNA, 280 bp, Glycine max
  Clone ID: 701106744H1
gaagagcggaagagaaaatgacgaccaggttcaagaagaacaggaagaagagaggtcacgtcagcgccggacacggccgtatcggaaagcaccgcaagcatcccggaggtcgcggtaacgccggtggcatgcatcaccaccgtatcctcttcgacaagtaccatcctggtttcttcgggaaggtaggcatgcgctacttccacaaacttcgcaacaaattctacaatccgatcatcaacatcgacaagctgtggtccctcctcccccaggaggccaaaga

SEQ ID NO: 33533 - DNA, 280 bp, Glycine max
  unsure (1)..(280): unsure at all n locations; Clone ID: 701106746H1
caaaagttacaaaaagaatcgcattttctttgtcaatgatacatatcttccgagtgctacaccaggtccactagttaagtacagaacaagaagaattggaggttttaagaggagatggaacanggaagcgcagagactttgacagaatctatgattatgatatctataatgatttgggcaatccagatggtggtgatcctcgcccaatcattggaggctctagcaactatccttaccctcgcagggttagaaccggtagagaaaagaccaggaaagatcc

SEQ ID NO: 33534 - DNA, 277 bp, Glycine max
  Clone ID: 701106747H1
gcaatacatagcatctaatggtggcgttgttgcagctgaagaacttgctccatatcttgatatagattccacagagggaattaaggatgatgaatcctatattttacctgtgctcttacgatttgatggtcaacctgatgttgatgaggagggaaatattctgtataggtttccatctttgcagaggacagcttctcaaaagagtaagagaaaagaatatgttggaaggagatgggcagattgggttggaattgagaagtttttcaaggagaaaaaa

SEQ ID NO: 33535 - DNA, 280 bp, Glycine max
  unsure (1)..(280): unsure at all n locations; Clone ID: 701106748H1
gcgctgaaaaatgtccgaaaacggagaagagaaattactcgctgtggcgcggcacatagccaaaacgctgggccacaacaacaccatgtctgatgacatattccaaatactatcgaactncgatggaagattctcgagagagaatctttctgagaagggcgcagatgtggatcccagaggctgcgccgcactggatcattccctcaaatccctagaccgccggatctctccctacgtctcctccgaccgcacaatctgggccgacgccgccgattctgct

SEQ ID NO: 33536 - DNA, 281 bp, Glycine max
  unsure (1)..(281): unsure at all n locations; Clone ID: 701106749H1
caagtagttgagaactaagaagaaggaaatggcttcctcaatgatctcctccccagctgttaccaccgtcaaccgtgccggtgccggcatggttgctccattcaccggcctcaaatccatggctggcttccccacgaggaagaccaacaatgacattacctccattgctagcaacggtggaagagtacaatgcatgcanntgtggccaccaattggcaagaagaagttcgagactctttcctacttgccagacctcgatgatgcccaattggcaaaggaag

SEQ ID NO: 33537 - DNA, 276 bp, Glycine max
  unsure (1)..(276): unsure at all n locations; Clone ID: 701106751H1
gtgggcataaaattttcaaagtcgaagcgagaacttgccatttcgagggttttagggttagggttttctcaaattgcaagaacatgggtttcaacattcaaccctatgggattcagtccatgctcaaggaaggccataagcacctttctggcctcgatgaagcggttctcaagaacatcgacgcctgcaaacaactttccactatcactcgaactnccctcggtcccaatgggatgaataagatggttataaatcacttggacaagctttttgtca

SEQ ID NO: 33538 - DNA, 280 bp, Glycine max
  unsure (1)..(280): unsure at all n locations; Clone ID: 701106752H1
gcgctgctcaaggtacacgcacccacacccacacccacattctgcctctgctcaactgcaatgggcgctgcagtgtaagtgtggcacccaccactctggcgtttcccaattcctactccatttctgcggaaagaggaagaagagaatgnanttngagggtgaaatgcagcagcagcagtgcngagattgagaaaggggctgcgagttttgggcccgggagccnagttgagagcaaccaacnattctngtggttngagcgatggaaccctggngaaggcag

SEQ ID NO: 33539 - DNA, 278 bp, Glycine max
  unsure (1)..(278): unsure at all n locations; Clone ID: 701106753H1
atcaaaataatcaaatcacctattccggcaacctcaacactacctacccctaaatcaaatgtccttttctatctcttcttcgattctcctcacaccccaaacatcttaaccttccagttcaacatcttacnccaaccatgcttgtgtttcgattgaagcctggcagttacaaggaaacagcgaccctcgcactttcccacttcaggcacttggtcttcaacttcacacgcgccggtgactctgggtgcccgccacgcgctggcttcggggttcggaga

SEQ ID NO: 33540 - DNA, 280 bp, Glycine max
  Clone ID: 701106754H1
atggctgcctcactacaagctgcagctaccttcatgcaacccaccaaggttggcatagcctctcgcaacctcaaatctacacaatgcatttctaaggcttttggcttggaacctgctgcagctaaactcacttgctcccttcagcctgatctcaaagaatttgctcaaaaatgtgtcgacgctaccaaaattgcaggattcgcccttgccacctctgctctcgttgtttctggagcaagtgcagaaggtgttccaaaaaggctaaccttcgacgaaatcc

SEQ ID NO: 33541 - DNA, 280 bp, Glycine max
  unsure (1)..(280): unsure at all n locations; Clone ID: 701106756H1
ctggttcctgaatttcccttgtggttaggtttcctcgatggagtcagaggatgatatgcacgacgccaacnacattgagtccctcgacgacgatttctacagtggcgagaccgangacgctcctttggnnnnnnnnnnnnnnnnnnnnnnnnnnnnnnnnttcgacgacgccgagaggatcgagtctcgccgccctgagcaaaattttaccatattgaaggaatccgatatccgactaagacaggaagatgacgtcgctagagtagcaacggttctttcc

SEQ ID NO: 33542 - DNA, 276 bp, Glycine max
  Clone ID: 701106757H1
gtttacttatgcttaaaggccagcaaatagttcatatagtatttgtgatgctacataattaggaagttcaattaagaatcatataccaacagagaattatgatttttgttcatgttttattgctttgtgaaatatagtatatggtagcgaagggggttatgggtgtacagtaataagctgtgcattttttttcccttacaatcatactcttgtttttgttcttggtctttcaattgggtattggtaatgtagagagtaattggttgtagaaaaaaa

SEQ ID NO: 33543 - DNA, 278 bp, Glycine max
  unsure (1)..(278): unsure at all n locations; Clone ID: 701106758H1
gggactttctcagtgttgattctcagagngnnaactgcagtgctgaaagtaaagaggctgttttgggagcaagaactaatgttgagggccaatggattgaggtcaaaagtaaacagcacacctctttctctgccaaaaaagagtacacatgaacctagaaagtcatttgacaattctagcagcaatacagacattcaagcacagaagagtgcaccttctcccaataacttgcagaagacagcgaaaganagagataattcagatcaagtttctgaagt

SEQ ID NO: 33544 - DNA, 276 bp, Glycine max
  Clone ID: 701106759H1
cgcaagcaaaaagaaagaatcccaggcgaggagaaagatggaggggaaggagcaggatgtgtcgttgggagcgaacaagttccccgagagacagccaattgggacggcggcgcagagccaagacgacggcaaggactaccaggagccggcgccggcgccgctggttgacccgacggagtttacgtcatggtcgttttacagagcagggatagcagagtttgtggccacttttctgtttctctacatcactgtcttaaccgttatgggagtcgccgg

SEQ ID NO: 33545 - DNA, 276 bp, Glycine max
  unsure (1)..(276): unsure at all n locations; Clone ID: 701106760H1
cagctatcttcatctgcttctgtcacatcaagcattctcataccgcttctcagtttctcattttcccaatcgcagctaaaaaatcctttgagccctttaanctattctcaataagcagaaattagggaacgcaacaatggctcaagcggttgaagaatggtataagcagatgcctgtcatcacgcgctcttatctcaccgctgctgttgtcaccaccatcggatgttcccttgatataatttctccgtatcatttgtacttgaaccctagattggt

SEQ ID NO: 33546 - DNA, 277 bp, Glycine max
  Clone ID: 701106761H1
cgacaggtttctgagtcttttcttcttcgttaccctcttcacatgccttctctctgctacttcccacgatgaccatattttcctaccgagtcaactccatgacgatgactcagtgagttgcactgcaaccgacccaagccttaactacaagccggtgatcggaatcctgacccaccccggcgacggtgcctctggccggctcagcaacgccaccggggtttcttacatcgccgcctcctacgttaaattcgtggagtccggtggtgctagagttatt

SEQ ID NO: 33547 - DNA, 276 bp, Glycine max
  unsure (1)..(276): unsure at all n locations; Clone ID: 701106762H1
tcaaaatctagtttcatacttttnttcttcttcttgnantggctctccaggctgcttctcttgttcctgcttctttctcggttcttaaagagggaaagagtggtgtgtctctcaaggactccaccttgttcggtctttcattttcagaacctatcaaagctaacttcagctcttctgcattgaggtgcaagagggaattcgaacaaaagctctgtgctgtgagggccgaaacagtggctacagcctctccagcagttaccaagtctacaccagaag

SEQ ID NO: 33548 - DNA, 201 bp, Glycine max
  Clone ID: 701106763H1
cgcaattcacaaatcacaaatcacaaatcacaaatcacaaaggtcttttcatttctgctgattatcctcttcagccgccatggaatcggaggctgtcttgaacctcttcgattcttgctggtttgaggttaacattttgaagacaaattcaagtcctcacatatcaattacaagttataacgaaagtttagattatgagat

SEQ ID NO: 33549 - DNA, 274 bp, Glycine max
  unsure (1)..(274): unsure at all n locations; Clone ID: 701106764H1
gcaatctgtatcttctaccacttatgtaatccatccctgtcaaacaaaccatggcttccgaaacaaaccagtccaagaatgtgtgtgtaattggagctggaccctcggggctattggcagcgagggagctgagaaaagaaggtcacaaggtggtnnngcnngagcagaaccatgatattggaggtcaatggctatatgacccaaatgtacaagaggaggatcccttaggtaagagaccttggctaaaggtgcatagcagcatctatgagtctta

SEQ ID NO: 33550 - DNA, 277 bp, Glycine max
  unsure (1)..(277): unsure at all n locations; Clone ID: 701106765H1
ctcttcggagctcaatttngccgtcaatggcggcctccgaggctctcaacggcacaaccaccacctccatcaggcacgcgttcggcaacgtcctcgcgttcttcatccttctcatgatcggcgttctcgccttctcgatccgtctcttctccntataaagtatgagagtgttattcacgagtttgatcctatttcaactatagagtcactcagtttttgacaaagaatgggatatatgatttctggaactggtttgtcgatcgaacttggtatcccc

SEQ ID NO: 33551 - DNA, 246 bp, Glycine max
  Clone ID: 701106766H1
gtgtccttgaagcttcagaagcggcttcgccgctagcgtcttaaagtgtggcagaggcaaggtctggctcgatccaaatgaagtcaatgaaatctccatggccaattctcgacaaaacataagaaagttggttaaggatgggtttattatcaggaagccaactaagattcactctcgctctcgtgctcgtcgaatgaaggaggccaagaggaagggacgtcactctggctatggtaagcgtaaggg

SEQ ID NO: 33552 - DNA, 274 bp, Glycine max
  Clone ID: 701106767H1
atcgttagcagttttgtagattcaacctcaatttgcagagttacgttctaatatatttacacaagactgataagagaaaatgtctctgattccaagtttcttcggtggccgaaggagcagtgttttcgaccctttctccctcgatgtgtgggaccccttcaaggattttccatttcccagttctctttctgctgaaaattcagcgtttgtgagcacacgagtggattggaaggagacaccagaagcacacgtgttcaaggctgatattccaggg

SEQ ID NO: 33553 - DNA, 273 bp, Glycine max
  Clone ID: 701106768H1
ggcgcgcacatcaccggcacttgttttcattttcagttcatcttagggttcaattctcaatatcctcattccccgttccctcgcctttgcttcctagttcctactgtgacctttaattctcgtgtttcttcggagcgagcagaaggacttcagcatcggagaccgaatcgttagggtgaggggagtaaataaacagggtgaaccgactcaagcccccatgttgaacggataattagttgcaattgcaaaagattgtgattgttgggattgcag

SEQ ID NO: 33554 - DNA, 273 bp, Glycine max
  unsure (1)..(273): unsure at all n locations; Clone ID: 701106769H1
tctggatatggttganaaactcccacagcagggtgtgtatttganacaaaggtagttacaggattgttctgaactcctgacccaaaaatgtgagttgaaaagggcaaaggaattgttggggctaatgctaaggagggggtttcagccccactatgctacctcaaatgaattgttggtttgtctttgtaaggcagggatggttgatgatgctgctgtggcactgtttgacttggtggagatggggttccagccaggacttgagacttgggaagt

SEQ ID NO: 33555 - DNA, 277 bp, Glycine max
  Clone ID: 701106770H1
ctacactaggctcacgattcatccaaactgaaatggcggcagtagtatcagcatcttctcatctattgtttgttcttcgttcacaaccattatcatcatcaccctcttttatttctcttctcaaacctcttcttgtttcttccccctatgctgtatctacaccccttcggcatatccaagttccaccgcttcgaaaacctctcttctctacttcctcttccccctcccttaccgtttctcaagatagtgaagaattggaagaaaaagagattgcaga

SEQ ID NO: 33556 - DNA, 276 bp, Glycine max
  Clone ID: 701106771H1
cgacgaactaaattttcaaattttgtttccgatctctgaagaagagagtgatggcggaaccttggagaaacatcgacgtggagaagctgatctcgtacagcgacgacctcgtcaaggtgttgtcggagggtccgcgcgacctcaacaacctctctcactctctccaacaaacacgcgccctttcttcctcctgcgactccgacctcaatgaagctcgctccttcctccatgactatcagaacaaagtagatgcatgcaagcagaaaatagaggaag

SEQ ID NO: 33557 - DNA, 210 bp, Glycine max
  Clone ID: 701106772H1
cttttgctttaccaaattccaatttccaattcaaaaccctaactcccgttcgaagcaccaaatcgtgatggcaccaaaggcagagaagaagccagcagagaagaagcccgcggaggagaagaaatcgacggtgggagacaaggctccggcggagaagaagccaaaggccggaaagaagcttccgaaggagggaggcgccggcggagaagg

SEQ ID NO: 33558 - DNA, 275 bp, Glycine max
  unsure (1)..(275): unsure at all n locations; Clone ID: 701106773H1
gccgcagcttgaaacagagcagagcgaccttgancagctatggctgtcggaaagaataagaggatttccaagggaaagnagggtggcaagaagaaagccgctgatccctttgccaagaaagactggtacgatatcaaggccccttccctcttccaggtcaagaatattggcaaaaccctcgtctctcgtacccagggaaccaagattgcatccgaaggactcaaacatcgggtttttgaggtctcattggctgatctccaaggggatgaagacca

SEQ ID NO: 33559 - DNA, 274 bp, Glycine max
  unsure (1)..(274): unsure at all n locations; Clone ID: 701106774H1
aatcaacatggcttcatcactcgnnaccatactcgtcgccttgccccaaaccccgcaatgccgtagcaccttccgatccgatccacccaaactatccctaaccctaaaacccaaggccactgttacatgtaaggccaccctgtccactaccctggagactagcatcnnnnnnnnnnnnnnnnnagatgaccaaaaacaaaagcccgtggccgaggtgtggcgcaagatccacggggaggacaactgggccgggcttctggacccgatggacccg

SEQ ID NO: 33560 - DNA, 276 bp, Glycine max
  unsure (1)..(276): unsure at all n locations; Clone ID: 701106776H1
gtttcggtgtccggtggttccagcatcagctcctccncctcctatggacgatncntccaatttcgcctcccaacaccaacagncgntcgagagnaggtgaggttcaatgtgaggtcaaaaagtccgggtcctgggtcaagaggacctaccagtcctacctcaccgcttcatcaaaggttgcatgctttgagccttgactctcccacggggagtgagtgtcatccattacctcttccacacggcatacgtncncctcctncttcngtgcttnccaac

SEQ ID NO: 33561 - DNA, 273 bp, Glycine max
  Clone ID: 701106777H1
cccaaattacccgtgagtggtctggaatcaatacattcgcacctgctacccagactaagttgcttgaactcttgggaaaacttaaacaagagaatgtgaactccttaactatacttgtgatgggaaaaggtggtgttggaaaatcttcaactgtgaactccatcattggggatagagtggtttcgattaatcctttccagtcggaagggccaagacccgtgattgtgtcgcgatcaagggctggttttacattgaacatcattgacactcctg

SEQ ID NO: 33562 - DNA, 274 bp, Glycine max
  Clone ID: 701106778H1
ttttctttcttttttttcccctctttaaaagtctggcttttggtcctttgattcccaacttcacttgtcacatatcatattatgaagctcacaggtttcctgcaagcggtgactcttgctttggtgttagccaccgtctctgcatcagatcctgatcctcttcaagacctctgtgtcgcagaccttgcttcagcggttaaagtgaatggattcacatgcaaagatgctgccaaggtaaatgcgagtgatttcttctcagacatactagccaaac

SEQ ID NO: 33563 - DNA, 271 bp, Glycine max
  unsure (1)..(271): unsure at all n locations; Clone ID: 701106779H1
gttcattggtggaaatccaagttcccgggcagaagtttgtgaacggagttccgttccccgctgtggtgtctcctccacctgcaactgcaagtgcggttcctcttacggactccgtcaaaacccagaaagctttccttgaatcattgctactccaatcgggtgctgtccttttcaggggattcccactctccaccgcttctcacttcaacgacgtcgtcgaagcattcggctacgacgagcttcctacgtgggcngcgcgctccccgcacca

SEQ ID NO: 33564 - DNA, 274 bp, Glycine max
  unsure (1)..(274): unsure at all n locations; Clone ID: 701106780H1
gggccacccgtacagacccacctccaaagagatcatttttattaccaattttccgatttcacagagaaaattctttgtgggcatctcttcaaaaatgtcaagcttccccaacacggtggcggaaggccgcaggtccggcaaggcaccggaaaaatccaccttttctcagacttgcagcctcttgagccagttcttgaaggagaaacgtgcttctgctgattccacccttggaattggtggaaaaatggnactaaagcggataccaaggtttgtt

SEQ ID NO: 33565 - DNA, 272 bp, Glycine max
  unsure (1)..(272): unsure at all n locations; Clone ID: 701106781H1
ttgtntcgngcgatccgaganaaactctgnaaacatgtnggtttaccaggacctccttacaggtgatgagcntctctctgactccttccgttacaaggnaattgagaatggaatgctgtnggaagttgagggnaagtgggttgttaaaggagcagttgatgtagacattggtgcaaacccttctgctgagggtggaggagaagatgagggagttgatgatgcagctgttaaggttgttgacattgttgacacattcagacttcaggagcaac

SEQ ID NO: 33566 - DNA, 271 bp, Glycine max
  unsure (1)..(271): unsure at all n locations; Clone ID: 701106782H1
gntagtttcangntttaatgtaggtggggctatcctgaagcaaangagcttttgaactaagtaaactgttgggtatagaggtcacaccttcgcagtttgtttgttgcatgcacctgtctctgaaacagtcgcaagtgatgccanttcacattgttgccctaaattctgntgacattccaaatgttnttcccttgcccaaacctgattgctgtgcangttttnctgggtcattctccatnnanacaattgntcaagagattngataacaatc

SEQ ID NO: 33567 - DNA, 275 bp, Glycine max
  unsure (1)..(275): unsure at all n locations; Clone ID: 701106783H1
aaagccatgggccacctccaacttctctattgttctctccgtctccctaagccttctttttggtgctacttaccaagggcacactcgaccgataccgtttctttcaccttcaacaagttcaacccagtccaaccaaacattatgctccaaaaagatgctagtatttcatcctctggggtgttacaactcaccaaagttggcagcaacggcgtgcccacctcgggatctctcggncgtggccctttacgctgccccaatccagatttgggacagcg

SEQ ID NO: 33568 - DNA, 273 bp, Glycine max
  unsure (1)..(273): unsure at all n locations; Clone ID: 701106784H1
caaagaatgatatgattgcaagggacagggtaatggacttcattaggctcttgtttgttataaattagattagaagcggcagattgatgtatagacctgagaaggtatggcattacctgattttnttcctttactgaaacaaaaatgtatcctctcttgtgctggtgaaaatgatgtaccatacatttcaggaccaatttagtataggatgatgggaaatttgctctggtaggttcttatccttcctataccattntcacaanggtttgttct

SEQ ID NO: 33569 - DNA, 276 bp, Glycine max
  unsure (1)..(276): unsure at all n locations; Clone ID: 701106785H1
cactaccctgctgcacnagagtgccangtcanacgcacaaccantttcttntctttntctctcagttctccaacttgcacncaacccantagtgnccaataanangctcaacctcgncaggatccagcacancgcactncncnncncngannaagannctnccccagtggtgcagttgaagggncgtgaggatgttagagaaagtggaggagtntancatggananggngatacaagagtttgaattatngacaagggatgcngaaagagttcagt

SEQ ID NO: 33570 - DNA, 255 bp, Glycine max
  unsure (1)..(255): unsure at all n locations; Clone ID: 701106786H1
gtgagagtcagagatggtagctatacggctttggagcccctnccttctccacttccgtttcancttcgcctggcttcctctccttctcctttggccttcccaataatccacaaattccanaacgcaggcaagtcagtgataacaatctgttcaaagaaaaatgcaaaatcaagggtggtcactctctgctctgcacctgtgcaagttgatatgcaggagcaggaggttagtgatattactttgagagagagaagt

SEQ ID NO: 33571 - DNA, 272 bp, Glycine max
  Clone ID: 701106787H1
agccacaatgcttttgatagcaaacaatgctgcccaagggattttatcctctttcttcttcaaatatgcagatacaattttgaagaagtactcatcaacagtagcaacaatcttcaccggtatagcatctgctgtactatttggacatactttaacaatgaacttcgttattggcatttctattgtgtttatctcaatgcaccaattcttttcgccactttcaaaagttaaagatgaacaaaatggtgtgctggaactgcatgatgttcatg

SEQ ID NO: 33572 - DNA, 270 bp, Glycine max
  Clone ID: 701106789H1
cgcaaaaatggcacctgcaacactgtctctgtctctcctcctcctgttctcactcagcatcgccgtaaccgttagatcgagcgactacgactacgattgtgtgtacactgcatacgttagaaccggttcggtgttgaagggcggaacggactctaagatcgggctgaagctgtacgacaagtacggctactacatctacattaaaaacctcgaagcatggggcggcttgatgggcaagggtacgactacttcgagcgcggcaacctcgaa

SEQ ID NO: 33573 - DNA, 268 bp, Glycine max
  unsure (1)..(268): unsure at all n locations; Clone ID: 701106791H1
ttccaattgccttgattttntcggaaaattcttattttccgagaaagttcgtgtttttactgttgaatcgagaattcccaaatcggggtgtctgaaattcaaagctgttgttgttgttggcncgctggggttagtctctgtggaggtttgggtgttttttgaggcagagcttattctcattttgctccaatggagatgcaggaccaaatagaaagcacnantcnaccatatttggcncagcnantaacatccatncaatgcnggaaag

SEQ ID NO: 33574 - DNA, 272 bp, Glycine max
  unsure (1)..(272): unsure at all n locations; Clone ID: 701106792H1
catttttcagtttctcagtttcttattcgttaatcgttagatctcatcttacacttcaccgggcgagtccatctcgcgccaccgtcgactcagctccggccatcgccgttggttccctcactnnnnnnnnnnnnnnnnnnnnnnnnnnnnnnnnnnnnnnnnnnnnnnnnncagcggaaatatgccttctcagaaggttgaaacgggtcatcaagacacgggtccatgatgttgcaatggatactatggtaagangtggccacggnntcatc

SEQ ID NO: 33575 - DNA, 270 bp, Glycine max
  unsure (1)..(270): unsure at all n locations; Clone ID: 701106793H1
caactctatctgcaacagccaactttctcgttcgtcgatcacaaaaatggcggcgaaacttcaaatatttacgggattgccccccgcgccatttcaatcttcctcctccactctctgcgtactcaagaagcctctcactacctccttcttcggcactgcacgagtggaagttctgaaacttcgagtgatgaggattgcgaanctgcgcgcggtggaggtgctctcggtgctcgcatgaacctctttgacaggttcgccagagttgtgaag

SEQ ID NO: 33576 - DNA, 271 bp, Glycine max
  Clone ID: 701106794H1
gagtcattgaactttgactatatttttcagagttcagattattcttctcttttgaattttgattttgggggtttaagtttctgagagaaaaaaaaaaatgataaaggtcgttctttttttgttctgctttgcctctgcactgaccctttcagtatcggagtccaaatctgcttctgtgcaacctcatgcagctgaatctttctctgttggatatattcagatgaagactgcagcgaactgttcttacctggtagttatatctacgagttgt

SEQ ID NO: 33577 - DNA, 272 bp, Glycine max
  unsure (1)..(272): unsure at all n locations; Clone ID: 701106795H1
ctctttctttctgcgtgtngttgggcacaatggagtctctgttatangtaacatcttcttctctgaaattcttagtgagagcttcatgggacacacagcagagactcccttacaatcccaacgctcccagaaagcttaagaataacattgttgcaactcccactcccactgctccaattacgcgcaagagggagcaatacatttccgatcttctcaagcgcggcactcctctccccaccatagggcatatagaagaagtacaagatgaaact

SEQ ID NO: 33578 - DNA, 162 bp, Glycine max
  unsure (1)..(162): unsure at all n locations; Clone ID: 701106796H1
aaaaagagagaggtagagaaaagcgaagagtctctctcttcctatctctctctttcaatgtcagggcacaaatcttccanctctacttcttctncttcttccttctaacctatatcagaaggaaacgcgaaaaaagatnaaaaaaaaagaggcagagggttc

SEQ ID NO: 33579 - DNA, 273 bp, Glycine max
  Clone ID: 701106801H1
caggaatcaattggttgaatctcttgggaacaggatacaaaatgagggtactgtggcatactatttgttattggacaaccgatttcgtgtttccagtggctatcttggagctgagtttcaagagaccatggattccggttttaatcaaatgcattccagtgaacttgcttcttcagttgttggaaaccgctttccaggctacatggaatatccaggagtaggatcgaggcaacagttccctgttgaaaggaaatgggcccttgggcttcagtc

SEQ ID NO: 33580 - DNA, 269 bp, Glycine max
  Clone ID: 701106802H1
gagcaaagagccaagagggtgcaattacatgagctgaaagaagtaacgcaaaagcccctttattttttatggttagaacttagaagctgattgtgacaatggatgctcgtggagaagggtcttctacttcttactacaacgttcttggtgttagctcagattctaacgtggatgagattagacgtgcttataggaagctggctatgcaatggcatcctgataagtgcacaaggtcgccttctttgctgggtgaagctaagcgcaaattc

SEQ ID NO: 33581 - DNA, 266 bp, Glycine max
  Clone ID: 701106803H1
gggttataaacttattataaccatgccttcttcgatgagtctcgaaagacgaaccattcttcgggcttttggagctgagttagtcctcactgatcccgccaaaggtatgaaaggagctgttcagaaggcagaagagattcgggataagactccaaattcttatattcttcagcaatttgaaaatcctgccaacccaaagatccattatgaaaccactggaccggagatctggaagggctctagtgggaaggttgatgctcttgtct

SEQ ID NO: 33582 - DNA, 265 bp, Glycine max
  unsure (1)..(265): unsure at all n locations; Clone ID: 701106804H1
ctgatccttatttttgttgtgtggggtggggttagtaaatggtgttattatatattttaaattgtgtaaggaaattaacagtttatttatcataataaggaataatgtaaattgttggtttcttaattttgaatttatgcatttttgcacaagttccctgctttatataacttggatgtatattttaaggtagttcaccattggtagaaatctgctcaattccaattgcnatgaacttcattcatgcttggnaaaantgataaaa

SEQ ID NO: 33583 - DNA, 266 bp, Glycine max
  Clone ID: 701106805H1
tgccatttgggttttatccctcccttgttctgcactgcggccgataacaattttctgttttgtgtgatttttttgttctttgtttacagctctgcgagatcttgagtcgccgattagaaaagatgagtaagcttcagagtgatgctttgcgtgaagccatctcaggaatcatggccgattccaaggagaagaatcgcaaatttgtggagaccatcgaactccaaatcggtttgaagaactacgatccacagaaggacaagcgtttc

SEQ ID NO: 33584 - DNA, 267 bp, Glycine max
  unsure (1)..(267): unsure at all n locations; Clone ID: 701106806H1
anagcacttagtgctattcaataattacgaaaaaccaacagcgagtgttgtttttgtttggtccaggctggaccagggaatgaatagagatgagaggctttcggttgaagagaactgagttaagcggcgaancaaancgcagaatcggcggcaganattgccaccggaagcacgtcgaaganggtgaaccaaacacaaaattccatccaccacttctcttttcaatccccaactcaaatctgtgaagaaaatctcaatttctaaatt

SEQ ID NO: 33585 - DNA, 265 bp, Glycine max
  unsure (1)..(265): unsure at all n locations; Clone ID: 701106807H1
gngcttttgattctttagggcttgctgctatagatggggttgggtggtgctgagaatggaaaagtagtggtggagtctttggatgtgtgtaaatcannnnnnnnnnnnnnnnnnnnnnnnnnnnntggggaagttgaagaggaagaagagactgggtgttggtttaggttgaggttcattgggagctgcatttcttcaagatccaaagttgatagctcagttagtggcaccagcactaattatgctgaaagtaaatcaactattg

SEQ ID NO: 33586 - DNA, 267 bp, Glycine max
  Clone ID: 701106808H1
gtttcgggggaagagatccagcagcaatggtgtacgtcaaggctcagaaatcaaaagcctacttcaagagatatcaagtcaagttcaagagaagaagagagggaaaaaccgattaccgtgccaggattcggttgattaatcaggacaagaacaaatataacactccgaaataccgatttgtggttcgctttagcaacaaggacattgttgcacaaataatatctgctagcattgccggcgatttagttcttgctacagcatattcac

SEQ ID NO: 33587 - DNA, 269 bp, Glycine max
  Clone ID: 701106810H1
ctctgaatccgccattgggctgcgatggcgaagaagcgaaagtcggtggcaacgcgccttgacgaagtggatacgaacgatgtactccactttctgcagcaccgccaactccctctctcatctctacacccacgccatgaaccaacaaaaactctcatttcaggccggtgaacgacacgctcttgagaaattgtatcaatggattctcaggcaacagcaagaaggatctagggtggccaccattgatattgttacccatttgcagaatg

SEQ ID NO: 33588 - DNA, 266 bp, Glycine max
  Clone ID: 701106812H1
taaaaaggtccaactgtttccattcttcaggcggaaaaagtccatgtcaggtttcaagcaacccatacatgatcggttttggcataatccaaattttattttctcaaattccagattttcatgaaacatggtggctctccatagttgcagcaatcatgtcttttgtctattccacaattgggctcgctcttggcattgccaaagttgcagaaacgggtactttcaagggtagtctcacaggagtaaggattggaatgtgaccgagg

SEQ ID NO: 33589 - DNA, 268 bp, Glycine max
  unsure (1)..(268): unsure at all n locations; Clone ID: 701106813H1
gggtaatcctattccctatggctggtgcgacttgcgaggtgtagacatgatgtgatgtgatgaattgaggggaatccattgaagaggcgaggcgagttaatcagaaatcagaatgcacttgagcgagaacgaagggatagaggggaaggccttcgtggtcaccggtggactgggattcgtaggatctgctctctgcttggagctcatccgaagaggtgctagagaggtgcgagcctttnacctccgcctctcttctccatggtcgcgc

SEQ ID NO: 33590 - DNA, 270 bp, Glycine max
  unsure (1)..(270): unsure at all n locations; Clone ID: 701106814H1
tgattgtgaagggaaggccgtacttggcacaaagcattctggtttgaaacactacgaatatcantgaagagagaagaaacattttagtacagaaaattaacatagtattctggttcgaaactaacaggtgctacccttttaagctatcagattccttcaatttgtaggattgtgagttgcaagcagggacctcttgaatcttgatggacgttgaattagctgctaagagtgtttctaggagtgaggaattggatgatgatggcagaatca

SEQ ID NO: 33591 - DNA, 268 bp, Glycine max
  unsure (1)..(268): unsure at all n locations; Clone ID: 701106815H1
ggttgagtccttctgtaagtgcaattccctcaccattctgtgctgctcccatttgtgtaagaactttctcttttcagttttcaacttctccctacactcgtccaaagcctctagttcctattccacgtggcaaaagtagagactctgattctgagccgcttctagaatcttccatcgtgcaagaagtttcattnnnnnnnnnnnnnnnnnnnnnattccttgacgaatttgatacgatgaagcagcggatggcgatgaatatatgagg

SEQ ID NO: 33592 - DNA, 103 bp, Glycine max
  unsure (1)..(103): unsure at all n locations; Clone ID: 701106816H1
tngtnatnccaaccaaccaaccganngantgttaaaacatggcaacagaaacattagttatacncccacgaacccaataggctgtntgtacctaaaannannt

SEQ ID NO: 33593 - DNA, 271 bp, Glycine max
  Clone ID: 701106817H1
gacgtggtggtgccaaccaattcggcagcagtgattatggtctgcaggggaagcctgtatacaagaaggaaaatggggcacccacttatggagggtctacatcctctgcacctagtgtgctgggaaacaatgcgaacatgagaccggcatcctacagtgattctgtggttactgaaaaaacatacgcattcagcatcggtgatggaccatcttcatcatcacaacgtgctggagtgcaatctgcatgggcagggaatacgggtcaagtatc

SEQ ID NO: 33594 - DNA, 266 bp, Glycine max
  Clone ID: 701106818H1
gtttggaaggattattaaggtgtgggaagagttgcaggctgagatggattaactatttgagagctgaccttaaaagaggaaacatttctgctgaagaggaaaataccattgttaagttgcacgcttcttttggtaacaggtggtctttgatagcaaatcacttaccaggaagaacagacaacgagataaaaaactactggaattctcacctcagcaggaaaatttacagtttcccaggtgcaggtgcaggtgcaagtgcagggatc

SEQ ID NO: 33595 - DNA, 264 bp, Glycine max
  unsure (1)..(264): unsure at all n locations; Clone ID: 701106819H1
aggaaggnaaaatggngttgttcttctacgcggtgttcggcggtttgggagcggttgttgcagtgacggagctgagcaagagcaacaaggaccgaatcaacacctcttccgcattcaattccttcaagaacaactacctcatcgtctattccctcatgatggctggagattggctacaaggtccatatgtctactacctttacagtacatatggatatgggaagggagacataggacaactcttcattgctggttttgggtctt

SEQ ID NO: 33596 - DNA, 267 bp, Glycine max
  unsure (1)..(267): unsure at all n locations; Clone ID: 701106820H1
gaaaagaaaggcctttccttcacgggcttacttagtgcttgtgctaaggtttgagctcgacccaaacaacggctaacgagcccctatcagagaaagccttggttaagtaaagcgcgttagtacttttaagttaaggcgcgcatcctcttgctnggagaggataaatcgttttgattcgaggcggatcccttttttgtttgcctttacgagttgagtcaaaaaaaatctctcgttatttaaggtaaggttataacactctaatgacaa

SEQ ID NO: 33597 - DNA, 54 bp, Glycine max
  unsure (1)..(54): unsure at all n locations; Clone ID: 701106821H1
gcttttaananaataaaatagcttantttttattgtnagttgtaaaanaaagcc

SEQ ID NO: 33598 - DNA, 268 bp, Glycine max
  unsure (1)..(268): unsure at all n locations; Clone ID: 701106822H1
gtacgaggcnntnnacancgcnggttttcttgacancaatccttattataanctnanncgacaatgaacaagtttcccttcccactgcaaccattgatggaccagctccaccggttggngctcttagtagagccctcgccaggctaaatactagttctaagttccatcaactacgcganntcgcaaagggaatcacgaagcaaattggaanccgagcatatgaatttacatctaaattggactcctaccttagagggatggtaggtgg

SEQ ID NO: 33599 - DNA, 265 bp, Glycine max
  Clone ID: 701106823H1
attctcttcactttaaagttacatagtttttcattgttttacttaatctacaatggctgcttcaacaatgactctctcttcatcatcattggctggccaagctatcaagcttgccccctccacccctgagcttggtgttggaagggttagcatgaggaaaacagcctccaagactgtttcctcaggaagcccatggtacggcccagaccgtgtcaagtacttgggcccattctctggtgagcccccatcctacctcactggtgaa

SEQ ID NO: 33600 - DNA, 190 bp, Glycine max
  Clone ID: 701106824H1
gggctaataggttaatcgttcaacagattttgtcaggcacctcagagtatatgtatccaatgaatcttagcaccattatggctttggattccaagaactagatcaatcaatcaagggtctctgtccatcattttattaccgcacctcttttgtgtctcacaattatatatagtctacctgttaatttgtc

SEQ ID NO: 33601 - DNA, 267 bp, Glycine max
  unsure (1)..(267): unsure at all n locations; Clone ID: 701106827H1
ctcttctctcactttgagtttgcgactctggaattccgctacaatggtcgncgccacagaaagttaaggangctganatcaccgagcaggattcacttcttctcacgaggaacctgcncngnattgccatattcaacatcagttatatcagaggactatttcctgagaagtattttaatgataagtctgtncccgcgttagagatgaagataaaaaaacttatgccagtggntgctgantctcgcnnatagnatgattggatggaga

SEQ ID NO: 33602 - DNA, 268 bp, Glycine max
  Clone ID: 701106828H1
gtttgttgtgagctataagctagtttatcgtgaggagaatatgaagttgtttgttttctttgttgctgcagtagttttggtagcatggccatgccatggcgcaggctaccaaaggttccctctccgaatgaaaactggctatggtgagcgttcttcggaggtaaaatgcgcaagttttaggcttgctgtggaagcacacaacatccgagcctttaaaaccattcctgaagagtgcgttgaaccaacaaaggactacattaatggcgaa

SEQ ID NO: 33603 - DNA, 273 bp, Glycine max
  Clone ID: 701106829H1
tacttctacttcccccctttgctctcaaaccttatcacctaatccttatcctcccaaaccagaaaaccatgtctacctccgcagcttccctcgcactcccaaccctcactctccgaacccgacaacctctatgttctccccaatgcttctcctcgtccctctccctcacacccaacaacaaacccatttccatttctgctgtttttctcaaaccaacaactctgtcgtcgtctcgcttcgttccccacgtcgtggtgtcgtcggatttggggc

SEQ ID NO: 33604 - DNA, 269 bp, Glycine max
  Clone ID: 701106830H1
gcctcgctctgtttctgtctctgtgtttgcggctgaggattccgaacgagcgaccttcttcgtttctcgcaaagtttaagtcatcatgggtaaggaaaagactcacatcaacattgtcgtcattggacatgtcgactctgggaagtcaactaccactggtcatttgatctacaagcttggaggtattgacaagcgtgtgattgagaggttcgagaaggaggctgctgagatgaacaagaggtcattcaagtatgcctgggtgcttgaca

SEQ ID NO: 33605 - DNA, 268 bp, Glycine max
  Clone ID: 701106831H1
tagcattctaagaaatgaagagccctaccattttcattctctttctactttctgccttctacacctcactcctaccttcagccaccgctcaagtcgtggttgacatggaaggtaatgatcttcaaaatggtgggaaatattatgtgttgccagtaatagagtcatcatatggtggaataagagtagccgcaactggaaaagaaagatgccctctcactgttgtacaatctgccgatccgtatgataaggggattgcaacaattatttc

SEQ ID NO: 33606 - DNA, 272 bp, Glycine max
  unsure (1)..(272): unsure at all n locations; Clone ID: 701106832H1
caacagtcaccggagcagagagagataaaagangaaaaacaaaaaagaaaagaaanaaagaaaacccttgcttgcattgcattgcactgcagcacctcctccttntgntccccaacccaccccctcatgccttgtcgccgaccagacccgacccgttgagctcnangganactttgcccaaaagggtctccgaattcgnccatggccctcgatttccgaccttagagacccttcaaggtttcgccttttcttcttcgctttttccccctttt

SEQ ID NO: 33607 - DNA, 253 bp, Glycine max
  unsure (1)..(253): unsure at all n locations; Clone ID: 701106833H1
tatatcctctccttcaccgtcgctctctccaacgatcacaacaacatcgtcatcccatggcaaacgccgcatctggtatggcagtccatgatgactgcaagttaaggtttttggagctgaagacaaagaggacacaccgtttcatagtttttaagattgaggagcagcagaagcaggtcattgtggagaagcttggtgagccagcccaaggctatgaagatttcactgccagccttcctgctgatgngtgccg

SEQ ID NO: 33608 - DNA, 267 bp, Glycine max
  Clone ID: 701106834H1
gacggatcttgacatggttgatgctgccatagtagaagggaaaacaaaagtgctttacttcgaatctgtttccaaccccacccttacggttgcgaacatacctgaactgtgccacatggcacaccggaagggagtgacggtggtggtggacaacacgttcgcgcccatggtgctttcgccagcgcgtcttggtgctgatgttgtcgttcacagtatctccaagttcatcagcggtggggccgatatcattgcaggagcggtgtgcgg

SEQ ID NO: 33609 - DNA, 230 bp, Glycine max
  unsure (1)..(230): unsure at all n locations; Clone ID: 701106835H1
ttaagaaaaaatggcagcctgcactgtctactcaacacaatctctgagcacaaattgctccatctcaaccccatcaaagacacagctgagtttcttccaccaaaagcaggtagttttctggaggaacagcnnnnnnnnnnnnnnnnnnnnnnnnnnnnnntatgtgataacatgtgcagcaggtgactcacagacagtggtgattggtcttgctgcagactcagggtgtg

SEQ ID NO: 33610 - DNA, 262 bp, Glycine max
  Clone ID: 701106836H1
ctcttcaccctgctaggagccattggaggtttaggtgaccgtggaaaatttgttgatgacgaacctactactggaggtgttattcctccaggcaaaggcttcagggaagctcttggtcttggttcaggtcctttatttggattcacgaaagcaaacgagctatttgtgggaagattggctcaattgggtttcgttttctcattgattggagaaattataaccggaaagggagcatagcccaactcaacattgagactggggt

SEQ ID NO: 33611 - DNA, 266 bp, Glycine max
  unsure (1)..(266): unsure at all n locations; Clone ID: 701106837H1
tgcggtctctcaccgcacgcactagcactgtctctcactgaaacttgttcgcacattttcacggatctaactaagttatcgccatgaatcgccaccacgatcccaatcccttcgaagaagaagaagtcaatcctttttcgaatggcactactgctcctgcatcaaagtcacgtattccaccattagcatctnantcactgggctttggtcatangcatgatgctacagttgatattcctttggatactacaaatgtaatgtcatcg

SEQ ID NO: 33612 - DNA, 265 bp, Glycine max
  Clone ID: 701106839H1
caacaactcactcactaagctaaacaatttcatcaagcctgccatggcttcctcgtgtgcttcctctgccattgcagctgttgccatctccacaccaagttcccagaagaatggatcactcttgggaagcacaaaagcttcttttcttagtgggaggaaactgaaggtgaacagttttacagcaccagttggagcacgatccagcactacagtgtgtgcagttgctgagcctgataggcctctgtggttcccaggcagcacccct

SEQ ID NO: 33613 - DNA, 213 bp, Glycine max
  Clone ID: 701106840H1
ttagagagtgagagagggataattggcgagttagggtgtcgaattgactcactgagtatttgcattgtatcgccggttttttttctttcgccggagaaaaccattgctccgatctcctctgctttttgtttccgataccatagccgtttgaaaggttcggtttttccggcgaggagtgtgggattttctggtgattccttggttgtgaattga

SEQ ID NO: 33614 - DNA, 267 bp, Glycine max
  Clone ID: 701106841H1
gtccgtttcaaatccgacagcagcccagcccggcccggcccaatcatgactcccaaactccaaaccgcggcctccgtggtggccaccgcgatgctcctccgttccctcgcccgcgactacgtcccggcggagctccaccactacctccgctgcaaactgtcgaaactcctctcctcattctcctccgaactgactctggtcatcgatgagtttcacgggctgacgccaaatcccctcttcagcgccgcgcagtctacctcaaacccc

SEQ ID NO: 33615 - DNA, 265 bp, Glycine max
  unsure (1)..(265): unsure at all n locations; Clone ID: 701106842H1
gtgtggttganagttaagaagtagcaaagatgtttccattcgggcacaagggtcaaaagataaaggggactatggtggttatgcagnngaatgtgttggctatcaacagcatcaccagtgttgacgggatcgtcggcaccggcttagacttcttaggcagtgcactcgatacagttacttttttagcctcctccatctccatccaacttattagtgctaccaaggctgatggtgggaaaggaaaagttggaaaggctacaaattt

SEQ ID NO: 33616 - DNA, 266 bp, Glycine max
  unsure (1)..(266): unsure at all n locations; Clone ID: 701106843H1
cttgttgcacttgcaaccgttgccatattaattatcttccaaaattgtaatcacaattcataaaaacaagcaagcntcgaaggacccagaaggatctcaacaacaaagaagcaaacttttcatcaattttggcatcaagaagagaagggttgtgtagtggaattggtttttggcaaaaggatatttttcgtaggaattgaaaacaagtaccaggaatttatngcaactcaagcttccgttagtgttttagaaggtggtttttggtc

SEQ ID NO: 33617 - DNA, 265 bp, Glycine max
  Clone ID: 701106844H1
gactagacagtaataataaggactctgcatggcaaaaggggagatttggtgaaaatacaataattggtaacatcgacacaggtgtttggcctgaatccgagagcttcagtgataatggatttggctccgtcccatcaaaatggcgagggggtaacgtttgtcaaattaacaaactccctggctccaagagaaatccatgcaacaggaagctgattggagcaagattctttaacaaagctttcgaggcagccaatgggcaacttga

SEQ ID NO: 33618 - DNA, 269 bp, Glycine max
  unsure (1)..(269): unsure at all n locations; Clone ID: 701106845H1
cacacaaaaaatttctagagcgagaanagtgagaggagagagaaagtagctgatcctccatggcctccaccaaggaacgcgaaaactttgtctacaccgccaagctcnccgaacaagccgaacgctatgaagaaatggtggaagcaatgaagaatgtggcgaactgaacgtggaattgacggtcgaggagcggaaccttctgtcggtagggtacaagaacgtggtgggtgctcgtagggcttcgtggaggattctatcgtcgattgaac

SEQ ID NO: 33619 - DNA, 267 bp, Glycine max
  unsure (1)..(267): unsure at all n locations; Clone ID: 701106847H1
ggcttcctcagttacttcctcttttcgcatcagcaatttgaagtcggtttttgttggtgagactaataaactcanagtntcangtntncctngnncccatgttggtttcaatagananactgtagaatgtnaggnatcacgaattgggaagcnaccaattcctgtnccatccaacgtcacagtcaaattggnaggacaggatatacaagtgaaaggtcctttgggagaacttgcattaacttatcctcgagaagtgttggttgagag

SEQ ID NO: 33620 - DNA, 267 bp, Glycine max
  unsure (1)..(267): unsure at all n locations; Clone ID: 701106849H1
accaaataaacacaaacatggacgcatcaaaactcaatcaattgaagcatttcatcgaacagtgcaagtccaacccttccctcctcnctgatccttcactctccttcttccgcnactatcttcaaagtctcggcgcgaaacttcctgagtctgcttattccgaatcgacgggcgtggagngggatgaggacatagaggntcttacggaggagcacgagaaggtagaagnagangagaagcagaggacgatgtnattattgatccgtg

SEQ ID NO: 33621 - DNA, 265 bp, Glycine max
  unsure (1)..(265): unsure at all n locations; Clone ID: 701106850H1
aaccctantcccttcagattcgggccaagatggcatcacttcatgctantgtgacatcagttgtttgcaagantggcaaccatgcttctcaatcgaaattcacaagctcttcattcttgcctgggtttgatgttgttggtcgtgcttcanatgcttggaagnnagaacttgtcccatcttccatttccttggtgcctagagncacactaacatttgatcccccaactaccnnctcagacaanancaaacaaaggaagcacactgt

SEQ ID NO: 33622 - DNA, 263 bp, Glycine max
  Clone ID: 701106851H1
cgaagaaggtgttcacgttttacgaccatttacacagttatctggcgtccgctggtgtggacggcgttaaggtggacgtgcagtgcattctagagactctcggcgcgggactcggcggaagggtggagctcactagaaattaccatcaggcccttgacgcttcgatttctagaaacttccctgacaacggttgtatcgcctgcatgagccacaacacggacgcgctctactgctccaaacagacggcggtggtgagggcttcc

SEQ ID NO: 33623 - DNA, 245 bp, Glycine max
  unsure (1)..(245): unsure at all n locations; Clone ID: 701106852H1
tttgaaggtgagaactccagganccaagctttcaaggcaccattttgaggccaacaaggagtacccagatgaaaaaggtgttgaatttctgagggattcatcagaagtgggtggttgtggtggcagctcagggttgcnagagttgaccctcagctacctttgtgacaacccaaaattcaatcttgctgagaaagagattcctggtaaaagcttgttggagaaaatgagccacaaaggtaaagngg

SEQ ID NO: 33624 - DNA, 265 bp, Glycine max
  Clone ID: 701106854H1
cacatatttaatgtgggcaaccctaacaatgaggtcactgttaggcagcttgctgaaataatgattcaggtttactcaaaggtaagtggagaacaaactgctgaaacacctaccattgatgtgagctcaaaagaattttatggtgagggatatgatgacagtgacaagagaatccctgacatgaccataataaacaagcagcttggatggaatcctaagacttcactttgggacctgcttgaatccactctgacatatcagcaca

SEQ ID NO: 33625 - DNA, 264 bp, Glycine max
  Clone ID: 701106855H1
cgaggcgaagagaagagaaaaattaagatggaggggaaggagcaggatgtgtcgctgggagcgaacaagttcccggagagacagccgattgggacggcggcgcagagccaagacgacggcaaggactaccaggagccggcgccggcgccactggttgacccgacggagtttacgtcatggtccttttacagagcagggatagcagagtttgtggccacttttctgtttctatacatcactgtcttaaccgtcatgggagtcgcc

SEQ ID NO: 33626 - DNA, 264 bp, Glycine max
  unsure (1)..(264): unsure at all n locations; Clone ID: 701106857H1
gcagaattctgtgccattatctaataatgaaccagatgtccaagttttattggctgagcaagcaacttctgctgtaaatgcatcatctgtcacaagccattcagttaatcatanngaaatgatccagagcaattccactgattctgttttgtctgaagtgttcacctcttctgggtcgacagcttctacaattgccaagacatcagagactgctctccttgatgaaaaatcattattagcttgtattgtacgcatattccagct

SEQ ID NO: 33627 - DNA, 245 bp, Glycine max
  unsure (1)..(245): unsure at all n locations; Clone ID: 701106858H1
ccctcttcttaattcaacaatgncagataactcaattancttattttctccatacaacaagatgggncaaattcaacctctctcatagggtggtattggctcccatgaccagatgcagagcgctcaatcggactccactggcagcacatgctgaatactacgctcagagatcaacaccgggtggatttctcatcactgaaggcaccttgatctctccaattcttctgggtttcctcatgttcctg

SEQ ID NO: 33628 - DNA, 267 bp, Glycine max
  Clone ID: 701106859H1
catcgctcaagctcacactcacagtaaaatccaaaccaaaatggcggaaaataaagccattgaagaagctcagagcaagttccgttcagagttccttcaagttctgcgtagtaggcgacccgctcaagttccattaacagtcgaattcgcgaagccagtggtgaatcctttgcatcagaactctcctccatcgatcgaagagatcaagataatggagtcgtgtccgagaactgatatagagaaccttgaagacttgctcgaggagga

SEQ ID NO: 33629 - DNA, 267 bp, Glycine max
  Clone ID: 701106860H1
caacgcaggtttcccccacaacgttgtgttcgacgaggacgagattcctagcggcgtggatgcagggaaaatctccatgagcgatgaagaccttctcaatgcgcctggtgagacttacagcgttactttggatgctaagggaacctacagtttcttctgttcgcctcaccaaggagctggtatggtgggaaaagtcactgttaattaattattgtctcaagggctcgtctcctacgtctaagttctcatatggttccttcttctaat

SEQ ID NO: 33630 - DNA, 272 bp, Glycine max
  unsure (1)..(272): unsure at all n locations; Clone ID: 701106861H1
caaaaccatcaatggcatcagcattatcttctctctcctccacctncttcttcactgttacngcacagtttcaccggaaactcgaaggctcctcccactactcaattccccaacaaaaatgtacgcttttcggtcttcgctcaaaagaaggcaaagaaacttcgaangattattttganggaagatgtggcttatgtagganagcaagggcaacttcttgntgtgaaggctggctttttcagaaattacctgcttcctatgggaaaagcaca

SEQ ID NO: 33631 - DNA, 268 bp, Glycine max
  Clone ID: 701106862H1
aaaaaaataaaccttagctactacgaccacagcctttagtcatggccacaagttgctcctacatggtttccaccaaattatccatgctaggctggagtggaggaagaagaagagaagcgagaaaccggagagcattcttggtctcagctcaacaacaaagtgatgttcaggaagcagagagcgtgaaggtagtagaagaggagaaggagcaagaacaagtgcaaacccaaacaccaaagccaaaaggaacaacaccaaggccagtgga

SEQ ID NO: 33632 - DNA, 268 bp, Glycine max
  unsure (1)..(268): unsure at all n locations; Clone ID: 701106863H1
ttcngatcnngagtcttcagtttctcctcgttgttcttcgctntcctgtcattcaatttcgattctttcgttaatttaatnagatgtttggganggcnncgaagnagancgataatacgaggtactacgaaatcctcggcgtctccaagaacgcttcgcaggatgctctgaagaaggcttacnagaaagccgccattaagantcaccccgacaagggcggtgatcccgagncagtttnaagngctggcgcaacttatgaggttctnag

SEQ ID NO: 33633 - DNA, 266 bp, Glycine max
  Clone ID: 701106865H1
tccgatgcaggtcgcacattcaaccttcaatgcttcgttctctttctttctccgatccatccatggattccgattctcagtttctctgattctctcgtcgaaattcgtttcccgaaccgcattcacgcgccaaccttgctcgcttcgcttctctcgcggcttcgtggattccgctttcatggaacgaattgccgcggtttctgttccgttctacaacagcgagaatttccttcttctgaatccgtttggtttccaaaaaaccacgc

SEQ ID NO: 33634 - DNA, 265 bp, Glycine max
  unsure (1)..(265): unsure at all n locations; Clone ID: 701106866H1
ctcactgcgattcactctagtgagagacagaagagaaggaaacacacgcagagttgaaaatggctctgcgcaccctctacttcgctgcaatgaagaaacgtttttnttttcttctccgaagaagaaaaatggctctcggcgacgatgcgcagaccactctcactctccctcgttcctcgattcccttctctgcgaagagcgagaaacgttcgaggaagactttgacgcgaaggtgacgagtgcgagaccgaaaacaacgacccct

SEQ ID NO: 33635 - DNA, 263 bp, Glycine max
  Clone ID: 701106867H1
cgaccatggatcacctgctgaccaattgtctttagccggtcttacaccatctcacatagcagcaacagtgttcaacatactaggacaaacaagagaggcactagaggtcatgtcttagaaatattaaggggttcaatttttcactttacacgatgtacaatgcataacatgattcaccacgtgtaatataatatgaaaaagtaatgtaatactgtgaaattttgaagtatatgatgcaggtcgtcatatggtaaaacaactag

SEQ ID NO: 33636 - DNA, 232 bp, Glycine max
  Clone ID: 701106868H1
gcacgtattgttctaatccacaaaaataatggccttaaattacaacattgccctcgccttctctacggttctcacgctgcttctccttcccttaccaacccttggggagctcgtgcaggagcagccactagtcctcaagtaccacaacggccaactcctgaaggggcgcatcaccgtcaatctcatctggtacggcaccttcaccccgatccaacggtccataatcgtggac

SEQ ID NO: 33637 - DNA, 263 bp, Glycine max
  Clone ID: 701106869H1
gatagtacactgtcatgctgtttcatttctcaaagtaaaccatgaattctctatcactcttcaccttcctctgcgcaatttgtgcgcactccgtcgccgtcacctccgcggcatatccttccatccccggcacggaaaccggagagtgctccctccgcggcgtcggcgtcggcgacggtgttctggtccctccgcggcgagaagtgtacgaggaggggcgaatcttcgacatcacccacaggtatgtccccgagatgccggtg

SEQ ID NO: 33638 - DNA, 264 bp, Glycine max
  unsure (1)..(264): unsure at all n locations; Clone ID: 701106870H1
gcgcaacccagctgttattgcagacaacgtaggagngcaatgttggagatatcgctgggatgggttcagactnatttgggtctnatgcagaatcatcatgtgcagctttatttgtagcatccatatcatcgtttggaacaaatcatgatcacacagccatgtcatatcctctcatcataagctccatgggaattgtggtttgcttgattacgactctttttgcaactgatctgtttgaaattaanaacgtgagccaaatagaac

SEQ ID NO: 33639 - DNA, 264 bp, Glycine max
  unsure (1)..(264): unsure at all n locations; Clone ID: 701106871H1
gtttcagttccaaacaaaacccatcanagtctttctccctcagtgatcatatattcattcagttctatacaaaatcctcaaaaactcttcctctctgccatgaccatggaatacagaaccttagaactcaacatcatatccgcaaaggacatcaagaatgttaatctcttctccaagatggacgtatacgccgccgtttcgctctccggtgaccctctccaccctcagggcgccaccacccacgtccacaaagacgccggcagc

SEQ ID NO: 33640 - DNA, 263 bp, Glycine max
  unsure (1)..(263): unsure at all n locations; Clone ID: 701106872H1
gttccaagttagttagaggcnttgttgcttgcatagntctctgatctgaaaatgantgcgtacgaggttcattaagtgcgtcaccgtcggcgacggtgctgtcggcaaaacctgcttgttgatttcctacaccagcaacacttttcccacggactatgtgcccaccgtttttgacaatttcagtgctaatgtggtggtggatggaagcaccgtaaacctaggattgtgggatacagctggtcaggaggattacnatagattaa

SEQ ID NO: 33641 - DNA, 262 bp, Glycine max
  unsure (1)..(262): unsure at all n locations; Clone ID: 701106873H1
ctaccttataagggtgatgataagccagggttcttgaagaagcttgcattgaagtttaaggagccagagaataccacattgtttattcttgacaaatttgatgggaactctgagctggttgcagagttggttaccattaatggatttaaancagcttatgcaattaaggatggtgcagaaggaccgcgaggatggaagagtagtggtcttcctggatagcaccacggaaaacattgagtttggacaatctgacagatgctat

SEQ ID NO: 33642 - DNA, 264 bp, Glycine max
  Clone ID: 701106874H1
catagccccatttatttacccagagcttgagtgggacttccggttacaactagtgaagagcatcaatgttagtgggcacaagtatggtttggtctatgctggaatcggttgggttatctggagaagcaagcaggacttgcctgaggaactcatctttcacatcaactatcttggggctgatcaacccaccttcacccttaacttctccaaaggttctagccaagtcattgctcaatactaccaactgattcgccttggttttga

SEQ ID NO: 33643 - DNA, 265 bp, Glycine max
  Clone ID: 701106875H1
gtttcttcaatcggaatcgcgaacaacatggaagtgagaattgggcaaagggtgtctcgcggaatgctccctctcctcgctctccacaccgtcagcgagtacataccgctccgaccacaaacctccgttcaccgccgccctcatcgccgccaacaccctcatctacctccgcccctccttcctcgatcccctcattccccccattgaacaagtctggttcaacccccacctcatcctcaagaacaaggacttgaaacgcttcttg

SEQ ID NO: 33644 - DNA, 273 bp, Glycine max
  unsure (1)..(273): unsure at all n locations; Clone ID: 701106876H1
gaggttcanccagtatcacctccgtaaacaacactncatcctcttnctacagncctcantacacacanncanagaaaaacaaaaangtggaacaactgnaccataagctgngncactaccgganaanccttacgacggggaaangacatngacgggngacacaggttcaacgtncttatctcatcaagacggcnccgtttcngntaatgcaacaacacaatctcctnctaccaatcnagtgccctacacgccncacttngtcccgttaccgnt

SEQ ID NO: 33645 - DNA, 271 bp, Glycine max
  Clone ID: 701106877H1
gcaaatctcaactatgctgagtctaacagagtctccatattaacagtggacaaattttcaagaaggatggttcttcagtttatgggaattaatcacatgttatgttatgcttctcctgctttggctgcaccaattatgccagacatgaaggaacctgaagtcatacgcatgtaggactttgaagctacctagtggagtgagagttcaagatattgtagaaggggaaggaccagaagcacacgatggagatttggttacattcaattgtgta

SEQ ID NO: 33646 - DNA, 267 bp, Glycine max
  unsure (1)..(267): unsure at all n locations; Clone ID: 701106878H1
gtgacactgtagactctggctcacgccttagacgacgaagctcgctctgtactctcactacacctgaacggatccttcttcttccttatcgcgaattccgttacttcaaaacctaattgcgtgagtgtggtttctgatttgtgttgaagcgaagatgaggattatgattaagggcggtgtttggaaaaacaccgaagatgaaatcctgaaagcggctgttatganatatggtaagaaccagtgggctcgaatctcttcgctccttgt

SEQ ID NO: 33647 - DNA, 268 bp, Glycine max
  unsure (1)..(268): unsure at all n locations; Clone ID: 701106879H1
gttcattggtggaaatccaagttcccgggcagaagtttgtgaacggagtnccgtnccccgctgtggngtctcctccacctgnaactgcaagtgcggttcctctnacggangcccgncaaaacccagaaagctttccttgaatcattgctactccaatcgggtgctgtccttttcaggggattcccactctccaccgcttctcanttcaacgacgtcgtcgaagcattcggctacgacgagctnangngccgnaagcggcgccgctccc

SEQ ID NO: 33648 - DNA, 215 bp, Glycine max
  unsure (1)..(215): unsure at all n locations; Clone ID: 701106881H1
cactccccaataaaaatctctctctccactcgtgcactctaatagagagatannnnnnnnnnnnnnnnnnnnnnnaaagaagataaggatgacagggcaagtngtggtgaccaacggtggcggatgcgctgctgtcgggaagggccggagagccgccgccggcgaagaggagcagaacccggcgtcaccggtggcgcttctnctggcggcgctga

SEQ ID NO: 33649 - DNA, 261 bp, Glycine max
  Clone ID: 701106882H1
gttcaaccacggctaggttgggttcaaggaaatgggctcctcgatttgactacatcctaacccagcaggccatggtggcggtggacaatggaacacctattaaccgggacttaatcagcaacttcctgtcagacccagtgcatggagccattaaagtttgcgctgaactgagacccacagtagacatttctgtgccaccagatgcagactttgttcgtccagagttgcgttccagcaattagaattaaaatcaattatggc

SEQ ID NO: 33650 - DNA, 260 bp, Glycine max
  Clone ID: 701106883H1
ctcgttcttcttcttttgttgttctgtgtttgtgtttgttttttctctcacctgaaaatgtcttgctgcggtggtaactgtggttgcggaagtcctgcaagtgcggcaacggctgcggaggctgcaagatgtacccagacttgagctacactgagtcaaccaccaccgagaccttggtcatgggagtggcacctgttaaggctcaatttgagggtgctgaaatgggtgtgcccgctgagaacgatggctgcaaatgtgga

SEQ ID NO: 33651 - DNA, 264 bp, Glycine max
  Clone ID: 701106884H1
gccatatctttacttcccaaaacttgctctacaatgagtttccttcgttcttttgcaagaaacaaggatatatcaaaagtaggacgcagaggtatccattgcatgcagaaactatgtgcagaaaaaatatctcctgattcactagagaaggcccaaaatcgtgtgatagatgctgcactcacacttgttcgagaaaatacaaggcttaagaaagaactcgtgcatagtttgggaggtgctgtggcaacttcaactcttcttgga

SEQ ID NO: 33652 - DNA, 262 bp, Glycine max
  Clone ID: 701106885H1
ggctcataaatcttttttatgggtttcagggtcactactactctgtctctgctctccctgttttggctcttgtccctgcaccaagcaagagctgcaaatttccacaatgtgagtggcttgagagggaaaaagccagttgtagcaaatgggtgcaatttgttcctgggaagttgggtggttgacacttcttatcctctctatgactcttcaacatgccccttcattgatcccgagtttgattgccaaaagtatggaagacctg

SEQ ID NO: 33653 - DNA, 264 bp, Glycine max
  unsure (1)..(264): unsure at all n locations; Clone ID: 701106887H1
gcataactgaacaaacaaagcaaccctatgtcgaaggtggtttgtgtcaccggagccagtggagccattggatcattggtggccctcctcctccnccagcgtggttatacggtccatgcnaccgtccaaganatcacgcgatgnaaatgagacgaaacatttggaggaaatggaaggagcaaagantcgtctccatttntttgaaatggatcttcttgcncatcgactccattgcngctgcnataaagggttgntccgncgtaa

SEQ ID NO: 33654 - DNA, 264 bp, Glycine max
  unsure (1)..(264): unsure at all n locations; Clone ID: 701106889H1
cgaacatcgacgggcccaggttggccagagttgatatcgtaattgggcagtgactgttgtncagtaattttagcgaaatggatcaagagttgtcttccatatttcagctggaancaaggagattgttatggcttatcggcattacggttgctatggttntagcattccaatatttggaacttccttatggtggcattcaacgcattgtattctctgccaacaagataccaacatctgatagcattagatttcaagctgcngatc

SEQ ID NO: 33655 - DNA, 245 bp, Glycine max
  unsure (1)..(245): unsure at all n locations; Clone ID: 701106890H1
tatatcctctccttcaccgtcgctctctccaacgatcacaacaacatcgtcatcccatggcaaacgccgcatctggtatggcagtccatgatgactgcaagttaaggtttttggagctgaagacaaagaggacacaccgtttcatagtttttaagattgaggagcagcagaagcaggtcattgtggagangcttggtgnnncnncccaaggctatgaagatttcactgccagccttcctgctgat

SEQ ID NO: 33656 - DNA, 256 bp, Glycine max
  unsure (1)..(256): unsure at all n locations; Clone ID: 701106891H1
catttgcgttgtcgcagtcacaggcttaaggcaaaaccctaaattctctcacactttcgtcggaatcnctattntggcannttccgtgacaagatgccggcgaaggacgacggctccgacaaggagaagtgcctcgatctctttctcaagntcggcttagacgagcgcacggctaaaaacacngtcgccaacaacaaagtcactgccaatctcacttccgtcatcgacgaggccggtgctactgatggatgcngcc

SEQ ID NO: 33657 - DNA, 264 bp, Glycine max
  unsure (1)..(264): unsure at all n locations; Clone ID: 701106892H1
tctccttgcaacatactactnagctagaaagacataaacaaagtgggttgatttagatttgaccaacagcttttgctacctctttgaattttattggaagacatggattgttcatcatggattaacacttccttggatctcagcattaatcctcgcagagttcatgaagaagctgttcctaaggtggtagaaagcaagcttttctctttgggaatgcccaagtttaacgtcgaagaagagtctactagtgacttggaggaggaa

SEQ ID NO: 33658 - DNA, 265 bp, Glycine max
  Clone ID: 701106895H1
gccctcagcaccagccgaaagccaagaaaaagctttcgatccctgtaactgcgttcgactatttagggttttttcggagacaatggcggatgaatcggagcacacggcggcgcggctgccggcgaatcgctgctcgacaagatcgccgagaagattcacggccacgacgactcttcctcttcctccgattccgattcggataaaaaggaatcttcgtcgattaaggagaaggttttccgcctctttggaagggagaagccagttc

SEQ ID NO: 33659 - DNA, 268 bp, Glycine max
  Clone ID: 701106896H1
ctttattgtggaaacaaaataagaaagtttcacctaccagttctgctaaatttagagtgctggcaattaagtctgacaatagcaccatcaacaggctcgagggtctacttaatttggatatcactccattcactgacaagataattgctgagtacatttggattggggggacaggaattgatgtgcgcagtaaatcaagaacaatatcaaagcctgttgaagatccctctgagctccctaaatggaactatgatggatctagcactgg

SEQ ID NO: 33660 - DNA, 277 bp, Glycine max
  unsure (1)..(277): unsure at all n locations; Clone ID: 701106901H1
ttcagattctaaaaaatgagttggtggtgggctggagcaatcggtgctgccaagaagaaattncgaggaagaggaaccgccgcgaacttcccagagcgtgggcctggtgatcggcgtgacgggcatcgtgggcaacagcctcgccgagatcctccctctcgccganncccccgccggtccatggaaggtctacggcgtcgcacgccgcccccgtccgccgtggaacgccgaccaccctgtcgagtacatccagtgcgantctccgatcccgccgagc

SEQ ID NO: 33661 - DNA, 274 bp, Glycine max
  unsure (1)..(274): unsure at all n locations; Clone ID: 701106902H1
ggagaagggtgtcactgcccttgncccctagagccaatgattttgatctcatgtatgaacaagttaaagctcttaaggatggaattgctgttgaaaaaccaatctacaaccatgtcactggtctcctggatccccctgagctcattaaaccccccaaaatcttagtcattgaaggcttgcacccaatgtatgattctcgggtcagagatctcttggactttagcatctacctagacattagcaatgaggtcaaattcgcttggaaaattcagag

SEQ ID NO: 33662 - DNA, 268 bp, Glycine max
  unsure (1)..(268): unsure at all n locations; Clone ID: 701106903H1
gataagtgggagctggaaacagcgaaagtgaaataccactacttttaacgttattttacttattccgtgaatcggaagcngggcactgcccctctttttggacccaaggtcggcttcggccggtcgatccgggcggaagacattgtcaggtggggagtttggctggggcggcacatctnnnaaaaganaacgnaggtgtcctaagatgagctcnagagaacagnnatctcgtgtanaananaagggtannanctcgttttttctgcag

SEQ ID NO: 33663 - DNA, 150 bp, Glycine max
  Clone ID: 701106904H1
gaagaggcactaggttcatttcttgatatgttttttttcatttgttgttgttggttagtcgttatggcagttgaaattgacttgacgtgtctggaacaattattttatcctacagtcaatgagaaattgtgtgatttttgcggctatagt

SEQ ID NO: 33664 - DNA, 273 bp, Glycine max
  unsure (1)..(273): unsure at all n locations; Clone ID: 701106905H1
cttgtatgtatgtagttaacgtggaaggattgggtgaagacgangggtttggcttagacttagatggagtcgcgtggacactcaaacccgcttctgtcattttccagcttcatccatcaacactgcgtccgcttagggtccgacctcgcgactcgtttggatgacacgaagcgagccctagctcaatctcatcataatcttgtcttccccaaacacgccctcgnccacgccgccactgctaccctgggctcccagcacgtggctaagtccctc

SEQ ID NO: 33665 - DNA, 271 bp, Glycine max
  unsure (1)..(271): unsure at all n locations; Clone ID: 701106906H1
ctttttcttctcctctctctctctcccctccgccatggctgaggataaggagatgtctacctctgtccatcaatgggaatgattccctaactggtcacatcatatctacaactattggaggcaaaaatggggaacccaaacagactattagctacatggcagaacgggttgtaggaactggatcatttggaatcgttttccaggcaaaatgcttggtnaactggggaggcagtggcaattaaaaaggttttacaagacagaagatacaaga

SEQ ID NO: 33666 - DNA, 204 bp, Glycine max
  Clone ID: 701106908H1
tagtgcctccttgccagaagttaaaatggcccaagaaactttcctattcacatctgaatcagtgaacgaggggcaccctgacaagctctgtgaccagatctccgatgctgtgctcgatgcatgcttggagcaggaccctgacagcaaggttgcctgtgaaacctgcaccaagaccaacatggtgatggttttcggagagatcac

SEQ ID NO: 33667 - DNA, 240 bp, Glycine max
  unsure (1)..(240): unsure at all n locations; Clone ID: 701106909H1
tgtggcctccaacnttgtncaagagtgactgcctaagacnaattggagaggntttgcccacnagagacttcaccaggatccacattcccttccttcaaacggaaccatgtttcagcatgtgtgttcttgaatatgtaaccaaaatctggagcaacagccatgaatttgaaacaattgctcacaaatagtttcagaatctgagttccagcgtcagagtcaagggatttgacactatgacca

SEQ ID NO: 33668 - DNA, 272 bp, Glycine max
  unsure (1)..(272): unsure at all n locations; Clone ID: 701106910H1
ctagaaacagtgtgatgaaaatgaaggtccttgttttcttcgtngctacaattttngtagcatggcaatgccatgcgtaacgatatgttccctctccgaatgaacactggctatggtgcccgtactccggaggtgaaatgcgcaagttggaggcttgctgnggaagcacacaacatctttggctttgagaccattcctgaagagtgcgttgaagcaacaaaggaatacatccatggcgaacaatatagatcagactccaaaacagttaaccc

SEQ ID NO: 33669 - DNA, 263 bp, Glycine max
  Clone ID: 701106911H1
tgcagatattatcatcctcaatccaaattcaacctttgagataactgcaaagtcccaccactccaaactggacacaaatgtctatgagggaaggagtggaaagggaaaaatcgaagtgactattgcaggaggaagagttgtttgggaaaataatgaactgaaggttgctcctggtactggcagatatataaaaatgccaccctttagttatctgtttaacggaattgacaaaaaggatgccttttatctaaattccctccaag

SEQ ID NO: 33670 - DNA, 212 bp, Glycine max
  Clone ID: 701106912H1
tttgcaaactccacccaaccaaccaccttcttaattaataaccgtcgtcgtttcaatctcgttacacacctcaaaacgcagcggcacactcactagaatgcaagccgtttcgctctcacctttgtcgtttagggattcttccgacgagttcgctggaaagttcgaacacgatttcatggccaagctcaaaatcaacgaagagaaagtcgaaa

SEQ ID NO: 33671 - DNA, 273 bp, Glycine max
  unsure (1)..(273): unsure at all n locations; Clone ID: 701106913H1
gnagatgctcaggagcagcacgctaacacagagtgttacagtcacctgtgttcgtcacagtcacagacaatggttccaatcaattcccgtaaattatagattctttgacgctgctcggaactctctatcataccccaactccgcgatcttcaaatggaacagaaaggccaattataaccgtcatagttctggaatggggaccttcaccactcgcgcgttggcgcagcgnctttcagaacgccgacgaactcatcgactccgtcgagacattta

SEQ ID NO: 33672 - DNA, 207 bp, Glycine max
  unsure (1)..(207): unsure at all n locations; Clone ID: 701106914H1
tncgacagtgagaagagagagagaagcgctcttctccgtaccgtttctagagagagaaactgatggccggagttaatccgaacggcgtcgccgattttccggcgactccaacgcacggcggacagttcattcagtacaacatattcggnnaacctcttcgaggttacggcgaagtaccgtcctccgatcatgcctgtcggacgcggc

SEQ ID NO: 33673 - DNA, 272 bp, Glycine max
  unsure (1)..(272): unsure at all n locations; Clone ID: 701106915H1
caactgaagaancaacaagangggtattgagattgagattcaagtaatggggaagagcaaggttcttgtggtggggggaactgggtacatagggaggaggatagtgagggcaagcctggcactgggccatgagacctatgtggttcagaggccagagttgagcctccagatagagaagctgcagaggctcctctccttcaagaagcaaggtgctcatctcattgaggcctctttcaatgatcacaagagccttgttgatgctgtgaagcagg

SEQ ID NO: 33674 - DNA, 275 bp, Glycine max
  Clone ID: 701106917H1
acaaatactaccatttcggtgaatcatggcgaacccaatcgacggtggcgagttcgagtgcctttccgggttcggcaaccacttctcctccgaggccctcgccggagctctgccggcggcgcagaacagccccctcgtctgcccgtacggactatacgccgagcaaatctccggcacctccttcacttctcctcgcaaccgcaacctcttcagttggttttatcggatcaaaccatcagtgactcacgaaccgttcaagccaagagtaccgggta

SEQ ID NO: 33675 - DNA, 269 bp, Glycine max
  Clone ID: 701106919H1
caacattgaaggcaggtacgtcggttctggcaaaggggagctcattggggacaaccactctggtgtggtgcagctgcacaacgtggaggacgtgcagaagctcatagaggaccacaagctggatcacaagctcatcgtgctcgatgtgggtctcaaacattgtgggccctgcgttaaggtttatcctacagtggttaagctctcgaggcagatggactcggtggtgttcgctcggatgaacggggacgagaacgagagctgcatgcagt

SEQ ID NO: 33676 - DNA, 269 bp, Glycine max
  unsure (1)..(269): unsure at all n locations; Clone ID: 701106920H1
aaacaaagtaacacaccatccatcctctctctcttctcttcttctgttctctagtttcctgctcttgtttcttagaatccgtacggtctaatcaacacaacaaaatgganngcaattagttgcctggatganagcaccaccaccgagtcactctccataagtcaggcgaagttcttcgacgactatgtcgtccgagaaggcttctcttccccgccgcggcganngttgctgnnnccagtcggtaacggtgnnagcganttgtggnttcc

SEQ ID NO: 33677 - DNA, 165 bp, Glycine max
  unsure (1)..(165): unsure at all n locations; Clone ID: 701106921H1
aaaacacgagtttgtgttagcatcaatgtggaatgtgttgaaagaacattcatgtgttattttagcatggtcatttatactttttgttatcaagtagagcaatattttctcgtttgtttgaaaaaataaaaaagggagnttgtcgtgtatgacatcttattttat

SEQ ID NO: 33678 - DNA, 272 bp, Glycine max
  Clone ID: 701106922H1
ggggtctctgcctctgcaattcagcgggctcaagtgctccccactctcatcttcttctctcttctccaaaccttctctttggacccaacaatcccaaaagcgcgtttcaattaccattgcgaactcaatagcaatagccaatgcgcagaacaaagagagagcgaggcttaagaaactcttcgaagaagcctacgagagatgccgcaatgctccaatggaaggtgtttccttcaccatcgaagacttcactgctgctcttgacaagtacgact

SEQ ID NO: 33679 - DNA, 269 bp, Glycine max
  unsure (1)..(269): unsure at all n locations; Clone ID: 701106923H1
cagcttgcagtggatttgctagctaatcagcttctttttgaggccttaaattactctcatttctgcaagtatgcttgctctgaagnaaatcctgagctcttggacatgggaggtccagttgaaggtggatttagtgttgcatttgatccccttgatggctccagcattgtggacacaaatttcacagtaggcaccatcttnggtgtgtggcctggagataagttgaccggcatcaccggaagagatcaagttgctgcagccatgggggt

SEQ ID NO: 33680 - DNA, 270 bp, Glycine max
  Clone ID: 701106924H1
caaggagatggctctgggaagaggcagtgcagtggttctactactttgcttcttgctgcttcactctcagatggctcgtgctgccacctacacagttggagattctgggggttggacctttaacactgttgcctggcccaaaggaaagctctttcgggctggtgacacacttgctttcaattatagccctgggactcacaatgtggtggccgtgaacaaggctggatatgatagctgcaagactccaagaggagccaaagtgtataagtc

SEQ ID NO: 33681 - DNA, 271 bp, Glycine max
  Clone ID: 701106925H1
cttcgttttgttcttccttgcgctcctcctcgttcgttcgttctccctcgcgtagatcggcaatggcggagaccgagacgtttgctttccaggctgagatcaaccagctcctcagtctcatcatcaacaccttctactccaacaaggaaatcttccttcgtgaactcatcagcaacgcctctgatgctttggacaagattagatttgagagtttgacggacaagagcaagctcgatgctcagccagagttgttcattcatattattcccga

SEQ ID NO: 33682 - DNA, 232 bp, Glycine max
  unsure (1)..(232): unsure at all n locations; Clone ID: 701106926H1
atttngcacagcgtgtccatnngtcagactcacacccgcaagcaaaagaactagctcagtctcattgagaaggagcaattgtggcccaaaatgttcggtgtcccaattggaattgaagagtgagagtgagagcaaaacgaagccctatccagcagaggcatcgaggaccataatggagttggctaaggtgggcacgctgtgtacgttgacccaagagggtttgccacttggt

SEQ ID NO: 33683 - DNA, 270 bp, Glycine max
  Clone ID: 701106927H1
ttctgaaatcccatccaatcgaaggctgtgaagtgtgtgatgcactctatccttctttctcttgaacccataattccatgactcggcgttgctcccactgcagcaacaacggccacaattcccggacatgcccttcgcgtgggggcggaggtgtgaagcttttcggggtcaggctgacggatggatcaatcattaagaagagcgccagcatgggcaacctaaacctctcctccgccgccgcacatcaccaattccattcatctccttctt

SEQ ID NO: 33684 - DNA, 273 bp, Glycine max
  unsure (1)..(273): unsure at all n locations; Clone ID: 701106928H1
ctcgttccgattcgttttcgttggtcttctagaagcttcttccaccatgaacagcaatnnncaacgtttccaaagagctcaacgccaagcacaagaagatactggaagggcttcttaaattaccagagaataggggatgtgctgactgcnaagctaaangtccaagatgggctagtgtaaatcttggcatctttatatgcatgcagtgttcaggaatacatcgaagtttgggggtacatatatcaaaggttcgttctgcaaccctggacactt

SEQ ID NO: 33685 - DNA, 270 bp, Glycine max
  Clone ID: 701106929H1
cagcatcatcacatgcacccgcgattcctacgatcccttcccatggtctcttctctgcaccctcgccgtaccttctagaaccttccctcagatctcaattccccttccgctttctcctttcatggaaatggcttccactccccgcaccgtcgaagagatcttcaaggactacaccgcccgcagaaccgccatcgttcgcgctctctctcaagatgtggatgaattctacggactctgcgatccagataaggagaattgtgcctctatgga

SEQ ID NO: 33686 - DNA, 209 bp, Glycine max
  Clone ID: 701106930H1
gaaatgggtaaggggggaatgtcaattgatgaacatggagaaggcaaagaagagaatatggctgcttggcttgttggaatgaacactctcaagattcagcctttcaagcttcctactttgggaccccatgatgtcagagttagaatgaaggctgttggtatctgtgggagtgatgttcactacctcaagacactgaggtgtgctcactt

SEQ ID NO: 33687 - DNA, 275 bp, Glycine max
  unsure (1)..(275): unsure at all n locations; Clone ID: 701106931H1
cntgtttttgtggccccaacaaaatgttaactatgcacaagcacaacttcaagcaccaaccaaggggatgctccactcatagaactcacacatagaaactggaactagaagtagcagtcactaagttttgtgcataaccttaaaccatgtcattgcctaccactactagtggtcactcatctatttactctgcacttacattgccaagaaccacccaaattcacccaaccttgttttctcccaccaccaagttcttttcttccaaaagcccctca

SEQ ID NO: 33688 - DNA, 263 bp, Glycine max
  unsure (1)..(263): unsure at all n locations; Clone ID: 701106932H1
cacgatgtcttacatcctgtagttctgtttctcctgccgaaatgacacaagnccaaattttggtttctggggatttgtatatatcttggagtttataaggggtcgttcaattttgtttataacagcctgtaatttgtgtaatcggtagatgatatgatatcattgtaatcgatgtgaaaagttatgaaagctcgattgtatcattttttccatttattttcaatgttgcctgaaatttaaccgatgtcttgtctgagacttca

SEQ ID NO: 33689 - DNA, 270 bp, Glycine max
  unsure (1)..(270): unsure at all n locations; Clone ID: 701106934H1
ctngantncntnnancntattnggnngagntcntncttgcacntttcttctatccttgctacncaattgnctatatttcttaaaggagtagtataaacactaaacaaattcagtttttgggcatggattttctctcatgtggatctggaccatgctgtcaagcagtggatatgaagtggaagttggttggcaaatgttngaattcacgtcaagcaaggtttcccagtgttggaaatagaagcgggtcagtgagattcatgacaataagga

SEQ ID NO: 33690 - DNA, 126 bp, Glycine max
  Clone ID: 701106935H1
cctcatcatagttttgctaacacaagtatacactcattctcaaaaggttttcatccaatttctttccctctcttttcattggtgtgcactttcacttgtggagctgcatcaactgcagtggaaatt

SEQ ID NO: 33691 - DNA, 270 bp, Glycine max
  unsure (1)..(270): unsure at all n locations; Clone ID: 701106936H1
cagaaatcccatattttccccccacattaactcacccaacccctctttctaaaaggcctcaaggatacactccggacttaattacgttattttgttagggtcaccgtttcgagatattctaaacttgtactgaaaaatatggagggaaaagaagaggacgtaaganttggagccaacaggtacggagagaggcagccaatagggaccgctgctcaggctaaagactacagagagccaccgtcggcgcctctcttcgaaccgggagagttg

SEQ ID NO: 33692 - DNA, 265 bp, Glycine max
  unsure (1)..(265): unsure at all n locations; Clone ID: 701106937H1
atattcatggctttctttattctctccttcctcttccttcttcttgtntcatctgccactgcttgtgatcgctgcttgtatcaatccaaggcttcctatttctccaaagcttctgctctttcatctggggcatgtgggtatggctctttggcactagacataagtggtggacaccttgcagctggtgtggattctctcttcaaaaatggagcaggttgtggtgcctgctttcagataagatgcaagaacccaatctatgtagcaa

SEQ ID NO: 33693 - DNA, 268 bp, Glycine max
  unsure (1)..(268): unsure at all n locations; Clone ID: 701106939H1
tatgatgaaattgtgaaggaagtctcttcctacttgaagaaagtaggatacaaccctgacaagattccttttgttcctatctctggttttgagggagacaacatgattgagaggtccacaaaccttgactggtncaagggtccaactctgcttgatgcacttgaccagattagtgagcccaagaggccctctgacaagcccctcaggcttccccttcaggatgtgtacaagattggaggtattggaactgtgccagtgggacgtgttg

SEQ ID NO: 33694 - DNA, 262 bp, Glycine max
  Clone ID: 701106940H1
ggaatcctctctgtgtgtgatgagccacttgtgtccgttgacttcaggtgcactgatgtgtcctcaaccgttgactcctcgttgaccatggtcatgggagatgacatggtgaaggtcattgcttggtatgacaatgaatggggctactcccaaagggttgtggatttggctgacattgttgccaacaaatggaagtgagagccaaacaaattctcatggtaattaaatatgtatgtaccacgccatgtaatttgtatgctta

SEQ ID NO: 33695 - DNA, 270 bp, Glycine max
  unsure (1)..(270): unsure at all n locations; Clone ID: 701106941H1
tctgcacataaaaaaccactctacaaaactctccagtaattctgaaaattttatttacttttggtgaaattaacagctctgtncattgatcaatggcgacaaaggaaggcaaagccataggcatcgatctnggcacgacctacagctgcgtgggcgtgtggcaaaacgaccgcgtcgagatcatccccaacgaccaaggcaaccgaaccactccctcttatgtagccttcaccggacaccgagaggctcatcggagagcggcgaagaacc

SEQ ID NO: 33696 - DNA, 270 bp, Glycine max
  unsure (1)..(270): unsure at all n locations; Clone ID: 701106943H1
caaacttttcaaacaaaaaaataaataataaagaaaacaaaacaagaagnaggaaacgcgcaacgcaacacaaaaaaccacactttcaattgcatttctctctctttctcacaatttccactttccgggtttnanattcgatattcgttgttccaatgagcgatcacttggtggtgttcgttgaccgtctcgcgcgccctgtccccgttgatccggtggcgcagacggcgcaggtgccttccgaaccatctccacctccggccgccgtgg

SEQ ID NO: 33697 - DNA, 268 bp, Glycine max
  Clone ID: 701106944H1
cgtttatttcctctgatcgtgtggtttctgagttctaagcactcacctctttcatacacgtttgttccgcttgttgagaagccatgggcgaggatttcgagttcccaagtgctggcaacatggaaatgcctgaggaggaagagtttgagagtccgatcctgaaggttggggaggagaaggagattgggaaaatggggctgaagaagaaattgctcaaggaaggtgaaggttgggacacccctgacatggagaccaagttgaatgcatt

SEQ ID NO: 33698 - DNA, 249 bp, Glycine max
  unsure (1)..(249): unsure at all n locations; Clone ID: 701106945H1
agcattttaggtgtgtnaatngactctgcaccaattntanctcatgcgatggttggtgacgctgcatatctgattgctggggatgcattggtggatgatcatgaatcacaggacctttcagaggaggaaataaatgtgcatcacttgttgagattggctaggnnactttggctgcctgcttntntcttncttaccgtttgtcaaacttggacgactcaatnacaaatattattcattaaacttactcta

SEQ ID NO: 33699 - DNA, 270 bp, Glycine max
  Clone ID: 701106947H1
aaaaaaaaaacccttagccaacacaaccatcatggccacctctgctattcagcaatcagcattcactggtcaaactgctctgaagcagctcaatgagttcgtccgcaagaccggtggcgccggcaaaggtcgcactaacatgcgccgcaccgtcaagagtgctcctcagagcatttggtatggccctgaccgtcccaagtacttgggtccattctcggagcagattccatcatacctgaccggagaattccctggtgactacggatggga

SEQ ID NO: 33700 - DNA, 273 bp, Glycine max
  unsure (1)..(273): unsure at all n locations; Clone ID: 701106948H1
cttcaaaattgcaatgggagtggaagatacagatatttgtatcantcaaggagccagatcatgttgtagtctattcagatggcatttctcatgattcgggtcatgaagctggaagtggtcatcacaatattacagagtcgtatgaacaaatcaatgagactactgaacatcatagttcagaggatagtgcaaaggaatatgaggtgaaggaatgcacaacagaagtttctgttaaggtctctgatgtctctaatgttaaaaaatgtgaggnta

SEQ ID NO: 33701 - DNA, 183 bp, Glycine max
  Clone ID: 701106949H1
aaccggatggaaccggaggagatggtagtgtgtgaggttgtgaatggaaggtgcgagtgggggagcgtgaggaatgtgacggtgaatgatgtgagtcacatggggagaatggtgttttctggtggccatgtggggcttgaggatttgaagagggcggttaaggataattgtatgtttgtggag

SEQ ID NO: 33702 - DNA, 270 bp, Glycine max
  unsure (1)..(270): unsure at all n locations; Clone ID: 701106950H1
aacactcataacacaaagcacaaagcaaagctcatccttgagttaaaaaatggcagcagcttcttccatggctctctcatccccatccttggctggcaaggccgtgaagctgggcccatcagccccagaagtgggaagggtgagcatgaggaagaccgtcaccaagcaggtctcctcaggnagcccatggtacggcccagaccgagtcaagtacttgggcccattctctggcgagcccccgtcctactaaccggtgagttcccaggcgac

SEQ ID NO: 33703 - DNA, 268 bp, Glycine max
  unsure (1)..(268): unsure at all n locations; Clone ID: 701106952H1
cttcatttcggacattcagatcttcttcgtcctctgantcaagtttcgactttatttgagtagttttgctctttccttccaaaatgagccggccaatggaggaagacactgcaggtaagaatgaggaagaggagttcaacaccggaccactatctgtactcatgatgagtgttaaaaataatactcaggtactgataaattgtcggaacaacaaaaagcttctgggtcgtgtaagggcttttgacaggcactgcaacatggttcttga

SEQ ID NO: 33704 - DNA, 269 bp, Glycine max
  Clone ID: 701106953H1
cagcagcatctgttagtgggttgaaaacgttagagaggaactttgcaacaagcatggagacagcctccagactatggagcattcacagagaaattcactttaccaccaaattctgcaccagctcttcctctcaaatcactcacctttgcagtgaaagagattttcgacacggaaggatacgtgaccggcttcgggaatcctgactgggcaaggactcatccggtggctacctctactgctccaacagctctggctctcctcagagcagg

SEQ ID NO: 33705 - DNA, 267 bp, Glycine max
  unsure (1)..(267): unsure at all n locations; Clone ID: 701106954H1
gaagttggggagtttgctacatttatggcacttggtttgcacttcgtggtcttgcagcggcgggtaaaacttacactaattgtgctgccattcgcaaaggcgttaaatttctactttcaacacagaaagaggatggtgggtggggagaaagttatctttcatgcccaaaacagatatatgtacctcttgaaggangtcgatcaacagttgtgcacactgcttggnctctttgggtctaattcttgctggacaggcagagagagatac

SEQ ID NO: 33706 - DNA, 268 bp, Glycine max
  Clone ID: 701106955H1
tgaaggcatcgttagcagttttgtagattcaacctcaatttgcagagttacgttctaatatatttacacaagactgataagagaaaatgtctctgattccaagtttcttcggtggccgaaggagcagtgttttcgaccctttctccctcgatgtgtgggaccccttcaaggattttccatttcccagttctctttctgctgaaaattcagcgtttgtgagcacacgagtggattggaaggagacaccagaagcacacgtgttcaaggc

SEQ ID NO: 33707 - DNA, 268 bp, Glycine max
  Clone ID: 701106956H1
ggttcgaagaatgctaaaccaattaccaaaactgaaaattgtgaaagcttcttcaatttcttcaaccccccgcaagttcctgaagatgatgaagacatcgatgaagatgtggctgaggaacttcagaatcagatggaacaagactatgacatagggtccacaataagagacaagattattccccatgctgtatcatggtttactggggaggccattcagggggacgagtttggagatctggaggacgatgaggatgatgaagatattg

SEQ ID NO: 33708 - DNA, 270 bp, Glycine max
  Clone ID: 701106957H1
gggcatcgttagcagttttgtagattcaacctcaatttgcagagttacgttctaatatatttacacaagactgataagagaaaatgtctctgattccaagtttcttcggtggccgaaggagcagtgttttcgaccctttctccctcgatgtgtgggaccccttcaaggattttccatttcccagttctctttctgctgaaaattcagcgtttgtgagcacacgagtggattggaaggagacaccagaagcacacgtgttcaaggctgata

SEQ ID NO: 33709 - DNA, 246 bp, Glycine max
  unsure (1)..(246): unsure at all n locations; Clone ID: 701106958H1
agctcacaaagtggtccttttaacnggctcttattgctgacgttcattgccactttgctcactcctctacattactgtgctcacagttatagggtacaagcaccagacggatcatgctgatgcgtgtggtggggttggcattcttggcattgcatgggnctttggtggcatgatcttcatcctgtctactgcactgctgggattcaggaggtcacattaacccagcagtgacattgggctgttttt

SEQ ID NO: 33710 - DNA, 268 bp, Glycine max
  unsure (1)..(268): unsure at all n locations; Clone ID: 701106959H1
aacatttagatggagggcgtccaggaggagataggatatataatgtctttgacaatcagcttcctgctgctttacggaagcttccacttgaccggcatctttctctccagaatgtaagaaaagtggtgtcagacgctgatggttatcagcctcacttgattgccccagagcaaggttacaggcgcttgattgagggagctctcggttactttagaggcccagctgaagcttcagtagatgctnttaactttgttttgaaagaactcgt

SEQ ID NO: 33711 - DNA, 269 bp, Glycine max
  unsure (1)..(269): unsure at all n locations; Clone ID: 701106960H1
cnntcaaaganggcgtcctcataaacgcctttcttctccgtttccgtntcctcgcntgaattcgcttttngatctgcgaaaatganagagtgcatctcgatccacattggtcaggctggtatccaggtcggaaatgcttgcngggagctctactgcctcgagcacggcatcgggcccgatgggcaaatgccaagtgacaagacagttggcggtggtgatgatgctttcaatactttcttcagcgagactggtgctggaaagcacgtgcc

SEQ ID NO: 33712 - DNA, 269 bp, Glycine max
  Clone ID: 701106961H1
ccctcttctcgcaatccgcactaaaattctagggttccgaaatggacgctgacggaaagatcaagaagggcgccggcggaagaaagggcggcggcccaaagaagaagccggtttcaaggtccgtcaaagccggtctccaattccccgtcggaagaattggccgttatttgaagaaaggaaggtacgctcagcgtgtcggtaccggtgctcccgtatacttggctgcagttctcgaatacctagctgccgaggtgcttgagttggctggg

SEQ ID NO: 33713 - DNA, 270 bp, Glycine max
  unsure (1)..(270): unsure at all n locations; Clone ID: 701106962H1
caactcaatttttctctcaaccggcccaatttagcataagcccagcatggccaccgcaacancagcagccacctcgtccttcatggggacgcgcctcctggaggcccattccggggcggggcgggtgcaggcccggttcgggtttggcaagaagaaagccgccgccccgaagaaagtttccagggggtcgggctctagctccgataggcccctgtggtatccgggcgccaaggcgcccgagtacctggatgggagccttgtcggagacta

SEQ ID NO: 33714 - DNA, 265 bp, Glycine max
  unsure (1)..(265): unsure at all n locations; Clone ID: 701106963H1
ctcatttnttgcactagatctcgtgagcnaatttgtntcctttnaancaaaagtgttttttctttgggggggtcttgaataggtttttgggtgaaggagtagtgttggtggctttgtatatcttttagtggataaggatacaacagcatgcggtggtggctagtctctcagttgatgnataccgcaaagtgatttcctgaatctgtattgcaaagttatctgtaactctaagtccctttgatcaaaaaccttttcaatcatctca

SEQ ID NO: 33715 - DNA, 272 bp, Glycine max
  unsure (1)..(272): unsure at all n locations; Clone ID: 701106964H1
gtgagagagagtggtgcaagaggactaagcaaggctntcctctcagcctcaaagaagaggggaaggtggggcccagaagtggaggaaagactccacaggctgggttggcggcaacgactgagcccatccctggttggcaatgtgattgatcctttctgaagagccaccactcccttgcacttggcttcttcaattgggcctctcagcaacccggtttctcccacacacccttcaccttcccactcactcctcaagcacctctcccacaccaa

SEQ ID NO: 33716 - DNA, 270 bp, Glycine max
  unsure (1)..(270): unsure at all n locations; Clone ID: 701106965H1
tttggaaatatcctttcgtgcaaggtagctancggattcatctgggcaatcaaaaggctatggctttgttcaatttgataatgaggaatctgcccaaaaagctatagagaagctgaatggtatgctgttgaatgataaacaagtgtacgtgggacccttccttcgcaagcaagagagagaaagtgctgctgacaaggcaaaattcaacaatgtttttgtgaagaatctatcagaatcaaccaccgatgatgagttgaagaacacttttgg

SEQ ID NO: 33717 - DNA, 229 bp, Glycine max
  unsure (1)..(229): unsure at all n locations; Clone ID: 701106968H1
tattttcttcttctctctctccgtcaccgctgcaagaacctcttctttccattccttacgtactntccgatggaattgagggtggtggcgagggagagcactannacgaggtgctaccgtggaaaacgaggagatccatggctgaagaagaggccacgagcaacgcctctctgatattggctcagaaaaganccacaaggnaggaccctttggataattcaancgtaca

SEQ ID NO: 33718 - DNA, 255 bp, Glycine max
  unsure (1)..(255): unsure at all n locations; Clone ID: 701106969H1
cggcaaaggtgatgcttagacctgcttctcccggtnctggggttattgcagnngggtctgtgagaattgttctggaaatggcaggagttgataatgctttgggaaagcaactagggagtaataatgcactcaacaatgccagagcgactgttgctgctgtgcaganaatgaagcagtttcgtgaggttgctgaggagcgtgggattccaatggaagaattgtgnaagtatgaatttgtgnagggatgtaatttnc

SEQ ID NO: 33719 - DNA, 120 bp, Glycine max
  Clone ID: 701106970H1
ggcagctttatcttctttttctgacctcgcttccatcccctttcatagtaatgattccgcagcttactcttttctctgtctctctttctctttctcttttctctctcaaaacaaaacaaa

SEQ ID NO: 33720 - DNA, 266 bp, Glycine max
  unsure (1)..(266): unsure at all n locations; Clone ID: 701106971H1
tagaacactaccctgaacatagtaaagaagccagtgctaggatttgttagtgaagcaatggctcaaaccatgttgctcatgtctagtntctctagcagttattccgtggatttgaagaaagaccttttcctccaattgcagagtcaaagtttaaggcctaagttctctcagctctcattcaacccacttccatcatcaacttcttcctttcttcaccccgtacattcacaactctggccctcttcaaatctaagaccaaagccgct

SEQ ID NO: 33721 - DNA, 267 bp, Glycine max
  Clone ID: 701106974H1
cagatttacgagacaattttgttcctctcgaaaaccaaccttcatttcccctttttagttttctctgtgtcactctgtttttcattattatcgcaggaaaagaaaaggaaaaaaaaaaccctaatctctggaatagcgttggattggagcgttttgagggcatcaaatcaatagagtgaagcagatcaagaggaagaggagggcacaaccaatgacaatggggtccaccgataaagaattggaagagcagcttctcgacgccggtaa

SEQ ID NO: 33722 - DNA, 268 bp, Glycine max
  Clone ID: 701106975H1
gggcagttactcttgggattgctgcagctgctgctggacttagtatattagctttttctgagatagaatcaatcctccaagttgtaggatcagctgcgctcattcagtttgcaagcaagaagcttttgtttgctgaggaccgaaagcaaaccgtgaaacaacttgatgagttcttgaacaccaaggttgcccctaaagaacttgttgatgaaataaaggatattggaaaggctcttctaccatcctctaccaataataaggctctcct

SEQ ID NO: 33723 - DNA, 176 bp, Glycine max
  Clone ID: 701106976H1
cagaatcaagttcaaattaagagatagaaaagcattccaacctttaattggctccctggtcaccttgattagtccttttgctacttggccaagttggaggggtgctctcattactactgctgcagcaacaattaagaggagctgtttgtccagctacagtgaatcccatgtcatct

SEQ ID NO: 33724 - DNA, 268 bp, Glycine max
  unsure (1)..(268): unsure at all n locations; Clone ID: 701106977H1
ccagncgaaagcgaagnaagagctttcgatccctntaaccgcgttcgacgatntnnggtttttttcggagnccaatggcggatgaatcggagcacacggcggcgccgcgagcggtgaatcgctgcttgacaagatcgccgagaagattcacggccaccacgactcttcctcttcctccgattccgattcggagaaaaaggaaacttcgtcaattaaggaaaaggttttccgcctctttggaagggagaagccagttcactccgtccta

SEQ ID NO: 33725 - DNA, 267 bp, Glycine max
  unsure (1)..(267): unsure at all n locations; Clone ID: 701106978H1
cgcttatgtctggcacagaacaggtgaccatgggaggattaggactcaatttgactccaattactacatttgctatcattactgtgattgctacggtgctaatatggtggttttggaatgcactcaactgggtgtggctgagacccaagaggatagagaggcgtctcaaggagcagggtatccaaggnaattcctaccgccctttgattggagacatcagagatatggttaagatgattaaggaagccaaatccaaacctatggatc

SEQ ID NO: 33726 - DNA, 266 bp, Glycine max
  unsure (1)..(266): unsure at all n locations; Clone ID: 701106980H1
ttgagaactangaaggagaagcaaatggcttcctcaatgatctcttccccagctgttaccactgtncaaccgtgccggtgccggcatggttgctccattcactggcctcaagtccatggctggcttccccaccagaaagaccaacaatgacattacctccattgctagcaacggtggaagagtgcaatgcatgcaggtgtggccaccagttggcaagaagaagtttgagactcttcctacctgccagncttgaggtngcaattgga

SEQ ID NO: 33727 - DNA, 269 bp, Glycine max
  Clone ID: 701106981H1
ctcgtttccctttcgactgtgattgtttgttaactgaacttttcgagcaaaatgtctggacgtggaaaggggggcaagggtttgggaaagggaggagcgaaacgacaccgtaaggtgttgcgcgataacattcagggaatcaccaagcctgcgattcggcgtttggctcgcaggggtggtgtgaagcgtatcagtggtctcatctacgaggagacacgtggcgtgctcaagatctttctggagaacgtgattcgtgacgccgttaccta

SEQ ID NO: 33728 - DNA, 267 bp, Glycine max
  Clone ID: 701106982H1
ttgaatacattgatttatacaatatttatgctccactatgcaagaatgcaaatctcacatccctgccaaaaaggaactcaattgtgactgatccatgtagtgagtattatgtgtatgcatatcttaatagaaaagatgttcaagaggctctccatgccaatgtaaccaacctcaaacatgactgggaaccctgtagcgatgtcataacaaagtgggttgatcaagcttcaacagtttcttccacttttacatgaattcctcaacata

SEQ ID NO: 33729 - DNA, 263 bp, Glycine max
  Clone ID: 701106983H1
cctttgaccatgggaaggttatatggctttgcttctatagcagagacaattccatctctacttcaggcagtttttggctgcgatgaggcatttgatgaccatggttaaggttgctttccttttagtcattgaactgggggtatttccttgatgtgtggatggtggctcgatgtttgtaccattcagatgtttgggaagacaatggttcacagagttcagttcttcctctgcatcccctttagcaagctcattggttcatgggt

SEQ ID NO: 33730 - DNA, 266 bp, Glycine max
  unsure (1)..(266): unsure at all n locations; Clone ID: 701106984H1
gcgngttgttgtaaagctagncttgttgcagccatggccacccacgcggctctagcttctacaaggatccccactaacaccaagttcccatccaaggcttcacactctttcccaacccaatgcgcctcaaagagacttgaggtgacagaattctctgggctaagatccacttcatgtgtgacatatgctaacgatgctagagaatcttcctttttgatctgtagctcccaactcactcccaagaccaatggatcatcaactcctgt

SEQ ID NO: 33731 - DNA, 268 bp, Glycine max
  unsure (1)..(268): unsure at all n locations; Clone ID: 701106986H1
aganaataaaataggtgaaatgaatatngatttcaattccgccactgaatttcgacnccaaaaaaccattccaacgaagaagatgaacctcgaagaagagggttagttacttctgagtgagtgagtgagttagtggttcctctgaggaacggtgaggaccttcaatttctcaagttctcaaccgttcgttttctctttcgttcccctaaccgccgtggatgggacaatctgtttcctccgccgccgtcgctagccgtcgcgagaggga

SEQ ID NO: 33732 - DNA, 266 bp, Glycine max
  Clone ID: 701106987H1
caaatcattaatcaaccaccaccttaacacaacaacaccatgatgtccatcttcagccacttcgagatcgcgcaggcccagaactggagcttttctttgctcccagtaaaaagcacgaattcgaagcccaacacagaagccacttcctcctccgctgagtccaaaacccccagaaaattttccaatctatcacaacccggtggatccaagcaaaacccgccccgtttgaggcccagatttgcgccggagttggagggttacatgct

SEQ ID NO: 33733 - DNA, 266 bp, Glycine max
  Clone ID: 701106988H1
gaatggctcccaagggtttaacctttctggctgtgttaatatgcgtttcagcactgtcactgagtccttctgttgcgggggaagggcaaaataatggccttgttatgaacttctacaaggaatcatgccctcaggctgaagacatcatcacagaacaagtcaagcttctctacaagcgccacaagaacactgctttctcctggctcaggaacatcttccatgactgtgctgttcagagttgtgatgcttcactgttgctggactcc

SEQ ID NO: 33734 - DNA, 266 bp, Glycine max
  unsure (1)..(266): unsure at all n locations; Clone ID: 701106989H1
cggaacctctttctcaggttttataaaatctcatgtctgttcaaagctttcttattcttcgtattcatcatacaccacgccaaatcacaatacccttcagtttttgggaattttggctcagttgagatctctgtgaaacgggtttggaaaattttttgatcttgaggtttatgagattttaactgtggaaganagatggtgggtgagaagttttgtgtgagcgaagatgacaagggtgtgttagagtctgtgttgggtgcagaggc

SEQ ID NO: 33735 - DNA, 267 bp, Glycine max
  unsure (1)..(267): unsure at all n locations; Clone ID: 701106990H1
ctttttntttcctgtaatccaggaaatgaaattgctagcttaatactgatctgtagagaagacaagggaacttgcttgctatggcaactctgancaattcaactaatatcttttggcaagattgtcaagtaggaaggcttganaggcagaagctacttaaccaaaagggatgtgttgtatggattactggactcagcggatcaggaaaaagcacattggcatgttccctaagcagagaactgcactcaaagggaaagttatcttatg

SEQ ID NO: 33736 - DNA, 268 bp, Glycine max
  unsure (1)..(268): unsure at all n locations; Clone ID: 701106991H1
ctagttagagcttcttcccacttcctncgccgccaccgccaccaacaccgatggcggatccgaaagcctactggtgccacgagtgcgacatgagcgtgtccctgacgctcccancctcccctctcctatgcccgcactgccacacccacttcctcgagctcatggactccccaaccctctcccaaaacgacaccgaatcctccctcttcgacgtcgttttccaagacgctctcttactcctcaaggcnctnttttcaaaancccgcnt

SEQ ID NO: 33737 - DNA, 266 bp, Glycine max
  unsure (1)..(266): unsure at all n locations; Clone ID: 701106992H1
tgttggagagcaatttggaagcaaagtccaaaatttacaaggaccctgctttgtgttatattttcttgatgaacaatgggaggtacattgttcagaagaccaaagatagtgaattgggaaccctcttgggagaagattggatcagaaaacacgctgcaaaagttaggcaattccatgtgcactatcaaagaagctcgtggaataagctattagggannctgaagttggatagtaatgggtcatgccccatattaacttggcaaagt

SEQ ID NO: 33738 - DNA, 268 bp, Glycine max
  unsure (1)..(268): unsure at all n locations; Clone ID: 701106993H1
gaagaatcactcccttatccatttccacacnacatcatagnnncaaccaacgctctctcttcagcctccattctacgctctcccaannnccagtctctgatccgaagagcgaaccataatggaagagtaaattaccggaaaccgaataaccgtttctccgtgaaagcctccgccaaagagattgcctttgaccagcattcccgctctgctatgcaggccggcattgacaagctcgccgacgctgttgggctcactcttgggcccagag

SEQ ID NO: 33739 - DNA, 266 bp, Glycine max
  unsure (1)..(266): unsure at all n locations; Clone ID: 701106994H1
acaacttctgctacttnctactccaaccgcacttctgttccgcaattatcatgggcaaggtcaagatcggaatcaacggatttggaagaattggccgtttggtagccagagtggctctgcagagagacgatgttgaactcgttgccgttaacgaccctttcatcaccaccgattacatgacatacatgtttaaatacgacagtgttcatggacactggaagcatcacgatgtcaccgttaaggacgagaagacccttctcttcggt

SEQ ID NO: 33740 - DNA, 270 bp, Glycine max
  unsure (1)..(270): unsure at all n locations; Clone ID: 701106995H1
cgagacnnnacctcagagaanccaaattccgcgncaagaggttagggtttggcgtttctgcgagangaagnagagagagcagaagcagcaatggaagcatacggcggcttcatggtcgacgagaaagccgttagggntgagaacgctttccttgatttccncaaaagcttcaagtctantagccagcggaacgaactttattacgaagcggnnatcgnattgatgacgagctatgnntccaacaccangntcatcgatttcgaccacgtc

SEQ ID NO: 33741 - DNA, 269 bp, Glycine max
  Clone ID: 701106996H1
tcgatcttttctattccctcaccaacgtaccgttgttcaatttcaatttcaatttctcggcagccattgccatgttctttcacggctcaagtgagaagaagagggaaagggaaagtggtaatgagcatggaggcaggcattggagtgatgggcaccaagttgggtatgatgagctatttcgaatccgacggagaggttgttcctgtcactgtcgtgggtttcaaagaaggcaacatcgtcacccagatcaaaactgaggccaccgatgg

SEQ ID NO: 33742 - DNA, 118 bp, Glycine max
  unsure (1)..(118): unsure at all n locations; Clone ID: 701107001H1
annataataacagcctctgccgcagttcgttctttctcagatcgcgccaccggaaccgccatggaggacttgtccgggccanctgaatattcctccggccgcctncgcggcgactctc

SEQ ID NO: 33743 - DNA, 253 bp, Glycine max
  Clone ID: 701107003H1
gcagaatcaggcatgtcatagttaataactatattaacacgttctatgtcaatcccccttcctacttgcacagggtgggaagagctggtagatttggcacgaagggtcttgcaattacttttgtgtcttctatgctgactctgaggttcttaatcaggtgcaatctaggtttgaggttgacataaaggagcttcctgaacaaattgacacttcgacatatatgccaaactgatgacgttttggaactattagg

SEQ ID NO: 33744 - DNA, 253 bp, Glycine max
  unsure (1)..(253): unsure at all n locations; Clone ID: 701107004H1
ctctccagaaccctcgtcaccgcctcaccattttgaggatggtgctggacatccagaagtttttgaataatgctgatcagcagcattttgagtttcaacatttcccttcttcctacctccgactggctgccaccgtgttgctcaacactacaacatgcaaacaatggttcaagatatcggcttagatggccagggaagtaaaattctggngaggaagttaccagaaagcaagtatcctgtggttcgattatct

SEQ ID NO: 33745 - DNA, 252 bp, Glycine max
  Clone ID: 701107005H1
gcggtagaaggtatcccatacctgacaaatcagcacctatttacataacaatcggagatggaggaaatctagaaggtcttgcctcaagttatttggatccacagccagaatattctgcattcagagaagcggctatggacacgccacactggagataaaaaacaggacccatgctatctaccactggtatcgcaatgatgacggaaagaaagtcccagctgactctctcgtattgcataaccagtattgggg

SEQ ID NO: 33746 - DNA, 252 bp, Glycine max
  unsure (1)..(252): unsure at all n locations; Clone ID: 701107006H1
tcaattccaacaacaccacaatgngaagaagaccggcgaggtgttaccggcagataaagaacaaaccgtacccgaaatcccgtttctgccgcggcgtgccggagccgaagatccgaatctacgacntgggatgaagaagaaaggcgtggacgagttcccgttctgcgtgcacctggtctcgtgggagaaggagaacgtctccagcgaggctttggaggcggcgcgcatcgcatgcaacaagtacatggccaa

SEQ ID NO: 33747 - DNA, 252 bp, Glycine max
  Clone ID: 701107007H1
ggctgttttgaacattcacccaatttgcagagttccaagttatatacatacactgcataattaagagaaaatgtctctgattccaagtttcttcggtggccgaaggagcagtgttttcgaccctttctcctcgatgtgtgggagccctttaaggattttccatttcccagttctctttctgctgaaaattcagcctttgtgagcacacgagtggattggaaggagacaccagaagcacacgtgttcaaggct

SEQ ID NO: 33748 - DNA, 245 bp, Glycine max
  Clone ID: 701107008H1
attcaacaggactttccgttcacgacactcccttttatcgtttcacttccgtcgtcgtcgtcttcaattttggatcttcgaatcgaatcgcatcctatgggtagcagcagaggacacacgctctggaggttggacccgacggggttgccgtcatcaccatcgtcaaccctcccgttaattcactttcctttgatgtattgcgcagtttaaaggagagttttgatcaggcgatacagagagatgat

SEQ ID NO: 33749 - DNA, 255 bp, Glycine max
  unsure (1)..(255): unsure at all n locations; Clone ID: 701107009H1
tttttgagaagaatatggaacgaagtgncggaatggtaacggggtcgcatgancaggaacgaacttgttagagttagacacggttctgacagtgggtctaaacccttgaagaatttaaatggtcagatttgtaaatatgtggtgacaccattggattaacggctactggtgacctctttgttgcttgtcatgagtgtggcttcccactttgtcattcttgttacgagtatgagctgaaaaatgtgagccaatctt

SEQ ID NO: 33750 - DNA, 255 bp, Glycine max
  unsure (1)..(255): unsure at all n locations; Clone ID: 701107010H1
gaaaacccaaagtgcttctctcctctgtctttttctctctcttgctatccttttggctagtngcactgctgcaagtgcaacttccaagaagcgcagtgccaagccaccatgtttcaacattcaacagaagccttttccttccacttttctctttggatntggttcttctgcttaccaggcagaaggagcagcaagtgtagatgggagaggaccaagcatatgggacacctacactagacagcatactgaaaagat

SEQ ID NO: 33751 - DNA, 254 bp, Glycine max
  unsure (1)..(254): unsure at all n locations; Clone ID: 701107012H1
cttattttcctttgtaatggaaagttagaaaccctcatcgtcaaancacgcgttttttttaatctctctctctcaacaaatatttgtgggtagattcaattcaccatgtcgagctcatcggagtactctgaanttccggccagaaaccggcgaggtcgccggagaaatcgagcttctctcagacttgcagtctgttgagtcaatacatcaaggagaagggtagcttcggagatcttaccctcggaatgacatca

SEQ ID NO: 33752 - DNA, 256 bp, Glycine max
  unsure (1)..(256): unsure at all n locations; Clone ID: 701107013H1
cacatcacancncaactcaagtttacaccaactaccccttttccttcgtttccgttttcttctcaaattgttcctattttcactgtgattcaccccaccaaattatgtgtttctctctgcacttgccaaccccgaattcatagggtctctctcttcttatttncaggttttggtttgaagaatggggattcagacagtgggatctctaggtaacgggcaacagtctcatttacagccttcatcattgtctaggcaa

SEQ ID NO: 33753 - DNA, 255 bp, Glycine max
  unsure (1)..(255): unsure at all n locations; Clone ID: 701107014H1
aacctttcgcgttctcttctctaggcgcattcatttcgctagattctcactttccaaggaatctactattgcttcgtaagctaaacaaaacaaacacaaactaattatttgttcgggatcgttctgaatatctaagaaaaacaacacatcacgncnnatacgataccgtttcgttgggaaacagcaatgggagatggtaattatgatatgagggagttctgtattcctgattacatattagtgccgggatctgag

SEQ ID NO: 33754 - DNA, 212 bp, Glycine max
  unsure (1)..(212): unsure at all n locations; Clone ID: 701107016H1
ctggcaacnatggcnactaccttatgttanaattctcttaanccttcaacaaccgtnttctcangaacccatttctcagtnncctngataaagagcttccactggatgcttcaccnnntgttgttggctataactgnggtgtaggatgcagancnaggaagcaaaggaagaaagtnatgcatgtgaagtgtgcagtggtggaggctccacca

SEQ ID NO: 33755 - DNA, 258 bp, Glycine max
  unsure (1)..(258): unsure at all n locations; Clone ID: 701107017H1
gnacangtagttgagaactanganggagaagcaaatggcttcctcaatgatctcttccccagctgttaccactgtacaancgtgccggtgccggcatggttgctccattcactggcctcaagtccatggctggttccccaccagaaagaccaacaatgacattacctccattgctagcaacggtggaagagtgcaatgcatgcaggtgtggccaccagttggcaagaagaagtttgagactctttcctacctgccaga

SEQ ID NO: 33756 - DNA, 228 bp, Glycine max
  unsure (1)..(228): unsure at all n locations; Clone ID: 701107018H1
aacaacgaccatgaacactaatgacagcaacaaccaacgtttacntgtctctgccacatgcttccgtgccactcctccttcgtgctcaatgaatccatgccacacagtttttcagttataaactccctgaatcctcacaagggacgacggataagcgttgctgttccacccaagtttccaaacttccggagggaagcatctctgcaggggaatttggaggctattaga

SEQ ID NO: 33757 - DNA, 251 bp, Glycine max
  unsure (1)..(251): unsure at all n locations; Clone ID: 701107020H1
gaaatggaaaagtacgagaagctggngaaggtgggagaaggaacatacgggaaagtgtacaaggctcgggagaaggcgagtgggagcctggtggctctgaagaagacgcgtctggagatgnacgnngaggtgtccctcccaccgcactacgcgaggtgtctctccttcagcttctctcccaatccgtctacatacgtccgcctcctctccgtcgaacacgtcgacaaggtccccaagtcccagaaatcctc

SEQ ID NO: 33758 - DNA, 251 bp, Glycine max
  Clone ID: 701107022H1
cagcacaacacaattcactaagctaaaatcacttcatcatggcttcctcgtgtgcttcctctgccattgcagctgttgccatctccacaccaagttcccagaagaatggatcactcttgggaagcacaaagcttcttttcttagtgggaggaaactgaaggtgaacaactttacagcaccagttggagcacgatccagcactacagtttgcgcagttgctgagcctgataggcctctgtggttcccaggca

SEQ ID NO: 33759 - DNA, 241 bp, Glycine max
  unsure (1)..(241): unsure at all n locations; Clone ID: 701107023H1
atttggttatgtggcaccggaatatgctaatacaggtttgttaaatgagaggagtnacatttacagctttggtgttctcctgcttgaagcagttactggaagggatcctgtggactactccgtccttctaacgaggtgaatcttgttgaatggctcaagatgatggtggggacaaggagaactgaggaagttgtcgactcaaggcttgaagtgaaaccatcaatacgtgctttaaagtgtg

SEQ ID NO: 33760 - DNA, 252 bp, Glycine max
  unsure (1)..(252): unsure at all n locations; Clone ID: 701107024H1
agggtttcctgtgttctcggccatagatgaccttttcgatgaaggncctttacttgcctcctctaaaaggtatcaggagtatcttgcccaggctcgttaggcatattaaggatattcaggaagacattctctttttgatcctcccgcaacaatgaacaaggccagatttttctggttaagggacgaagaatttggaagacagactctcgcgggtcttaacccttgctgcatccaattggtcacggaatggcc

SEQ ID NO: 33761 - DNA, 251 bp, Glycine max
  unsure (1)..(251): unsure at all n locations; Clone ID: 701107025H1
agtcattattaatggagtaaaccaaatttctcactgttgttatactgtattgctgtatttgattcctgcatccaattttnatgttatgcttatgaattaataattttgaaacgttggaattgctcctccttctgcttttaatggggttatagttcacagtttaagagtgaaagattatttttttattggcaaatgttggagtagcgcctattgtagagaagatggtggaaaatagacttaggtggtttggg

SEQ ID NO: 33762 - DNA, 254 bp, Glycine max
  Clone ID: 701107026H1
cagcctctctgttccaaaaccctaatccttcgtcttccaaggagatggctgattctcccctcgcaaggaactcaaggtcaccttccccatggaaagctcagtcgagatcgagatctaggtcaaggtcgagatctaggtcgaggtctaggcctagacaaaggccaagatcgcgttctagaagtcgtggcaggtcaaggtcaccaattcgtggaaggtcaaggtcaccaattcatggaaggtctgaacctacaaat

SEQ ID NO: 33763 - DNA, 251 bp, Glycine max
  unsure (1)..(251): unsure at all n locations; Clone ID: 701107027H1
gcaacagaaacaaaagtggcagtattaggtggcatcaccgaagtgcagggagctgccaacagcgtcgagatcaacaatctcgctcgctttgctgtagaggaacaaaacaaaagagagaattcagttctgggtttgtgagggtgattagtgcacagcagcaagtggtttctggagtgaattactacataacattggaagcaaaaganggtgagattaaaaatgagtataaagcgaaggtttgggagagggaa

SEQ ID NO: 33764 - DNA, 249 bp, Glycine max
  unsure (1)..(249): unsure at all n locations; Clone ID: 701107028H1
atgtcctcccaatctgacgccgttggctgtaacttgaaggagacggagctcaccttaggccttcccggcaccaaaactaatggcacaaaacgtggcttctccgacacccttaacacttctcataataaatgttgcnccccacctccaaggaacaagtggtggggtggccgccggtgagggcaagcaggaaaaatgctatgaagatgagttgcaagttggtgaaggtggcggtggatggagctcctatct

SEQ ID NO: 33765 - DNA, 251 bp, Glycine max
  Clone ID: 701107029H1
tggatcaattccagaaagccttggacagttgacatcattacaaagactgtaagattctccagtgtttaactaacccataaaacacatatgaaggcaacaaatgagtatcacaatgtcttcatgcaggaacttaacagcaacctcctatctggaagggtcccagcaactgtaggaggaagactactctacagagctagcttcaagtatgtaatcaaatattaaactctagacaaattatagaatacgtaatt

SEQ ID NO: 33766 - DNA, 254 bp, Glycine max
  unsure (1)..(254): unsure at all n locations; Clone ID: 701107031H1
ctttctttgaatcccattattttctgcgtcaatttngctganaancttaagtgggtatcctgaaaacactagattcttcgattcgtttggtaagcggatttttaggttngattattacgtttttctgttcttttggatatngaggtttcggtgattggaagctctcaagcgaatctgggagcgtcggaattggcatctagggaagttggattttgcaatcttaagaacaatttaagggctttgaatgatagagt

SEQ ID NO: 33767 - DNA, 254 bp, Glycine max
  unsure (1)..(254): unsure at all n locations; Clone ID: 701107032H1
tgaagatcacgccggtccagaagcagacccgggccgggcagaggacccggttcaaggccttcgtcgtcgtcggagacaacaacggccacgtcgggctgggcgtgaagtgcagcaaggaagtggcgacagtatcgtggcgcgattattctggcgaantgtctgttatccccgtgaggagggggtactgggggaacaagatcgggaagccccacaccgtcccgtgcaaggtcacggggaagtgcggctccgttacc

SEQ ID NO: 33768 - DNA, 255 bp, Glycine max
  Clone ID: 701107033H1
ctcaaattggtcatcataagaacaataccaccaacagcaacatcccagtgattgacatgaagcacatctacggtggtgacgagggaaagagggctgagacgctccggctcgtgtcggaggcgtgccaagaaggggttttttccaggtggtgaaccatggagtgagccatgagttgatgaagggggcaagggaggtgtggagggagttctttcaccagccacttgatgtgaaagaggtgtatgctaatacacccct

SEQ ID NO: 33769 - DNA, 253 bp, Glycine max
  unsure (1)..(253): unsure at all n locations; Clone ID: 701107034H1
gaagaccaaatcgaggaatccggaaagggangaagaagaagnagaagagagtgggttgggttgcgtgccccgttccgttcgttcttcccctttcctttcaattctttcttttcaattctttttcttctgaacacagaaaaaacagaagatgggaatgaaacaagtcattaaaaacctcgacgcctttccctcgcgccgaggatcacttgttgcagaaaacccaatctggggctctcgtatccgtaattggtct

SEQ ID NO: 33770 - DNA, 250 bp, Glycine max
  Clone ID: 701107035H1
agaatccgaggcgaagagaagagaaaaattaagatggaggggaaggagcaggatgtgtcgctgggagcgaacaagttcccggagagacagccgattgggacggcggcgcagagccaagacgacggcaagactaccaggagccggcgccggcgccactggttgacccgacggagtttacgtcatggtccttttacagagcagggatagcagagtttgtggccacttttctgtttctatacatcactgtctt

SEQ ID NO: 33771 - DNA, 250 bp, Glycine max
  unsure (1)..(250): unsure at all n locations; Clone ID: 701107037H1
tgccatataattttnttttatttganataatgtccgggatcatccacaagattgangagaccctccatgtgggagggcacaaganagangagcacaaaggagaacaccatggtgagcacaaaggtgacacaaaggagaacaccatggtgagcacaaaggtgaacacaaaggngaacaacaccatggggagcacaaggngggacttgtggataagatcaaggacaagatccatggtgatggccatgacaag

SEQ ID NO: 33772 - DNA, 239 bp, Glycine max
  Clone ID: 701107038H1
aagcgattttgagggaagaagaagatgaggccgatttttgctgggaacttggagtacgatactcgtcaatcagagcttgagcgcttgttctcaaagtatggaaggattgaccgcgtggacatgaaatctggttttgcttttgtctattatgaggatgagcgtgatgcagaagaagcaattcgtgcacttgacaatgttccatttggtcatgaaaagcgaaggctgtcagtggagtgggc

SEQ ID NO: 33773 - DNA, 249 bp, Glycine max
  unsure (1)..(249): unsure at all n locations; Clone ID: 701107039H1
ctcttgtcacattccacanaaacnaagtatccctacaagggaagaanaacttanctactaaggaaggatcaaagagnntggctcaagcaatggcatcaatggctggcttgcgtggttcctctcaggcttgttggaaggtagccttcaggtgagtggctccacacgcttgaatgtggggagtggaagcagggtggcctcagtcacacgtgcagggttcacagttagagcacaacaacaacaagtgagtgg

SEQ ID NO: 33774 - DNA, 250 bp, Glycine max
  unsure (1)..(250): unsure at all n locations; Clone ID: 701107040H1
cttttttctctctcttgcaaaacctaattttcatttcttccctcaantttcaaaatgcgtgagatccttcacatccagggtggccaatgcggcaaccagatcggcgccaagttctgggaggtggtttggcggagcacgggatcgaccctaccggaaggtacggtggggactcggagttgcagctcgagaggatcaatgtctactacaacgaggccagttgcggtcggttcgtgccgcgcgcggttctcat

SEQ ID NO: 33775 - DNA, 207 bp, Glycine max
  Clone ID: 701107044H1
gagaaagaaaagaatggcaaagttaataaaattctttgagttgaacacaggggccaagattccttctgttgggttaggcacttggcagctgagcctggtgttgtagccaaagctgtcaccacagccattctggttggatacaggcatattgattgtgctcaagcgtataacaatcaagcagagattggttctgctcttaagaagctt

SEQ ID NO: 33776 - DNA, 249 bp, Glycine max
  unsure (1)..(249): unsure at all n locations; Clone ID: 701107045H1
ctacgctaacgggattctgaatgtctccgcagaggacaagactgctggtgtgaagaacaagatcacgatcaccaacgacaagggtaggctgagcaaggaggagattgagaagatgttgaaggatgcaggaggtacaaggcggaggatgaagaggtgaagaagaaggtggaggcgaaaaactcgcttgagaactacgcgtataatatgaganacacnataaaggatgagaagattggagagaagttgagc

SEQ ID NO: 33777 - DNA, 250 bp, Glycine max
  Clone ID: 701107046H1
cacatactttgtgttgccaactataatattaaacggcggtggaatagaatatgccacatttggaaatgaaacttgccctgtcactgttgcgcaatctcgcgatcagttctgcaagggctttccgataaccatttcatccccagcccgaatccgtcacatcagcgaaggccttagtttgaacattgggttcactttcgcatccccgtgttcccccgcttctgagtggaccattgtgaaggatcaaccagaa

SEQ ID NO: 33778 - DNA, 203 bp, Glycine max
  unsure (1)..(203): unsure at all n locations; Clone ID: 701107048H1
ctttaccaaattccaatttccaattcaaaaccctaactccgttcgaagcanccaaatcgtgatggcaccaaaggcaganaagaagccagcagagaagaagcccgcggaggagaagaaatcgacggtgggaacaaggctccggcggagaagaagccaaaggccggaaagaagcttccgaaggagggaggcgccggcggagaagg

SEQ ID NO: 33779 - DNA, 251 bp, Glycine max
  unsure (1)..(251): unsure at all n locations; Clone ID: 701107049H1
atatnagcagcngtgcagggaagttggtgtgtgtcaccggtgctgccggttatattgcttcatggattgtccaagttcctacttgaacgtggttacactgtcagggccactgttcgaaacccaaatgatacacgaaggtagaacatttgctaaaacttgaaggtgcaaaggagagactgcacctttttaaggcagatcttttnggtganaattcttttgactccangttgagggctgtgatggcgtcttca

SEQ ID NO: 33780 - DNA, 253 bp, Glycine max
  Clone ID: 701107050H1
ggcgtgacaaaagcaaaaggaaagaatatcaacaaggtaaagtagattccttactagacatggcgttgaaggacacattctacatatctcatggatcaccaactttgtccatagatgaatccattctggcaggaagttccttcagtcatggaagaaggacgtgtttcctcaaagaccctcttcaattcttgtcatctctggtcattgggaaaccgcagttcccacggtcaacgtcgttgactccatcaacgac

SEQ ID NO: 33781 - DNA, 119 bp, Glycine max
  unsure (1)..(119): unsure at all n locations; Clone ID: 701107052H1
gatccgtgttgctaacncacagtccctcnctcanccacgtctctncncgcttcagatcttaaacgtctttcgctggtgcgtttttttctcttccgatccatttccacacannatacgag

SEQ ID NO: 33782 - DNA, 248 bp, Glycine max
  unsure (1)..(248): unsure at all n locations; Clone ID: 701107054H1
caagccccaacgggtcttctcgcgttccgtcgccgacgacgaacgccgtttaaatccacaaacgacgcttggnatgttctgtacgcagctgcaggggaagttgcgaggttgaagatgaacgatttagttcttcgaagtatgatttccagaaccgtggagtgctgggtggttttcctccacctgttgcggcggagaatgtatttttttccaaaccagggtgtttctcaggttcgataccagcaagtgag

SEQ ID NO: 33783 - DNA, 190 bp, Glycine max
  unsure (1)..(190): unsure at all n locations; Clone ID: 701107055H1
cccttttatatttctgggttcgatattgttatcggnttatttgtgcactacttccgccggctattcannntcatggctagggttttggctcagtctattaatgtccctggtctattggctgagcataggcatggtcagcaaaaggaatcaggaaaattaaaaagatcgaccaaaatgatgagtgctttac

SEQ ID NO: 33784 - DNA, 253 bp, Glycine max
  unsure (1)..(253): unsure at all n locations; Clone ID: 701107056H1
cttggttattctacttcttctttctcctcctcagaacctcaaacaccnaaaccaagcattacaattcccaatttcacagaaacaccagaattaataaaacacataacaacaaaagaagtgaaaaatggcggctcagtggagaaggagggtggcgcgagcgaggaaactttctctgtggagcttcctgctccacctggttggaagaagctgttcatcccaaagaaagctggtaccccaaagaaaaacgagattg

SEQ ID NO: 33785 - DNA, 253 bp, Glycine max
  unsure (1)..(253): unsure at all n locations; Clone ID: 701107057H1
cttccctttgtttccattttccattttctcattctcanttccaaaactcctccattcattcctcgcatttccatcttnccaaagctctntctctcaaagatcgagctttggaaaacttgaggaagcatttgagtancaaaccctttttcagatccctgaagggttgtgttcatttgtcgaaataataacaacttgcttggaacaagcataagccatggcaagcgcgttgcagcagcttcaaggggttcaaggg

SEQ ID NO: 33786 - DNA, 249 bp, Glycine max
  unsure (1)..(249): unsure at all n locations; Clone ID: 701107059H1
cagntagaggcttctattaactcactnatctgtctatctccttccccaccaaaactcaacacaacaacatcactcttacagcttccgaaccctccatcatggccttgtcaagtccacacatacaaagntnctcttatgcaagcttcatagccgctccancgccaagaacagacacagaaacagcttcaccgccacaaccaccaccaggagcagttgctgctctgccatagccattgatgcncngtcgtc

SEQ ID NO: 33787 - DNA, 237 bp, Glycine max
  unsure (1)..(237): unsure at all n locations; Clone ID: 701107060H1
anattannngaggtgtagcnggtggaagcattctgangggtgttttgaaggtccntcaattcattgaagttcgtcctggcattgttgttaaagacgagagtggaaatatcagatgcaccccatatactcaagaatagtttcattgtacgctgancaaaatgagcttcaatttgctgtgcctggaggcctaattggtgttgggacaacaatggatcccacttgacacgcgctgatagg

SEQ ID NO: 33788 - DNA, 248 bp, Glycine max
  unsure (1)..(248): unsure at all n locations; Clone ID: 701107061H1
tgaatcgaagttaattgctctcacccactctcagcttctgcttctaaatctgaactcaacggttctgtgaaatcaaaatccgcggnngttcagcattctagggtgatattttcatggatggagatgtagcagtgaaagcccaatcgaaactaagaaagccaagtnaaaaacccctcgaaaacctaaagaaaccattctgaagcaaaaatccccctgccgaattcttcgcagaaaataagaacattgca

SEQ ID NO: 33789 - DNA, 253 bp, Glycine max
  unsure (1)..(253): unsure at all n locations; Clone ID: 701107063H1
ctgaagctgatatgcaagtngatcttgacagaaggaggccaggtcagagccgaattacaactcctagaaaggagactgatacatgtaaaatattttcaggagtttccgaaggaatcactactggaactcaattcatgtatctgtacccaatactgatcaaagaggacatgactatagcgagatggcagtagcttataggccctcccatgcagatgctacctatgacntgaagtatggtgtcagatcagttcag

SEQ ID NO: 33790 - DNA, 252 bp, Glycine max
  unsure (1)..(252): unsure at all n locations; Clone ID: 701107064H1
tttattcttctctcggngtcgccatggacgaagaagaggtgcgcaagatcttcagcaagttcgacaagaacggcgacggcaagatctcgtgcgcggantgaaggagatgatggcggcgctgggatccaaacgacgtcggacgaggtgaagcgcatgatggcggagctggaccggaacggcgacggctacattgacttgntgagttcggcgagttccactgcggcggcggtggcgacgggagggagctccggg

SEQ ID NO: 33791 - DNA, 251 bp, Glycine max
  unsure (1)..(251): unsure at all n locations; Clone ID: 701107067H1
cacaaggcagaaagcaagctcatcctagagttttaaaaatggcagacgcctcctccatggctctctcttccccatccttggctggcncggccgtgaagctgggcccatcagcccccgaagtcgggaggtcagcatgaggaagaccgtcaccaagcaggcctcctccggaagcccatggtacggcccagaccgcgtcaagtacttgggcccattctctggcgagcccccgtcctacatncactggcgagttc

SEQ ID NO: 33792 - DNA, 247 bp, Glycine max
  unsure (1)..(247): unsure at all n locations; Clone ID: 701107068H1
taacttaaggtttcaatcctaggaagttggaagtcntggcagcaacattgatggnagcnacaacaagttctggtactcttaaagcaactcctttccttggccaaggcaagggtgccaatgccaatgctcttagggatgttgtctccatgggaactgggaagtacaccatgggcaatgatttgtggtatggaccagacagagtgaaatacttgggacccttctcagctcagaccccttcatacttgaa

SEQ ID NO: 33793 - DNA, 248 bp, Glycine max
  unsure (1)..(248): unsure at all n locations; Clone ID: 701107069H1
tcagccgaaagcgaagaaagagctttcgatccctgtaaccgcgttcgacgatttagggtttntttcggagacaatggcggatgaatcggagcacacngcggcgccggcgagcggtgaatcgctgttgacaagatcgccgagaagattcacggccaccacgactcttcctcttcctccgattccgattcggagaaaaaggaaactttcgtcaattaaggaaaaggttttccgcctctttggaagggaga

SEQ ID NO: 33794 - DNA, 246 bp, Glycine max
  Clone ID: 701107070H1
ctcttcttcttcttccaattgcgctcactgcttcgctcgctaacaacgcatttctgaaaatcccaacactccatcatggcgaatgctcactgtcttcgtcatccttcatcggttctcggctcacatctcgcgctcttgtactcttcaagggaaccaattgctttcgagaaagcaattcgtggttttcgcgaggaagatttcggggttggaggaggccatgaatatcagaagagaacgtgaagttcg

SEQ ID NO: 33795 - DNA, 249 bp, Glycine max
  unsure (1)..(249): unsure at all n locations; Clone ID: 701107071H1
ctcaatttttctctcaaccggcccaatntcagcataagcccagcatggccaccgcaacagcagcagccacctcgtccttcatggggacgcgcctcctggaggcccattccggggcggggcgggtgcagcccggttcgggtttggcaagaagaaagccgccgccccgaagaaagtttccagggggttcgggctctagctccgataggcccctgtggtatccgggcgccaaggcgccggagtacctggatg

SEQ ID NO: 33796 - DNA, 248 bp, Glycine max
  unsure (1)..(248): unsure at all n locations; Clone ID: 701107072H1
ccagctacctgcaggactctctaatgaattgaaggactttggagagcaggtgattgatgctgacataaagtcatatggggtaatcataaatacttttgaagagttggagaaggcatatgtgagggatacaagaaggtgagaaacgataaggtgtggtgcattggtcctgtntcattatgtaacaaagatggcttggataaggctcaaagaggcaaccgggcctcaattaatgagcatcattgcttgaa

SEQ ID NO: 33797 - DNA, 228 bp, Glycine max
  unsure (1)..(228): unsure at all n locations; Clone ID: 701107074H1
ggcttagtgaaattattataggcaccncttttgactgggagtncccacaatgatgagttctanctagatgaacatggaaacacaagaacaagaacaaatcgctctgggggatacaggtatttgtgctgttctgtaattactaattagttgtttctagatatgcactatatcagtcacatgtctatatttgttttacttatattatctgtattgacaatcagggtggaa

SEQ ID NO: 33798 - DNA, 249 bp, Glycine max
  unsure (1)..(249): unsure at all n locations; Clone ID: 701107075H1
ctcagctttccttcgatccctgaatctggacgttactaaagcagcccagccatccacgcaccattttaaaagccaacacagaaagcacagaaccaccacatcgttgccttcctctaaacgataaattttgggattctgaaactagtgatacattttcttgcatganggcagcgtattgaggaattcagttagtgtattggaagatctagttcaacatgtcttctgtaagcaagggtgataggaaggctt

SEQ ID NO: 33799 - DNA, 247 bp, Glycine max
  unsure (1)..(247): unsure at all n locations; Clone ID: 701107076H1
cgncgnananggtattgacgtcgangatgaaaatgaaattggtgaaaacattactgcntcncctttgtgtgaaactcttctgttatgcagtgattggtgctcctcaaacttgtcctgctaacaatgaggataaatgcggcgattcagatgaatggaaaggggagtttttccctgacattcccaaaattaaatatgagggtccgtcaagtaagaatgtgctttcatttaaatggtataatgcagagga

SEQ ID NO: 33800 - DNA, 239 bp, Glycine max
  unsure (1)..(239): unsure at all n locations; Clone ID: 701107077H1
attttatgttgagaaatttgagtgttttttttttgtccacccatgttttgttgaccaaatgagctttcaattcaagtggtttatcttatttattggaattttggtaactttnactcgtcccgttattaccatatngaaaaattgaacttttcttttttactagacccatttttgngacctnattttgcngttttttataataaaaaaatgatccatagtatttgttgaaaattctgttt

SEQ ID NO: 33801 - DNA, 245 bp, Glycine max
  Clone ID: 701107078H1
attgtttgttgttgtaactcgttcttcttcttttgttgttctgtgtttgtgtttgttttttctcacctgaaaatgtcttgctgcggtggtaactgtggttgcggaagctcctgcaagtgcggcacggctgcggaggctgcaagatgtacccagacttgagctacactgagtcaaccaccaccgagaccttggtcatgggagtggcacctgttaaggctcaattcgagggtgctgaaatgggtgtg

SEQ ID NO: 33802 - DNA, 250 bp, Glycine max
  Clone ID: 701107079H1
gctttattactgggaaacctgtatttggtactctcgttgctcttctacaaaatggcacaccaatccttggcataattgatcaacctgtgttaagagaaaggtggatcgggatagcaggaaagagaactcactgaacggacaagaaatatctacacgcacttgtgcggacctttctcaagcatacctgtacaccacaagcccacatctgttcagtggagatgcagaagaggcattcattcgtgttagaagc

SEQ ID NO: 33803 - DNA, 252 bp, Glycine max
  unsure (1)..(252): unsure at all n locations; Clone ID: 701107080H1
tgacngttctgaagaagncagcgaggntgaaagtgaaganaaacnctccaaaactcctcagaaaanaggnacggacgtgnagatggttgatgctgccttgtctgaaaagaaagctcctaanaccctantacaccaagagaagaatctggcacttcaaagacactatttgttgggaacttgccatttagtgttgagcgggctgacgtggaagggttcttcaaggatgccgganaagttgttgatgttcgtntt

SEQ ID NO: 33804 - DNA, 240 bp, Glycine max
  unsure (1)..(240): unsure at all n locations; Clone ID: 701107081H1
ctaatttcaattcaaccccattttcattagtatcctttccggtagagtggaaannaaaaggaattgaaatgaaatgagacgaaagtnagttttgtatttaactaaaagttgtcgttttaaacgnaacgggcctaatgattttaatgnaatttctgaaactgataattaaacatttgatttggttgtgcagcatgacgtggatgctggtgtgttgaagaaagtggtgttggctgagggagc

SEQ ID NO: 33805 - DNA, 251 bp, Glycine max
  unsure (1)..(251): unsure at all n locations; Clone ID: 701107082H1
cgcagagccaaaccatgtcgttccccttcaaccactctcacgccacccacacccaccaccgcaggnnnnnnnnnnnnnnnnnacgacccaccgtttaccctccgccgggaaactccttcagcaacccccacctccgttctacggcgtccctcaaccaccaccccctcatcnggaganccacgtgttccattccgctcacgtgacaccaggacacgtgtcccatgacttcaacaactactccgctcccccgc

SEQ ID NO: 33806 - DNA, 207 bp, Glycine max
  Clone ID: 701107083H1
aagaagggtattattatcatgtactcgaggctcatacacccccacgatgggattgtgacgcaggatgacttgcagggtgctgcttcaatctctctcacgctcacaagggagatccttgtctcgttctgacggctgatcccaagcctcgtcttcgttggactcaggacttgcatgaacggttcgttgatgcggtaacgcagcttgggg

SEQ ID NO: 33807 - DNA, 249 bp, Glycine max
  unsure (1)..(249): unsure at all n locations; Clone ID: 701107084H1
tttttttctcccatcataaaaaaccgaccctctcctttccctcttcaccaaccaatggctcccccaaaggccgagaagaagcccgcggngaaaaagcccgcagagaaggctccggcggngaagaanccaaggccgagaagaagatatcgaaggaaggaggaagcgnnnnnnnnnnnnnnnnnnnnnnnnnnagcgtggagacctacaagatttacatcttcaaggtgctgaagcaggttcaccccgaca

SEQ ID NO: 33808 - DNA, 248 bp, Glycine max
  unsure (1)..(248): unsure at all n locations; Clone ID: 701107088H1
ttctcccatgcgagctgatctaaatcgtgttgtaaaangggntccaagccancatannatannggctgctagnnttgcatcagagaaattactgaggagagttggagcaggatctgaagatccgctgccgcatgttccataattaagangcaagtaaaaagaaatctaaatgcagtttcaaagctcagaaaggctgcacttgatcatttacggtatgtgaagagaacaaccatgtatcctcnngagcc

SEQ ID NO: 33809 - DNA, 245 bp, Glycine max
  unsure (1)..(245): unsure at all n locations; Clone ID: 701107090H1
acatgcnagtnatcgatatttgaggtggantgggcatagattacnacggtncaaatcgtgtgantctgatatntccgntgagtanagtntcgaggattatgcagtcgcggttgttcacgnggtcantgtgtgtgcgaccgaaggtccgtgaaacacccagttatctgcagcgagantgggagagccatcgtgtctcatcattcggtctgattttcgaggcggttggcaccagcagtaccaccggg

SEQ ID NO: 33810 - DNA, 246 bp, Glycine max
  Clone ID: 701107092H1
atagatgaccctttaaccagagcaacttttctgcctgcacttgggaatgggcagtctcgtaacccgctttccaaattggatgaatgcattgaggaggaagaggaggaagctgagggagaatctctcaggggtttgttacttctgctgctgaagaaaaaatcccaagtgtttcagaactttctgtgtcactgaaaaataccatgttagatgggaaaaaccagaatcagcagaaatattcaggaggaa

SEQ ID NO: 33811 - DNA, 248 bp, Glycine max
  unsure (1)..(248): unsure at all n locations; Clone ID: 701107094H1
ttaaaaggaaggagtagtantagagtaaggaaaaatggcgcgtaagaagatcagagagtatgactcaaagaggttgttgaaggagcactttaagagactttctggcaaggagttnccgatcaagtngcacaaattactgcatcaactgatttcactgagctacaagagantnaaccctggctttcatcttctaaattggttgtgaaacctgacatgttatttggaaagcgtggcaaaagtggtttggt

SEQ ID NO: 33812 - DNA, 275 bp, Glycine max
  unsure (1)..(275): unsure at all n locations; Clone ID: 701107101H1
cnaaaaggggttcaattctagctagttctattacgtcgtccgccaccatgaacatggcgatcgcgcttctgttcatggttttcgcagtttcatcagctttagacatgtcaataatatcacacgacaacgctcatgcggatagggccacgaggcgcaccgacgaggaggtgatgtcaatgttcgaggagtggctggtgaaacacgacaaggtgtacaacgcgctcggtgagaaggagaagaggtttcaaatcttcaagcacaatctgcgcattatc

SEQ ID NO: 33813 - DNA, 249 bp, Glycine max
  unsure (1)..(249): unsure at all n locations; Clone ID: 701107102H1
ggaattgcgcttcaaggcgtctcntagggctaatccgcancacgagggtcaccaacggcacgtgcctttggggggccgaggccccctactgctggtcggcaaacggacggcgggcgcacgcgtcgcttctagcccggattctgacttagaggcgttcagtcataatccaacgcacggtagcttcgcgccactggcttttcaaccaagcgcgatgaccaattgtgcgaatcaacggttcctctcgtacta

SEQ ID NO: 33814 - DNA, 265 bp, Glycine max
  Clone ID: 701107103H1
acaatttaccagctatacttgttccttttgaaggttagaagtgctacaatacaaacaatggcagctactcaggaagatgtgaagctttgggtattgtgggaagcccatttgtgtgcagggtccagattgcccttaagttgaagggagttgaatacaaatttttggaagaaaatttgggcaacaagagtgatttgcttctcaaatacaaccctgttcacaagaaggttccagtgtttgttcacaatgagaagcccatagcagagtc

SEQ ID NO: 33815 - DNA, 264 bp, Glycine max
  unsure (1)..(264): unsure at all n locations; Clone ID: 701107105H1
cattatcactggaccacctccctccttccgaacagctatgttatnttcactgcaacatttgtgacaccgtcctcgctgtaagtgttccttgcacaagcttgttcaagaccgtcacagtccgatgcggccattgcactaacctcctcccagtgaacatgcgagggttgcttatgccatctcccactcaatttcatttgggtcactctttcttctccccatctcataaccttctggaggagataccaaatccctctccaaattttc

SEQ ID NO: 33816 - DNA, 261 bp, Glycine max
  Clone ID: 701107106H1
agatattgaagtttatctcaaatgctaagagtgagggtgcaaccattttgactggtgggtctcgcccagagcatctaaagaagggattctttgttgaaccaactgtcataactgatgtaactacctccatgcaaatttggagagaagaagtatttggaccagttctctgtgtaaaaacatttagcactgaggaagaagctattgatctagcaaatgacactgtatatggcttgggttctgctgtaatatcaaatgatctag

SEQ ID NO: 33817 - DNA, 263 bp, Glycine max
  unsure (1)..(263): unsure at all n locations; Clone ID: 701107107H1
gaaaattaatctccctttcattttctctgcatctgtactctccanaatgccgtccttagaggaggagctcttcccttcaaccccangcaagttcaagatcgagcgggcccaccacatgaaccgccagctctaccgctgcttcgcctccaccagcaccatgttcctgtgggccctctttttaatcgccctcaccgcttcatatctcagcttccaaggcttcgttgattccggcagccgctacctctccgcctcctggggcggga

SEQ ID NO: 33818 - DNA, 261 bp, Glycine max
  unsure (1)..(261): unsure at all n locations; Clone ID: 701107108H1
agaaccnggtgctgaacaaaaatttaagganattagcaatgcctatnaggtgttatcagatgatgagaaacgatccatatatgacaggtttggagaggctgngcttaaaggttctgcaatggggatgggggatttcagcaatccatttgatctgtttgaatcactgtttganggcatgaatcgtggcgcaggttccagaggttctggaatggagcaattgatggtgaagatgagtattacagtcttgttttgaactttaaa

SEQ ID NO: 33819 - DNA, 264 bp, Glycine max
  Clone ID: 701107109H1
attgaatacattgatttatacaatatttatgctccactatgcaagaatgcaaatctcacatccctgccaaaaaggaactcaattgtgactgatccatgtagtgagtattatgtgtatgcatatcttaatagaaaagatgttcaagaggctctccatgccaatgtaaccaacctcaaacatgactgggaaccctgtagcgatgtcataacaaagtgggttgatcaagcttcaacagttcttccacttttacatgaattcctcaac

SEQ ID NO: 33820 - DNA, 262 bp, Glycine max
  unsure (1)..(262): unsure at all n locations; Clone ID: 701107110H1
cttctctggttgattcggatctagagtcttcagtttctcctcgannttcttcgctttcctgttttcaatttcgattctttcgttaatttaataagatgtttgggagggcaccgaagaagagcgataatacgaggtactacgaaatcctcggcgtctccaagaacgcttcgcaggatgatctgaaganggcttacaagaaagccgccattaagaatcaccccgacaagggcggtgatcccgagaagtttaaagagctggcgca

SEQ ID NO: 33821 - DNA, 263 bp, Glycine max
  unsure (1)..(263): unsure at all n locations; Clone ID: 701107111H1
ctcagtttccaaaagcaactaggactggcattttgttctnggttctgctgtcttgtacttgcttcacttcagcagatnccttataatccgcttgatccaaatgggaatatcacaatnaaatgggatgttatatcctggacccctgatggatatgtagtaagtatgttcttgtacgcatattacttattaatatgagtgtcaaaccatctattgtacattacgcatggtgttgaaagtttgtctgcagcttttctttccactgg

SEQ ID NO: 33822 - DNA, 224 bp, Glycine max
  unsure (1)..(224): unsure at all n locations; Clone ID: 701107112H1
catttgagagttttnagtgagacaatgangtcttcagtggtggaaggtggacgcgacgaggggaaacncgagccgtcggatttgatcanggaaaccatgaatctganggctccaaacctttcacttcccagtgaaactgaaacattcttgagcgcagaatttccctcaaggacaaggtggtggaggagacttggaaccggagagatcaagtggttgatccgacg

SEQ ID NO: 33823 - DNA, 265 bp, Glycine max
  unsure (1)..(265): unsure at all n locations; Clone ID: 701107113H1
agtagttgagaactaagaaggagaagcaaatggcttcctcaatgatctcttccccagctgttaccactgttcaaccgtgccggtgccggcatggttgctccattcactggcctcaagtccatggctggcttccccaccagaaagaccaacaatgacattacctccattgctagcaacggtggaagagtgcaatgcatgcaggtgtggccaccagttggcnagaagaagtttgagactctttcctacctgccagaccttgatgatg

SEQ ID NO: 33824 - DNA, 208 bp, Glycine max
  Clone ID: 701107115H1
tagtgcctccttgccagaagttaaaatggcccaagaaactttcctattcacatctgaatcagtgaacgaggggcaccctgacaagctctgtgaccagatctccgatgctgtgctcgatgcatgcttggagcaggaccctgacagcaaggttgcctgtgaaacctggcaccaagaccaacatggtgatggttttcggagagatcacaac

SEQ ID NO: 33825 - DNA, 154 bp, Glycine max
  unsure (1)..(154): unsure at all n locations; Clone ID: 701107116H1
gntagaagttgtgggatgttggtgagccaacccttttggctagntgggctgtccggggagaggttnccagatccctctcgcactggcacgtgactgcacaccctgctncntntccctgcaaacaanaancgnatcatccnttctcttttctttg

SEQ ID NO: 33826 - DNA, 262 bp, Glycine max
  unsure (1)..(262): unsure at all n locations; Clone ID: 701107117H1
taagagcaggttgatnatnttttgggttgtgctctatttttgttccatcacaaactcactaaangcttcaaagcagtgncatttccctgccatcttcaactttggtgantccaattcagacactgnaggtctctctgntgcctttggacaagcnnantatnctcatggagagtcctacttccatcaccctgctggncgttactgtgatggccgtntcattgttgattcttagccaagaagctggggctgccttatttgagtg

SEQ ID NO: 33827 - DNA, 262 bp, Glycine max
  unsure (1)..(262): unsure at all n locations; Clone ID: 701107118H1
gtgtgatggtgtcaatttccaggttgtccttgtagncattantantntgngnnttggagtttgtgtttatagcaagntnatggatgantcaaaaaacaggcataatgataatttgggtgtgaacnaaatggggaaaaacattaggaagagcccnttacaccagcccaattatggtnnnnnnnnnnnnnnnnnnnnnnntgggggtagacagcaacagcnacngccttcagcctcaggtttncaacataagcaagactgnnnt

SEQ ID NO: 33828 - DNA, 264 bp, Glycine max
  unsure (1)..(264): unsure at all n locations; Clone ID: 701107120H1
tttcgtttccaaaaaggtcttaacttcgaactctaaggtcacaaaagttaagannnnnnnnnnnnnnnnnnnnnnnttccccatcgggagaaggacctccaactccaaggaagtgaagaaaaagaagaaggtaataataaaggaggaagagnnnnnnnnnnnnnnnnnnnnnnnnnnnnnnnnngtttatgatttacctggccagaaacgagatccacctgaggagaaagaccctcttaggattttctacgagactttattcaa

SEQ ID NO: 33829 - DNA, 263 bp, Glycine max
  unsure (1)..(263): unsure at all n locations; Clone ID: 701107121H1
cactcactcattgctattgattgtctatcaaaaccatcatacaagantttgaattttgcacctaatagactttcccatggtatacctctacacaaattacagtanccattgctttaagctaagcattctcaaatataaaactgttgatgtttatgcctattgtctattgattgcaattttagtagatgtttgagtttatgtattaagatgcatggnaaatattttgacaacatcttctgtttggcggatatgtttgtgttagt

SEQ ID NO: 33830 - DNA, 265 bp, Glycine max
  unsure (1)..(265): unsure at all n locations; Clone ID: 701107122H1
atagaaccaaaaaagagaggatgaaagttgaagtagaaatcatttctagagaagacattaggcnttcttctcccacaccctctcacntgngagtcttcaatctttcccttttggatcacntcattccatcaccatatgntcanntaatcctatactacacctcacccaacagtgacaaaacttacntctctgaagtccccaagaggttagaattgctgaaaaaatntttatcggagacantaacccaattctatnctcttggtgg

SEQ ID NO: 33831 - DNA, 255 bp, Glycine max
  unsure (1)..(255): unsure at all n locations; Clone ID: 701107123H1
cgttttcattctagatccaaccacttccattgccaccaattcctgcttcttgtttattttgctcccataccaacactgtgtgttagatactcagatctcctcccccctcttttctctatgccattcccccagctaggaagggtgtactggaatcagagtgtagctgtggggtacggatttattactagttttgtagagaatgggcaagtgcaaggnttgtgggaagttaggaagaatgggaacaacaaatgggtc

SEQ ID NO: 33832 - DNA, 265 bp, Glycine max
  Clone ID: 701107124H1
agatattaagataaggacccatttcctcttctaagctatatagtgctcgttctagcctacccactacaagcaacattgttaaccattctcttcactttaaagttacatagtttttcattgttttacttaatctacaatggctgcttcaacaatgactctctcttcatcatcattggctggccaagctatcaagcttgccccctccacccctgagcttggtgttggaagggttagcatgaggaaaacagcctccaagactgtttcc

SEQ ID NO: 33833 - DNA, 263 bp, Glycine max
  Clone ID: 701107125H1
agagacagcttcattacgcacagagcattctgtgacgcactagcggaggagaacaacaaagccaacgaaggacaattgccaaagataggtccaaacttgcaatgccaacaaatcccaaacctcgtttcatcatcattaccaatcaacaccaacattgttcccaacccacaaatgggtggcacctcggagttcaaccatgctgatcacaagcacccactatcactcccacacgagctcatgccaatgcctgcacaaaaatcctt

SEQ ID NO: 33834 - DNA, 261 bp, Glycine max
  unsure (1)..(261): unsure at all n locations; Clone ID: 701107126H1
atcgagataactagaaacagtgtgatgaaaatgaaggtccttgttttcttcgttgctacanttttggtagcatggcaatgccatgcgtacgatatgttccctctccgaatgaacactggctatggtgcccgtactccggaggtgaaatgcgcaagttggaggcttgctgtggaagcacacacacatctttggctttgagaccattcctgnagagtgcgttgaagcaacaaaggaatacatccatggcgaacaatatagatc

SEQ ID NO: 33835 - DNA, 262 bp, Glycine max
  unsure (1)..(262): unsure at all n locations; Clone ID: 701107127H1
caacctagtaagctcttttaaagttctggcccgaaccctttctttcgtcacaatcacaacttggtaaaggtactccgtgcaagaaagatgaagctcgagttcgcaaatgtgctacttctgtgccttgtccttagctcttctttcttggaaatntcaatggctggttctcctttctgtgactcaaagtgcgcgcagaggtgtgccaaagctggggttcaggacagatgcttgaggttttgcgggatctgctgcgagaagtgca

SEQ ID NO: 33836 - DNA, 259 bp, Glycine max
  unsure (1)..(259): unsure at all n locations; Clone ID: 701107128H1
ctttcttcctttgtaatagnaagcacgcgtttctctctntcnctctctcaangantatttgtgtacttcctcttttgtgggtngattcaatttaccatgtcgagttcatcggaatacttctcaattttccggccatnaaccggncnagtcgccggaganatcggcttctctcagattgtagcctgttgagtcaatacatcaaggagaagggtagcttcggagatctaccctcggaatgacatcatgtgggtcacngnga

SEQ ID NO: 33837 - DNA, 263 bp, Glycine max
  unsure (1)..(263): unsure at all n locations; Clone ID: 701107129H1
atcgagataactagaaacagtgtgatgaaaatgaaggtccttgttttcttcgttgctacaattttngtngcatggcaatgccatgcgtacgatatgttccctctccgaatgaacactggctatggtgcccgtactccggaggtgaaatgcgcaagttggaggcttgctgtggaagcacacaacatctttggntttgagaccattcctgaagagtgcgttgaagcaacaaaggaatacatccatggcgaacaatatagatcaga

SEQ ID NO: 33838 - DNA, 266 bp, Glycine max
  Clone ID: 701107131H1
ttctcttcactttaaagttacatagtttttcattgttttacttaatctacaatggctgcttcaacaatgactctctcttcatcatcattggctggccaagctatcaagcttgccccctccacccctgagcttggtgttggaagggttagcatgaggaaaacagcctccaagactgtttcctcaggaagcccatggtacggcccagaccgtgtcaagtacttgggcccattctctggtgagcccccatcctacctcactggtgaatt

SEQ ID NO: 33839 - DNA, 260 bp, Glycine max
  unsure (1)..(260): unsure at all n locations; Clone ID: 701107133H1
cttcggaataaacctgaagctaacgaaccaaccataaaccctatctatggccaccctcgacccaatccaaaacggcgtctcttcggacaatccagccgccgaaccgtcctccacccccgccgaagaccccaccccagancccgccgccgccgagaagcggtggccggggtggcctggccactgcgttttccgcctaatcgtgccggtgctcaaggtcggtagcatcatcggccgcaaggggagctcatcaagaagactgc

SEQ ID NO: 33840 - DNA, 265 bp, Glycine max
  Clone ID: 701107134H1
tcttctcctcattcgaagtttgctgtgcatagatatggcaaaaccgcgctttttggtttcgacgattcctgtgtctgtcagttttcagcttggttcctaggcacattcatggcaaactatgctttggtggtacaaaagttgaacctctagtaaaaatcaggcacacattctgccctagcaggataagagttgccgaagaatatcaagaaggtttgtctgatgaagatgatgatctctgtcccgtcgaatgtgtaagagaattcac

SEQ ID NO: 33841 - DNA, 258 bp, Glycine max
  unsure (1)..(258): unsure at all n locations; Clone ID: 701107139H1
gggaagttcacagtgcttgttgccactgntgttgcagctcgtggacttgatattcccaatgttgatttggttatacattatgaacttcccaatgatgctgagacttttgtacatcgttctggccgtactgggcgtgcaggaaaagagggtacagccattctgatgtacaccagtagccagaggagaacagttagatcccttgagcgtgatgtagggagcaaatttgaatttgttagtccaccagctatggaagagatt

SEQ ID NO: 33842 - DNA, 261 bp, Glycine max
  unsure (1)..(261): unsure at all n locations; Clone ID: 701107140H1
gttcttccatcttttatcctcagacacataaaatatggtgctttaagccaagtctttcagtaacgccnnnnnnnnnnnnnnnnnnnnnnnnnnnnancctctcacgaagaaaaaccgaagccgataaccagtgtttcgaacccatttgtgaagcactgcctcaaacttcgcaattcctcttcttatcgtcgctctcatgcttctgctattgttgtgggtgctacccctataagagaaatctgcaggtttcgagagtcaata

SEQ ID NO: 33843 - DNA, 259 bp, Glycine max
  Clone ID: 701107141H1
cggaaacaaacatgtcgtggtgttactgcgctaagcctatgactttgcagttgccgttgcaaccaagagcatcatcatcattccattcccacgttggaggagtaacagtaacatcctcaacactgtctcttcgactctcttctactcttgttttcacccacaacctccacttccaacccaaactcaaacgcgcttccacaaccgttcgatgctcctcggcattgactcctcaattgaagtctaccttggatcaagttat

SEQ ID NO: 33844 - DNA, 260 bp, Glycine max
  unsure (1)..(260): unsure at all n locations; Clone ID: 701107143H1
atntntatttntaagtaattatngtgnttattattnnngttgagaaagataagaatggcnaagttantaaaatggngttgagttgaacacaggggnnaagattccttctggncgggntagggncttggcaagntgngnntggtgttgtagccaaagctgtcannncagncattntggttggatacaggnatattgnttgtgctcaagcgtataacaatnaagcagagattggntctgctcttaagaagcttttgntgatg

SEQ ID NO: 33845 - DNA, 260 bp, Glycine max
  unsure (1)..(260): unsure at all n locations; Clone ID: 701107145H1
gngcatgagntnnanccgagtgtagtcgncgttgtnnctgtcantatcanaaaaccctctaaaaactcctaanctgttggagacatatccttaatgttgattccgtttgaatggctccattgcgaactcaacaacatttgtaagtccctcttgagggcgaagaattacacgcattcctttgangacccatctatcacaagaccccttttacgctacaaaaattgttaggctctatgcagccaacaacgacattaactctg

SEQ ID NO: 33846 - DNA, 265 bp, Glycine max
  unsure (1)..(265): unsure at all n locations; Clone ID: 701107148H1
cnacatgcnaaacgacagcgttctgagtcttttcttcttcgttaccctcttcacatgccttctctctgctacttcccacgatgaccatattttcctaccgagtcaactccatgacgatgactcagtgagttgcactgcaaccgacccaagccttaactacaagccggtgatcggaatcctgacccaccccggcgacggtgcctctggccggctcagcaacgccaccggggtttcttacatcgccgcctcctacgttaaattcgtg

SEQ ID NO: 33847 - DNA, 264 bp, Glycine max
  unsure (1)..(264): unsure at all n locations; Clone ID: 701107149H1
ggnnatatactggttcncgttctcgtcactggnncngcgggcngtgttggntatnctcttgtcccnatgattgntaggggagtgatgctgggtcntgaccagcccgtgatcctcnnnatgcttgacattcctccagcagcagagtctcctgaatggggttaaaatgganttggtggatgctgcattccctcttcttaaaggtgttgttgctacaaccgatgtggttgaggcagcatggggtcaatattgcagtgatggttnggg

SEQ ID NO: 33848 - DNA, 246 bp, Glycine max
  unsure (1)..(246): unsure at all n locations; Clone ID: 701107150H1
ctccttctctcgttgattcggatctaacgnnttttttcactctnccagttctcgttgttgancttcgctttcctgaaactagggttttcaatttcgattcattcgttaataattaaagatgtttgggagggcaccgaagaagagcgataatacgaggtactacgaaatcctcggcgtctcgaagaacgcttcgcaggatgatctgaagaaggctacaagaaagccgccatcaagaatcaccctgac

SEQ ID NO: 33849 - DNA, 260 bp, Glycine max
  unsure (1)..(260): unsure at all n locations; Clone ID: 701107151H1
aagttggggagtttgctacatttatggcacttggtttgcacttcgtggtcttgcagcggcgggtaaaacttacactaattgtgctgccattcgcaaaggcgttaaatttctactttcaacacagaaagaggatggtgggtggggagaaagttatctttcatgcccaaaacagatatatgtacctcttgaaggaagtcgatcaacagttgtgcacactgcttggnctcttttgggtctaattcttgctggacaggcagaga

SEQ ID NO: 33850 - DNA, 257 bp, Glycine max
  unsure (1)..(257): unsure at all n locations; Clone ID: 701107153H1
tcaccgcccggnttcctctnactcccatagaggaaaccgtgagggccatgaaccatgttattgataggggctgggccttctactggggcactagcgagtggtcngcacagcagatcaccgaggctnggctgtggctcagagattggaccttgttgggcctattgttgaacagcctgagtataacctcttgtccaggcacaangttgagtcggagtttcttcctctgtanaccaatatggcacaggcctcactacatg

SEQ ID NO: 33851 - DNA, 239 bp, Glycine max
  unsure (1)..(239): unsure at all n locations; Clone ID: 701107154H1
ggttcctttaactctgtcgttcaacnttgccatgctgtgtactcacactgcttctcccttanatcacaatgtcaaggacccccaggctgaattgttagacccagctttgaaggggactctcaatgttctgaaatcgtgtgtaaacttgccgacgctggaacgcgttgttttaacctcttctgttgctgcagttgcgtacaacggaaagcctcgaactcccgatgtagtagttgatgaga

SEQ ID NO: 33852 - DNA, 256 bp, Glycine max
  Clone ID: 701107155H1
cagctgtggacaacctcttggatggaaatatgttctgacacatgaaaagaatgaaatatacaaagaagggaagtttgtgcttgagaggtggacgatagttgacaatgaagaggaggaattgaattctgatgcacaagctggctctctaactggctctcaatctggctcaagtgacacagaaaacgcctagcaagtggctcttttcatgaatttgaagtattgtagctagcaattatattatagtatgtacctagta

SEQ ID NO: 33853 - DNA, 242 bp, Glycine max
  unsure (1)..(242): unsure at all n locations; Clone ID: 701107156H1
tgggagggggcacggggcttaacacntttcaaaanccgcttnccccgaacgatgttttgatnntgggatagcagaacaacatgctgtaacttttgctgcaggcctagctgctgagggcctcaaacccttttgcgcaatttactcttcctttctacaaagaggttatgatcaggtagcacatgatgtggatcttcaaaagcttccagttagatttgcgttagacagagctggcttagttggtg

SEQ ID NO: 33854 - DNA, 260 bp, Glycine max
  Clone ID: 701107159H1
ctgtctcaactttccttcattttctctcttcctctcaccgagtcacgcactcggcttgactcgtacgaactccgatccccccccgagtcacactcaaccagcaccaccgcccgatccgacgatgtctcgcgcctcctccgccgcagattccgccgcctccggtgagatcatactgttcggagtcagagtcgtcgtcgattccatgaggaagagcgtcagcatgagcaacctctcacagtacgagcatcctcaagacggca

SEQ ID NO: 33855 - DNA, 262 bp, Glycine max
  unsure (1)..(262): unsure at all n locations; Clone ID: 701107161H1
ctgctcgagggtgaccacttatttacagttaaagttacaataccaaaaaggattagtacaaaggnncgtgagttgcttgaagaacttgcttctctaggtgacacaagcagnccgttcaaaatcccgtcctaggactcactcttccacaggtggtacggaaagtccgaaagctcaaaaggatgaaagtacaacatcaacagtcgaagaaaaaactgaaaaatncagaagatgaaaatgatgtatggataaattgaaggacttg

SEQ ID NO: 33856 - DNA, 210 bp, Glycine max
  unsure (1)..(210): unsure at all n locations; Clone ID: 701107163H1
aaacaagaaaaggtcgcnatccaaacaatctggacccanccctaaacnacgttcttcttcttctcagcgtttncggaatcaaccaaccgctctctgaatcaatctcactctcttattcttcagcgagaactcatctctccgaatccacacgcgatcggatccacgtcgtcgtcgtctttcaaattcaaatttccctggcgatccgattga

SEQ ID NO: 33857 - DNA, 265 bp, Glycine max
  Clone ID: 701107164H1
ttgtttgcttcccaagtctctcgaagcatctttctttctcttcctgcagaagctatccgtgttacttgttcccaagtctccaacaagcaaagtacatggttgatttggaaatccaggtccccagcgcattcgacccgtttgccgaggcgagagaatcagatgcccccggggcaaaggagtatgtgcacatacgaattcagcagaggaatggaaagaagagtctgacaacagtgcaagggctgaagaaggagttcagctacgagaa

SEQ ID NO: 33858 - DNA, 136 bp, Glycine max
  unsure (1)..(136): unsure at all n locations; Clone ID: 701107165H1
tnnngagnaaagnnctnggaatgttgtcaccccttcttctntttctatgcctaactcttcctttgttttngttgtccttcttcaaataccgtaagnccttcaagantccaccacttccaccaggnnctngagntcc

SEQ ID NO: 33859 - DNA, 260 bp, Glycine max
  Clone ID: 701107166H1
ggtggtgaagaaaccaaagatatccttctcttggatgtggctcccctcacccttggaattgaaactgttggtggggtgatgacgaagttgattcccagaaacactgttatccctaccaagaaatctcaggtgttcaccacctaccaggatcagcagactaccgtctccattcaggtttttgaaggtgagaggagtctcacaaaggattgccgtctgcttgggaaatttgaactgtcggaattcctccagctccaaggggt

SEQ ID NO: 33860 - DNA, 259 bp, Glycine max
  Clone ID: 701107167H1
cttgtattcacatttcaacaactatagccatggctttctccacctcaaaggcactacttgtccttgcctgctccttctgcctatttgcatcttttacttttggacgcgatttctccattgtgggctattcatcggaggacttaaagtccatggataagctcattgaactctttgaatcatggatatcaagacatggcaagatttaccaaagcattgaggagaagctgcataggttcgagattttcaaggacaacctaaa

SEQ ID NO: 33861 - DNA, 258 bp, Glycine max
  unsure (1)..(258): unsure at all n locations; Clone ID: 701107168H1
ccatttcgtctcgtcgggattcataccaacacaccaataaacaatcnccagtcacactgcannnnnnnnnnnnnnnnnnnnnnnngctccgtgttttttctctctgcagaatttccnaaatttctccactaccccatctcctttgctcctgaaactcccacattcttcaccagcaatgcacgatcttcaatacgaatgcagtttcgatatttgatatcggagtatcggtgnttgagcggctgaattggaattggaaaa

SEQ ID NO: 33862 - DNA, 254 bp, Glycine max
  Clone ID: 701107169H1
caaagaagtacggtgacactggttttgctggacagttgaatataacatttacaggaagtgctgggcagtcatttgcatgctttctgactcctggaatgaacattcgccttgttggagaggctaatgattatgttgggaagggcattgctggaggtgagttggttatcactccagtcgacaagaccgggtttgaacctgaggatgcagctattgtagggaacacttgcttgtatggtgcaatggtggacaggtct

SEQ ID NO: 33863 - DNA, 253 bp, Glycine max
  Clone ID: 701107170H1
tttgccgcaaatgctatgctcgtctgcaccctagggctgtgaactgccgtaagaagaagtgcggtcatagtaaccagttgaggcctaagaagaagatcaagtaaattctgggtgggatattgttggtctctactttcgttttgtttgtcttagaacagtgacttgtttggtatttatcgtttctggttttgattaatgttaattgttttgagacaatagttttgaactagtcaattatatttttatgatgcca

SEQ ID NO: 33864 - DNA, 256 bp, Glycine max
  Clone ID: 701107171H1
attattgggtctgatgttaaatgtaaattgtgctaatgatgcagataatgaccgcgcatgatcgatggcaagctttcaggggtgaaaccacagaggccaaagatctaatctttactctgaagcgttcgtcccttatccagtttaagaccaaattagatgtgtttttggccaataacacaaaagaagatgtttgtgactttaaggtcaaaggtagttggttggaacgatcttgcgttgtttatgctggtgaatctaa

SEQ ID NO: 33865 - DNA, 256 bp, Glycine max
  unsure (1)..(256): unsure at all n locations; Clone ID: 701107172H1
ctataagctagtttatcgtgaggngaatatgaagttgtttgttttctttgttgctgcagtagttttggtagcatggccatgccatggcgcaggctaccaaaggttccctctccgaatgaaaactggctatggtgagcgttcttcggaggtaaaatgcgcaagttttaggctgctgtggaagcacacaacatccgagcctttaaaaccattcctgaagagtgcgttgaaccaacaaaggactacattaatggcgaac

SEQ ID NO: 33866 - DNA, 256 bp, Glycine max
  unsure (1)..(256): unsure at all n locations; Clone ID: 701107174H1
caagtagttgagaactaagaaggagaagcaaatggcttcctcaatgatctcttccccagctgttaccactgtncaaccgtgccggtgccggcatggttgctccattcactggcctcaagtccatggctggcttccccaccaggaagaccaacaatgacattacctccattgctagcaacggtggaagagtgcaatgcatgcaggtgtggccaccagttggcaagaagaantttgagactctttcctacctgccaga

SEQ ID NO: 33867 - DNA, 257 bp, Glycine max
  Clone ID: 701107175H1
cttgctcaggttgtaagtgatccaagcctaacaaaatctggtgtttactggagctggaacaaagcatcagcttcgtttgaaaaccagttgtctcaggaggccagtgatacagagaaggctcgtaagatctgggagattagtgagaaacttgttggttttgcctaagtgggaggagcctccaacatcccatgttgttctagagaccttgcacttggcatggaggaagaaaatgacgtctcaaaagagtggatagataa

SEQ ID NO: 33868 - DNA, 259 bp, Glycine max
  Clone ID: 701107177H1
caggctgtaaaccctttttccatctagagttgttgcggctctcttctctgcacactcagaatgcagtcccacactcttcaaccccacccattcccttatccccacttcaccacactctatcagatccaattctggtcatgcttctctctccgttcgcgcctccatcgccgtggaaacccccacggagacggtgaagctgaacaagtacagctcccgcatcaccgagcccaaatcgcagggcgcctcccaggccgtgctc

SEQ ID NO: 33869 - DNA, 260 bp, Glycine max
  unsure (1)..(260): unsure at all n locations; Clone ID: 701107179H1
taaaaaaaaaaagagngantagtactccaatcaacataccccanactgtttgnttaggaattcgggttgcanacctactccttctactttccannaccgctgtctctgtncttctagtcanaattgggtgggttggtaccaaaggtgaggcagaggngactcagaaagagatggctgaacacggaaganttatggcaaactgtgtatatgcncccaatccctaccatgantgcncggaggcttgcgtgcaaagaatcaag

SEQ ID NO: 33870 - DNA, 259 bp, Glycine max
  unsure (1)..(259): unsure at all n locations; Clone ID: 701107180H1
anactgaggacttagctagtagttagagatgcctganttttgcgtgacaggtggtactgggttcatcgcatcttacctggtcaaggccttactagagaagggtcacacagtgaggaccaccgtgaganacccaggggatgtggagaaggttggttttctgactgaactaagtggagccaaagagagactgaagattttgaaagcagatctattagtggaaggaagctttgatgaggcagtgagaggagttgatggtgtc

SEQ ID NO: 33871 - DNA, 200 bp, Glycine max
  Clone ID: 701107181H1
ttacacaatacttgttttgattcagaaaagaatacaaagctttgaattgatagattataccgaataagatgctgaactgactgctctgcaaataaacatttgcctttcacggcattatctttaggagtagtttcaaatgtcatcttttgtttttctgccgcaacgcaattgatgagtaataaaatcctgattccttgagt

SEQ ID NO: 33872 - DNA, 260 bp, Glycine max
  unsure (1)..(260): unsure at all n locations; Clone ID: 701107182H1
ganagtgttgtttttctttttttcatttgcattgcaaagcanaaaccttgcaaattgcaatggcttccaacaaggttattgccaccatcttggttctttctctccttgcctactcaacatgcattcaccaatgcatgtggcacatgccacccanaacctactccttctccccctcctccatcagggangtgccccaaggacacattgaagctaggggtgtgtgctgatgttctaggacttgttaatgttgttgttggttc

SEQ ID NO: 33873 - DNA, 257 bp, Glycine max
  Clone ID: 701107183H1
agattgcatataggtttttagtgctgaagcatcaaaatggggagatattcaataccctttatgggtgttctgctactgttctgtctggtttcatcttcagaggcagaatatttgaagtataaagaccctaaggcgccactgaatgtcagaatcagtgacttgttgaagcgaatgtctctcgaagaaaagataggccagatgacacagattgaaaggagtgttgctactcctgatgtgatgaacaagtactcattggg

SEQ ID NO: 33874 - DNA, 258 bp, Glycine max
  Clone ID: 701107184H1
caagtctcacttttttcagcttctctaaattctctgtctacttcaccaagcacttttggttgcagctttggttaatttccaatatggtgtttcctctcctatctatctttgctttactcaatcttgcagtggtggcaacccatgcagaaaccttgccccctgaagtttactggaagtcgaagcttcccaccactccaatgccgaaagccattacagatatccttcacccagatttggcagaagacaaaagcacctctg

SEQ ID NO: 33875 - DNA, 256 bp, Glycine max
  unsure (1)..(256): unsure at all n locations; Clone ID: 701107185H1
cttgagctcannaatctgnctcataattgtngtngtattgtcaatggcattaancccatttctgaatgaagctggaagnngggctgctagctttattgaagaaaattttgaccctgagaataaacagaatgtttctgagacggttaacttcaacattagtgaacccgttgttatccttggatttggacaaatgggccaggtccttgccaatttcctgtccaatccattagcttcaggaggagatagtgatgaagta

SEQ ID NO: 33876 - DNA, 256 bp, Glycine max
  unsure (1)..(256): unsure at all n locations; Clone ID: 701107186H1
gcttaaggcctcttccaccagtgtttccacggtcaacaagaccnatttcgtgccaaaaaccttcaaagtctagatttttaagcacaaacaagggtgtgccagatctgaatctccaagcaagagggttaacatgctgtagttttagggatagaaagtgggaattgggagtgagtgctccactgaaagttgccaccaatgagggagaggaagaagagagaaccaatggggctaataatggggttggtgaggaagtttc

SEQ ID NO: 33877 - DNA, 257 bp, Glycine max
  unsure (1)..(257): unsure at all n locations; Clone ID: 701107188H1
ttttattcagatagtaacactaacacagcttttctacatacaanganccnnaataaaaaatactagaaaaagaaaagtataatagaaatctatttanttgtttttctttttaattttaaccgacatcagattacggtgttaccacggtaggcttgcttgcaaacagagctaggtttctgcgcggnggagcacagctgcgacgaccctgggcacgcctgcaggcaattgtcccccaggctgccggaaaccgctgttcc

SEQ ID NO: 33878 - DNA, 257 bp, Glycine max
  unsure (1)..(257): unsure at all n locations; Clone ID: 701107189H1
ctgggccttttgttctcgtgtcaatttctaaatccaccaccacaccctcnncttctattctctattattattatctcccacacccttcactctctctcactcttctctcgaatcttccaccgcaatggccaccnctgccgagaaactctccgctctcaaatccgccgtcgccggattgaacgaaatcagtgagaatgagaagaacggattcatcagcctcgtcggccgctatctcagtggcgaaggcagcatgtgga

SEQ ID NO: 33879 - DNA, 255 bp, Glycine max
  unsure (1)..(255): unsure at all n locations; Clone ID: 701107190H1
ttcgagaccatggccanaagccccttcaagcttgaacatcccttggaaagaaggcaggctgagtctgctncgcattagagacaagtatcctgatagaatacctgtgattgttgagaaagctgaaagaagtgacatcccagacatcgataagaagaagtaccttgtcccagcagatttgactgttggccaatttgtttatgttgtccgtaaaaggattaaggtcagtgcagagaaggctatttttgtttttgtcaa

SEQ ID NO: 33880 - DNA, 256 bp, Glycine max
  unsure (1)..(256): unsure at all n locations; Clone ID: 701107191H1
ctcggctcagcacagctaccatcgaaaactagccaaggctctgtctttttccctttttccttttgcttcaacaacatcgtcgtcacaaatctnnnnnnnnnnnnnnnnnnnnnnnnnnnnnactgttgaattgaagatgaagatcactgtcatgactgctgatgaacaaatcatcacgttggatgtggatccccacgaatctgtggnaaacgtcaaagcattgctcgaggttgagacaagtgtggctcttcaacaa

SEQ ID NO: 33881 - DNA, 261 bp, Glycine max
  Clone ID: 701107194H1
tttgggattgggaaggcgagggattgcgctgcgtctcttcctcttctctttcgattcatccctcattcataatcttccaatccaacaacctcagcctcacactcacacatacacacatctgaacgcgtatcgtccctcccatggcttcaaagcgcatcctcaaggagctcaaggacttgcagaaagacccaccaacttcttgcagcgctggtccagtagctgaggacatgttccattggcaagcaacgattatgggtcctg

SEQ ID NO: 33882 - DNA, 259 bp, Glycine max
  unsure (1)..(259): unsure at all n locations; Clone ID: 701107195H1
tttgtnataaggttgaacaatgctagggttgatcactttgagaccaaggttggaaaaaaaactagcatttcattncatgaatagtaacatcttgcatttgtgtgctagaaggggagggtgtttctgccacccttatggtgaccgtgttccgattnttatgtacatttgtcaagccttgcatttcatggactacactgtgtgcaatgcttctcacaaggctcctttgttggtgactgatcctaggtttgatgtgttgtgt

SEQ ID NO: 33883 - DNA, 262 bp, Glycine max
  unsure (1)..(262): unsure at all n locations; Clone ID: 701107196H1
cnatccccaactcagcactgcatcgtgaagccgaaatggggaaccaataccaccaagcaacagancggcttctgagccttttcacaaaggccaatcacgatctctctatggttcaccatcgtctcgaaaaggagtttcagcaggtttaccccgacaacgctaaccctatgaagctggtttctagaatcaagaaggttcaggaagatatatcaatcttgaaggggcagtgccatgagcttctggctgtaagcaggatttgatt

SEQ ID NO: 33884 - DNA, 273 bp, Glycine max
  unsure (1)..(273): unsure at all n locations; Clone ID: 701107201H1
gtttgctacctaaaccctagtctccatacatcaacttgggaggttaaagagacggcaacgttgtgctgtccgccttgaccgagccagagcttcgtcttggccctcgattttgccctgtaaaactaatcccagtcacaacagaaataatcaatggcaccgaaacagaccaaggctgagaagaagatcgcttacgatgcgaantgtgcgacctaatggaggagtacggccaaatcctcgttgtaaactccgacaacgtgggatcgaaccagctcc

SEQ ID NO: 33885 - DNA, 117 bp, Glycine max
  Clone ID: 701107202H1
gcaaaattctcttccgtttcaggattagggtttcaccgttacagtgaaacatggcaaaaccaaagcgaatctctctgcgtatctttgcgctgctcctcttgatttccacacaacata

SEQ ID NO: 33886 - DNA, 259 bp, Glycine max
  Clone ID: 701107203H1
tacgaaactactctacaaacacaacaaaactctccaattctgaagattttcttatctcttgtctttgaaactagaagctccgtgattgatcaatggcgacaaaagaaggcaaagccataggcatagacctcggcacgacctacagctgcgtgggcgtgtggcaaaacgaccgcgttgagatcatccccaacgaccaaggcaaccgaaccaccccctcctatgtgcgccttcaccgacaccgagaggctcatcggagacg

SEQ ID NO: 33887 - DNA, 263 bp, Glycine max
  unsure (1)..(263): unsure at all n locations; Clone ID: 701107205H1
cttcgtgttttttcttctctntcacttttgcttcttcttcatnnccttcacgatccactctctctcgtagttgtggtggtgctgatcgcgtgcgctcatggtgatcgagcatgacattgagagttgncggagcagagcgatgcaatctttgcacgcgcatcaccctcgccaccaccggcagaagctggaggtgtacaatgaggtgcttcggcgaattcaggaatcggattgcgaggaggggcatgttcccggcttcgacgatc

SEQ ID NO: 33888 - DNA, 261 bp, Glycine max
  unsure (1)..(261): unsure at all n locations; Clone ID: 701107207H1
gaactttggtaggttcataaaattaggttgcattgaagacactgcaaatccataagcgcattacaccactattgaggttttacacttccaaaagtgaggaggagcttaaaagcctagatgattatgttgaaaatatgggtgaaaaccaaaaggctatcttttatctagcaactgacagcttgaagagtgcaaagactgctccatttttggaganattggttcaaaaagatattgaggttctttatttggtcgaacctattg

SEQ ID NO: 33889 - DNA, 261 bp, Glycine max
  unsure (1)..(261): unsure at all n locations; Clone ID: 701107208H1
aacaagtagttgagaactaagaaggagaagcaaatggcttcctcaatgatctcttccccagctgttaccactgtccaaccgtgccggtgccggcatggttgctccattcactggcctcaagtccatggctggcttccccaccaggaagaccaacaatgacattacctccattgctagcaacggtggaagagtgcaatgcatgcaggtgtggccaccagttggcacgaagaagtttgagactctttcctacntgccngacct

SEQ ID NO: 33890 - DNA, 258 bp, Glycine max
  Clone ID: 701107210H1
cagggcgaggatttggactttgcttacgacagcatctctgcattctctgataggagagacaatcaggaggccgtttttggcaccgaggaaggattgaaagatatcaaggaggcgactttggcgtatagagaggaggctttggccttgcagaggcagctgaggcatctgcaatctcagtttgacatgctttcgggccaggcctccaccttgacacaaggaagacgagcacgccttgctgcaacctctattgttaatgga

SEQ ID NO: 33891 - DNA, 259 bp, Glycine max
  unsure (1)..(259): unsure at all n locations; Clone ID: 701107211H1
ctanagtcttcagtttctcctcgttgttcttcgctttcctgttttcaatttcgattctttcgttaatttaataagatgtttgggagggcaccgaagaagagcgataatacgaggtactacgaaatcctcggcgtctccaagaacgcttcgcaggatgatctgaaganggcttacaagaaagccgccattaagaatcaccccgacaagggcggtgatcccganaagtttaaagagcnnncncnagttatgaggttctgag

SEQ ID NO: 33892 - DNA, 240 bp, Glycine max
  unsure (1)..(240): unsure at all n locations; Clone ID: 701107212H1
gttggtgtagctagcgagggaacnatatagggggaagnctttattcattcattaagacggcatcggagcttcaattgcccccaggcttcagattccatccaacggaccaggngctggtgttgcactatctctgccgtaaatgcgcatcgcagcctatcgccgttcccatcatcgccgaaatcgacctctacaaatacgacccctgggacctaacccggattggcttcctacggagagaaa

SEQ ID NO: 33893 - DNA, 262 bp, Glycine max
  Clone ID: 701107213H1
tcctctcccagacaaacacatggctttgcccaatcagcaaaccgtcgattaccccagcttcaagctcgtcatcgtcggtgacggtggcacaggaaagacaaccttcgtgaaaaggcatctcactggtgaattcgagaagaaatatgaaccgaccattggtgtggaggttcatcctttggattttttcactaactgcggaaagattcgattctattgttgggatactgctgggcaagagaagtttggcggcctcagagatgga

SEQ ID NO: 33894 - DNA, 242 bp, Glycine max
  unsure (1)..(242): unsure at all n locations; Clone ID: 701107214H1
caagcctagctcctcatatcatactcactgatttatcttacnctctccatcgttccgttcantcattcactctgggcgcgcgcacgtgctaggaaccatcgattcgagaatgggcaacgactgtnnnnnnnnnnnnnnnnnnnnnnnnnnnnnnnnnntggtggccgttgagctcactgacgcctccagctggtggcacgacatcgacgactctccggcgtggcaggatcgtatcttctaca

SEQ ID NO: 33895 - DNA, 233 bp, Glycine max
  unsure (1)..(233): unsure at all n locations; Clone ID: 701107215H1
tggaattcccaacagtatctctatctaagggctctatggttgctgaagtactgtccctggctttaaataaatgtgaaatagaaggaatctgattccttcatcagttgtgtatgtttaagttatgtatttggagtggctgaatgtacttgtatttgtcattaataaaccatgtttgtgtaatggaaaccaaaataataaatgcaatcatgcaggtttgaactttttaaantaaa

SEQ ID NO: 33896 - DNA, 130 bp, Glycine max
  unsure (1)..(130): unsure at all n locations; Clone ID: 701107216H1
ctccgctctgccacggctgagaaaatagcgacgcggaaacacgctcgtccttcacgaccctgcgatccagcgcggcgtgtcctgcgattccnctctccgnngngtntccngnagatgaagaattgngagg

SEQ ID NO: 33897 - DNA, 268 bp, Glycine max
  Clone ID: 701107217H1
gtgaaggcatcgttagcagttttgtagattcaacctcaatttgcagagttacgttctaatatatttacacaagactgataagagaaaatgtctctgattccaagtttcttcggtggccgaaggagcagtgttttcgaccctttctccctcgatgtgtgggacccctcaaggattttccattcccagttctctttctgctggaaaattcagcgttgtgagcacacgagtggattggaaggagacaccagaagcacagtgttcaaggtga

SEQ ID NO: 33898 - DNA, 268 bp, Glycine max
  Clone ID: 701107218H1
cttctccaacatgccaaacgacagcgttctgagtcttttcttcttcgttaccctcttcacatgccttctctctgctaattcccacgatgaccatattttcctaccgagtcaactccatgacgatgactcagtgagttgcactgctaccgacccaaaccttaactacaagccggtgatcggaatcctgacccaccccggcgacggtgcctctggccggctcagcaacgccaccggggtttcttacatcgccgcctcctacgttaaattc

SEQ ID NO: 33899 - DNA, 265 bp, Glycine max
  unsure (1)..(265): unsure at all n locations; Clone ID: 701107219H1
gtaagaactacgacgaantancaacaatggtggcnggaactgcaaccttgaagcttagcctctccgctttttcntctccaatgtcaaatttcagcgcttcctcttcattcccctctcgtctcccaatgcgaaccccttcttcttctaaacctcgatttctcaggatttacgccttaaccagcaacgacatcaaggtcggcaccaacctcgaagtcgatggtgctccttggcgtgtgttagagtttctcacgttaagccgggaaaa

SEQ ID NO: 33900 - DNA, 262 bp, Glycine max
  Clone ID: 701107222H1
caaaaatggcggcgaaacttcaaatatttacgggattgccccccgcgccatttcaatcttcttcttcctccactctctgcgtactcaagaagcctctcactacctccttcttcggcaccgcgcgagtggaagttctgaaacttagagtgatgaggattgtgaagcctacgcgtggcggaggtgctctcggtgctcgcatgaacctctttgacaggttcgccagagttgtgaagtcgtacgcaaacgctgtcttaagttcgtt

SEQ ID NO: 33901 - DNA, 255 bp, Glycine max
  Clone ID: 701107225H1
accagatggcggaagtggacgagtttgaggacaagcagaaggagttggaagggatctgcaaccccatcattgctaagatgtaccagggtgctgctggacctggtgcagatgttcctatgggtgctgacatgcctgctgctggtgctggacctaaaattgaagaagttgactaagcttgtggaatatcactaacttcaactttgggttgctctttcttattaggtgctctgccagagatgtaagcttaataatgta

SEQ ID NO: 33902 - DNA, 76 bp, Glycine max
  unsure (1)..(76): unsure at all n locations; Clone ID: 701107227H1
cctagtgcngttcctgcaattggcccctggccagtaaacatgaatgttcatcctggnccctaactanctgtggcta

SEQ ID NO: 33903 - DNA, 261 bp, Glycine max
  unsure (1)..(261): unsure at all n locations; Clone ID: 701107228H1
gagaaatggnaaagtacgagaagctggagaaggtgggaganggaacatacgggaaagtgtacaaggctcgggagaaggcgagtgggagcctggtggctctgaagaagacgcgtctggagatggacgnggagggtgtccctcccaccgcactacgcgaggtgtctctccttcagcttctctcccaatccgtctacatcgtccgcctcctctccgtcgaacacgtcgacaaggtccccaagtcccagaaatcctcctccaacc

SEQ ID NO: 33904 - DNA, 261 bp, Glycine max
  unsure (1)..(261): unsure at all n locations; Clone ID: 701107229H1
gcngcgccaagnggagcggtcccccaaagcaccagaacaagtacgcttggaaacccaacgctggtcgcaaaatcaacgaaactgaagttggaggaagattcagacccctctctgagatcactggggtgtgccctcgttgcaaggatcaaatcgaatggaaacgacgttatggaaagtacaagcctcttcttcaaccagccaaatgtcagagatgttccaagcgtgctgtacgtcaagcttaccatagcttgtgtcctggtt

SEQ ID NO: 33905 - DNA, 262 bp, Glycine max
  unsure (1)..(262): unsure at all n locations; Clone ID: 701107230H1
ctttcgtcttaatttgttctcttcagccatggcgatggtgcaanatgaacgatgcgttcagaaaagctactggattgaacatacgacggacttgtccgtagagtcaatgatgctcgattccaacgcctctgatctcgacaaggaggagagacccgaagttttgtccctactaccaccatatgaaggaaaatcagttgtagaacttggagcaggtattggaagattcacagttgaattggccaagaaagctggccagttactt

SEQ ID NO: 33906 - DNA, 263 bp, Glycine max
  Clone ID: 701107231H1
catgggggaccttcaaaagcgtgacctgtttttgggtctattcattgaggtggcaaaagagagagccctaccagttggaccagaggaaggtggttttggaatgtcactatgatcttctgtatggacgagctggattcttatggggtgcattgttcgtgaacaagcacctaggagaagatgcagtgcccaaagacattttgatgcttattattgatgcggtgttggctggtggtagagcaggagcatctgatattaaagactgc

SEQ ID NO: 33907 - DNA, 264 bp, Glycine max
  Clone ID: 701107232H1
gcacttttcagttacaaagcatttcattgttttacaatatacaacactacaatggctgcttcaacaatggctctctcttcatcatcattggctggccaagctatcaagcttgccccctccacccctcagcttggtgttggaagggttagcatgagaaaaacagcctccaagactgtttcctcaggaagcccatggtacggcccagaccgtgtcaagtacttgggcccattctcaggtgagcccccatcctacctcactggtgaa

SEQ ID NO: 33908 - DNA, 270 bp, Glycine max
  unsure (1)..(270): unsure at all n locations; Clone ID: 701107233H1
ctctctctatactataggtctcgcccaatacctactctccgctcccaagagcacgcaccaccactattgcacttcttcctcgnnnnnnnnnnnnnnnnnnnnnnnngctaaacccttttttctatctcactaacacaacaatgggagacgagaagaagggcaagcctgctgcttccggcgtgtggtccaccatcaagcctttcgtcaatggtggagctccggcatgctcgccacctgcgtcattcaacccatcgatatgatcaaggtgag

SEQ ID NO: 33909 - DNA, 266 bp, Glycine max
  Clone ID: 701107234H1
ggtgtccggaaatcgttcctatcatcacttctcaaatctcgaaccctctcgttcgtgccgatcactaggtcacacttcatcaatggcgggtagaggcaaaaccctaggatccagcgccgctaagaaggccacctcaaggagcagcaaagccggcctccaattccccgtcggtcgtatcgccaggttcctcaaggccggaaagtacgccgagcgcgtcggcgccggagcccccgttctacctcgccgccgttctcgaatatctcgtg

SEQ ID NO: 33910 - DNA, 264 bp, Glycine max
  Clone ID: 701107235H1
cgagataactagaaacagtgtgatgaaaatgaaggtccttgttttcttcgttgctacaattttggtagcatggcaatgccatgcgtacgatatgttccctctccgaatgaacactggctatggtgcccgtactccggaggtgaaatgcgcaagttggaggcttgctgtggaagcacacaacatctttggctttgagaccattcctgaagagtgcgttgaagcaacaaaggaatacatccatggcgaacaatatagatcagactc

SEQ ID NO: 33911 - DNA, 261 bp, Glycine max
  unsure (1)..(261): unsure at all n locations; Clone ID: 701107236H1
gttattctcttattcatccttctcttctgaataatccagatctctttctgcnncttttctccgtcacgcttttcgtgaccggatctgtatggatttgatccagatctacacgccgatggtggttttggccgggtctttcatagatctggtgcgtagaggctcagatctacggtaccgaggtacaacagagaatcgatgacaagaacgcagatccgacggtagatccagccgattccgcttgttcgatcgctacagacccct

SEQ ID NO: 33912 - DNA, 262 bp, Glycine max
  unsure (1)..(262): unsure at all n locations; Clone ID: 701107237H1
ctctcctcctttctccatttttcctctgcgcctttgcatntcagcngcacaccacaatggccaccaatgcattcactggcacatctctctccatgcgatctgtcattcctcaaacacaggcatttgcctcaatttctggcccgacatctgcttcaatttccagctttgggagaaagaatgtttcttttagcttgcagccacgcttaattcgccttaaaatttcctgtggctggccgctaaaccagagacagtagagaaggtg

SEQ ID NO: 33913 - DNA, 257 bp, Glycine max
  unsure (1)..(257): unsure at all n locations; Clone ID: 701107238H1
gagtttacacaagttctgattgaagagttatctctgaatttacaggctttacntgacattggagcaagaaagtatgccttggctgggttgggccttataggatgcaccccaggtatggtgagtgctcatgggacaaatggatcatgtgctgaagagcaaaatctcgctgcattcaatttcaataacaagcttaaagctcgagtggatcaattcaacaatgatttctattatgctaattccaaattcatctttataaa

SEQ ID NO: 33914 - DNA, 259 bp, Glycine max
  unsure (1)..(259): unsure at all n locations; Clone ID: 701107239H1
cncctctccaaaacttgtagctgaggatattattactcagcaaaaattcatggaagttccaatcaagtatccggttcaaactcacccttagggtggttcttacttgtatcatggcggccaccggtgggttgatttttggctatgaccatggtgtttcaggtggagtgacctccatggattccttcctgaagaagttcttcccatctgtatatgaaaaggagtctaacgtgaagccttcttcaaaccagtactgcaaatt

SEQ ID NO: 33915 - DNA, 258 bp, Glycine max
  unsure (1)..(258): unsure at all n locations; Clone ID: 701107240H1
gtttcccaacctccattgcctccgcttctacctcgctaccatgatcattcctgagaagaaccgcaaggagatctgcaaatacctcttccaagagggagtttgctttgcgaagaaggacttcaatttggcgaanaccctgagattgacgtgccgaatctgcaggtgattaagctgatgcagagtttcaagtctcgcgagtatgtgagggagactttgcttggatgcactattaactggttcctcaccaacgatggaatc

SEQ ID NO: 33916 - DNA, 259 bp, Glycine max
  unsure (1)..(259): unsure at all n locations; Clone ID: 701107241H1
cttatcttttcttatcccaaacaaactganactcaactcctgaanngcaagagtgagagagaaatggagaatgcggaggagatgatgcagcaaaacgacgaggttntgtcggttgaacttccagctccttncggttggaataaactgtttttccctaagaaactgggaacaccaagaaaaagtgagattgtnttcattgctccaactggggaggagatcagtaccaaaaaacaattggagcagtacctaaaggcacatc

SEQ ID NO: 33917 - DNA, 256 bp, Glycine max
  unsure (1)..(256): unsure at all n locations; Clone ID: 701107242H1
ggataagatacatatccttgtcaacctaaatggttatacaaagggtgccaganatgagatatttgctatgcaacctgcaccaattcaagtttcatatatgggattccctggaacaactggggctacttacatagactacttagtcactgatgagtttgtttcaccactacggtatgcaaatatatattcagagaagattgtacatctaccgcattgctactttgtaaatgattataaacagaaaaatcaggatgtg

SEQ ID NO: 33918 - DNA, 256 bp, Glycine max
  unsure (1)..(256): unsure at all n locations; Clone ID: 701107244H1
tcaggtacgaaggtatttcacccaaatataaatagcaatggaagcatttgccttgncatattgaaggagcagtggagccctgcgctaactatttcaaaggtgttgctctcaatttgttccctgttgacggaccctaatcctgacgatcctttggtccctgaaattgcccacatgtacaagacagacaggaacaagtacgagtcaactgccagaagctggacccagaaatatgccatgggttaagtgacctgtggta

SEQ ID NO: 33919 - DNA, 259 bp, Glycine max
  Clone ID: 701107245H1
tcagatatcagtttcggtggtttcactctatcgccacccagttccgatggctctcctcgccgtcacttcgcgcgctcccttcctcttctccccaaaccctaaaccactttctccatcctctttctactcccacctctctctctctcctcgctctcccaggttcccttctctccgcttccgctctgccaccggagacgccagcgacgccggcaagcccgccggtaagatcttccgacgagtggggcgaggatacgatccc

SEQ ID NO: 33920 - DNA, 259 bp, Glycine max
  unsure (1)..(259): unsure at all n locations; Clone ID: 701107246H1
actcataacacaaagcacaangcaaagctcatccttgagttaaaaaatggcagcagcttcttccatggctctctcatccccatccttggctggcaaggccgtgaagctgggcccatcagccccagaagtgggaagggtgagcatgaggaagaccgtcaccaagcaggtctcctcaggaagcccatggtacggcccagaccgagtcaagtacttgggcccattctctggcgagcccccgtcctacctaaccggtgagttc

SEQ ID NO: 33921 - DNA, 261 bp, Glycine max
  Clone ID: 701107247H1
cctactcttagccgcagatctctcagggcttgcatcttctcaggtaagttgtgaagatgtacacatcaaggaagaaaatccacaaggataaggatgctgaaccaactgagtttgaagagtcagttggacaggcattgtttgatctggaaaataccaaccaggagcttaaaagtgatctgaaggatttatacataaactcagctgtgcaagttgatgtttctgggaaccgcaaggctgttgttattcatgtcccttacagat

SEQ ID NO: 33922 - DNA, 258 bp, Glycine max
  Clone ID: 701107248H1
tcaacttgggtaccattgcgaggtccgggaccaaggagttcatggaggcgttgcaggccggtgctgatgtcagcatgatagggcagttcggtgtggggttctactctgcttaccttgttgcagagaaggtcattgttaccaccaagcacaatgatgatgaacagtacatttgggagtctcaggctggtggctctttcactgttactagggacactgatggcgagcaactcggaaggggaaccaagatcaccctcttcc

SEQ ID NO: 33923 - DNA, 270 bp, Glycine max
  Clone ID: 701107249H1
gggaacgagcagcaaagagatacactgaagtcaagaaacaagctgatccaaaagcaagcacaaaacttattaccttccatggtgatctgccatacacatcatctgagatcatagagaagctagagtctcttgatgaagaggatatagtaggatcaggaggatttggtacagtttaccggatggtgatgaatgattgtggtacatttgctgttaaacagattgatcgaagttgtgaagggtctgatcaagtgtttgaaagggaactagaaa

SEQ ID NO: 33924 - DNA, 264 bp, Glycine max
  Clone ID: 701107250H1
gcctcaacatctgaaacagactctatccctaatccctatcttcttctctgctctctccgcacgctttggctcctctgatctcaggtgttgttggcttggtatccgtgcaagttctgctgtagccgatttgaaggtgaaggtgtcaccttaaagtttctttcatgtttgatcaggctactatccatctgtgagcaactgagctgcttggagagtatttttcttcttctagaaaaaatacagaccctcatcccagagagttagctg

SEQ ID NO: 33925 - DNA, 262 bp, Glycine max
  Clone ID: 701107251H1
gtaaagaaccaaacttcatctcccaaaccttcatcgggcacaagctggttggctcatgctcaacagggcctagcagctttggctatctccttggcactcaactttagcccagttttgtttaatggcaatgcattggcatctgagtttgatgtgcttaatgagggtccacccaaagattcttatgtgtttgatgatgcaggagtgctagtagggtgaccaggtctgatttaaagcagttgttgtctgatttggaatcaaggaa

SEQ ID NO: 33926 - DNA, 258 bp, Glycine max
  unsure (1)..(258): unsure at all n locations; Clone ID: 701107252H1
agaaattaaacagatgggcctgcttcgagttgcaacccaggatgcaattcgccagctttcctctcagaccatcgttcaggttgatgtagacctgngagatggtttgaagatatgcaaggctgttaaccgggaggngtttgaggaggtaaacagaaaggtgtttgagaaatgtgaaagccttatcatacagtgtttgcaagatgccaaggtagaagttgaagangtaaatgatgtgataattgtaggcggatgttctta

SEQ ID NO: 33927 - DNA, 259 bp, Glycine max
  unsure (1)..(259): unsure at all n locations; Clone ID: 701107253H1
tnaccatctaatctcaagctctaagaagagcaactctacttttatattcacaacaaaaaagaaaaaagagagcataaaccaatggctacttcactttcagcaactgggtgtgttggttcttccttctatggaagttggggaacttcaattgttggtgaggactacaccatgctggccaagtcagtgccatcacaagttcgcatggggaagggaaagcccacgagattgcagcctatgatgaagaatgttaatgaaggga

SEQ ID NO: 33928 - DNA, 259 bp, Glycine max
  unsure (1)..(259): unsure at all n locations; Clone ID: 701107255H1
tnagaaacacgttcgtttcgtttcgttcccatggcggtctccgtttccgcgtcctccgcgattgcttctttgaactccgaactctccacgcgcttgccaccctcactcgcctccgcatcttcttccgccaagcaatcctttctgcaattcccgtcgtgcacgcgccttcttcggattagcactccacgcgctcccgctccatcgcgacctcgattccttcctctggttcaagcgaagaaacaaacctataactcgtttg

SEQ ID NO: 33929 - DNA, 255 bp, Glycine max
  Clone ID: 701107257H1
cttttttgggagatgattcacatgttttgagtgaagccaaggaggaagctgcatgtgctattgtggaatttgtgagggcacctgacatatttcagtgtgatttgctagacttgcctgctgttgcacaactggagaaggatgccaaatatgctctgttatatcagcttcttaagatttttcttacccagaggctggatgcatacatagactatcatgctgccaattccacattgttgaaaagttatggcctgtgca

SEQ ID NO: 33930 - DNA, 257 bp, Glycine max
  unsure (1)..(257): unsure at all n locations; Clone ID: 701107258H1
cncttcccttctccaacntgccaaacgacagcgttctgagtcttttcttcttcgttaccctcttcacatgccttctctctgctacttcccacgatgaccatattttcctaccgagtcaactccatgacgatgactcagtgagttgcactgcaaccgacccaagccttaactacaagccggtgatcggaatcctgacccaccccggcgacggtgcctctggccggctcagcaacgccaccggggtttcttacatcgcc

SEQ ID NO: 33931 - DNA, 258 bp, Glycine max
  unsure (1)..(258): unsure at all n locations; Clone ID: 701107259H1
ctggttgattcggatctagagtcttcagtttctcctcgttgttcttcgctttcctgttttcaatttcgattctttcgttaatttaataagatgtttgggagggcaccgaagaanagcgataatacgaggtactacgaaatcctcggcgtctccaagaacgcttcgcaggatgatctgaaganggcttacaagaaagccgccattaagaatcaccccgacaagggcggtgatcccgagaagtttaaagagctggcgcaa

SEQ ID NO: 33932 - DNA, 255 bp, Glycine max
  Clone ID: 701107260H1
catttgtgagcacccgtgtggactggaaggagaccccagaggcgcacgtgttcaaggcagatattccaggactgaagaaggaggaagtgaaggtgcagattgaagacgataaggttcttcagataagcggagagaggaacgttgagaaggaagataagaacgacacgtggcatcgagtggagcgtacagtggcaagttcatgagaaggttcagattgccggagaacgctaaagtggagcaagtgaaggctctatg

SEQ ID NO: 33933 - DNA, 260 bp, Glycine max
  unsure (1)..(260): unsure at all n locations; Clone ID: 701107261H1
ctttaatactgcaatgtttatgtttttaatttctttacatgtgccataaganacacgtattatccataaagttaatcgcaaaatacagaccaaaaaggaaactaaagatgaattgattctatttatgcattaattaactatgggtggtggagatataatttccgaagcttgacagctttaacctaattttaaccctcttaaagcagcacttgcaatgctagcttagattccaagataaganacatcatcattaactaact

SEQ ID NO: 33934 - DNA, 259 bp, Glycine max
  Clone ID: 701107262H1
attcgttgttgttgttctaaaacgtccacacattctccgtcgccacaacaacaatggctccgaagaaaggtgtgaaaggttccgttgtagcagcgaagaagaaggttcaggagaaggtgacgaatcctttgttcgagaagcgtccgaagcagttcgggatcggaggcgcgctgccgccgaagcggacctgacgcggttcgtgaagtggccgaagaacgtccaaatccaacgcaagaagcgcatcctcaagcagaggctc

SEQ ID NO: 33935 - DNA, 259 bp, Glycine max
  Clone ID: 701107263H1
tctgtcacagaagatattcttaccggatttaagatgcatgcccggggttggcggtctatatactgcatgcctaagcgcccagcgtttaaaggttctgctcccatcaatctttcggatcgtctaaaccaagtgcttcgatgggctttaggttccgtggaaattcttttcagccgacactgtcccatctggtatggttatggtggaaggttaaagtggcttgaaaggtttgcttatgtgaacaccaccatctatccagtca

SEQ ID NO: 33936 - DNA, 259 bp, Glycine max
  unsure (1)..(259): unsure at all n locations; Clone ID: 701107267H1
ggattctgtgtttctgagggaaggctaccaagattctcagttggtggagaaggaccggttgttgcttataaaggaaaagcttcgtactctggttaatgttccacggtttcccaagggncctgctcgcaggatagttgaagatagcatgagaggnagtgatagcagagaagatgaaagtggtgaagaggaagaagaatggttagaagatgttgataatttaatgaatgatgatgggtttgatgacntgatgatggtgatg

SEQ ID NO: 33937 - DNA, 258 bp, Glycine max
  unsure (1)..(258): unsure at all n locations; Clone ID: 701107268H1
ctcctaagccatacaatncaaaaaagtcgtttttttatttttttnattttcaaccatggctggtgtgaaccccgaggcaggagggtggaaggcctatccttctgttatggagactgctcttgatagtggtgatggaaggagtcatcataacatgagtgatgatgggtcggtgatgcatttctctgctacaaggtcagtggcagtgccatcatctggacagaataaagtgattncctagtccaatcagtttagcatcct

SEQ ID NO: 33938 - DNA, 258 bp, Glycine max
  Clone ID: 701107270H1
gcgaagacggattacatgtacttcgacccgtcggattcaatcccgaagctgcacacggactcgagctgttcggagcaggtggtatcgccggaattcgcgagcgaggtgcaaagcgagcccaagtggaacgagtgggagaaaagcctcgaatttccatttaattacgtggatgccactctcaacaacagcttcatggcccaattccagggcaataatcagatgttgtcgccgctggcaggacatgttcatgtactggcc

SEQ ID NO: 33939 - DNA, 256 bp, Glycine max
  unsure (1)..(256): unsure at all n locations; Clone ID: 701107272H1
tgcggcggtccaaacactcttctctgcagcttttnncctacaactcccttcaccatggctgaacaaaccgagaaagcttttctgaagcaaccaaaagtgtttctcagcacaaagaagactgggaagggaaagagacctggaaaaggtgggaaccgcttttggaagtccattgggcttggatttaagactcccagggaagccatcgaaggaacctatattgacaagaagtgcccctttcactggcaatgtttccatc

SEQ ID NO: 33940 - DNA, 254 bp, Glycine max
  unsure (1)..(254): unsure at all n locations; Clone ID: 701107274H1
aagcacaaacgactgtatggcgtatctctcccattcctactatttcatctacttgactctctctctgctnnnnnnnnnnnnnnnnnnnnnnnnnnnnnnnntgccctatttaacaacatccccagcctaatgcctttcccattctcttgtcctcttcaacttccaacacccactgacacattccctcaactctctcatgctcacggccactactcttatctctctcccctcctagttccattcatctcctcaca

SEQ ID NO: 33941 - DNA, 259 bp, Glycine max
  unsure (1)..(259): unsure at all n locations; Clone ID: 701107276H1
cttcccttctccaacatgccanacgacagcgttctgagtcttttacttcttcgttaccctcttcacatgccttctctctgctacttcccacgatgaccatattttcctaccgagtcaactccatgacgatgactcagtgagttgcactgcaaccgacccaagccttaactacaagccggtgatcggaatcctgacccaccccggcgacggtgcctctggccggctcagcaacgccaaccggggtttcttacatcgccgc

SEQ ID NO: 33942 - DNA, 257 bp, Glycine max
  Clone ID: 701107277H1
tagattaaagaggaggtgtgctgagacaggtagggtttcgagttacagccgcaccttgattcagagcagagcgaccttgaagagctatggctgtcggaaagaataagaggatttccaagggaaagaagggtggcaagaagaaagccgctgatccctttgccaagaaggactggtacgatatcaaggccccttccgtctttcaggtcaagaatgttggcaaaaccctcgtctcttcgtacccagggaaccaagattgc

SEQ ID NO: 33943 - DNA, 255 bp, Glycine max
  unsure (1)..(255): unsure at all n locations; Clone ID: 701107278H1
ctcgagataactagaaacagtgtgatgaaaatgaaggtccttgttttcttcgttgctacaattttngtagcatggcaatgccatgcgtaacgatatgttccctctccgaatgaacactggctatggtgcccgtactccggaggtgaaatgcgcaagttggaggctgctgtggaagcacacancatctttggcttgagaccattcctgcagagtgcgttgaagcaacaaaggaatacatccatggcgaacaatata

SEQ ID NO: 33944 - DNA, 257 bp, Glycine max
  unsure (1)..(257): unsure at all n locations; Clone ID: 701107279H1
tttgttgatcgagataactagaaacagtgtgatgaaaatgaaggtccttgttttcttcgttgctacaattttngtngcatggcaatgccatgcgtacgatatgttccctctccgaatgaacactggctatggtgcccgtactccggaggtgaaatgcgcaagttggaggcttgctgtggaagcacacaacatctatngctttgagaccattcctgaagagtgcgttgaagcaacaaaggaatacatccatggcgaac

SEQ ID NO: 33945 - DNA, 264 bp, Glycine max
  unsure (1)..(264): unsure at all n locations; Clone ID: 701107281H1
cnaaaagcgaagaaaaacgcggtttttgttcccctgctctatctgactctgtctctctttctctctgcaaaaaccttcgttcatcgtcaacccacgaactcaaacaacaaatcattcattctttcaattgtaacatataaaaaaaaatgggttgtttcgccagcaaaaacgctgacaccaaggccagtagggccgcgcgctggcgatccacgggcatcgttgctttgcgcgatttccaattaaagacgtttccagatgaattct

SEQ ID NO: 33946 - DNA, 262 bp, Glycine max
  Clone ID: 701107282H1
caatcagcaggattgatgatgccgtggcaagaatcttaagagtaaaatttgtcatgggcctatttgaaaatccatatgctgatccaagcctcgcaaaccaactgggtagcaaggaacatagagaaatagcaagggaagctgtacggaaatccctagtgttgctaaagaatggtaaatcttacaagaaaccactgcttcctcttcccaaaaagtccacaaaaatactggtagcaggaagtcatgctaacaatttgggttatca

SEQ ID NO: 33947 - DNA, 240 bp, Glycine max
  unsure (1)..(240): unsure at all n locations; Clone ID: 701107283H1
gtaatttttgttgtgtactagtaacgnngtttgataaacctannacttcatacngtaaactatttaaatctctcaccactaagcagactctgataagttaatctgtgtgtatatgtattctaggcagacggacggatctatttgagagagagtgggagcaactgccccactaaattttttatttttcttacatgatatatatgtgtggttataaattattttaaaaattaaaatatagtt

SEQ ID NO: 33948 - DNA, 262 bp, Glycine max
  unsure (1)..(262): unsure at all n locations; Clone ID: 701107284H1
cacacactccgcaagtccacttcccctattcgcgcctacttcttctttttctccctgccatggctgcttcttctccgctaaacgacgccgtcgaaggcaatcctcttctgcagaacttcgncttncccacccttcgatgtcgtcgagcccaaacacgtgcgacccggcattcgcgccctcctcggcaagctggaaagtgaattggaggagctcgaacggaacgtggaaccgtcgtggccaaagttggtggaaccgttggaga

SEQ ID NO: 33949 - DNA, 258 bp, Glycine max
  unsure (1)..(258): unsure at all n locations; Clone ID: 701107285H1
ctaaaagcgaagaaaaacgcggtttttgttcccctgctctatctgactctgnctctctttctctctgcaaaaaccttcgttcatcgtcaacccacgaactcaaacaacaaatcattcattctttcaattgtaacatataaaaaaaaatgggttgtttcgccagcaaaaacgctgacaccaaggccagtagggccgcgcgctggcgatccacgggcatcgttgctttgcgcgattccaaattaaagacgtttccagatg

SEQ ID NO: 33950 - DNA, 256 bp, Glycine max
  unsure (1)..(256): unsure at all n locations; Clone ID: 701107287H1
cncatgggggaggatgaacgtgaactgcttcttcttcgcaaccatgaattcttggcagagcaagaacaactcaaggctaaatacaatataatgcaaaaaaatattgacgaatttggaagagaccctaaaaatcgttccattgtgtttgatagaccagctcgcattgagantataaatgagcaatccgaaataccactggttgtttatgtgtctcgtgaaagaaggccaaatgttcctcatacatacaaagggggag

SEQ ID NO: 33951 - DNA, 256 bp, Glycine max
  unsure (1)..(256): unsure at all n locations; Clone ID: 701107289H1
ctttcaccttcctccatnctttcttcatctgggttttgcttgctataaaaatctanctaaaatttgtccgtttgctttcagcaagagctttagcttaattatcaccaggaatttatttggcagtcatggattattcatcatggatgattaacacttccttggatctcaacattaatccccacaggcttcatgaagaacttcccaaaaaggaggtggaaaacaactttttgtcattgaatttggaggtgaagaaatc

SEQ ID NO: 33952 - DNA, 255 bp, Glycine max
  unsure (1)..(255): unsure at all n locations; Clone ID: 701107292H1
ctcggctcagcacagctaccatcgaaaactagccaaggctctgtctttttccctttttccttttgcttcaacaacatcgtcgtcacaaatctnnnnnnnnnnnnnnnnnnnnnnnnnnnnnactgttgaattgaagatgaagatcactgtcatgactgctgatgaacaaatcatcacgttggatgtggatccccacgaatctgtggnaaacgtcaaagcattgctcgaggttgagacaagtgtggctctcaacaa

SEQ ID NO: 33953 - DNA, 258 bp, Glycine max
  unsure (1)..(258): unsure at all n locations; Clone ID: 701107293H1
ctcggctcagcacagctaccatcgaaaactagccaaggctctgtctttttccctttttccttttgcttcaacaacatcgtcgtcacaaatctagagacagagagaganagagaaaaaaaaaactgttgaattgaagatgaagatcactgtcatgactgctgatgaacaaatcatcacgttggatgtggatccccacgaatctgtggnaaacgtcaaagcattgctcgaggttgagacaagtgtggctcttcaacaaca

SEQ ID NO: 33954 - DNA, 239 bp, Glycine max
  unsure (1)..(239): unsure at all n locations; Clone ID: 701107294H1
ggcaaaacgcnaganaaaaactgacaacttagtcatcaaaacnaagncttgtttttctcaaacccatctttctttccccaccccacttgtccncttctgtccctatctctctccacacttcttgggacancgtcgttgtcgttttcatctatgtcacttcctagctcccgntttcatttattatatgttgttgatttgtgtgttgctgaattcagaaacaaggcatggaggttaacatt

SEQ ID NO: 33955 - DNA, 259 bp, Glycine max
  unsure (1)..(259): unsure at all n locations; Clone ID: 701107295H1
ctcagttgtgtatcgttgcagctctactagctagggtttcgcaagtncgatcgaagaagaacgatggcgatggctgctgctctgcgtcgcgaaggaaggcgtttgacccaaccaatcaacgccctccgttcctctctcatctctcaagaccaatcccctcatggcgcgcncttcatttccactcaagtggtgagaaaccgaatgaagagtgtgaggaatatccagaagatcaccaaggccatgaagatggttgccgcat

SEQ ID NO: 33956 - DNA, 260 bp, Glycine max
  unsure (1)..(260): unsure at all n locations; Clone ID: 701107296H1
cacattaacctttctcattccccatctcctcaccttattcagccactgctaatttctagganttccgaaatggacgctggcggaaagatcaagaagggcgccggaggaagaaagggcggcggccctaagaagaagccggtttcaaggtccgtcaaggccggtctccaattccccgtcggaagaattggccgttatttgaagaaaggaaggtacgcccagcgtgtcggtaccggtgctcccgtttacttggccgcagttct

SEQ ID NO: 33957 - DNA, 267 bp, Glycine max
  unsure (1)..(267): unsure at all n locations; Clone ID: 701107301H1
gtctcactgtcantttacncaaacnctaacactntcntcnctctgtnttccttcntcctngnatcantggagttggacggcgttctcctcggcatgtgnaaccctctcctcgacatctctgccgtcgtcgacgacgctttcttgcaaaaatacggtatcaagttgaacgatgcgattctcgccgaggatanacacaaacctatgtatgaagaattgggtaanaatcctaatgtggagtacnttgctggaggtgtatcagaattcaat

SEQ ID NO: 33958 - DNA, 283 bp, Glycine max
  unsure (1)..(283): unsure at all n locations; Clone ID: 701107302H1
cggatgagagcatcaaactcttcttcttcgatttncattncgaacgtnaactntntcttcgactttctcatnannttcttcgctcttagatctncgtccgggganngtnccgnatactaccactaccaatcgncgatnnccacgatcggaggcntanangantcgcaangctctcanaacanngtcnanaccgaagcccttgatcgattcgccgtagacgaacacnanaagaagcagtattcgcttctggagtttggtagngtnggctagggcaagnaacngg

SEQ ID NO: 33959 - DNA, 277 bp, Glycine max
  unsure (1)..(277): unsure at all n locations; Clone ID: 701107303H1
tcaaaacactcataacacaaagcacaaagcaaagctcatccttgagtnaanaaatggnagnagcttcttcnatggntctctnatcccnatccttggctggcaaggccgtgaagctgggccnatnagcccnagaantgggaagggtnancntgaggaagacngtnacnaagnaggtntcntnaggaagcccatggtanggcccagacngantcaagtacttgggccaattctctggcgagcccccgtcctacntaaccggtganttccaaggcgacta

SEQ ID NO: 33960 - DNA, 275 bp, Glycine max
  Clone ID: 701107304H1
ttcattctcatctttctctcttctctctccacccaaaccctaactcccgaccctgttcccctctcgtatccgtcatgaaaggaggaaagtccaagaccgaatctaagagagccgatcccaaacttgctgtgaataagaagggagccgccaccaaggctaggaaacccgccggcaaggggaaggcagcgaaagaccctaacaagccaaagaggcctccaagtgctttcttcgttttcatggaggagttcaggaaggtattcaacaaagaacatcct

SEQ ID NO: 33961 - DNA, 279 bp, Glycine max
  unsure (1)..(279): unsure at all n locations; Clone ID: 701107305H1
ggagaggctgtggagaacactatatacagtgttgcgtccaaaactaccagcgtaaggntgcagaaagcagttgatcctgaagtggctgcattgcttgatgatgacgatttgtcacggttgggatctgatgttgaggatttggaagaagactttgttgttcaggcgaatctccttgaagaggaagatgaagaagatgacgagaaggatcctatatgtaatgaaacgagttttctgaggagtctgcgatacatagaaacgggaacatgcacacacactgca

SEQ ID NO: 33962 - DNA, 101 bp, Glycine max
  unsure (1)..(101): unsure at all n locations; Clone ID: 701107306H1
aaaacctcgtttcttctcaatacaaaaaaaaaaaantgctgnagaaccngtgtctngnncggnttcnncanggaagcccttccggnatttnttttgcagaa

SEQ ID NO: 33963 - DNA, 285 bp, Glycine max
  Clone ID: 701107309H1
gggagaatgaaaactgaaacagagccaaatgaaaccgagtcagattggagcgagttgactcgcgagtgcctcatcaacatcctctctcgactcagcgtcgaggatcgatggcgcggcaccatgctcgtttgcaagtcatggttcagcgtcttcaaggaaccctctcttcacttcgtcttcaacctcgaccctcaattcgactcgcccaccgaatcaactcgctggtggacccccgagttcgaggccaagatcgataacatgcttcgatctgtcgtcgaatgggcc

SEQ ID NO: 33964 - DNA, 283 bp, Glycine max
  unsure (1)..(283): unsure at all n locations; Clone ID: 701107311H1
ggcagatcctactgctgaagaagaatctattatggaaacccatgtgacaatagttttggatacatccggtcaactaatatctctttacaagcctggtgggccagctcttgcctatacttctgctatccaggattgtgtcgggctaacggggcaaagagtanaggaactaaagagctacttagacaaagaaaattctgctatggaggtggtggtttgagtagaattattaattacacagtaatcntttttgtcctgaatggttgtttaaattanntagtatttg

SEQ ID NO: 33965 - DNA, 284 bp, Glycine max
  unsure (1)..(284): unsure at all n locations; Clone ID: 701107312H1
gtttctcctcgttgttcttcgctttcctgttttcaatttcgattctttcgttantttaataagatgtttgggagggcaccgaagaagagcgataatacgaggtactacgaaatcctcggcgtctccaagaacgcttcgcaggatgatctgaaganggcttacaaganagccgccattaagaatcaccccgacaagggcggtgatcccgagaagtttaaagagctggcgcaagttatgaggttctgagtgaccctgagaagcgtgagatatatgatcagtatggt

SEQ ID NO: 33966 - DNA, 285 bp, Glycine max
  unsure (1)..(285): unsure at all n locations; Clone ID: 701107313H1
cgccaganttgaagcgagaaggaagggtccgcgcgccatggctggcatcaccacctcccccttcaaactctctcactttccgactctcttctcttcttctgattccaaactcttcggccttcccctctccaatccctattccctcaaattcgacccttcttctctctccactacctctctctcctacgtcaaagcccgctactannnnnnnnnnnnnnnncctccccgctcccccaacgactcccgcttccgcaagtcctccgattccgacgacgacgataaagc

SEQ ID NO: 33967 - DNA, 286 bp, Glycine max
  unsure (1)..(286): unsure at all n locations; Clone ID: 701107314H1
ctctcctctacttgcttgaacatgaaagcttccactctacccttatacnncaacccctcttcccaaaacctccctctctgcttctcatttctctcttcatctccttccaatggcttccantcccacactctccctttcaaaccccaacaaccattgcactctccctcccacctctctcttcggcaccaggattactctcctacgcgccacctcatcgtcccgttccctccccaacaccaattgccgtgccagtcagcaaccgtgtcgtttagcctccccaccccga

SEQ ID NO: 33968 - DNA, 286 bp, Glycine max
  unsure (1)..(286): unsure at all n locations; Clone ID: 701107316H1
tcttcatcgtttttaggaatatcacgattttcntttcgccaattcgtgaaatcgaaagattcccacagaattgtacgaattattgttcatttttttgtctctactgtcgtgctccaacttggtaaactagaagttcatttattgtttncattcttcaatgggggatgctgagaatgcccttccacctacaaagaaaagtngctgctggaagggagctcactcgagacactcccattgatgatgaggaagatgcccccgagcttgagactggcactttcaagagagc

SEQ ID NO: 33969 - DNA, 286 bp, Glycine max
  unsure (1)..(286): unsure at all n locations; Clone ID: 701107317H1
ctcgcgactcaccaccactgctcagactgctcgccggcctctantttatcaaagcttctgcgcctcccacgttattttcaatactctcttggggttcgcatagtgagatggggaagaaggcgaagaaagctatgaataatttgaaaagggcttcctttaataataagccatctgagggtgctgatttcttgcccttggaaggtggtcctgctcgtaagctcgccgcctcccagcagaagccgccggagaacaccgccacggttttgtatgtcggtcggattccgca

SEQ ID NO: 33970 - DNA, 282 bp, Glycine max
  unsure (1)..(282): unsure at all n locations; Clone ID: 701107318H1
ttcgtncattcttcgttttctcngaatctgattggctgatttgggaaaatgctcctgggattctcaacgttagcgttgttggtgtgtttctcatgttgttggttattagtgttgggcganggtnaaacggcgtcgtgttcgaacatagtggcgttggggcaccgcaccgncaacatatccataactnagttgggggcgtgggtgatggacgcaccctcaacaccaaggccttcaganaggccatatatagggttcagcacttgccacgaganggaggcacgc

SEQ ID NO: 33971 - DNA, 283 bp, Glycine max
  unsure (1)..(283): unsure at all n locations; Clone ID: 701107319H1
cccaattgaggcattatttttcatatgtatgattagtacatgaccaaggtgatggagtattggagaccgtggttttgggggcacgccgacaagtactacgttgttaagttgagccaattgaggttgaagtttgggccaacgttggatgctgcaaatgacaagataatagcaattcagattaagggaacagctacaaagaaagggaaagtnnnnnnnnnnnnnnnnnnnnncaaaagctttcttattccttttcatcgtacccagaaactaggatccactcaca

SEQ ID NO: 33972 - DNA, 275 bp, Glycine max
  Clone ID: 701107320H1
ggctgacggggtggttctgttggatacatgggccagcatgtttgggatgagggttaggattgcattagctgaaaagggtgttgagtatgaatacaaggaagaaaatctcaggaacaagagtccttgcttttgcaaatgaacccaattcacaagaaaattccagttctgatccataatggcaaaccaatttgtgaatctgcaattatagtgcagtacattgatgaggtctggaatgataaagctccaatcttgccctctgacccttatgagagagc

SEQ ID NO: 33973 - DNA, 280 bp, Glycine max
  Clone ID: 701107321H1
cttgaatacctgtggcaagtccctagtcatcgtaatgcttggagacagattgctaaagaggaggaaaagggtgtctatctgaatttcttaaactttctgattaatgatagtatttatcttcttgatgaaagtctgaacaaaattcttgagctaaaagaattggaggctgagatgtcaaatacggtcgagtgggagcgacgaccagttcaagagaggcaggagaggacccggttattccattctcaagaaaatattattcggatagatatgaagttggcaa

SEQ ID NO: 33974 - DNA, 282 bp, Glycine max
  Clone ID: 701107322H1
gtgcttgtgacgctcttgtccttttgccacgcttaagatcacccaagagagaacctaagacacacaacacaacacacagagagagtttgaggaagaaatcatcatggcttcagcagcatctgggtttgtgctgtctcttaatgttgcagcttccaccacaaactcaagggtggtcttgttcaacacaaagaaccacgcttctaggcttcttgtgagggcttcagacgagcctgcagcggcggcacccgcaaccaccacccctccagctgaagctgaagcaaa

SEQ ID NO: 33975 - DNA, 281 bp, Glycine max
  Clone ID: 701107323H1
ctccttcaaaaagcttctcatccatggcgaaaacgctcatttcgtctcaatcgttcatcggcacaccgctcccctcactccctcgccaccacctcccccaccgcaccaggctcgtcgccaccaaagtcctcgtcagcctccacgaaattcccccaatccactccataagccgcaacattgacttcgccggaatcgtgactagagccgaaggcttctctacacgctcgccgatgctgcggttgcggcggaccctgcggttgctgcggactctgcggcttcca

SEQ ID NO: 33976 - DNA, 282 bp, Glycine max
  unsure (1)..(282): unsure at all n locations; Clone ID: 701107324H1
gngagccgtagcagcggaagtctagcttgggtagcgaatcncaatggcgagaggattaaagaagcatctgaagaggcttaatgccccaaagcattggatgcttgacaaactgggtggtgcatttgctcctaagccctcatctggaccacacaaatcgagggaatgcctgccactcatactcattttgcgaaaccggctgaagtatgctctaacataccgtgaagtcatgctattctgatgcagcgacatgtccttgttgatggcaaagtcaggactgacaaa

SEQ ID NO: 33977 - DNA, 281 bp, Glycine max
  Clone ID: 701107325H1
gtctgctgttagatctgtacccgcctagccattgatttggaaaagtccaacttcaaggatgagtaagcttcagagtgatgctctaagagaagctatctcaggaatcatggctgattccaaggaaaagaacaggaaatttgtggagaccattgaactccaaattgggttgaaaaattatgatccccagaaggacaagcgtttcagtggctctgttaagttgcctcatattcctcgccccaagatgaagatttgtatgcttggagatgcccagcacgttgagg

SEQ ID NO: 33978 - DNA, 282 bp, Glycine max
  unsure (1)..(282): unsure at all n locations; Clone ID: 701107326H1
atgggttcttcttctattacaacatcgccttgaaancatgaccatggctgcgatcgtgctcctnttcacggtctntgccgtttcctccgccctagacatgtcgataatctcgtacgacagcgcccacgcggacaaggccgccacgttgcgcaccgaggaggagctgatgtccatgtacgagcagtggctcgtgaagcacgggaaggtgtacaacgcgctcggcgagaaggagaagcgcttccagatcttcaaggacaacctgcgattcatcgacgaccacaa

SEQ ID NO: 33979 - DNA, 283 bp, Glycine max
  unsure (1)..(283): unsure at all n locations; Clone ID: 701107328H1
gctgtttgttagggagagaagaaagagagaaaaagaaaaatcaaaggacggtggtgagtgctgcttctgcttcatcatcatcagagaagaatggcggctactgtgtcttctgcgtggtcaaagcccggcgcgtgggctctcgattccgaggaacacgaagccgaactccttcaacagaacaacgaaannnaactcgccgacttccnnnnnnnnnnnnnnnnnnnnnnnaagcccaagaagaagaaggcccagacctactccctcgccgaattcaccgccaanc

SEQ ID NO: 33980 - DNA, 283 bp, Glycine max
  Clone ID: 701107329H1
gccccatttcggattgcagaacaatacagtcacagaaacattttccaaagaaaaagcaaaaaaaatggatgcaaaaacgaattcttcggcgccggaaacatcgccgccggtgatccacccggcagtggcaccactctcctaccttctgggaacatggagaggccaaggagaaggagggttccccactatcaactccttctcctatggcgaagagcttcacttctctcattcccccagcaagcctgtgatagggtacactcagaagacatggaaatcagctctg

SEQ ID NO: 33981 - DNA, 283 bp, Glycine max
  unsure (1)..(283): unsure at all n locations; Clone ID: 701107330H1
aggnaagagagagggagaagtatagagatagagagcaggagagagaaagctatagagacggggacaaggataaggggaaagataaaattagagaaaaggagagggagacggatcgcagataaagaaaggacaagagatagagtgaacagaaagactcacgaggaagattatgaactggataatgttgatgataaagtagactaccatgacaagagagatgnggagattggcaagcaggcaaaggattcaaagcttgacaatgataatcaagatggccaaacat

SEQ ID NO: 33982 - DNA, 281 bp, Glycine max
  unsure (1)..(281): unsure at all n locations; Clone ID: 701107331H1
ttgatcgagataactagaaacagtgtgatgaaaatgaaggtccttgttttcttcgttgctacaattttggtagcatggcaatgccatgcgtacgatatgttccctctccgaatgaacactggctatggtgcccgtactccggaggtgaaatgcgcaagttggaggcttgctgtggaagcacacancatctttggctttgagaccattcctgangagtgcgttgaagcaacaaaggaatacatccatggcgaacaatatagatcagactccaaaacagttaa

SEQ ID NO: 33983 - DNA, 287 bp, Glycine max
  unsure (1)..(287): unsure at all n locations; Clone ID: 701107332H1
aacaanagaaccaaactcagaaccaaaactcggccaaaactagggttttgcattgatggcactgtgcaaccgcgtcagatcgggaatctctctcttcaccaaatccacgttcctcacttcccagcgatccagtctccaacgatccctcgttgcccctttcatttccctcgcctccagaaattacgccaacgtgccggggcaaaaggaaaccaaagttaaggtccctctggctttgtttggaggttcaggaaactatgcctctgctttgtatattgcatctgtgaaag

SEQ ID NO: 33984 - DNA, 281 bp, Glycine max
  unsure (1)..(281): unsure at all n locations; Clone ID: 701107333H1
attctcgcttggttgcagcttcagcagcagcggcaagcaactccatccgcaatggnaatngatttgaaggcaggaggnangtccaagaagaccaaaggtanagcccccaaatccaatgatatttacctcaagttcttcgtcaagctgtacggttttcctggttcgnaggactggtagtaacttcaatgcggtcatcttcaaacgcttttcatgagcaaggtcnacaagncccggctatccctctctagattgntcgttacaccaagggaaaggaggatagt

SEQ ID NO: 33985 - DNA, 283 bp, Glycine max
  unsure (1)..(283): unsure at all n locations; Clone ID: 701107334H1
ccgaatgagagcatcaaactcttcttcttcgatttccattgcgaangttaannnnnnnnnnnnnnnnnnnnnnnnnnncttcgctcttcgatcttcgtccggggactgctccgaataccaccaccaccantcgccgatggcnacgatcggaggcttacacgactcccaaggctctcaaaacagcgtcgaaaccgaagcccttgctcgattcgccgtagacgaacacaacaagaagcagaattcgcttctggagtttgctagggtggttagggcacaggaacag

SEQ ID NO: 33986 - DNA, 79 bp, Glycine max
  unsure (1)..(79): unsure at all n locations; Clone ID: 701107336H1
gtcagtctnancgttcnctcttatcnntcaantgaaaccctaaatccngatccggttcgcntctcgtatattgtcatga

SEQ ID NO: 33987 - DNA, 282 bp, Glycine max
  unsure (1)..(282): unsure at all n locations; Clone ID: 701107337H1
cgcaaacgacaacaaccgcgcgcgtttcacacctccataactcggagtagcatacgcagcgtcgttgactncgcaactccgtaacttgggcctcgcgcgccgatgggtcggtccccagcaccgtcgctccccgcaccttcctgccgtcgattcccaagccgagagctcctcttcacgccgcgaaatccgtcgccagcgccgcgcgcaacttcccgagactttcgcacaacctcattctctccggaaacaaacgcgcggtggcggtgaactcggcgtcggagg

SEQ ID NO: 33988 - DNA, 274 bp, Glycine max
  Clone ID: 701107338H1
gaattgttgtaactttttgattcctaaattctctaaaattcgaaattctaatttcgttaggggaaagagattgtttgtgtgtgagtgagtatggctggaaaaggcgagggtcctgctatcggaatcgatttgggaacgacgtactcttgcgtcggcgtgtggcaacacgatcgtgttgaaatcatagccaacgatcagggtaacagaactaccccatcctacgtggctttcaccgacacagaacggttgatcggcgatgcggcgaagaaccagt

SEQ ID NO: 33989 - DNA, 279 bp, Glycine max
  unsure (1)..(279): unsure at all n locations; Clone ID: 701107340H1
tgcaaactcttttaggttaatcatttagnccactgcattgtgaggnagctngtttgtcattgtntctaatttgaagtactgggtttgctacattaagtggggttttgagtggtgaatttgnccattgaatgtctggtgaaacaggatccttttagcccgtaacancaacagtgaangtngcagtttggatttgtactttcaactaataaatgtcgaggggatctgatggatcacaaaaaaagcgtttagttgctgcgatctgtgttgtggcaattttct

SEQ ID NO: 33990 - DNA, 280 bp, Glycine max
  unsure (1)..(280): unsure at all n locations; Clone ID: 701107341H1
actagttctagatcgcgatctagaacctcgagccgattcggctcgaggagaaagaaagataaaattctcaaaatggcagccagttcnctacccatccgagtcgccgaatccaaccgtgcgccacctccggaccaccgcaggncccgatcccgatcgccggagagcctcctccaccagctggtggaccccgctgttcggctggtcctccgaaccggactacattgactcaaacaacagagcatcgagtcttcaacggaccaagccggaaccggttaggcgg

SEQ ID NO: 33991 - DNA, 278 bp, Glycine max
  unsure (1)..(278): unsure at all n locations; Clone ID: 701107342H1
caaagatattgaagatgggaattttgagcactatagcaagcttttttggatttggaatgggaacttcaattgggctagtcattggatactatttgttcatatacttccagtcaacagatgttanggatccagtaattcaacctttgattgagcaagatgctaaaacattacaactgttgcttccagagatacccacttggattaaaaacccagactatgaccgtcttgactggcttaataaatttatcgagtatatgtggccttatctggacaaggca

SEQ ID NO: 33992 - DNA, 280 bp, Glycine max
  Clone ID: 701107343H1
ttttctcacaccaggcgcacgttagcacaaactatcatgggccacggcaacagcagctgccacctcgtcctttatggggacgcgtctcctggaggctcactccggagcggggcgagtgcacgcccgattcggcttcggcaagaaaaaggctcccgccccaaagaaagcctccaggggatcgggccgagacaccgacagacccctttggtatccgggcgccaaagcgccgaatacctcgatgggagtcttgtcggagactacgggttcgatccgtttgggc

SEQ ID NO: 33993 - DNA, 280 bp, Glycine max
  Clone ID: 701107346H1
gcaaaggcagaaagagctgaagcttcttcgtgtgtgacaaagtaacaaatttcagcattagcttagaaaatggagttcgttcctgaagaaggcaagcaccttcacgaggattgctccactttgattttgcctgctctgtcgattggcaatgtggggcagctagttgcagatcttttgatttcatcaatgggttctgagagagttgggtatttggatgatcctaacgttttgccctgtgttggcaatgatgcttatggaccctttcctcaaggagacctgg

SEQ ID NO: 33994 - DNA, 279 bp, Glycine max
  Clone ID: 701107347H1
cgatgtggttgtcagaaagttggaaatgaccaaagatgtttccgattatatgccctatttggaggaaaaaaggacaatagtgggaaaagtgatgatgctccttctaaggcaggaattctaggaaacatgcaaaatctttatgagactgtgaagaaggcacaaatggttgtccaagttgaagcagtgcgggtgcagaaagaactcgcagcagcagagtttgatggttattgtgagggtgagttagtaaaggtaacgctgtcggggaaccagcaacctgta

SEQ ID NO: 33995 - DNA, 278 bp, Glycine max
  unsure (1)..(278): unsure at all n locations; Clone ID: 701107349H1
ttaagttttgcataatcttgctccttgttattgcttcgtaagccatggcaaccgattgcaattgcaacaagggcttcgctgatagttacatgttgttgaagcccgaagatgcgagttntctttgatctctttcgtgtcttatttaagggaaacttatcacagaggaactttgtggaaagccatgcagatgatgatgcttggacgaaagtttgggccatcgatggcttatagttatttctattttggcccagaagcttttgcagcttgttgccaagccc

SEQ ID NO: 33996 - DNA, 161 bp, Glycine max
  unsure (1)..(161): unsure at all n locations; Clone ID: 701107351H1
tttgactctcanaaaccttgcatccatccacacatggctggcatgaactctagcgtattggcctgtagcnatgccatatctggtgcagcatgctccgagactnaatgnganngtnacgtncgtggnctncngtggnatcntctggnnanangttnccattg

SEQ ID NO: 33997 - DNA, 268 bp, Glycine max
  Clone ID: 701107354H1
caaaaaccacttaattagtccttctcacatccaaaatcttgtggccagcaaatccaaacatgggcatccatgactatgcttcagaccatgattcctaagaatgcaccgaacctccctcctcgtgttggtgcttcttccaacaacactactaagatctcatttggtggctcaggtagggtactgtggaccgggattcagaggaacaggaataataggtcttcttcgattgtagttgctgcagttggagatgtttcatccgatggcatgc

SEQ ID NO: 33998 - DNA, 69 bp, Glycine max
  unsure (1)..(69): unsure at all n locations; Clone ID: 701107355H1
aattaatntctctcntcaatcttcatcgtntcnatcagtcttctaattttccacacaacatacnagnac

SEQ ID NO: 33999 - DNA, 255 bp, Glycine max
  unsure (1)..(255): unsure at all n locations; Clone ID: 701107356H1
gtcggaaagtaatgttagtttcganccccgatcttggtttnccatatggcatgagagttgacanattgcagcattattgcggcttgatcgcctgccagccacatatattgagtgcaagagttgaactggccttggagttcgagtggcctaacatggacagaagaggaggctaacgatttagtgttcctttggggatggatggatggctattattttttcctccattctgttatattttacatgatagattttgga

SEQ ID NO: 34000 - DNA, 275 bp, Glycine max
  Clone ID: 701107357H1
gccttgacgagcccaacacttttggaaacaggatccacagaatgttgaagcttggactgagcattgacgaggatgcaggtgaagctgatgctgaaatgcccccactggaggaggccgaggctgatgctgagggcagcaagatggaggaggttgattaaaattaaatatgatgcgtttcttgttagtagcgtctctaatgccttttttggctatgtttttttctcctttttttattttggattgatgacagtgttcaatggatatttagctaatta

SEQ ID NO: 34001 - DNA, 275 bp, Glycine max
  Clone ID: 701107359H1
ttcaaagctgtggatgggagctatgtgtttaataaaggaaaggttcataaggtgcctgcaaacgacatggaggccttgaagtccccacttatggggctatttgaaaaacgccgggcacgcaagtttttcatttatgtgcaaaactacaacgagagcgatcccaagacccacgaggggatggacttgacaagagtgtctactaaagagttgatagcaaaatacggccttgatgataacactatagacttcattggtcatgctttggcgcttcatag

SEQ ID NO: 34002 - DNA, 277 bp, Glycine max
  unsure (1)..(277): unsure at all n locations; Clone ID: 701107360H1
ttcgctctgtgcagtttcctcgctctcttttctgcaattttcttttttgttccttctctgcggttatctttttgagcttcaatggcggacgctgaaaccttcgctttccaggctgagatcaaccagcttctcagcctcatcatcaacaccttctacagcaacaaggagactttcttgcgtgnactcatcagcaacgcttctgatgctttggataagattcgatttgagagtttaaccgacaagagcaagctcgatgctcagccagagctcttcattc

SEQ ID NO: 34003 - DNA, 280 bp, Glycine max
  unsure (1)..(280): unsure at all n locations; Clone ID: 701107361H1
gcttattttaacttgcacataagttccaattcntttntccntcttattttctctctcttgtaagtgcttgtggaaaagtatatctaaaccgggccaaataattggttgttctntntaacatgttttgtnntattgtgtttttatggttcacttttgaaaggggataaagaacatgcttgtgncctaatttgaatcttgcacagatgatttgttggagatattcttgtttggntgggaatntgtgacgttgatgtctcttctcttgctttgttgtntgtcc

SEQ ID NO: 34004 - DNA, 275 bp, Glycine max
  Clone ID: 701107362H1
tataatatcttcatgaatctaatataacgttattcatagtgaaaataaatcgagccaaggaatttattaataattgtcttcatttcatattagctgcctgctgcgacttccttatgcataattttactgtttatagaaattgtgaagctatactgttgtaattgtcatgtaaattgttccctttttcatcttacttgatttggtaaactccggttacttgtatccaaataagatgggccatttgtattgcgggggctttgtataattgtacaatt

SEQ ID NO: 34005 - DNA, 248 bp, Glycine max
  unsure (1)..(248): unsure at all n locations; Clone ID: 701107363H1
ctcattctcccatttcctctcagaaccctcacncactcnanngcgctcctatatcctctncttcaccntcgctctctccaacgatcacaacaacatcgtcatcccatggcaaacgccgcatctggtatggcagtccatgatgactgcaagttaaggtttttggagctgaagacaaagaggacacaccgtttcatagtttttaagattgaggagcagcagaagcaggtcattgtggagaagcttggtga

SEQ ID NO: 34006 - DNA, 280 bp, Glycine max
  unsure (1)..(280): unsure at all n locations; Clone ID: 701107364H1
gatgctcattacaagctgnagctaccttcatgcaanccaccaaggttggcatagcctctcgcaaanctcaaatctacacaatgcatttctaaggcttttggcttggaacctgctgcagctaaactcacttgctcccttcagcctgatctcaaagaatttgctcaaaaatgtgtcgacgctaccaaaattgcaggattcgcccttgccacctctgctctcgttgtttctggagcaagtgcagaaggtgttccaaaaaggctaaccttcgacgaaatccaga

SEQ ID NO: 34007 - DNA, 281 bp, Glycine max
  unsure (1)..(281): unsure at all n locations; Clone ID: 701107365H1
ctccgctatctgcgatcctagtcctacactctccgctcccgctcgaaaccttggncgccgtcatcgacgcgaggacttctagaaggaagaaatttgaagaaagatgggagagaggaangtgttgaacaagtattacccaccggactttgatccctccaagcttcccagagcaagaaggccaaagaaccagcagatcaaggtccgcatgatgcttccgatgagcattcgatgcaacacttgcggcaattacatctacaaaggaaccaagttcaattccagaa

SEQ ID NO: 34008 - DNA, 282 bp, Glycine max
  unsure (1)..(282): unsure at all n locations; Clone ID: 701107366H1
ccgaatgagagcatcaaactcttcttcttcgatttccattgcgaacgttaannnnnnnnnnnnnnnnnnnnnnnnnnncttcgctcttcgatcttcgtccggggactgctccgaataccaccaccaccactcgccgatggccacgatcggaggcttacacgactcccaaggctctcaaaacagcgtcgaaaccgaagcccttgctcgattcgccgtagacgaacacaacaagaagcagaattcgcttctggagtttgctagggtggttagggcacaggaaca

SEQ ID NO: 34009 - DNA, 276 bp, Glycine max
  Clone ID: 701107367H1
ctctcagtctcagtctccactttctgagaagagcgccaaattagggttagattatcagggtttaaccgttcctcctcttcctctaccataatcaacaacctcttcccaatcccaatggatccaaccaagaagcgcaagttcgacgagaacggttcaacaacaacgactcttccgaccccctcaagctctccccctccgaagtccgcaagctcatcgagcgcttcacctccgaccagctcctcgacatcctccaggacgcggtggcgcgccactcga

SEQ ID NO: 34010 - DNA, 272 bp, Glycine max
  Clone ID: 701107370H1
gtatggctcggaagctgtttatgtccctcgtgtccctggtaccgattctgaagaagatgatggatacttgatttgttttgtacacgatgaaaataccggaaaatcatttgtgcatgtcatcaatgcaaaaacaatgtcagcagatcctgttgcagttgtcgaattgccgcatagagttccatatggtttccatgccttctttgtgacagaggaacaactgcaagagcagggtaaactgtgataattttggcagcctcactgtaccgtcctgc

SEQ ID NO: 34011 - DNA, 274 bp, Glycine max
  unsure (1)..(274): unsure at all n locations; Clone ID: 701107372H1
tcaagcctgttggcagcaatgtcatctccgtggatggaaaggaaatcaaagttgtttctgaccgcaaccctgccaaccttccttggaaggacttggggatagacttggtgattganggaaccggggtgtttgtggacagagaaggtgcaggnaaacacnttcaagcaggagctaagaaggtgctcatcactgctcctggtaaaggagatatccccacctacgtggttggtgtcaatgagtatgactanagccctgatgaacccatcatcagcat

SEQ ID NO: 34012 - DNA, 133 bp, Glycine max
  unsure (1)..(133): unsure at all n locations; Clone ID: 701107373H1
gcttaaacccatttccataataacttttttctactttcttctccatccattttgattcgtaattaacttgattcacaaccaccatggctgaagagaaacaccacanacaccacctctnccacacaacntanga

SEQ ID NO: 34013 - DNA, 276 bp, Glycine max
  unsure (1)..(276): unsure at all n locations; Clone ID: 701107374H1
ccaagaacaacatgaattttctnaccttcgttactgttctactcttcatactacttagcaacctcatcttcccagtatttggggaacaaccttctcactcatcgcaagatattcctaaaaaaagacaacattattacctcgtacgctgtcatctttgacggtggtagcacaggaacccgtgtggcatgtcttccattttggaccagaatttggatctccttcccattggtgatagtcttgagntaataaaaagatcacaccggtttaagtgttacg

SEQ ID NO: 34014 - DNA, 271 bp, Glycine max
  unsure (1)..(271): unsure at all n locations; Clone ID: 701107375H1
aagaatatactacagaatgaattctgcaatacccagagctagtgctcctacaaaggttcacatctttgtccacaactaacagataancaaaagctaactcttttctctcccctctcccgctatacaaggcattatgccatatttgctctctcataaaccaattcctctctctaattccaattcggccccttcttatttctccgttatatgttttccaaacccaaggcccatgattgagtggatggacggactgaacaatggggctgatagt

SEQ ID NO: 34015 - DNA, 275 bp, Glycine max
  unsure (1)..(275): unsure at all n locations; Clone ID: 701107376H1
gccttgcacgacgtcgacgtcaccatcatcaccaccgcacataacgccaccgttttccaaaagtccntcgatttagatgcgagtcgcggtcgccccatcagaacgcacgttgtcaacttccccgccgcacaagtgggtctccccgttgggatcgaagccttcaacgtcgatacgcctcgggacatgacccccagaatctacatgggcctatcccttctccaacaagtcttcgaaaaactcttccatgacttgcaaccggatttcatcgtcaccga

SEQ ID NO: 34016 - DNA, 277 bp, Glycine max
  unsure (1)..(277): unsure at all n locations; Clone ID: 701107377H1
gcaagatcataggaggaaaatggagcagaagcagcagagcatagaccccttcaaaggcaaaacaaggttacccagttttgctattccagaaagatatgaactcnatttaatacccgatctctctgcatgtactttttctgtcaccgtgcaaattagccttaccatcaatgcaagcaccgagtttcttgtcttaaacgccctggaacttgtcatacaaaacactcactttaccaactctcaagggcaggtgagtagtttttagtaatcaaaacctttt

SEQ ID NO: 34017 - DNA, 275 bp, Glycine max
  Clone ID: 701107378H1
ctcatgaccaagattgacaggcgatctggcaaagagcttgagaaggaacccaagtttttgaagaatggtgatgctggttttgttaagatgattccgaccaaacccatggtggttgaaactttctctgagtaccccccacttggtcgctttgctgtcagggatatgcgtcaaactgttgctgtgggagtcatcaagaacgtggagaagaaggatcctactggagccaaggtcaccaaggctgcccagaagaagaagtgaatcgtgcggtttggttc

SEQ ID NO: 34018 - DNA, 278 bp, Glycine max
  unsure (1)..(278): unsure at all n locations; Clone ID: 701107380H1
cntngatgtcgatgtttatgtttcttattaataatcacgttgagacaccagataattaataagaaacataaacatcgacatcaacgtttttatagtaacggttccaacgcaataccttctacaactgtttttcgtcttcaaatgaaagataacnttagatgaagaactatcaaagagtgaatggaaccttgcagagattgtatgcgaagattcgtgggccgcatacggaatccatgtactgaaagagaaaagtagcatggaggatattcgattcagtg

SEQ ID NO: 34019 - DNA, 276 bp, Glycine max
  Clone ID: 701107381H1
gataaatctttcaaagaaaaaaggagagtgcttagagagagagcaaaacatattattttcattttcatctttttttgagtatcaacaaatggcaaccactgtgatgaccactctcccccaattcagtggtcttagaccccaattctcagctgcccctgtgaagaacttggttgctgtgcaacccatgagtcgcaaggggaagggtgcattgggagctcgatgtgactacattggttcatccactaatctgattatggtggcttctacaaccctgat

SEQ ID NO: 34020 - DNA, 271 bp, Glycine max
  unsure (1)..(271): unsure at all n locations; Clone ID: 701107382H1
tcatatcatgtttgcaagtnacagttgtcacatgaagtggaagagtgcattctgtccatttagttgaagaaaatgacagtaattttttaattccaaggtagtgcatttctttgacagtaactttttaattccaaggtaatgcatttcttggatttggtaccataatctttgaggcttattcaatgacaaacttgtcgtaattttcaccccagcctatctgaattggctatcaaggttaatgtctgataagactatgcaggatatgtcacaa

SEQ ID NO: 34021 - DNA, 275 bp, Glycine max; identical to SEQ ID NO: 33960
  Clone ID: 701107383H1

SEQ ID NO: 34022 - DNA, 294 bp, Glycine max
  unsure (1)..(294): unsure at all n locations; Clone ID: 701107384H1
cngcgntctggtatacatggataacaagtctaccanaatcnattggcaagctccagaatttgngagaccttggatatanganacacaagtgntgtctganatgcnagaggagatnagtaagcttaaaaagctacgtcatcntnccgggctgattatnggtngtgcaattcnaatcgaagtgatattgggagggcatgacatcccctagaagagataccctcccagtggtntatagatgatgatggagtggtcattagannaggtaggaaagctaaagcagtttaagggaactgt

SEQ ID NO: 34023 - DNA, 271 bp, Glycine max
  unsure (1)..(271): unsure at all n locations; Clone ID: 701107385H1
tgcaaactagttttgtnttgggaacatcatcacattacattagattggtggtaatggcagcgtcactacaagcagcagctactttcatgcaacccaccaagttgagcaggagcaacactttgcagcaaaagtctactcagtccatttccaaggcttttggtttggaacctgttggagctaaaaaggtcacatgctcccttcaggctgatcttaaggacttggctcacaagtgtgttgatgctaccaaaattgcaggattcgcccttgccac

SEQ ID NO: 34024 - DNA, 271 bp, Glycine max
  unsure (1)..(271): unsure at all n locations; Clone ID: 701107386H1
cgcttgtgctgccttcgtttgcgtttttatcacagaggaattaacatatatatagcaagcatggcagtcacactctacgaccttagctcttcctctgggttgaanaaacttgatgagtaccttctcccacgcagttacatcaccgggtaccaagctacaaaggatgatcttactgtttatgcagctttgccaactgctccatcagatgaatatggaaatgtttccaggtggtacaagcacattgatgctttgttgataatctctggtgtta

SEQ ID NO: 34025 - DNA, 271 bp, Glycine max
  unsure (1)..(271): unsure at all n locations; Clone ID: 701107388H1
ggaggagctgaagaagaattaccggattgtggacaatggttacaattccttccaacgtgcatcccgggaacacaataccaaaaggcactattgaaggagacttggcaagattataggtgacataatttgtgagaggaaggagaagaagttgcttgaaagggatctattgagctgcttattgaattggaaaggtgaagggggagaagtgttatctgattaccaaattgcagataacattattggggtgcttntgctgctcaggacaccacag

SEQ ID NO: 34026 - DNA, 94 bp, Glycine max
  unsure (1)..(94): unsure at all n locations; Clone ID: 701107389H1
ttttaaagtgaatttncntcttgctttcatgtatcaagagagctttgaaggatgtttctaaccttagtataaaanaaaaaancanaaaaaaaac

SEQ ID NO: 34027 - DNA, 273 bp, Glycine max
  Clone ID: 701107390H1
ctcaggagaactcggacgtgaagacgctggtgaagcacatgcacggggaagaagtactgcgacaaaggatgggaatgtaagggctggtcaatttactgttgtaacctcactattactgattatttccagacctaccagttcgagaatctcttctccaagcggaactcgccggtggcgcacgccgtcggattttgggactaccactcgttcatcgccgctgccgcgcttttcgagccgcaagggttcggcaccaccgggaacaagacgatgcag

SEQ ID NO: 34028 - DNA, 272 bp, Glycine max
  unsure (1)..(272): unsure at all n locations; Clone ID: 701107391H1
ttcgataagaaaagttcccaacttcagctaagagaaaatgtctctgattccaaactttttcggtggccgtangagcaatgtgtttgatcctttctcccttgaagtgtgggatcccttcaaggattttcattttccctcttctgtttctgctgaaaatttagcatttgtaagcactcgtgtggattggaaggagactccagaagcgcacgtgttgaaggcagatattccagggctgaagaaggaggaagtgaaggtgcagattgaagatgata

SEQ ID NO: 34029 - DNA, 272 bp, Glycine max
  Clone ID: 701107392H1
gatcatcatctctttgagttgccattgaagaagaagctcagatcggaaaaattcacctctccaatcccaatcccatcgttgcaaatgatccgattcattctgttgcagaacaggcagggcaagacccgtcttgccaaatactacgttcctctcgaggactccgagaagcacaaggtcgaatacgaggttcatcggctcgtcgtaaacagagaccctaaatacacaaatttcgtcgagtttcgtacgcacaagataatatacaggcgatatgc

SEQ ID NO: 34030 - DNA, 270 bp, Glycine max
  Clone ID: 701107394H1
tgctttctaatcttgtaattttctgcgttgcttcgtggttaattcttcgtgttcttgtgatctttctgttggagtatttacaacactcctttgtaagtttaactaaagaggctaattaattttcaattggaccgcagcagatggctgaggagggtcacagggttactctaaatgtttatgacttgagccaaggtctgcacggcagctttcaatgtcctttttggggaaagctattgaaggcatatggcacacaggagttgttgtttatgg

SEQ ID NO: 34031 - DNA, 274 bp, Glycine max
  unsure (1)..(274): unsure at all n locations; Clone ID: 701107395H1
cacagaatcaaattggagaaatataacaaggccatgcattccccctcacagttcacttcttctacgttcangcaacaagattcaaatttctctgatttcatgctcttcatcacagaccccagaagctgatacacaaactgctgaatcttgcgtcaatttgggtcttgagctcttctccaaaggacgggntaaagatgctttaaccctgtttgaaacagcactttccttgaaccctaatccagtggaggcccaagctgcgtactacaacaaagct

SEQ ID NO: 34032 - DNA, 245 bp, Glycine max
  unsure (1)..(245): unsure at all n locations; Clone ID: 701107401H1
caattaatagaactccaaaagtaaaatncattactattatttatcgtaatgtaatgtactactattaaattanaaatgtatttttatatgcatatacacatactgagggagacactgtgactgtgataaagtaaataaaatttctgtggctttggattcttctggcaattcgtgctggccagctttacttggctatgggggcagcaatagcatagacccataaaataanaattgaaacttggcat

SEQ ID NO: 34033 - DNA, 244 bp, Glycine max
  unsure (1)..(244): unsure at all n locations; Clone ID: 701107402H1
gtttattcagcatatgtctcaaaggcccacgattcctcactcttcttccatngcctgcggccttnactctcatctcctggtctccagtgagatgaaccctagctccaattggtcccattagttacctctttcctgcatctcatatatcccattctttctcattcacacagcatcatggggggtcaaaggttttgttgaaggaggcatcgcttccatcatcgcaggatgttccacacaacatacg

SEQ ID NO: 34034 - DNA, 240 bp, Glycine max
  Clone ID: 701107403H1
agtgaaggcatcgttagcagacctgtagattcaaccccaatttgcagagttacgttactaatatatttacacaagactgataagagaaaatgtctctgattccaagtttcttcggtggccgaaggagcagtgttttcgaccctttctccctcgatgtgtgggaccccttcaaggattttccatttcccagttctctttctgctgaaaattcagcgtttgtgagcacacgagtggattgga

SEQ ID NO: 34035 - DNA, 103 bp, Glycine max
  unsure (1)..(103): unsure at all n locations; Clone ID: 701107405H1
ttctgaccgtccatagatcgaattccggatatggcgaggaacacagctgacctcgtaaacgncagctcaacgttgctcatcacttttccacacgacntcncng

SEQ ID NO: 34036 - DNA, 195 bp, Glycine max
  Clone ID: 701107406H1
gaagcgaagatgaagaggcgacgaagcagttgcgtttctttgagtcggcgatgggtattgagctttcttcgctggagttggaatccctcaaagataataagtgcattttggaggtatcagaagccgctgattcagacgtgacagtattgggcaaaactattagggcagcgtttggcgcgtcttggaaagaggctc

SEQ ID NO: 34037 - DNA, 260 bp, Glycine max
  unsure (1)..(260): unsure at all n locations; Clone ID: 701107407H1
gtgaaggcatcgttagcagttttgtagattcaacctcaatttgcagagttacgttctaatatatttacacaagactgataagagaaaatgtctctgattccaagtttcttcggtggccgaaggagcagtgttttcgaccctttctccctcgatgtgtgggaccccttcaaggattttccatttcccagtnctctttctgcngaaaattcagcgtttgtnagcacacgagtggattggaaggagacaccagaagcacacgt

SEQ ID NO: 34038 - DNA, 261 bp, Glycine max
  Clone ID: 701107408H1
gcagcaaacaaacaaaccccccacccaacgcattcttcaatcttccccttcgcgtcttttgggtggtttggtttaggacatttcacaaacacctcctctcccctccattttccatttccattcttctctccactataaattctccttcactttctttctcgtaatcttcgcctcccttcaactccaccctctctccttcttacctccttgaccatgatgagtttcgccatggattcagtttcggtgttaaaccctaaactt

SEQ ID NO: 34039 - DNA, 260 bp, Glycine max
  unsure (1)..(260): unsure at all n locations; Clone ID: 701107409H1
ccaagcctcactccctcgtttcttccgcccccttcactcaccttctatctgccaattctcttctattaataacacccacctctttggttcctcttcccttcaattcatcacataataacgacnctacaaaacattgtttttngctcttttttgttgcagcgaaaccaaaatgtctttcactgcaactaagtttgcaccttctcctctccctctcaattccaccacccccagatccnatgacaagcctctctctttctcct

SEQ ID NO: 34040 - DNA, 247 bp, Glycine max
  unsure (1)..(247): unsure at all n locations; Clone ID: 701107410H1
ttcangtcttagggtcatcagtgcccgtctcgtgcagcagcagcangatacctgccagtgccagantttgcaagtnccgttgccacacaacaatcctcttctggttatgggtggtttatttggatggctcactggagaccgatccagttctttaccatctctggatttcccgcttccgggcgttacacttcccccttcattgcctgattttgttgcgcccggaaaaactattattactacactccca

SEQ ID NO: 34041 - DNA, 59 bp, Glycine max
  Clone ID: 701107412H1
aatggaataatatttacttggtgatatcgtaatataatttttcaattttctttgggttc

SEQ ID NO: 34042 - DNA, 251 bp, Glycine max
  unsure (1)..(251): unsure at all n locations; Clone ID: 701107415H1
taattatatatttttaacttttgtngttgttgaatttagtttttgttttgctttggtgtgtaggcggagaaactaattgagcttctgcggcaaccaagatccggctacggcgctgttcgtacatcagaagtggtggcgtaaacgccagcaataataaaataaatttattcagcttggtggtgccccacctcaccgtgcgtgagtgtgtacaaacaccacgtttaaaaattgtgaatttggttaaaacacaa

SEQ ID NO: 34043 - DNA, 92 bp, Glycine max
  unsure (1)..(92): unsure at all n locations; Clone ID: 701107416H1
gatattcatattaatcgtacgatagagataaaaacaagaaaaaaaaannggngaangaaaaanggnggtgaggcnggaagncaagngggtnt

SEQ ID NO: 34044 - DNA, 262 bp, Glycine max
  Clone ID: 701107417H1
gtctcacaggaagttcgagcacccaaggcacgggtcactgggatttctccccaggaagcgtgctgctcgtcacaggggaaaagtgaaggcattccccaaggatgacccatccaaggcacccaagctcactgcattcttgggttacaaggctggtatgactcacattgttagagaggtcgagaagccaggatcaaagcttcacaagaaggaaacatgtgagcctgttacaattattgagacccctccaatggttattgttggt

SEQ ID NO: 34045 - DNA, 260 bp, Glycine max
  unsure (1)..(260): unsure at all n locations; Clone ID: 701107418H1
ccgcattgctctcagcttcacaacaccatggaccacgttagggaaacctctgcttggntcgctagccgctcctcccacgtcctcgttgactctgcaggaattgagaaagtggtgagcaccattgattccattcccaaggttgagtgggatttcgaagggattcactactttgataatggaccactcaccgttcagtacctgttttgtgttggacgctttaaatttttgcttctggcctgataaggatttgaattatgatg

SEQ ID NO: 34046 - DNA, 257 bp, Glycine max
  Clone ID: 701107420H1
gggagaaccaccaccccatcttgcctcaacaaccttatgatagagccttggctcgattctggtcaaggtacattgatgacaaatgcctgcctgcaatatcaaaggcagcatttactgtagacaaggaggaacgtgacaagggcactgaggaatcactcgagtctcttcaaattcttgagaatgagctcaaacacaagttctttggaggagagactatagacatagtggacatagccgctggtttcatagctttctgg

SEQ ID NO: 34047 - DNA, 259 bp, Glycine max
  unsure (1)..(259): unsure at all n locations; Clone ID: 701107423H1
ctttcttcttctcgtttttactttgacggtttctagagagaganagtttgttatagagagagaaagcgcnnnnnnnnnnnnnnnnnnnnnnnnnngacagtgagaagagagagagaagcgctcttctccgtaccgtttctagagagagaaactgatggccggagttaatccgaacggcgtcgccgattttccggcgactccaacgcacggcggacagttcattcagtacaacatattcggaaacctcttcgaggttacg

SEQ ID NO: 34048 - DNA, 248 bp, Glycine max
  unsure (1)..(248): unsure at all n locations; Clone ID: 701107424H1
attcaatgcttgagcatgtgaataagttgcttgagataccaggatcaaagttnctattcgggggtagtcctctagagaaccattcaattccacctatttatggtgctattaaaccaacagctgtctatgttcctctcgaagaaattatgaaggataagaattttgagcttgtaacaaaagaaatatttggaccatttcaggttatcacggactatcaaaacagtcagctagcagttgtattggatgct

SEQ ID NO: 34049 - DNA, 255 bp, Glycine max
  Clone ID: 701107426H1
atttcagtgagtgatcggtgttcacttgatctcatcataatcgtcagcgtcaattgaagaagatgccgatcagaaacatcgccgtcggaaggcctgaagaggcgactcaccccgacacgttgaaggcggctttggctgagttcatctcaaccttcatcttcgtgttcgccggctcaggctccggcatcgcctacaacaagctcaccgacaacggcgctgccacccctgccggcctcatctccgcctccatcgccc

SEQ ID NO: 34050 - DNA, 255 bp, Glycine max
  unsure (1)..(255): unsure at all n locations; Clone ID: 701107427H1
ggaagataataacttgtctctcattgagtatgaactggtgaatgttgttgcggaatgacttattgggaatcctggaatttcttttgagaataaaacaaatccagcgaagaaatcttttgttttttcgnctgagacatctcatcangcccatcacattcaccttagtttaggaatagagatttgagcagctagtagtgccaacagttgcttcttacttttgcaacagactctggatcttgtagcttaaccactgag

SEQ ID NO: 34051 - DNA, 226 bp, Glycine max
  unsure (1)..(226): unsure at all n locations; Clone ID: 701107428H1
accctccaaattttctcactctctctttatcttcaccttttcagtttaaagcttcagatcacaaccgatccaccattcaccactttctcttcacaagctcaagttactgacaggcaaatctaacaagaaaagtagtctctgaagccgatccagtgccttntgaatttggaattggtggtgaatttagatctaaaagccatagcaatgtcttttatcggtacccagc

SEQ ID NO: 34052 - DNA, 255 bp, Glycine max
  Clone ID: 701107429H1
gtccgacctaccttcccatcaaaagtaactgccgagaataaacaaagttccaaatcaagggttcctggccatggtcaagctgaaaagcctcaaggaggtaaaacagttgtagttggagcagatgatgtaaggaagagaaagagatcagaggacataatggataataacccaaggaattccaagtcccctgtatctttagctccccccagcagggaagttaatgaggatatatctcctattagtgcttcaagttct

SEQ ID NO: 34053 - DNA, 259 bp, Glycine max
  Clone ID: 701107430H1
ggcaacctcaacatcactgggcttctcaactctacattgggcctgcgccgcccctgcctcaagctcgattctttcaattctcaatctttctctctcttcgaccctaatcttcgcctatccctctctccacccaaaccctcacgcgccgtcatcgccatggccggcaccgggaagttctttgttggtggcaactggaagtgtaacggaacaaaagactcaatcagcaagcttgttgctgacttgaacaatgcaaaattgg

SEQ ID NO: 34054 - DNA, 260 bp, Glycine max
  unsure (1)..(260): unsure at all n locations; Clone ID: 701107431H1
cttgccatggcagcagcagcgtcaatgtgtatgagcttcaacctggcaacagcattcaagggtctcnnnnnnnnnnnnnnnnnnnnnnnnntcttcgctggaagtggtagttattctctccgcgcgggtcccacctcggtggtgtcgctgccccggcgctgcccgctgaccatagagaacgcccacaagaagggggcgggcagcaccaagaacggccgcgactcgcagggcaagcgtctcggagtcaagatatacggcga

SEQ ID NO: 34055 - DNA, 262 bp, Glycine max
  Clone ID: 701107432H1
tgggcttctcttgccccataccaccacagaccaagagcttcaacaattgagaaacagtctacctgatcaagttgttgttcagcgaatagatgaaagattatctgctctgggaaattgtatcgcatgtaatgaccatgtggccctcacacacactgatcttgacagggagactgaagagatgattgcagatgttcttggagtagaagttttcaggcagaccattgctggtaatattcttgttggtagttactgtgccttctcc

SEQ ID NO: 34056 - DNA, 260 bp, Glycine max
  unsure (1)..(260): unsure at all n locations; Clone ID: 701107433H1
gaagatccaaaaacaataggaaaaaaaaaatgatggctcactgtgttttccctgttaatgcacttcctactccttcaccatgtttccactccaaagttgganggcaatggcctcagggatttgccttgagtgtgaggccaacgaatccgaagaggctttcaagtgcctgcaaagtgagagcaactttgggtgcttctgataaatcaattggaattcccaaccaatggtacaatgtaattgcagatcttccagtgaaacca

SEQ ID NO: 34057 - DNA, 260 bp, Glycine max
  unsure (1)..(260): unsure at all n locations; Clone ID: 701107434H1
gnttcttccatgcaccaggacaccatgggtttactaatggagcgttgagagcatgctgtggtggaggtggacccttcaatttcaacatttccgcaaggtgtggtcacacaggttcaaaagcatgtgcagatccgtccacatatgcaaattgggatggaattcatttgacagaagcagcttataggtacatcgccaaaggtctaatttacggtccattctcatatcctcccctcaagacctctcccaacaagatagcctag

SEQ ID NO: 34058 - DNA, 246 bp, Glycine max
  Clone ID: 701107436H1
ttctgattcagaaactcttaggcattccacattctcaaccccgaaccctaagagcagagcgaaaatgacaaccaccttcgcgaccgtcgcaggactcggtggcgcattactgtcatccacctcatctcgtctcacctcagggtttgtgaaatccccagtgattgctaggaatcccttgaggcaagctgtggcaatgggaaatgggaggattacatgctttgagaggaattggctgcgggcagatta

SEQ ID NO: 34059 - DNA, 255 bp, Glycine max
  Clone ID: 701107437H1
ccaacacattctggtcaccggtggtgccggtttcattggcacccacaccgtcgttccagcttctcaaagctggcttcagcgtttcaataatcgacaatttcgataactccgtcatggaagcagtggaccgcgtccgccaagtggttggccctctgctttctcagaacctccaattcacccagggcgatctccggaatagggatgacttggagaaactcttctccaaaacaacatttgatgccgtgatccactttg

SEQ ID NO: 34060 - DNA, 255 bp, Glycine max
  unsure (1)..(255): unsure at all n locations; Clone ID: 701107438H1
gtttaagtntgcaggattggatattgacaaccttcagaacttggagagttgtctttttgtccttttcccatatttctcgtacatgcttgctgaaggccttggtctgtctggtattgtatcantcctgttcacaggnntagtcatgaaacattatacatattccaatttatcacaaagttctcaacgatttgcctctgcttttttcgagttaatatcatctttagctganacatttgtatttatatacatgggctt

SEQ ID NO: 34061 - DNA, 247 bp, Glycine max
  Clone ID: 701107439H1
ctctaataatgctgtcagcacttctttcctattagatgatgactcgagcattcctttttcggtggatgacatttccaaatcaatgcacccagtagaagtagcagacgtggatcctcctccgttgatacgtgagaactcagggtttgggttcttactagcacggtcagagtgatacaaatacccaatgaatattgtctctgatgctccatcttgtggctatccccggggtattgcaccaaggtgcagg

SEQ ID NO: 34062 - DNA, 166 bp, Glycine max
  Clone ID: 701107440H1
ggtaatatatattttacactcctttgaagatgaacgtactttctactttcagctttaatgcattgcttcttttattgtcctgtatatcaaaaatcattgcatcttatgaccttatttgtcactgtgttatggtaatcaaattcatcagcaggggttattggattgc

SEQ ID NO: 34063 - DNA, 255 bp, Glycine max
  Clone ID: 701107441H1
gtttcatttgtgaaactaacaacaacacaaggccatcatcatggcagctgcttccccaatggcaagccaactcaagtccaccttcactaggactcttgtagctccaaagggcctctctgcctcttcaccacttcacctcgtgccttctagaaggcaatttagcttcactgttaaggccatccaatcagagaagccaacctatcaagtgattcagccaatcaacggtgacccattcattggaagcctggaaacccc

SEQ ID NO: 34064 - DNA, 251 bp, Glycine max
  unsure (1)..(251): unsure at all n locations; Clone ID: 701107442H1
tcgtttccttcccttccctaacgatctgaggaagacaccaagcttctctccacgcccttcttgggtaatctgaagtgcagcgatggcggatggattgcactcgcggcatccatcagtagttcagaagttatctggacagtcttatttgttgtctaggcttgcccctactcactcaaganactattccacaactggtagttacttcaatggaggcttgcagtcttcgggtttggttccagtcatggcacatg

SEQ ID NO: 34065 - DNA, 252 bp, Glycine max
  Clone ID: 701107443H1
ctacactaggctcacgattcatccaaactgaaatggcggcagtagtatcagcatcttctcatctattgtttgttcttcgttcacaaccattatcatcatcaccctctttcatttctcttctcaaacctcttcttgtttcttccccctatgctgtatctacaccccttcggcatatccaagttccaccgcttcgaaaacctctcttctctacttcctcttccccctcccttaccgtttctcaagatagtgaag

SEQ ID NO: 34066 - DNA, 252 bp, Glycine max
  Clone ID: 701107444H1
caaaaaggtaaactttttgcaacaaccatggttgcaatggcagcagcaacagcatccacccagttgattttctcaaaaccttgttccccttcacgtctatgccccttccaactatgtgtctttgacactaaacaagtgctatcaagtggcaggagaaggcatgtggggggttctggagttaggtgcatggctgtgggggaagcagcaaccactgggacaaagaagagaagtggatatgagcttcaaacactc

SEQ ID NO: 34067 - DNA, 252 bp, Glycine max
  unsure (1)..(252): unsure at all n locations; Clone ID: 701107445H1
ggaaaataaagaaattagcgtgaaaaatgttgggtgtgttcagcagctccatagtgtcgccnccggaggagctcgttgccgccggcagccgtacaccgtcgccgaagatgacggcggcggcgctgcggaagtggttcgaggagaagaacccctccgcagtgtcggtggaggtcggagagcatgtccagctcgcttatacccaccagaacgagtcgccgtttcagcccagatccnttgctgtgaangatgagg

SEQ ID NO: 34068 - DNA, 254 bp, Glycine max
  Clone ID: 701107446H1
aaaaaatctaaaactttcgttctagaaaaccagaccaaacttttctttctacggtggctccaatttggccttaacgaaacgaagaatctcgcatcgatcgcgattcgaacatcggaatctggaagcaagcgatgtcaacctcgagccagcaccagttccgatatacacaaaccccttccaaggtcctgcaccttcgcaacctcccctgggaatgctccgaggaggagctcagagagctctgcagacccttcggt

SEQ ID NO: 34069 - DNA, 257 bp, Glycine max
  Clone ID: 701107447H1
ctgtcttccgaagcaggaactaaatatggctgacttgttggaatggtcaaagcaagataagaaacgaatgcttcatgtcgtctaccgtgttggtgaccttgatcgcaccatcaaattttacacagaatgtttaggaatgaagcttttgaggcaaagagatatcccagaggagaaatatgctaatgcttttcttggatttggccctgaagaatcccattttgttgttgaattaacatataattatggggttacctcgt

SEQ ID NO: 34070 - DNA, 260 bp, Glycine max
  unsure (1)..(260): unsure at all n locations; Clone ID: 701107448H1
gnaactggcaaagacaccaacaccccttatctctctctgtccaattctgacctcaagttctgttggatcttgcatatagttaccgtttattgattcgcaaagatgaaggtcacagtggtttctcgaagtggaagagaagtggttaaaggtggcattgagctcagcgattctgctactgtagcagatttgcaggaggcaattcataagcgaaaattacagatagagataccgacattttaaaaaattcaagttaggacaaa

SEQ ID NO: 34071 - DNA, 259 bp, Glycine max
  unsure (1)..(259): unsure at all n locations; Clone ID: 701107449H1
ggaaactatgcncacaacaagtgacagagacagagtagaaccaaaagattcataataactaagcattagaaactaggtgaaagtaactgcacagacacacaacacatcttccttaatttctccgtccatttccctcccataaataaatctttcatttccatctttcttgggtgatccaatggcgacccttttccagggattgggagttgtgaacccatcattggcttcttcaaactccaacaagttccatcttccttct

SEQ ID NO: 34072 - DNA, 252 bp, Glycine max
  Clone ID: 701107451H1
cttagctactaaggaaggatcaaagagaatggctcaagcaatggcatcaatggctggcttgcgtggttcctctcaggctgtgttggaaggtagccttcaggtgagtggctccacacgcttgaatgtggggagtggaagcagggtggcctcagtcacacgtgcagggttcacagttagagcacaacaacaacaagtgagtggtgaggtacaaagcagccgtaggcagtgctttcacttgttgctgctggtttg

SEQ ID NO: 34073 - DNA, 252 bp, Glycine max
  unsure (1)..(252): unsure at all n locations; Clone ID: 701107452H1
ctctgctgcagtgctgcttcatactttttctcgcctataaaatntccgccactgcttcactctgcgccacttccagaacaactttctcatcatcgaagcccgtcgcgagaagaagctgcttcgtcgcggttcccaaaatcgcgtttcccaagctccgtttcaaacccgtcgctatggctacgctcggcgctcgcatggtggccgccgcacccaccgtcactccgccggcctcgctcgacttcgaaacctccg

SEQ ID NO: 34074 - DNA, 211 bp, Glycine max
  Clone ID: 701107453H1
tcttagatctcttctttctctacgccgcacgccgaaaccatggccggaaaaggagagggtcctgctatcggaatcgatctcggaaccacctactcttgcgtcggtgtgtggcaacatgaccgcgttgaaatcatcgccaacgaccaagggaacagaaccacgccgtcctacttcggattcactgacaccgagcgtctcatcggtgatgcgg

SEQ ID NO: 34075 - DNA, 236 bp, Glycine max
  unsure (1)..(236): unsure at all n locations; Clone ID: 701107454H1
catgatcttcaggacactcctatnccctcctggcctttatngtgacnnaattcagttgctgngatggacaagaagacatacataatacacatggacaagaccaagatcaaagcctcaatccattcccaagacaacacaaaaccttggttcaaatcagtcgttgatttcatctctgaagcgtcattagaagaagacatagcccctcagcttctttatgtttatgaaaccagcatgtt

SEQ ID NO: 34076 - DNA, 255 bp, Glycine max
  Clone ID: 701107455H1
gcaaataactattaccaacaaactctactttcggcaaccttcaatttttttgaaagtcatggatttcagagtgatgggtttggagcctccgttgttccacacgctgcaacacatgatggacatgtcagaggacgctgcaggggaaaacaagacgtacagtgctccgacacggtcatacgttcgagacgccaaagcaatggctgcaacacctgcggatgtgaaggaatatcccaactcctacgtgttcgagatcga

SEQ ID NO: 34077 - DNA, 252 bp, Glycine max
  unsure (1)..(252): unsure at all n locations; Clone ID: 701107456H1
tcaagactcatttatttataaccaccaccagctcaggtggcgcanaaanccaaacccacaagaggttaagaacaagtagaataacaaaacccattcttcacctctctcccatcgtaataatgggtcagagcctgagttgcagtggcaaccatgaccacggcctcttcaccgccgtgctgcacggcgaccttcaaattgtcacaactctcttggattccgacccttctctcttgcaccaaacaactctctacg

SEQ ID NO: 34078 - DNA, 251 bp, Glycine max
  Clone ID: 701107457H1
aaaaaatctcaaaataaaacaaccaaaccacacacttcacaccctcttcaacatcctcagcaagtacaagaacaagaagaaacaatgtcttgctccaatctcacaatgttggtgtcctcaaaaccttccctttccgatccctccaatctctccttccgctctgtcctcaacccttttcagctcccttcacaaaacccaacttcatgcactccttcacgctcctcaaccacccaaattcagtgtggtctgag

SEQ ID NO: 34079 - DNA, 251 bp, Glycine max
  Clone ID: 701107458H1
cttctgctctagaaaattcagtgctgaaacatggcttcggctactctctctgtagccaaaccagcccttcaggcaaatgggaaaggcttctctgaattctctggcctccgaagctcatcaggcttccttcccttttctagaaaatcttcagaggatttccattctgtcattgccttccagacctatgcagttggaagcagtggaggatacaagaagggtgtgacagaagcaaaactgaaggttgccataag

SEQ ID NO: 34080 - DNA, 241 bp, Glycine max
  unsure (1)..(241): unsure at all n locations; Clone ID: 701107460H1
cagagagctaagcaacatgactaggagctatatggnaaaattggtgagagangcatatgctagatggaatgacttggaagaaattgatgcggctctgttaacccaaggtgaaaccttggaggaatttccaaacaatcatcaggcatcactaatagcatatgatcagaatgactactttggtgataaatctgccgaagttggtaactatgtaccaacccataatgcacaaatgggatgcagc

SEQ ID NO: 34081 - DNA, 250 bp, Glycine max
  Clone ID: 701107461H1
tctagcaatcaaccatctttggatcaaccctccaatttgtttacaatatggaacagaccctctcctttgaatttgagcatgaatttgttcaaaacacggcaagagtgaaatctgttgatatgcatccaactgagccatggattctactgggtttgtattcaggaactatttctatttggaactatcagacaaagactgaagagaagtctttaaaaatcagcgaatctccagtgagatcagcaaagttcat

SEQ ID NO: 34082 - DNA, 251 bp, Glycine max
  unsure (1)..(251): unsure at all n locations; Clone ID: 701107462H1
ttcgctctgtgcagtttcctcgctctcttttctgcaattttcttttttgttcgttctctgcggttatctttttgagcttcaatggcggacgctgaaaccttcgctttccaggctgagatcaaccagcttctcagcctcatcatcaacaccttctacagcaacaaggaganttcttgcgtgaactcatcagcaacgcttctgatgctttggataagattcgatttgagagtttaaccgacaagagcaagctc

SEQ ID NO: 34083 - DNA, 256 bp, Glycine max
  unsure (1)..(256): unsure at all n locations; Clone ID: 701107465H1
gtccgttttctaaatctcattcttcacctgcaactatttggattgctgatttttggtacattctccactttntagagtttttntccttccaatttgttcatatggatgatcattaattattgtccaaaagttgatattnttttcatgttctttctgcagttaataccatatttactgatattggcgcatttctttgagaaagttactaattcctagatagaggcaaaaatgttgggaattttcaaggagaagttgg

SEQ ID NO: 34084 - DNA, 256 bp, Glycine max
  unsure (1)..(256): unsure at all n locations; Clone ID: 701107466H1
ctttcaccaacaacaaagaaaacagagaaactttcacttcatatantttcatcatcgcagcaaaggaatcaatcaatcaaaatccatggcaggcttcagtggcgacgaaaccgctcctttcttcggcttcctcggtgccgctgcggccctcgtcttctcctgtatgggagcggcgtacggaacggcaaagagtggggtgggggtggcgtcgatgggcgtgatgaggccggagctggtgatgaagtcgatcgtgccg

SEQ ID NO: 34085 - DNA, 245 bp, Glycine max
  Clone ID: 701107467H1
ctcttcttttccaaaaacaatgaagctcattagcaccatcaaccccaaaaaactcaaactaagccccaaacgcttctttcgtaaaaaggaaccatctttagtctcacgctccgacccgccttctttcggatccggatcctcttccgttgactcttccaccgcaaatcacaaaccttccgccggtaaccaaactccgaccagcgttctcccggacgtctccggcgagtggtccgaggtcgccaccg

SEQ ID NO: 34086 - DNA, 249 bp, Glycine max
  Clone ID: 701107468H1
ttgcattggctgtatttcaactcattatgactcttgggcatgttttccttggtatgggatggccagggtcaatgtatgttggcacgttactagttggacttggttatggagctcattgggcaattgttccagctacagcctcagagttgtttggtttgagaaactttggtgctttgtacaatttcattactatagcaaaccctgcaggaaccctggttttctctagtctcattgccagcaccatctatg

SEQ ID NO: 34087 - DNA, 251 bp, Glycine max
  unsure (1)..(251): unsure at all n locations; Clone ID: 701107469H1
ctaatatttttctcactgtcttgtctctccagagaactgtatagngagagatggcagctgcaacatctggtgctgtgttaaatgggttgggatcttccttcttgagtggaggaaacaggagccaaacccttctggccactgctattggaggcaaannnnnnnnnnnnnnnnnnnnnnnnagtcctagaagactcattgtggtagctgctgctgcaccaaagaagtcatggctccctggtgtcagaggtggt

SEQ ID NO: 34088 - DNA, 250 bp, Glycine max
  Clone ID: 701107470H1
aaaaaatgaagtaatcaccatttttcatatatgctagtactttttaaggtcccaaggtttctttttacttgatgctgtgtttgtcaatttcggtctttattcttcaacagctacgttttaattgaatcattttttttcacttgtcttttggaatcagtacttctaagaaactgaggtggattcttctgattgttgttttgattgcaatgaatagtaatgattttgagagatataagattggttttgtagt

SEQ ID NO: 34089 - DNA, 245 bp, Glycine max
  unsure (1)..(245): unsure at all n locations; Clone ID: 701107471H1
cccgcttctctttcnctctgtctctctctcgttctgtagccgttttcgtcaccaanangcgccangaacctcaatttcgacgcagacacagctcnggcgaaggatttcctttccaactttgcagatgccaatggcgaacnaatacatgaacatcctgcaagatgttgcaaaccacaaaactcgagcagncccagatcgaccttgaggatttatttaattacaaagatctggacgaggaatttctg

SEQ ID NO: 34090 - DNA, 254 bp, Glycine max
  unsure (1)..(254): unsure at all n locations; Clone ID: 701107472H1
gtttccacttgcaaatgggacncatcaccatgctgcgacaaggtaggtttaaagaaaggaccatggactccagaggaagatcagaagctcttagcttatattgaagaacatggccatggaagctggcgtgctttgccagcaaaagctggacttcagaggtgtggcaagagttgcagactaagatggaccaattatcttaggcctgacattaagaggggaaaattcagcttgcaagaagaacaaaccatcattca

SEQ ID NO: 34091 - DNA, 249 bp, Glycine max
  Clone ID: 701107474H1
tgagttcgggctactaagaacgcagcaaacgcggttgggggaaaaactgcaagagcatgtgacggctgcataacgaaaacgtgcacgttggtactgtgctgccgatgatgcttttctctgccaggcttgtgactcttcggttcacttggcgaatcctttggctcgaagacacgaacgagtccgcttgaaaaccgcgtcgtacaagtccaccgatgaacgacgacaacctcccacgtggcacaccaagaa

SEQ ID NO: 34092 - DNA, 247 bp, Glycine max
  unsure (1)..(247): unsure at all n locations; Clone ID: 701107475H1
cnagaggaagataatggnatagaaactttgaggagtggggaggtagaacggcaaaaggaggagagtggttgcatggaagaagaaagtattgggttgggaaaaagtttggttgtagaaaaggagggagaaattgaatgcgaggnggagcaagaggaaggtgaagaaattgaagctttgaggaatgaggaggtggaagacaaagagggtgtgggaacaagttcggttgcggagaattgtttgatgaaag

SEQ ID NO: 34093 - DNA, 229 bp, Glycine max
  unsure (1)..(229): unsure at all n locations; Clone ID: 701107477H1
cccggagtacctcttcgtcgaggnggcccgccgcaagcgcncgatcctggggcgagaaccacaccttctacaccggctgcggctacctctccggcgctgtcggtggcgccgcctccggcctcgtcggcggcgttaaatccttcgagtccggcgacaccgccaagctccgcgtcaaccgcgtcctcaactcctccggccacgccggccgcgcctggggcaaccgcctcgg

SEQ ID NO: 34094 - DNA, 226 bp, Glycine max
  unsure (1)..(226): unsure at all n locations; Clone ID: 701107478H1
tgcattcacgggtcagaagcgtcgccggaaacatcaaatgcgnacgatgactcttctgttcatcttcgacgaccacgccgccggctgcgccgttgcagttcccgcagactctggcggggctccgggcgcggctggcggaggagtcgccgtcgctgtcggacttcctcgcgttaaaatcggagagcgcgtactcggtggaggtcgggactaagaagaagccgcttcc

SEQ ID NO: 34095 - DNA, 252 bp, Glycine max
  Clone ID: 701107479H1
ccgatttgaaggatacaattgtgaagggatttgggtttacggcggaagatgatgttaagattacggggttcgatccgagagacgccgaggtagggcattccgtggagtaccaattcgacctccaaatcgatcacaaggttattcccttcaagcttctcgaagatgtgaaacgctgggattacgtggatcttcccattttccgggccgaggccccaactggcttggttcagaaacgggcttcggctgacgggc

SEQ ID NO: 34096 - DNA, 256 bp, Glycine max
  Clone ID: 701107480H1
cagagctgattttcgcggctgttaccggtcaccggagattctatccgaaatcgttttccgatgacgataaaaactgttaaagtcagtaacgtttccttgggagcaactgagcaagacattaaggagttcttttcattttctggtgatattgaatatgttgaactacggagccatgatgaacgatctcaaattgcttatattaccttcaaggattcacagggagctgagactgcactactgctttcaggggcaacaa

SEQ ID NO: 34097 - DNA, 254 bp, Glycine max
  unsure (1)..(254): unsure at all n locations; Clone ID: 701107481H1
ggttgattcggatctagagtcttcagtttctcctcgttgttcttcgctttcctgttttcaatttcgattctttcgttaatttaataagatgtttggganggcaccgaagaagagcgataatacgaggtactacgaaatcctcggcgtctccaagaacgcttcgcaggatnatctgaaganggcttacaagaaagccgccattaagaatcaccccgacaagggcggtgatcccgagtcgtttaaagagctggcgc

SEQ ID NO: 34098 - DNA, 249 bp, Glycine max
  Clone ID: 701107483H1
caagtatctccttcacactaaagcatgaccattttcatctagcttcgttcttcaaaccattgtttctgagatactgtatggctcacaatcacatcgccaccgattcacctctctctcggcgcatagttcgtgccttcctctacttcctcaactctgttgaaccgggtcctggggttgatgctgagggcattgaggttgctagggagtgtttggcagaggcttttaagcttaattcatctcctgtggctg

SEQ ID NO: 34099 - DNA, 249 bp, Glycine max
  Clone ID: 701107484H1
gcgagcagcgtttgtttgttccttcctcagtcgttgtgacagtgtgtgtgagtgagtgagtgagagcgacgatgggcgcgagcagcgaccccacccaagacggttccgacgagcagcagaagcgttcggagatctacacctacgaggccccctggcacatctacgccatgaactggagcgtccgccgcgacaagaagtatcgcctcgccatcgcctccctcttagagcagtaccctaaccgcgtggaga

SEQ ID NO: 34100 - DNA, 208 bp, Glycine max
  unsure (1)..(208): unsure at all n locations; Clone ID: 701107486H1
cgtcgatctggcatcaccttgacacttcttgtggataaagctcttttttttctgtactctaaaaaaaaaagcgtttctctctcattttctttctgtcgagaaaatttagtgaacccaaaaggagagaacttnctttggtttgtgtttcattttgttgtggttttctgtaagattaaatngctgaggttttgaccaaggcgagtttggt

SEQ ID NO: 34101 - DNA, 250 bp, Glycine max
  Clone ID: 701107487H1
tggaatcaagcagagaacaagttcatctgcccttgccatggatctcagtacaatgaccaaggaagagttgtgagaggacctgctcccttgtctctggcattagcacattgtgatatagatgatgggaaggtggtgtttgttccttgggttgaaacagatttcagaacaggtgatgctccatggtgggcttagactccttaaagccgtccctctgttgtcatgtatatttaaacatgaaattcaaacattc

SEQ ID NO: 34102 - DNA, 251 bp, Glycine max
  unsure (1)..(251): unsure at all n locations; Clone ID: 701107488H1
cggcaacagacgaagttgtttctctctctaggcctagggtttccttctccactaccgttctttncatcggatcgctgccgtttccggcgtcattccgataattcggcggcatgaagctcacagtgaagactttgaaagggagccatttcgaaatcagggttcaaccctccgacactgttatggctgtcaagaagaatattgaagatgtacaaggaaaagataattacccatgtggacagcaattgctgatt

SEQ ID NO: 34103 - DNA, 259 bp, Glycine max
  unsure (1)..(259): unsure at all n locations; Clone ID: 701107489H1
catnngcnctgncncaggnantnnggtntgcaaatgatgtctttgnagaggaccaagttgtttccttttttcattgtccttgtntccttcacatgtagtctctcccttgctatgtccagtaaccagttggagcagtttgcttcggaggaagaagtgtttcaactattccaagcgtggcagaaggagcataagcgtgaatatggcaaccaagaggagaaggcaaagaggttccagatattccaaagtaatttgaggtaca

SEQ ID NO: 34104 - DNA, 247 bp, Glycine max
  Clone ID: 701107491H1
ctggtttctccacctcctgtctttcctcttccagcaacttagggacatgttggttggtattaaaaactcacaatgcaagggccgtgccagggaaactacctggaactgtaaggagaagattgtcattaataaaagcagaagtgaagtatgtgaacgctgaaaaggctaaggaacttgtggaagctgatggatatactgttcttgatgtgcgggacaaaactcagtttgtgcgagctcacataaaatc

SEQ ID NO: 34105 - DNA, 246 bp, Glycine max
  unsure (1)..(246): unsure at all n locations; Clone ID: 701107492H1
ctttgttcactcttcttctcttgcggctagggttttagcgcantnccttctagatttaaggaagatgggtaaggaaaaggttcacatcagtattgtggtcattggccatgtcgactctgggaaatccactaccactggtcacctgatttacaagcttggaggcattgncaagcgtgttattgagaggtttgagaaggaagctgctgagatgaacaagaggtctttcaagtatgcctgggtgctgga

SEQ ID NO: 34106 - DNA, 248 bp, Glycine max
  unsure (1)..(248): unsure at all n locations; Clone ID: 701107493H1
gactgctctctgtcaaccaatcacaaaatttagaattttcaatgtatcatttttaacttaaatactgtgagactctgtgtcagagtttgtgaagtgaatcccataatcatgaagaaaggaaacttgggacttggtctcaaactctcagttcctgtntctgatcaatctaattttgccaggttcctgactgaaagtgggacttttaaggatggggatctgcttgtcaacagggatggagttcgaattgt

SEQ ID NO: 34107 - DNA, 248 bp, Glycine max
  unsure (1)..(248): unsure at all n locations; Clone ID: 701107494H1
tatgaaaagataagatgcgtancacaaaccaaaccagcctcatattcttgattctttaggtggcttcagagagtgagctttatggttttggtaattccattttgttcatcaagatacatttctagagttcaacctctatatctttcagcaagtgaatcacacgcactatagatgaattgcaaaataaactccttaagctcaccaattccatgcaaactttacaccaagaaaccaaggcttagaagaac

SEQ ID NO: 34108 - DNA, 253 bp, Glycine max
  unsure (1)..(253): unsure at all n locations; Clone ID: 701107495H1
cagagagaagcgtcttaataaacgctcttctctgaaaaacctgatttcttctcttcttctcttctctttcgtttcgatcttcgatctctgaaaatgagagagtgcatttcaatccacatcggtcaggccggtattcaggtcggaaacgcctgctgggagctctactgcctcgaacacggcattcagcctgatgggcagatgccaagtgataagactgttggtggaggtgntgatgctttcaacaccttcttca

SEQ ID NO: 34109 - DNA, 254 bp, Glycine max
  unsure (1)..(254): unsure at all n locations; Clone ID: 701107496H1
aacgtgtgtagcccacgacagcttttcaactgggcacttgaaccagccgaagatgcaattcttgaccgattctttgagcttggatatctagatgcttctgtctgggcaaaggaaaacccagttgaagtaatagttcaagatgatagtcctgcgtttggaagtagcagtgcgacatagattgatgatataatgaactacgtaaagatagttcattatncagattgaagatgcatgaggaaactacagaccattga

SEQ ID NO: 34110 - DNA, 262 bp, Glycine max
  unsure (1)..(262): unsure at all n locations; Clone ID: 701107501H1
gcttcaacagccgnaacatnctacttcgcatcaaacactcactttctctctncaccactctacacttcgccacagctaccagattcgcgaagggatttagggttccgntcatggacnctgttgnattgccgttaccacttgacgtggcagccacccccaaattgatgggatcggagggtttctcgctaattcaaaatgatgttgcaagtataaaaactgtgcctgagtttccttccngcaataaatttgtagaaactcaact

SEQ ID NO: 34111 - DNA, 122 bp, Glycine max
  unsure (1)..(122): unsure at all n locations; Clone ID: 701107502H1
tcacgaagttggatatcatggatagaggcactgatgcgcggaatctgttactaggaaaagttaatcccctccgacttggttatgtcngtgtngtgaatcgtagtcaagaggatattctaatg

SEQ ID NO: 34112 - DNA, 267 bp, Glycine max
  unsure (1)..(267): unsure at all n locations; Clone ID: 701107503H1
ggctgcgtgagaaggaagatgacctggtcgaccgacaaaaagaagaggaagaaattgctgagacccaaaaagaagggccgaggaggaacagaagcaacaaagagatgcattaaagctattatctgagcatgtggtaaatgctggtaaggaaaatatgattactgaagagattactattgaagttaaaagcatcgttgctgaacaagatacngtagctgattatcatcatgaatatcatattggtgacggtgattcaataaatgtctc

SEQ ID NO: 34113 - DNA, 269 bp, Glycine max
  Clone ID: 701107504H1
tggattttatggtcatgtccataactatgaaagagtatgccccatttatcagaatcaatgtgtgaatgaagaaaagccatcactactctggcactgtgaatggaacaattcatgtggttgttggtggagggggaagtcacctgtcagacttcacaccatgcaccccctatttggagtctttatagggacgttgactatgggtttgagcaaattgactgctttcaatcattcatatctcttgtttgagtacaagaaaagtagtgatggag

SEQ ID NO: 34114 - DNA, 266 bp, Glycine max
  unsure (1)..(266): unsure at all n locations; Clone ID: 701107505H1
tgaaaataaaacccacacttttaagatatttatntgattaanaatcaggaattgaagcttaataatactttatgtgagtgatgtcaataacaatagagagaacagagcagggtcacagactaaaaagagaacagaagtgagcaggtagcagaggtctttgctttgctagaaaatgctgaaagatgccgggatacatgttggagaaaagtgagtgtttgtccagagaatgatataaaggattagagtgaactgaacagaggttgcag

SEQ ID NO: 34115 - DNA, 263 bp, Glycine max
  unsure (1)..(263): unsure at all n locations; Clone ID: 701107507H1
attttttcttattctcttcctctctctctactctgagacacaaaggnaaattntnaganattatggntggttattcaaaagcttcagctctttggatccttntncttctctttggcttctctgtagctanggaaattttggttggaggtaagactgatgcatggaaggtttcagcctctgaatcagattcactcaaccaatgggcagaaaagtctcgtttccaagttggagactatcttgtttgganatatgatggtggaaaa

SEQ ID NO: 34116 - DNA, 257 bp, Glycine max
  unsure (1)..(257): unsure at all n locations; Clone ID: 701107509H1
cactttcgggcgagtgtgtgtgtagcagtttctggttctgtttttggtttcgtttcagcaaaacctctcttcttcttctgattgattccacctcgcgattgntgcttntcgtttgtnttcttctttntcggtttctgatctgaactcgattcgattcgctattgccggaaaatgagtcctccggcaagtgtccggngatgatcgctccctcgagaggttgttgaggttatcgttgttgttctcgaagtcaggtttcg

SEQ ID NO: 34117 - DNA, 260 bp, Glycine max
  unsure (1)..(260): unsure at all n locations; Clone ID: 701107510H1
caacaataacaatggctgcctcactacaagctgcagctaccttcatgcaacccaccaaggttggcatagcctctngcaacctcaaatctacacaatgcatttcacaggcttttggcttggaacctgctgcagctaaactncacttgctcccttcagcctgatctcaaagaatttgctcaaaaatgtgtcgacgctaccaaaattgcaggattcgcccttgccacctctgctctcgttgtttctggagcaagtgcagaagg

SEQ ID NO: 34118 - DNA, 259 bp, Glycine max
  unsure (1)..(259): unsure at all n locations; Clone ID: 701107511H1
gnnaaataaaaccaaacctttcttcctactactcccatncccacatttcgagcaacatngacgangncttcgacatgccgacggcggaggcaatgggcgaggactttcgacttcgccggcgccaccggcggcgacctcgacggcagcagcagcaaccccatcttgaaggtcggcgaggagaaggagantggaaaagagggtttgaagaagaaactacttaaagaaggtgaaggatgggacactcctgaagttggtgacg

SEQ ID NO: 34119 - DNA, 255 bp, Glycine max
  Clone ID: 701107512H1
cttcaacattccaatctaatccaaaacgctgcgttttatttcgtattcaatttaattcaatccctaaattcctcgccggagagagcgaatcttaataaccccaccactttccggcgaaacatggccgtcgccgtcgccggccgccagaagccgagctccgacgcgagcctcttcacgctctgccccttctggagctcgcgcaacgctactcaaaggtccaccaaaacggtgtcgtccgtcgccaggtcgctgctc

SEQ ID NO: 34120 - DNA, 253 bp, Glycine max
  Clone ID: 701107513H1
cttccccaaaggagacacagagcgagagagaatcgtaacaaaagcggtaaccggaataagttgtctctacgatttgagccatggcaacaacaacaccctcaaaccgatcatcagaggcgtttgctctcatggcaatcctcagcactctgctttgcacggcggtggcggcgaaggagagcgtgtacgagatactccccaagtacggcctcccgagcggtctgttaccggacaccgtcaccgactacacgctcga

SEQ ID NO: 34121 - DNA, 250 bp, Glycine max
  Clone ID: 701107514H1
caacaatgctagattttatccatatttcaaggattgtataggagtaattgatggtatgaacattccggctcatgttccagccaaagatcaatctcggttccgcaataagaaaggtatcctatctcaaaatgtgctggcagcatgcacatttgacctgcagtttatatttgtttatcctggttgggaaggttctgtcaccgactcacgagtgttaagggcagtccttgataacccagatcagaatttcccg

SEQ ID NO: 34122 - DNA, 251 bp, Glycine max
  Clone ID: 701107515H1
tcataacacaaagcacaaagcaaagctcatccttgagttaaaaaatggcagcagcttcttccatggctctcttcatccccatccttggctggcaaggccgtgaagctgggcccatcagccccagaagtgggaagggtgagcatgaggaagaccgtcaccaagcaggtctcctcaggaagcccatggtacggcccagaccgagtcaagtacttgggcccattctctggcgagcccccgtcctacctaaccgg

SEQ ID NO: 34123 - DNA, 252 bp, Glycine max
  unsure (1)..(252): unsure at all n locations; Clone ID: 701107516H1
agattatcgtgaatgcgtataaaaggaaaatanaganattagcgncaaaatgttggntgtgttcagcagctccatcagtgtcgccnccggacgagctcgtggccgccggcagccgtactccgtcgccgaagatgacggcggcggcgctgcggaagcngttcgangagaagaacccctccgccgtgtcggtggaggtcggagagcatgtccagctcgcttatacccaccacaacgagttcgccgtttcaaccc

SEQ ID NO: 34124 - DNA, 258 bp, Glycine max
  unsure (1)..(258): unsure at all n locations; Clone ID: 701107517H1
ttttaggaaaaagtgagatatgcttcaactaaataanaacaaaaaatgatccntatcaagtcactttattgaatagtagtttcaatgatttagtttccctataattatacgtagggcatcctgagaaacaaacaagcatgcctccaatctattcactgtctaggaaaactccaatgaaaaaattcttcattctctgttcgatatactcactcttcaatccttgtgttttgaacacttcatacttacttccattactat

SEQ ID NO: 34125 - DNA, 267 bp, Glycine max
  unsure (1)..(267): unsure at all n locations; Clone ID: 701107518H1
tgagaaataacaagaggggaggagtaggagctaaattttatgcataagaaaacaataggctggccacaagatnagtagacaagatagcagggatnaaatcanacatatacttcagcaattagttccagatttgnacaacaattatggcggcagnttcctcatccactccatttttgggaatcagagaagaaagccctcagnttacaacacancatcnaccctnnacagtttctccaaccanagcgcctcaaaagaaacggnnntttc

SEQ ID NO: 34126 - DNA, 266 bp, Glycine max
  unsure (1)..(266): unsure at all n locations; Clone ID: 701107519H1
ttgaagttaaaagccttagncttccctacaactccaaacacnngacatcatcatccatggntgcntccgtctccactgtcggagctgtcaacanaggtcttttgaacctgaatggttctggagctggagcntcagctccnagttcagccttctttgggaccagcttgaagaaggttattncctcaagggtccccaacagcaaggtntccggtggaagcttncaagattgttgcngtagaagagaagaaagagattgaaganaccca

SEQ ID NO: 34127 - DNA, 264 bp, Glycine max
  unsure (1)..(264): unsure at all n locations; Clone ID: 701107521H1
gtgacacagaaattaagctagagcttcatagtntcttcttcttttctcaccttccttctctcccttncagacaaaggganaaaaaatcnnnnnnnnnnnnnnnnnnnnnnnnnttccaaaaccatgtcccacagtcatctaagtttcgcctttgggattctaggtaacattgcctccttcgtgtgctttctggcaccactaccaacattttatagagtntgtaagaagaaatcaaccgaaggttccaatcaattccatatgtgg

SEQ ID NO: 34128 - DNA, 261 bp, Glycine max
  Clone ID: 701107524H1
gttcttgaggtgttagaggattttccttctgtacaaatgccatttgagtggttagtccaattggttccacctctgaaacctagagcattctccatatcttcttctcaatcagctcaccccaatcaagtacacttgactgtgaatgtggtgtcttggacaacaccttacaagaggaaaaaaaaaggactatgctcgtcgtggctagctgcattagatccctgtgatgtaggtatccatgttccaacctggttccataaaggt

SEQ ID NO: 34129 - DNA, 249 bp, Glycine max
  Clone ID: 701107525H1
cgaaaccgaaacaaaaggcagagcggtagcatttaaagggagaaccggtgccgtgaagcgttatcttatcactcaaatttagcttcggcaccgtctgtgtttctctcatctcagccatttcactttccctgtgatggacgccgatcctcctcaacttgatgatcatttggaacctttcagggtttctgtgaatcaaattctcaccacagtcaacaagcttgagaagcaagtgactgaggttgaacagtt

SEQ ID NO: 34130 - DNA, 255 bp, Glycine max
  Clone ID: 701107526H1
tcttgacatccccttcaacttctattctcttttgaaacacttagaaaagaaaaaaaaaatgtctgcgttccttttgcttttcctagttttttcttctcagttgatcggtggactcaatacacctctaccatctccaatctatggaaacctcgtaaccattctcagcatagatggaggtggtataaggggtatcattccagctgtagttcttgaccacttcgaaaaggctcttcaggcatgggataaaagtgcatc

SEQ ID NO: 34131 - DNA, 206 bp, Glycine max
  unsure (1)..(206): unsure at all n locations; Clone ID: 701107529H1
agggatgttttatggggaactgggttcttctactctttgtttatcccatcgctgcaataactctacactttcacatatacacaaacatccctctcctctaatatctccaaactatgctgctactcacactcacaacaaacgattagttgcttctgcttcttcagctccatcagttagcggttcaggtgctgaatattccgancaga

SEQ ID NO: 34132 - DNA, 248 bp, Glycine max
  Clone ID: 701107530H1
gaatatgtgtataacaggctccatttcagctatggttggtacttcacatttgttcaagggtttgtgtacctgtttctgatttacctccaaggcttcacaagcaagcaaatggtgaatccatggaaaacttatgtgaaactctctgctgtgcttatgggttctcatggcctaacaaaggggtcattggcttttctcaactaccctgcacaaatcatgttcaaatccacaaaggttcttccagtgatgat

SEQ ID NO: 34133 - DNA, 197 bp, Glycine max
  Clone ID: 701107531H1
agtgagcgtgaaagatgccttgggcgaggctttcagggtctccaaggctcgacgttgctattgacatgggcaatccatttctcaatctcactgttgatggtttccttaagatcggagctgtcgcagccacgcgatcagctgctgaagatacttatcatattatccaaaaggggaatatctcaagtcatgatttcgag

SEQ ID NO: 34134 - DNA, 201 bp, Glycine max
  Clone ID: 701107533H1
accggtaataatttttatcctcttctgttaaacttggtccatccatgtcaatttttttggatctcagtcaccgccgttccctttccatcgccaattaatcccccccctcaatttttacttccctctcatctgccatacatacacgtctctataaacatcatccagaaaaaggtgcattgcattgattgttttctttatcga

SEQ ID NO: 34135 - DNA, 262 bp, Glycine max
  unsure (1)..(262): unsure at all n locations; Clone ID: 701107534H1
cgcggcttcaaccttgtagttattctctttcttcttttttagccacccctcttcttgaaaaatctagatctcgttcttccttgatctacgttacgcttttagtgaccggatctgtatggatctgaaccagatctacacgccgatggtggttttggcctggtctttcatagatctgatgcanggaggctcagatctactgtacagaggtgtgcgattcatgttcgtctctcttttggaatctgnttcgtagaaagtcgtttgg

SEQ ID NO: 34136 - DNA, 266 bp, Glycine max
  unsure (1)..(266): unsure at all n locations; Clone ID: 701107535H1
gtctgcagagtgcagagcnttntctcntctattnnggcttccaacctgtttggcgccattcattgcncaacaacaaaaccantctctatattttgnttagacaatgngggggagcttgtggcaacntgggcaatcgatcactcgccgtcttgcncatggagataagaaggctgttgctcgccgatgttttgcctcanaagctgagctgaaaaagacagtgtttcatgagttccatntngcncatggtgggaagatggttccatttg

SEQ ID NO: 34137 - DNA, 109 bp, Glycine max
  unsure (1)..(109): unsure at all n locations; Clone ID: 701107536H1
gacagatgtctggcattttaataagaaagattganactggggaannatctgnnctttangcanaagggctgnnttangggcntanggcattcaccaaatactgaacngt

SEQ ID NO: 34138 - DNA, 192 bp, Glycine max
  unsure (1)..(192): unsure at all n locations; Clone ID: 701107538H1
ctttaggtgaattatgattttgaggttttgttggccctgagtcatcatataccagactcactcagcagctagctcatgtancctgtttaagtatcaacaatttaatatcagtgttaatgtgtatgtttcgagagggggctagcttctaagcctcatcatgactatgatttggtgcaaagatgttctttatct

SEQ ID NO: 34139 - DNA, 234 bp, Glycine max
  unsure (1)..(234): unsure at all n locations; Clone ID: 701107542H1
tnaatcctatcctatcgtagcaaagccaganaganagaaaancctagcttaccttttcaactttcaagatgcaaatctttgttaagacactcactggtaagacaatcacccttgaggtggagagttcagataccatagataatgtaaagtccaagattcaagacaaggaagggatcccaccagaccagcaacgtctcatttttgctggcaagcagcttgaggatggacgtacat

SEQ ID NO: 34140 - DNA, 250 bp, Glycine max
  Clone ID: 701107544H1
agcgaagggaaagggttaggcatcattcatacactgaacgaacgctcagctcagtcaggtgccggcgttcctctttcacgttctcatggaaaacgacgacgtcgacatgcacgctgccgacaccagcgaagaattggatgacatgaagaagcgcttgaaggagatggaagatgaagctgctgctttgcgagagatgcaggccaaggtcgagaaggaaatgggatctgcgcaagatcctgcaaatgcttct

SEQ ID NO: 34141 - DNA, 248 bp, Glycine max
  unsure (1)..(248): unsure at all n locations; Clone ID: 701107545H1
cgctattcgagtattagtgtactcattactaagactagtgctgttaagttgtattattttactcctttatttccctcaattccacgagaacagctcatncattatcgatcttatctcttaggctttcagggttatgttgattgccttgacttctgtaagctcaggttctctccagttcctcacatggacaaaattgtgcatgtgaaaactaatttttaattttgctgcctaattttttcttgatcttt

SEQ ID NO: 34142 - DNA, 247 bp, Glycine max
  unsure (1)..(247): unsure at all n locations; Clone ID: 701107547H1
gcagaaagcaagctcatcctagagttttaaaaatgggcagcagcctcctccatggctctctcttccccatccttggntggcaaggncgtgaagctgggcccatcagcccccgaagtcgggagggtcagcatgaggaagaccgtcaccaagcaggcctcctccggaagcccatggtacggnccagaccgcgtcaagtacttgggcccattctctggcgagcccccgtcctacctcactggcgagttcc

SEQ ID NO: 34143 - DNA, 245 bp, Glycine max
  unsure (1)..(245): unsure at all n locations; Clone ID: 701107548H1
gncattttnanggnnncanncngaangggtaacaatatcnnggtnatctgtgatgcctacactnctnctngagaacctattcccantaacaagangnacgctgctgccaaggttttcagccatccngatgttgttgctgaagtgccatggtacngtattgaacaagaatacaccttgttgcagaaagatatccaatggcntcttgggtgggctgttggtggtttccctggacctcagggtccata

SEQ ID NO: 34144 - DNA, 263 bp, Glycine max
  Clone ID: 701107549H1
aagatcttcccactaattcaaccatcgaatacactattgaccattaactagaaaattttgaaatctcatctgatttttttcaattgaaacggagcttcaaagcatggcagcttttacatcaattgttgtgcagtactcatccacatcatctttacagtctttggtaccttctttagaagctacacgcgatcataattcatggtgggggagagtgagatcatacagatccacaggaaaaaattcactccaacagaatatcacaa

SEQ ID NO: 34145 - DNA, 264 bp, Glycine max
  unsure (1)..(264): unsure at all n locations; Clone ID: 701107550H1
cttgaatcttcgttatccttctttttttctccttgaactcgaatattcactatggcagatgaggtggttctgctagatttctggccaagtccatttgggatgagggtcaggattgcacttgctgaaaagggtatcaaatatgagtccaaagaagaggacttgcagaacaagagccctttgctccctgcaaaatgaacccggttcncaagaaaatcccggttctcatccacaatggcaaacccatttgtgaatctctcgttgctg

SEQ ID NO: 34146 - DNA, 263 bp, Glycine max
  unsure (1)..(263): unsure at all n locations; Clone ID: 701107551H1
cataaaagccggggcatacttcgagaatgtggaggtaatcaggaagaagaccaatctgatgttcgtcggagatgggattggaaagactgttgtgaaggccagcaggaatgttgtggatggctggaccactttccaatcagccactgttcgctgtggttggagacggattcataggcaaagggtataacctttganaattctgctnggccaagcaaacaccaagccgtggccctaaggagtggttctgatttctcagccttcta

SEQ ID NO: 34147 - DNA, 261 bp, Glycine max
  Clone ID: 701107552H1
ctctatcaaccccaaatgctattgattccaccatttccattcaccacccaaatgctcttcacagattccctatttctctcttcttcaactttctcaggtattcgaagaaagaattctgggtgtattgaaagtttgaatcttttaagcctctaaatttcctccatacatttacctgcatttccaaattttgaagtttggatacggtaataatcaaaatggcctcttgcgtgtcaacaatttttgcaccttctaatactagaa

SEQ ID NO: 34148 - DNA, 229 bp, Glycine max
  unsure (1)..(229): unsure at all n locations; Clone ID: 701107553H1
gttngatgctgnnctttgtagcatatacnatgaagtnagggacgaggttgtagctgctggtgaagaagccttggacttggaaaacttttccttccgagtttcttccttcagatacggaccttgctgagtttactgctgatgtgaaaagctttcttggaaacggggctgatgaggattcacctgatgatgatgagcacgtgaaagaatcagaactactgattctgattgc

SEQ ID NO: 34149 - DNA, 115 bp, Glycine max
  unsure (1)..(115): unsure at all n locations; Clone ID: 701107554H1
cttattagngggagcaatacatatcantcattcagnttncaacaaaggagntgtanattaggagcctgggctgcanaagctctnngttcntcatcatccgcntncctttcagcng

SEQ ID NO: 34150 - DNA, 259 bp, Glycine max
  unsure (1)..(259): unsure at all n locations; Clone ID: 701107555H1
tgataagtcaaaagaagagaaggcagaagatagtaagggtgagaaaggatcaaaaaaacgtgggagagggatnantnatgntngaganagtgaaagaaaaaagaaaagaactgaaganaacagagccaaggactcctactattgatcgccctgtgcgggaaaggaaatcagttgagaggttggtagcatcaattgntaaagatgcaaccaaagatttcacattcaaaagggccgtggtacacctttaaaagatatacca

SEQ ID NO: 34151 - DNA, 258 bp, Glycine max
  unsure (1)..(258): unsure at all n locations; Clone ID: 701107556H1
tgagtagttcttcatcatantcttaaacattaaaccttagcaaaactcaacaatgctagacatncaaaggctacctcgtactcnttcttcctatggttcatatcaaccattctgatangttccatcttcaagaaaccacagcgtctaagactcccaccgggtcctccaatttcaatacccttgctgggacacgcgccatatctccgttcactgctccaccaagccttgtacaagctatcactgcgctatggacccttg

SEQ ID NO: 34152 - DNA, 231 bp, Glycine max
  unsure (1)..(231): unsure at all n locations; Clone ID: 701107558H1
caaaaatctcatgccataagtttgntactactaaccttttanctgcttttgcttacaagctncctacattctctctccaggttgggaattagtgcctttggtgatcatcatgttccttcttagaaggcaaacccagaataaccaggagaatgattcctcatatcaagatacaaaggtggctgaactcaagacaggtcttgggcccctctctggtcgtcgattaaagtattg

SEQ ID NO: 34153 - DNA, 250 bp, Glycine max
  unsure (1)..(250): unsure at all n locations; Clone ID: 701107559H1
atatctcactagtcacttccaagttacaccctcttgcttctaccttaatttctctcaagacacaaaacaggtctactatagatttanttggtgttcttcttacattggtttcatagagtgataatcaagaaggatgaagggttttgctgtgaaggttgaggaaggaagagaaggtacaaatggtgagctatctataggtcctgtatatcgcaacctcctctccaaaaatgaatttcctccactagatcct

SEQ ID NO: 34154 - DNA, 248 bp, Glycine max
  Clone ID: 701107560H1
cgcactatcagcacaacaactcactcactaagctaaacaatttcatcaagcctgccatggcttcctcgtgtgcttcctctgccattgcagctgttgccatctccacaccaagttcccagaagaatggatcactcttgggaagcacaaaagcttcttttcttagtgggaggaaactgaaggtgaacagttttacagcaccagttggagcacgatccagcactacagtgtgtgcagttgctgagcctgat

SEQ ID NO: 34155 - DNA, 247 bp, Glycine max
  Clone ID: 701107561H1
gaagagttgaacatgttgatcattctcgcaaatcggctgaacaggctgtgaaggccatcaaggcagctgaggaaggaaaaacagttgaggagtatgattaccttccatacttctattcccgttcattcgatctgtcttggcaattcctatggcgacaatgtcggcgacacagtgctattcggagacaacaatcctgcgtcttcaaagccaaagtttgggacatactggattaaagacgggaaagttg

SEQ ID NO: 34156 - DNA, 242 bp, Glycine max
  unsure (1)..(242): unsure at all n locations; Clone ID: 701107562H1
cttttttcttgagtcaatttattccaggttcagcaaaattgtattnactgtggcgtttgtatgggcaagtacttctgtgggacgtgtaagctctttgatgatgatgtatctaagcagcagtatcattgcagtggctgtggaatttgcagaactggaggatgtgaaaatttctccactgccacaaatgtggttgttgctactcaactcagctgaaaaacagccacccttgcgtggaaggagca

SEQ ID NO: 34157 - DNA, 243 bp, Glycine max
  Clone ID: 701107563H1
cttgattggaagagttgatactgaccctgttgtccatgcatgtaagaatctcccatttctagtgcagaccttggacattggcgttcggccatttattgccgcattagtgaacaatatgtggagatccacgactccagaagaagtcctggcaatatttctggtggaattaagagcaatggctgaagctcagctgaaacgaagaataagaaatgtggttctaccgtcccagtttcattcagtcga

SEQ ID NO: 34158 - DNA, 113 bp, Glycine max
  Clone ID: 701107564H1
tagtccatatgcttgttctcaaagattaagccatgcatgtgtaagtatgaactaattcagactgtgaaactggcgaatgggctcattaaattcagttatagtttgtttgatgg

SEQ ID NO: 34159 - DNA, 260 bp, Glycine max
  Clone ID: 701107565H1
gaggagttaccgtgatacattgttttcatttcctgtctctagaattttctatccgcttcatccccctcacaaattagggtttttgcgaatcttttatcgtctgaaatcgaatccaacgtttcagccatggtttccgattcaatcgccgccgtaccgattccctccgccgcaaacaccaagaacccggggaagaagaagaggactaacaggtccgcgaaattgaagcagtacaaaatcgatgcgcgccgcgagcaatggtt

SEQ ID NO: 34160 - DNA, 258 bp, Glycine max
  Clone ID: 701107566H1
attcgttttcatccatcaatgaatttaagtgttgccaagttccttggttttgaacagactttaaagaatgccttatcaccatacaaattaggaggagcagctggtggaagtgattttgatccaaaaggaaaaagtgataatgagattatgcgattttgccaaagtttcatgagcgaaatgtatcgctacctggggcctgacaaggaccttccgtctgaggaaatgggtgttggtactcgagaaatggggtatcttttg

SEQ ID NO: 34161 - DNA, 260 bp, Glycine max
  unsure (1)..(260): unsure at all n locations; Clone ID: 701107567H1
gggagcacttgcttcaacgagccatcttctcttcgagagaaaggtcttcttgtgcttccaggtgaagatgcaccccctncagatgttgctagcaaattttttgagcctcctcttagatcttcgactgcgaatccatcttccaagaaagactcaaacaatgaaaagaaagagatccctttgcttttagggtcagggccttctcttgcagacactaacaaccaaggttcaaatagagaaaatgctaatagctgaaagcttgg

SEQ ID NO: 34162 - DNA, 219 bp, Glycine max
  Clone ID: 701107568H1
accggtggttctgttcattcttcctggcacttacttctttgaagatcgaaattgtgtttttgaaaaaatgggagttccagagaaagaccctctttcccaattgagtttgcctcctggttttcggttttaccccaccgacgaggagctcctcgttcagtatctatgccgcaaggtcgctggccaccatttctctcttccaatcattgctgaaattgattt

SEQ ID NO: 34163 - DNA, 262 bp, Glycine max
  unsure (1)..(262): unsure at all n locations; Clone ID: 701107569H1
ataacacaaagcacaaagnaaagctnatccttgngttaaaaaatgggcagcagcttctntccatggctctcnnatccccattcttgggcnggnaaggccgtgaagctgggcccatcagccccagaagtggtaagggtgagcatgaggaaggancntcaccnagcangtntcctcaggaagcccatggtacggcccagaccgagtcaagtacttgggcccattctctggcgagcncccgncctanctaacnggtgnnttcnna

SEQ ID NO: 34164 - DNA, 255 bp, Glycine max
  unsure (1)..(255): unsure at all n locations; Clone ID: 701107570H1
ggatctcttcttcagtggtggaagctactagaacactagtttgttgagcactgcgatgaggaagtngacggtngnntccgctctccttcttctctctctcctctttctctttgcagatcaaggtcgaaagtttcaggcgaatgccgagggagattccgacgagcttgtagatcctccgaaggtggaggacangatcggtgctgtgcctcatggcctttccaccgattcagatgtcntcaagagggagtcggagtc

SEQ ID NO: 34165 - DNA, 254 bp, Glycine max
  Clone ID: 701107572H1
ggagggtgatcttgttgatgtctctggcaccaccattggcaagggtttccaaggtggaatcaagcgtcataacttcaaaaggggtccaatgacacatggttccaagagtcaccgacaactaggatcaattggtgctggaaccacgcctggtcgtgtttacaaggggaagaagatgcctggtaggatgggaggaaccaagaggaagatcagaaagcttaagattgtcaaaattgataaagatcttaatgtcctca

SEQ ID NO: 34166 - DNA, 251 bp, Glycine max
  unsure (1)..(251): unsure at all n locations; Clone ID: 701107573H1
ctctctctctttctctttctctctcatccagatcttgcaaaaaaaaaaaaacacaanggnagcnagngtccnattcnaggngaaganttcgtgtananggcgaactggcggaaaggccgagngntacgaggagatggngnagttcatggagaaggtntccgcntccgcnganagcgaggagntgaccgtggaggagngcaacctccctntcggtngcctanaanaacgtnaatcggggntcgcngggcntc

SEQ ID NO: 34167 - DNA, 230 bp, Glycine max
  unsure (1)..(230): unsure at all n locations; Clone ID: 701107574H1
ctttcaatttaaacacagaaacaaaanccaccaccttcaaagtcttctctctcgagaatcatcncnataaaactagggtttccgatcgtcgtcgaggagaatgccgaagaacaagggaaagggaggaaagaaccggaagcgcgggaagaacgaggcggacgacgagaagcgggagttgtgttcaaggaggacggccaggagtacgcgcaggtgctccggatgctggggaa

SEQ ID NO: 34168 - DNA, 244 bp, Glycine max
  unsure (1)..(244): unsure at all n locations; Clone ID: 701107575H1
cataccatggcaagctgatccatcagatatggagaaggtggaagatttcaaggttggagattgggtaagagtgaaagcttcggtgtcttctccaaaatatggatgggaggatgttaccaggactagtattggggtaattcatagcttggaggaggatggcgatatgggtgttgctttttgtttcagaantaagccctttcttgctcagtcactgatatggagaaggttcctccattgaggtggg

SEQ ID NO: 34169 - DNA, 246 bp, Glycine max
  unsure (1)..(246): unsure at all n locations; Clone ID: 701107576H1
caagtccaggatcgcacattgttgtccttgcgttcgtgttgctncatttcatcaaaacttgcagaatgtcacaacatagttcgcttccttcctggcttccagggacnccttccttttctacttgaaactggttacgtggaagtgggtgaaactgaagcagaggagcacgcagaactcttctattattttatcgagtcagagaacgatcctaaagggaaccctctcctactttggctaaccgggggt

SEQ ID NO: 34170 - DNA, 247 bp, Glycine max
  unsure (1)..(247): unsure at all n locations; Clone ID: 701107577H1
caagtattctgcnanctgccagnatcccaaatccctcctacataaccatattgtnnnaataggnncaatatagaatataacaaaacttagacatggaagaagcacaggtgcaggtatgggaagggtacgtagattggaggaacaagccagccataanaggacatcatggtggcatgcttgctgcttcctttgtttnggccgcggaggtattggagaacctaggcatttcttgccaatgcaagcancc

SEQ ID NO: 34171 - DNA, 242 bp, Glycine max
  Clone ID: 701107578H1
cggatttctgtttctctgtcttcattttagtttttacggctagaagaatgtccagctcatcggaatatttggtattttccggccaccacccggcgaactctccggcggaaaagtccactttctctcagacttgtagtctattgagccaatacatcaaggaaaagggtaccttcggagaccttaccctcgggatgacttgcactgccgaaacaaacggttcccctgagacatcgtgtcactct

SEQ ID NO: 34172 - DNA, 243 bp, Glycine max
  unsure (1)..(243): unsure at all n locations; Clone ID: 701107579H1
gctgctgttcttgcgcgtgaacaagcctcaggtaagccaaaaccatggttaancataacaatgttatcccaaacggacacttccgtaagcactggcagaactatgtgaagacttggttcaatcagccagcacggaagacaaggagacgattggctcgtcagaagaaagctgtgaagatattccccagacctacggctggacctctcaggcccattgtacatggtcaaactttgaaatacaaca

SEQ ID NO: 34173 - DNA, 259 bp, Glycine max
  unsure (1)..(259): unsure at all n locations; Clone ID: 701107581H1
gtttttnttcttcgatggcggcaacctcaacatcactggcttctcaactctacattggcctgcnccgcccctgcctcaanctcgantctttcaattcctcaatctntctctctcttcgancctaatcttcgcctatccctctctccacccaaaccctcacgcgccgtcatcgccatcgccggcaccgggaagttcttgttggtggcaactggaagtgtaacggtaacaaaagactcantcagcaagcttgttgctgact

SEQ ID NO: 34174 - DNA, 257 bp, Glycine max
  unsure (1)..(257): unsure at all n locations; Clone ID: 701107582H1
atgggttgcaaactctttggattttaacaaggattatgaagcaagtgtttttgagacaaccataagagtagtaggtggtcttcttagtgcatatgatctttcaggggacaaagttttcctcaacaaagcaatagaaattgcagacagattattgcctgcatggaatacgcctacaggaattcctnacaacatcantanacngtcacatggncgngcacacaaccctagttggactgggggtgagagtatctggcaga

SEQ ID NO: 34175 - DNA, 260 bp, Glycine max
  unsure (1)..(260): unsure at all n locations; Clone ID: 701107583H1
gtgaagaggttgatggatgatggagagaaagggaagagaatgagaagcaaggccaaagagatggcaggagaaggnntggaaagctgtttcaagaaggtggttctcntangacagtgctcacggctctgattcatcatttnaanactcnngtncctaatcatgtgantgggaatgggannatcgatcactgantgaatattacattgatncgagtntcatgtctttgatcatnagttanttatcaagtgaatgcatgaatg

SEQ ID NO: 34176 - DNA, 254 bp, Glycine max
  unsure (1)..(254): unsure at all n locations; Clone ID: 701107586H1
ccttgctttgtctggtgtcaaaggagcagataatgggcactttcagaattggtgctgtcctgcaagactacttcatggcntgtggctgctctngtgatagtgattaacggctatcttttgacggaattctttncctctgaagtgaatggnccaatgattggcgctgtagtgggtgcaataactgctgcatatgttgcattcataatataccttatntggcgagccatcacatatnnaccttggcaaagtgtaac

SEQ ID NO: 34177 - DNA, 113 bp, Glycine max
  unsure (1)..(113): unsure at all n locations; Clone ID: 701107587H1
attttctctnttttggtaaggcagtngaattaggagcaactaaccaaaccaccccaatttccaancacgacacggnngggnncaancatcgnaaaacggnaaaactggaaggc

SEQ ID NO: 34178 - DNA, 254 bp, Glycine max
  unsure (1)..(254): unsure at all n locations; Clone ID: 701107588H1
atgccaccaaagccttntagactatgggtcaataaatgaaaacgtgaagaagagtcaatatgctgtnagaangtgaattatancttcgancntctgagnttcagaaagagggcacnaagnttatatttactaatgttgggaacccacatgcattgggacagaaaccactgagcttccctcgtnaggttgttgcnttgtgncaagctccantcctacttgatgatcctaatgttggactgcnattccntggctga

SEQ ID NO: 34179 - DNA, 235 bp, Glycine max
  unsure (1)..(235): unsure at all n locations; Clone ID: 701107589H1
attcaacacaaacgatcatgncatgataaaacgtgggattgtcaaggggaagctttncagtcaactcagctgaagaaagactaaaaggctcctgtccnctaatgcctcaggaggtaaganaatatttttaaattttagatagtcaaattgttcattgtcaatgaattggttggataaacttggcaaactttggtcattcacatttgttgccaatttatactaatgccatatattt

SEQ ID NO: 34180 - DNA, 85 bp, Glycine max
  unsure (1)..(85): unsure at all n locations; Clone ID: 701107591H1
aacaacagcaganaactctctgcggttcgtngcanagnccgngatctgncgnccttcgtnngtcgcaacnttttctctccgttct

SEQ ID NO: 34181 - DNA, 242 bp, Glycine max
  Clone ID: 701107593H1
ggagaagggtgtcactgcccttgaccctagagccaatgattttgatctcatgtatgaacaagttaaagctcttaaggatggaattgctgttgaaaaaccaatctacaaccatgtcactggtctcctggatccccctgagctcattaaaccccccaaaatcttagtcattgaaggcttgcacccaatgtatgattctcgggtcagagatctcttggactttagcatctacctagacattagca

SEQ ID NO: 34182 - DNA, 212 bp, Glycine max
  unsure (1)..(212): unsure at all n locations; Clone ID: 701107595H1
ggaaaataaatgcaancaccacaaagacttacgcttccaagaaccatatttttcttgaaaagtgatggaaccttgacgccattggccattgagttaagtaagccgcatcctcagggtgaaggatatggtcctgttagcgaagtctacgtgccttcgagcganggagttgaagcttacatttggttactggcaaaggcttatgttgttgtgaa

SEQ ID NO: 34183 - DNA, 239 bp, Glycine max
  unsure (1)..(239): unsure at all n locations; Clone ID: 701107596H1
gctgttgttgttgcngcatcaccggaacaacttcccctgtanatcgcgttcgtntgtgcaaggttttaaaagatggctgatgcngaggacattcaanctcttgttgttgataatggaactggaatggtcaaggctggttttgcaggtgatgatgctcctagggncgtgttccccagcattattgggagaccacgccatacggtgtaatggttgggatgggtcagaaggatgcntacgtg

SEQ ID NO: 34184 - DNA, 265 bp, Glycine max
  unsure (1)..(265): unsure at all n locations; Clone ID: 701107602H1
cttggataaccaagtgattgaacacaagcgttaatatgctaaagnctaaggttgaatcaatcagatagtatcttattttnatctttggaagaaagaattattggtaagattttacttatctttcatttaaactttggattagtcaaaatcctttttcccagataaatcggagggttaagacaaaaaaattatctgtgttggatttcatattnnctttnggagagttctcaaataaaaccatgaaantttctaaaatanggngngc

SEQ ID NO: 34185 - DNA, 267 bp, Glycine max
  unsure (1)..(267): unsure at all n locations; Clone ID: 701107603H1
ggtttaagctctttgcantcctctctctctggtangatactcactcactttcattaattntctcaaaaccacttttttcttnttcctttgagaccaaaatttttaagcntgtgtntctggcacccgaaaacctgcttctcgtggnaatttcaatatctgntttnganattttngggtataaaagantctttgtnaanncatgtaagtcngacatnctggggtgaagtnnantnncnggagtnaggnnaangntgcgggtgncgaant

SEQ ID NO: 34186 - DNA, 256 bp, Glycine max
  Clone ID: 701107604H1
cgagattcaaggaaagctgtttatcttcagcatggagtttttgattcatcaatgggttgggtatctaatggtgttgttggctctccagcttttgcagcctatgaccaagggtatgatgtgtttctggggaattttcgtggtttggttctcgggaaacatgtcaacaagaacatatcatcacgtcaatactggcggtattccatcaatgagcacgggactgaggatattcctgctatgatagataaattcatgaata

SEQ ID NO: 34187 - DNA, 260 bp, Glycine max
  unsure (1)..(260): unsure at all n locations; Clone ID: 701107606H1
atcacntttcaaaggcatgttttttcaacaaagttcattctacccacgagtcgattncaacaaacccagacgctaattctcccttctctatccccgcacnnnnnnnnnnnnnnnnnnncatttatccctcagtggaaacaacagagaatctcatttgggaagagccaaacacgactacagaagaagccatggaaaacgttctggtcacggtcccgggtgcgattctgcatctgatagaaaaggattccagcgtgcacctt

SEQ ID NO: 34188 - DNA, 114 bp, Glycine max
  unsure (1)..(114): unsure at all n locations; Clone ID: 701107607H1
ttttctctcaagcgctttcaaacgccgccggcgaagaatccgcncgcncggcacnagcgagtcatcaacaatgcactgaagaagctgccgtctcagtctcctcttccggacgag

SEQ ID NO: 34189 - DNA, 74 bp, Glycine max
  unsure (1)..(74): unsure at all n locations; Clone ID: 701107610H1
tctttccattttccttcgtttnctcnctntttcgcagtnnctcagtggtctcagtncatnaccatcggaagcag

SEQ ID NO: 34190 - DNA, 250 bp, Glycine max
  unsure (1)..(250): unsure at all n locations; Clone ID: 701107611H1
ggaagactgtagccgagaacccagtggtgctttattccaaaacatggtgctccnattcttctgaggtcaaaatcttgttcaaaaagctcggcgtcgacccattggtcttcgaattagacgaaatgggtcctcaaggcccacagttgcacaaggcggcaagcacattggcggctgtacagatacactgaagctgtatcggaaaggagaacttgaacctttgctatcagaagctaatgctaaanaaacaggg

SEQ ID NO: 34191 - DNA, 257 bp, Glycine max
  unsure (1)..(257): unsure at all n locations; Clone ID: 701107612H1
gaaaaaaaaaacccttagccaacacaaccatgcatggccacctctgctattcagcaatcagcattcactggtcaaactgctctgaagcagctcaatgagttcgtccgcaagaccggtggcgccggcaaaggtcgcactaacatgcgccgcaccgtcaagagtgctcctcagagcatttggtatggccctgaccgtcccaagtacttgggtccattctcggagcagattccatcatacctgaccggagattcctgntg

SEQ ID NO: 34192 - DNA, 213 bp, Glycine max
  unsure (1)..(213): unsure at all n locations; Clone ID: 701107613H1
atctccatttccatttcctctctctcagtttccaagaatcttaagctatgggaaagtctncccaaccgtgagcgtgattacccagaaggccgtgagaaggcgagaagagtcagaggntcatcgtgagagantgcctctctatgtcgttgnatgnacctgtggactacgcgnanngagaacgtgcctcgaacaaagacctcgaccgnagggnaa

SEQ ID NO: 34193 - DNA, 262 bp, Glycine max
  unsure (1)..(262): unsure at all n locations; Clone ID: 701107614H1
caattncngtcgctnngctctgattctnatntcatgngttccaatgtctcnctggcttgcatacgccattctnatttncagatcagcatagcctagccgntagatatggcagtcantatgngnactaatgaccaggcagcatctgctgacctacatctaccttctagtttanatttcactttcatcaggggttcattctgtagaacaagtgggtcctctccacatggnattntaatngnccattnccgataacactccantg

SEQ ID NO: 34194 - DNA, 252 bp, Glycine max
  unsure (1)..(252): unsure at all n locations; Clone ID: 701107615H1
cgcgtnntcatattcttcgccccttgttctgcagtgcgtgaagaatatcttcanttctttcatgcantcagacttttaatccagacgcacgttttctgtgcacgagatctggcacgaattccctgtgaatcttgcaaagatggaatcttgtgcgcaattcgggttctgggtggtcttcatcttgttcttggcatttcaaattcctcccaattacgggtnntaccttccaggtagttacccccacaatatggt

SEQ ID NO: 34195 - DNA, 244 bp, Glycine max
  unsure (1)..(244): unsure at all n locations; Clone ID: 701107616H1
gcaaatattgcctattcggcaatactggcggaaaatggttacnattgagctgaacaagtttactgttgttttgtttgttgttgctaatacaagtggcagtttctgaaatcntttttgaagagcgatttgatgatggatggcgaagtaggtgggtgaaatcagactggaaaagcagtgagggcaaagcaggttcattcaagcacacagctggaaaatgggctggtgatccagatgacaaaggtat

SEQ ID NO: 34196 - DNA, 266 bp, Glycine max
  unsure (1)..(266): unsure at all n locations; Clone ID: 701107617H1
cggctcaantattattattagggtttggcgattcagagagaaagagaaatgggagaacgaaaaggaatcccaattgctctggggctcttggcgatgctcctcttcttcattgcttcttcctcttcctctcacctcgttcgtgcttccgatgacgccgacgacgcgatcttctacgagtcattcgacgaggattttgacggacggtggattgtgtccgacaaggaggattacaacggtgtctggaagcatgctaagagtgatgggcc

SEQ ID NO: 34197 - DNA, 261 bp, Glycine max
  unsure (1)..(261): unsure at all n locations; Clone ID: 701107618H1
tttctttccattttccttcgttttctctctctttctcagtttctcagtttctcagtcatcaccatcgcagcagcaagatgtggaaccaaccattcggaaaaaccgatttggaaagcggttctcggcctctgtatccgatgatgctcgagagccctgaactgcggtggtcgttcatcagaaaagtgtactccataatcgcnatccagttgctgtaaccatggtcgtnggngcgtcntgnnnacgtncgnccnattaggnttt

SEQ ID NO: 34198 - DNA, 266 bp, Glycine max
  unsure (1)..(266): unsure at all n locations; Clone ID: 701107619H1
ctcactctgcactcaccactgccacacttcaatcgcactaatggntgtcaccttctgcagatctacacaccgaagagggcattcaaatccctcgatcaattcctttctgggaaaacctanatttctggggatcagttgacaaaggatgatattaaagtgtatgcagctgttgttgaaaagccaggggacacttttcctaatgctgccaagtggtacgatgctgtctcttctcaacttgctccaagctnnnaaacgncacgctgcaa

SEQ ID NO: 34199 - DNA, 258 bp, Glycine max
  unsure (1)..(258): unsure at all n locations; Clone ID: 701107621H1
ttccaattagacacacataanaccattcccaatagccgcctctgataattgattactatcaacccaacttcaagttgtgttcttttgtggtgtgtaaccgtattctgtatttgttttcatcaattggaaactgggttttctcgctttttgcagataagcatcaataggatactagatcatggattggtactatgggaacggcattaatgattatctggttcccagagatcaggatttattggacaggcatccttcacc

SEQ ID NO: 34200 - DNA, 260 bp, Glycine max
  unsure (1)..(260): unsure at all n locations; Clone ID: 701107623H1
caaggatgataccgcaacagtgggcttctccatgtggaaaccaatgcaccaataaatacgctgccctaaccaaaatcccatggcgagtattctgcaaaaagggttgcgactcagatggagagacatgggaagaatgtttggaggactgcaancaaatatgctacaaggatcccgtactaaaggaccagcagtggagtgcttatattgatcgttcccctggagctgccagttattcagaggaatgttttcatgcatgtgta

SEQ ID NO: 34201 - DNA, 258 bp, Glycine max
  unsure (1)..(258): unsure at all n locations; Clone ID: 701107624H1
ttcctcttcagatcaaacgcacacagttacgctcttcaaatcaatctcttctcagaaatgggtgtggctcaaantcattcccgatgcggaggagngaaccttggagattggaatggaatacagaactgtgtctggagttgctgggccattggtcattcttgatnaagttaagggacctaagtntcaagagattgttaatattcgcttgggnagatggaactactcggcgtggacaagtgctagaagttgatggtgaaa

SEQ ID NO: 34202 - DNA, 260 bp, Glycine max
  Clone ID: 701107626H1
cagcaagaagggcaatatcaaggagaccctcttgactccaagattctacaccactgactttgatgagatggagacactcttcaacactgagatcaacaaaaacctcaaccaggatgagtttgaggcactgctccaggagttcaagactgactacaaccagacacactttgtcaggaacaaggagttcaaggaagccgctgacaaacttgagggtcccctcagacagatctttgtggagttccttgagaggtcctgcactg

SEQ ID NO: 34203 - DNA, 260 bp, Glycine max
  unsure (1)..(260): unsure at all n locations; Clone ID: 701107627H1
gtaatatttcatgcttctctatcactcttgtcaaattccacaaaaaccaagtactacaagggaagaagaacttagctacaagctaaggaaggatcaaagagaatggctcaagcaatggcatcaatgactagcttacgtggttcctctcaggctgtgttggaaggtagccttggctccacacgcttgaatgtggggagtggaagcagggtggcctcagtcacacgtgcagggttcacagttagagcacagcnacaacaagt

SEQ ID NO: 34204 - DNA, 259 bp, Glycine max
  unsure (1)..(259): unsure at all n locations; Clone ID: 701107629H1
aacaagaacaggataggcgaaagaggaatcgttcaaagagtgatgatgatctagatgacttccaagaaagcaaagagagaaggcggaaagggaaaagggctttgacttcagccagtnnnnnnnnnnnnnnnnnnnnnnnnnnnnncttggatgagtttcttgaggggatgtttccatgaccttggctgtttgattgtcatacctgaaaagtgcttctcagcaccaaagctgggcaaatagaaaaggttaggcagtggtg

SEQ ID NO: 34205 - DNA, 103 bp, Glycine max
  unsure (1)..(103): unsure at all n locations; Clone ID: 701107630H1
ttggnntaattcantcacaaatnagttaggttatccagtagacatcatccctncatcattcacttgataacctaacttatttgtgattgaattattcatttgg

SEQ ID NO: 34206 - DNA, 259 bp, Glycine max
  Clone ID: 701107631H1
aatgttgctaacattgtcccaccatatgaccagtcaaaatacgctggaactggggcagcagttgagtatgctgttttgcatcttaaggtgtctgagattgtggtcattggacacagtgcttgtggtggtattaaggggcttctgtctttcccatatgatggaacctactctactgattttattgaggagtgggtcaaaattggcttgcctgcaaaggcaaaggtgaagacacagcatggggatgcaccttttgctgagt

SEQ ID NO: 34207 - DNA, 264 bp, Glycine max
  unsure (1)..(264): unsure at all n locations; Clone ID: 701107634H1
gttaacatgtatgaggagagacttggggatgctgggntacaatctcttcaagctcgcgcgaancaacaatgcgcggagatggtctgctgattgctatacgtaaagaatgtctaagagtnatggnttataaagngttgcttttaaacgattgtggcgatcgcgttgctcanttgttactgttcagtcagctancccctttgtacaaaaccccaaaggcagtgtncccnaagagttcccggatgtgaagcacccacccttgnnntt

SEQ ID NO: 34208 - DNA, 224 bp, Glycine max
  unsure (1)..(224): unsure at all n locations; Clone ID: 701107636H1
attgtagctctttgctatgcaaacgatggnaatcagcagggaaggtcancanctgtnattgtcattggtngtgnnatggctngnattgtgctgctcgtcgtccatgatgttcgtacagntgttctcntagagtcaagggangaatggtggcgatcacactgattactcatncgtttctgtgacatggagntctgtgcnggattnnatgnaaccatgctcgngtg

SEQ ID NO: 34209 - DNA, 256 bp, Glycine max
  unsure (1)..(256): unsure at all n locations; Clone ID: 701107638H1
acattctaaaacaaaggacccagttttacatttntttttgttcctgagttcnaatggctcttcaggctgcttccttggtttctgcttctttttctattgctaaagagggaaagtctggtgtatctctcagggacaccacaatgtttggtgtttcattgtcggatactctcaaatctgacttcagctctccctcatcgacttgcaaaagggaattccaacaaaaatttggccctttgagggttcagtcagtggcaac

SEQ ID NO: 34210 - DNA, 185 bp, Glycine max
  unsure (1)..(185): unsure at all n locations; Clone ID: 701107640H1
tgttttnagtagtttcttccctattntctgttcataantcaggtttgtgtgtaacgtgtttccttgataaaagctctttcattcgttanancccttttaaggtcggtttgtctaatcantnnatngtntgnttgnggttggtnntcgtgatagattagttgtcaaggnaacntagtttgttaccg

SEQ ID NO: 34211 - DNA, 255 bp, Glycine max
  unsure (1)..(255): unsure at all n locations; Clone ID: 701107642H1
caagggaagccagagttcactgaccatttgactcataaactaaagcaccaccctggacagattgaagctgctgctatcatggaacacattttggaaggnagctcttacatcaaagctgctaagaagttgcatgagattgatccttgcaaaagcctaaacaagaccgctatgcacttaggacttcaccacaatgggcttggtcctcaaattgaagtgattagattctctaccaagtcaattgagagggagataaac

SEQ ID NO: 34212 - DNA, 257 bp, Glycine max
  unsure (1)..(257): unsure at all n locations; Clone ID: 701107643H1
accattgcgangtccgggaccaaggagttcatggaggcattgcaggctggtgctgatgtaagcatgattgggcagttcggtgtggggttctacttctgcttacctcgttgcagagaaggtcattgttaccaccaagcacaatgatgatgaacagtacatttgggagtctcaggccggtggctctttcactgttactagggacaccgatggcgagcaattcggnaaggggaaccaagatgaccctcttcctcaaggaa

SEQ ID NO: 34213 - DNA, 252 bp, Glycine max
  unsure (1)..(252): unsure at all n locations; Clone ID: 701107644H1
aggaagtataggagcaatggaactcatggtggtttgganaatgtggaatatacctctnatagagaaattaggaggcgcttattaaagttgaacaaganatcnatggactcagagagngaaacatctgatgatgatcttnataagtcttatgaagatgggaagagtgacagtcatactacaacctctgactctgaaagtnaccgagaagtacattcagaaagtctaagtagggagtcaagaggggntggatac

SEQ ID NO: 34214 - DNA, 258 bp, Glycine max
  unsure (1)..(258): unsure at all n locations; Clone ID: 701107646H1
gtcttgttgctatctgaagctcttgctagcacacacccatttaaagtacaggttcataatgaaatgcaactnctgattcttttgaagggagctcaaattgtaaaatagtctacagatctggtttaagaattaatatatgaattgtagatttagattagctttctcttgatgggtggtaataatttcctgtcacctgtattaatgaatacttttgtacacacggtacatttgtgagtcttcaaatttnactcttatttt

SEQ ID NO: 34215 - DNA, 259 bp, Glycine max
  Clone ID: 701107647H1
caaattgctacatagcacacactccctcttctcttctacggttatggcgtccacgttgggcacttcttcaattgcggttcttccttcgcgctgcatctcttctttttcttccaagccttccattcacacactctctctaacttcagggcagagctatgggcggaaattttatggaggaattggaattcatggcatcaagggaaggtctcagctctcagttgccaatgttgccactgaagttaactctgtagaacaggcc

SEQ ID NO: 34216 - DNA, 260 bp, Glycine max
  Clone ID: 701107648H1
ttagcaataaccaaaccctctctactcttttttcttctccttctcttcgctagggttttagcttcttcctcttcacttcgttctttttcgcctctacaatgagcaacgacaaggacacattcaacgtcgccgatctcacttctgctctcaacgaggacaatagagcagaccttgtcaatgctcttaagagcaagatacagagtttggctggacaacactcggatattctagagtctctgtcgcccaatgtccgaaagcgt

SEQ ID NO: 34217 - DNA, 265 bp, Glycine max
  unsure (1)..(265): unsure at all n locations; Clone ID: 701107649H1
aaacgaagaacataaacatttttttgctaacgcagtgaaactgcaaaaacactaggctagttaacactctctatggctngtgcccaattcctgaatctcttcaactcctcttnangatcttccttggtcaagccctctaggccacttctctacaaccccattaagaattangggcaagcaagcaaaggaaagcatagccgnttgatggaagagagggnnccttccacagctgaagaatttgagaggttgccgaggagaaggccnc

SEQ ID NO: 34218 - DNA, 240 bp, Glycine max
  unsure (1)..(240): unsure at all n locations; Clone ID: 701107650H1
acaacacaacacttgttttcttaaacagttcaaactgtctganttttgcagaatccacggaactaagaatgaaattgtagaagaagaagcactttcacagaaaacatgaaagggtaggtcctcatgcccctttggtttcaaggggaaagcttcctccttcgttggcagtagtggatgccttgccaacatgctcttcttatttctctagaaccacggtcctatacccattaagatgcagac

SEQ ID NO: 34219 - DNA, 256 bp, Glycine max
  unsure (1)..(256): unsure at all n locations; Clone ID: 701107651H1
atgggatatcacttgaaggtctacataagaggttagaggctggtaacctggaccccagagaactagccactgcnttagagggtcagaagaaggactttccaaatggtattgatgaatgtggtgccgatgctctccgttttgcactggtctcgtacacagctcagtctgacaaaattaacctagatattcaaagggtggttgggtatcgccaatggtgtaataaactgtggaatgcagtacgatttgctatgagcaa

SEQ ID NO: 34220 - DNA, 125 bp, Glycine max
  unsure (1)..(125): unsure at all n locations; Clone ID: 701107652H1
ccaagtttcatcctcttctgggttgtcttcaaacttttagtctagtgcagtgtcagtgtcaccncttccacanaacatacnantttnncnaaaggnggnagtgctgccnnncccagnnaaanaca

SEQ ID NO: 34221 - DNA, 255 bp, Glycine max
  unsure (1)..(255): unsure at all n locations; Clone ID: 701107653H1
caaaaggagagtgcaataactcgttgtacattcctagtgtgtgggagagacatggctaagatgtgtgtnttggtgttggttcttgctctggctgtggccacaagtgccagaaacgttcccaaccccaaggatgctggtcttaaggaccagaagaacttcatcagctatggtggagttggtggttattccgggattgggaacaatggactgccttttggaggagctggtgccggaataggtggtngtnttcgcggc

SEQ ID NO: 34222 - DNA, 253 bp, Glycine max
  unsure (1)..(253): unsure at all n locations; Clone ID: 701107654H1
aagcaatatagtttgtttaantgttgcttcatttctattgtgtgaatggcatttgggaagttcattatgaatataggggtagtggcaatggttctgggtttatggattcgngttggatttgcacaacaagtaccttgctactttatttttggagactctttggtggataatgggaacaacnaccagctnaactcactggctaaggctaattatctcccttatgggattgacttcgctggtggcccaactggaa

SEQ ID NO: 34223 - DNA, 194 bp, Glycine max
  Clone ID: 701107655H1
accgtaccagagaacaaggaaggatagaagaaagtgaaagaaaatggcgttgtacatggacgaagaagagatttggaagtgtccgaagcatccatcaaagagaagaagaagcggaatttgccctacttgccttcgagaccgtctcgtaactctttgccctgactgtgctaacgtgcgcccctgttcctgctacg

SEQ ID NO: 34224 - DNA, 255 bp, Glycine max
  Clone ID: 701107657H1
ctttttcttcttcgttgggtttgttgccacttagtaagaaagaggctgtgaagagagtggggagaagatttggtgttgtggccatggcggagtctaagagtactgtgcttgttacgggagcgggtggtcgcacaggacaaatagtttacaaaaaattaagagagaggccaaaccaatatgtggctagaggtctggttagaacagatgaaagcaaacagaacattggtgctgcagatgacgttattgttggggata

SEQ ID NO: 34225 - DNA, 256 bp, Glycine max
  unsure (1)..(256): unsure at all n locations; Clone ID: 701107659H1
cgggagggtgaagaggagttgtcatctgaagatggaggtggatatggcaacaattccaacaacaagagcaactcaaagaaggcacccgaaggtggcgcaggtggagcagaagagaatggggaagaggatgaagacgaagatnnnnnnnnnnnnnnnnnnnnnnnnnnnnnnnnnnnngacgatgatgacgaagaagatgagggaggtgangaagaggatgaagatggtgctgaggacgaggagaatgaagaggatg

SEQ ID NO: 34226 - DNA, 253 bp, Glycine max
  unsure (1)..(253): unsure at all n locations; Clone ID: 701107660H1
tgatgttgtccttgtnggtggttctaccagaattcccaaggttcaacaactgctgcaggacttctttaatggaaaagagctttgcaagagcattaatcccgatgaggctgttgcatatggtgctgctgttcaggctgcaatcttaagtggtgagggcaatgagaaagttcaggatcttctcctcctggatgtcacccctctgtctcttggtttggagactgccggtggtgtgatgactgtcctgatacctagg

SEQ ID NO: 34227 - DNA, 257 bp, Glycine max
  unsure (1)..(257): unsure at all n locations; Clone ID: 701107662H1
atcaattctccaaatacctaatatggagtttcacattcttcccatcattacttttctcatgcttgttgtggcaactaatgctgatgctgcattacctcctgcattttactggaagtccaagcttcctaccacaccaatgccgaaagccatcactgatttgctacaacctgattggaaggnagagaaagacacctctgtggatgtagggaaaggtggagtaaatgttggtgtagaaaagggaaaccaaggaccaggag

SEQ ID NO: 34228 - DNA, 260 bp, Glycine max
  unsure (1)..(260): unsure at all n locations; Clone ID: 701107663H1
caaaaccattggcgccaacagttgtttgtttcctctaccatccaattacgcttctctctgcctctacgtaaataaaaatatggctctcatattccaagccaataaccccaaaaaaccaatggcatcgctaacagcggggtttcaccgccacaacaaccaccgnagccattcttcttctgcgtccaaaatcataatcttcttctgcctctctgcctttctcggcctcgccatcatcgccaacctcttccgcgcctccctct

SEQ ID NO: 34229 - DNA, 127 bp, Glycine max
  unsure (1)..(127): unsure at all n locations; Clone ID: 701107665H1
aanagtctctgtnttgtgtctgtctgctgagtgctgagagacaatggagctgtgcacncgaaccttcgnaagtntcttncttttcaanccgtcttcctcttcaaancccctgtttcttcgtcctaat

SEQ ID NO: 34230 - DNA, 251 bp, Glycine max
  unsure (1)..(251): unsure at all n locations; Clone ID: 701107668H1
gagagtgtggtaaaagcaatatatactggttctgagtttgttgatactgttaataccggtgatgatattggtgtagttctggagtctacaagcttctatgctgagcaaggtggtcagatttttgatactggatcacttgagggcccacatgctttatttgaagtgcgtaatgttcaagtttatggaggctttgttcttcacattggtaatgggactggtgtctcagttggcgacaaagtagngtgnaggtt

SEQ ID NO: 34231 - DNA, 252 bp, Glycine max
  unsure (1)..(252): unsure at all n locations; Clone ID: 701107670H1
tttttacaattgtaatagaataagttaggaaagagaaagaataagggttaatttggcctaattgaaattcggagtgaaactcgggatctcgtccaggcttccatggaattgaattaataattcaattccatttctattaataaaagagtgaaagcngaaatttaaatggaatgtatagggtgggggcaacaatatcataaaanatacttagttaaaaaaacgaaaatactgtattgcaattgtattgcaatc

SEQ ID NO: 34232 - DNA, 253 bp, Glycine max
  unsure (1)..(253): unsure at all n locations; Clone ID: 701107671H1
gaaacaatgaacgacttgttctccggttccttctcccgcttccgcagcgaccagtcctccccggaccgccaccacgacatcgagatgggcgccaccgcctccggcntcggtcgcggcggcgaggtgaancttgacaagttcttcgaggacgtggaaggcgtgaaggaggaactaaaaacnaaggaaggtttggctcagagtctaaggagcagccacgagcagagcnagacgctgcacaacgcgaagcggtgag

SEQ ID NO: 34233 - DNA, 248 bp, Glycine max
  unsure (1)..(248): unsure at all n locations; Clone ID: 701107673H1
gttgctgtcatcatccgcagctgntgtnantcgcaccgcaaacaaacagtgagccatggccgtcggaaagaacaagcggcatctccaaagggaaaaagggtggcaagaagaaggcagctgatccctttgccaagaaggattggtatganattaaggccccttctctttttcaagtgaaaaatgttggcaaaaccctcgtctctcgtacccanggtaccaagattgcttctgaaggactcaaacataga

SEQ ID NO: 34234 - DNA, 251 bp, Glycine max
  unsure (1)..(251): unsure at all n locations; Clone ID: 701107676H1
ctctctgtttcattcacaattcaaacctcaatcgncatgtctgaccnagaaggtggcaaagggtctccaaagtctcgtctttgggtccatatgaagaagccatggangccttgtcgtctttgatcactagacgcactcgtgctgatgatagcaacgtgggggatcagtttagcctgttatatgantacctgaagatgctagatttggaggagccaattgcaaatatgaagattatccatgtggctgggacc

SEQ ID NO: 34235 - DNA, 254 bp, Glycine max
  unsure (1)..(254): unsure at all n locations; Clone ID: 701107677H1
gcaactcttggcttgcaagcagttcgtcctcctccattaacgtccacttccgatcccaccacctctttttgatggcaccaccaggttgtacatcagttatncctgtccctatgcacaacgagtatggataactaggaactacaaggggcttcaagacaagatcaaattggtccctattgatcttcaagacaggccagcttggtataaggagaaagtctaccctgaaaataaggtgccatccttggagcacaatg

SEQ ID NO: 34236 - DNA, 248 bp, Glycine max
  unsure (1)..(248): unsure at all n locations; Clone ID: 701107679H1
canagagaanatatccccgttaagataagatgatgatgaaatcatcatattctnccatacctttctatattattcctattntnccttctccttgtggataaatccctctccaaatccggtgcacgtntttctctaaccagagcagtnttcatgccgcaccacccagtgattggtggttcccaatgggatcaaaccgtggagaccgtggaacagcaagagtctgctccanaaccaacgaagcaaatcaa

SEQ ID NO: 34237 - DNA, 259 bp, Glycine max
  unsure (1)..(259): unsure at all n locations; Clone ID: 701107680H1
gcaaaagcaatccactcanagagctagaaganttcaacaatgcctcgctangatgataaatacggcaatacccgcctctatgtgggacacttgtcttcgaggactcgttcccgtgatctggagcgtgcctttagcagatatggaagagttcgaggtgtgggatatgaagaatgatttcgcttttgttgattttagtgatcctcgagatgctgatgatgcaagatataacctggatggtcgggatgttgatggaagtcgg

SEQ ID NO: 34238 - DNA, 261 bp, Glycine max
  unsure (1)..(261): unsure at all n locations; Clone ID: 701107683H1
gccggtgcgcggcagcaacatccacgggagggctgatgaacaaaatgaccgggcgcatcggtgacttcgccgctgataggcgccgggacctacgcgtgcgacgtgtgcggcgtatcgtgcacgggtgnacgcnaggccatcatacgtgggcacgctgggcgcgtgnggtgtcagcggtggatggaataacaaaggcttgaagcttcaagaagccgtggattttgtgattcaagcaccgtctcgatgaagggatggcnggtc

SEQ ID NO: 34239 - DNA, 254 bp, Glycine max
  unsure (1)..(254): unsure at all n locations; Clone ID: 701107684H1
gctcgtttcattttagggtttcgcgtcgcaaaatctcttttctgttgctctcaatcataatcttgttgtttttgctttaatngtgttccagatgcgtgattttggaggccaaagaagctgaggacaaacatctactgttagtgcattctgaaaatcatgttaatctgattaagaacatcagctcaaagcagttcaattcgcggaggcataagattgcctcaaaattggattccatatatntnnatgaaggttct

SEQ ID NO: 34240 - DNA, 259 bp, Glycine max
  unsure (1)..(259): unsure at all n locations; Clone ID: 701107685H1
ttcatttccaaggggaaaaggagttctggtaagannatccattggataatgttacgccttntgtctcaanagtnaggatnagctaatgatnacctatccatctcctcctacgagannatgangttgcacccanaagggaacctcntcacaggnataaccagacactggaatgaantcccancttantgatcncccanttgttggacaagaanaatcctnatgcttnatctngtgggcaagtttcccataacgatgcagc

SEQ ID NO: 34241 - DNA, 252 bp, Glycine max
  Clone ID: 701107686H1
gaggcactgtggcagaagtcctaggagtgtaaaacagagacgcaaaatgaagacgatcttgtcgtctgagaccatgaatattcccgacggcgtgagcatcaaggttcacgctaaggttatcgaggttgagggccctcgtggaaaactcgtgcgagacttccaccatctgaacttggacttccaacttattaccgacgatggcggtaaaaggaagctcaagattgattcttggtttggttctcgtaaaacctc

SEQ ID NO: 34242 - DNA, 254 bp, Glycine max
  unsure (1)..(254): unsure at all n locations; Clone ID: 701107687H1
gnccatcttcagtcgnaacattgccatccagttgatcagtgccancaagactgatggacttggaaatgggaaagttgnaaagcaaacctatttggagaaacatcttccttcgttacnaaccttgggaganaggcaagatgnattcagcgtttattntgaatgggataatgattttngaattccaggagcattttacatnaaaaatngtatgcaatctgaatntttcctcgtgagtnntcactcttgaagacatt

SEQ ID NO: 34243 - DNA, 254 bp, Glycine max
  unsure (1)..(254): unsure at all n locations; Clone ID: 701107688H1
gagcactagctaagttcacaatttcaaaatggctaggggactaaagaagcatttgaaaaggctcaatggtcctaagcattggatgcttgacaaactgggtggtgcatttgcgcctaaaccctcatctggaccacacaaatcgaggnagtgcctccccctcattcttattctggcnaaaccggctgaagtatgctctgacataccgtgaagtcattgctattctgatgcagcgccatgttcttgttgatggcaaa

SEQ ID NO: 34244 - DNA, 253 bp, Glycine max
  Clone ID: 701107689H1
tcaagattcagcaagtgcgtttcggaagcagagaccgaaatacttcgagatggcccgtacaaagcaaactgctcgtaagtcaactggaggaaaagctcccaggaagcagcttgcaaccaaggctgcacgtaagtctgctccaacaactggtggtgtgaagaagcctcatcgttatcgccctggaactgttgctcttcgtgagattaggaaataccagaagagcactgagctcctaatcaggaagcttcctttc

SEQ ID NO: 34245 - DNA, 254 bp, Glycine max
  unsure (1)..(254): unsure at all n locations; Clone ID: 701107692H1
caggtgtactgaatgattctaaagcttcanttgangtgcttgcntttgctgctatttctttgggcttgatgctatgtggggtctggcaatgaagaaattgctcaagcaatnanatatacactaatggaccggagtgagtctcagttgggagagccccttacacgactnttaccttctcggtcttggtcttctatatcttggaaagcaggacatgttgaggcaacngccnaagtttcaaagactttcaangaaaa

SEQ ID NO: 34246 - DNA, 249 bp, Glycine max
  unsure (1)..(249): unsure at all n locations; Clone ID: 701107693H1
cgaagataccttctttcagcctcccttcaacacccttttgncccnttattcttcaaagtctcanagcaaagctcgaagacctgagaagaacaaagggtgattaaattctgtgtggttgtgttggaggttgaaacacaagttgccaccccaagtgtgtgttaatcttaaatttcacaagcaagttgcttttttggagtattcnattgtatgaccaaatattttgtgtttaggactagatattttgcttct

SEQ ID NO: 34247 - DNA, 254 bp, Glycine max
  unsure (1)..(254): unsure at all n locations; Clone ID: 701107694H1
canttatacgtnttggnattctcttggatttncgtttgatggggttggaggatactgaatttgcgtgaaataggtcgtggctttttctttggtggtttgaggttgagctaggtggtgattactangtgtttgtnaatatgcatganaganaaagagagaaaataattgatagattcagagagagaaggatgaaggagactgtgatagtgtcaattctggtttaggagtgtgtgtgaggttaaaacataattaga

SEQ ID NO: 34248 - DNA, 255 bp, Glycine max
  Clone ID: 701107695H1
tcgagataactagaaacagtgtgatgaaaatgaaggtccttgttttcttcgttgctacaattttggtagcatggcaatgccatgcgtacgatatgttccctctccgaatgaacactggctatggtgcccgtactccggaggtgaaatgcgcaagttggaggcttgctgtggaagcacacaacatctttggctttgagaccattcctgaagagtgcgttgaagcaacaaaggaatacatccatggcgaacaatata

SEQ ID NO: 34249 - DNA, 262 bp, Glycine max
  unsure (1)..(262): unsure at all n locations; Clone ID: 701107696H1
atcaactggtnntcaataattgtaatatangntcanataaggncacatgggnnaaacttacacaattattgagcatatnntanaatgttttcaattcagaaaatngnatatatacactggatgttgaaattttttgaattcacatataagtgaagtgtattggaatttgcnaatntcattgtcattgaagatactatggggaaacatatttnatganngtntgatgcangtnctttttctttnaactggnanggcctangcc

SEQ ID NO: 34250 - DNA, 285 bp, Glycine max
  unsure (1)..(285): unsure at all n locations; Clone ID: 701107701H1
aagctgttgcttatggtgctgcagtgcaggctgcgattctcagtggcgagggtaatnanaaagtgcaggatcttcttttgttggatgntactcctcnatccactggtttggagactgcaggaggagtcatgactgtgttgattcccagaaacanaagcattcccaccaagnnggagcaggtgttctcancctactctggngaaccagcccggngtgttgattnaggtctangaaggtgaaggaacgaggttcgtgacaacaatttgcttggcaaatttgagttnt

SEQ ID NO: 34251 - DNA, 282 bp, Glycine max
  unsure (1)..(282): unsure at all n locations; Clone ID: 701107702H1
gtcttgggagggcatcaatcattgtatncatcctctcaggtgtcatttttgctagcgccctcaccatgggtgtcgttggcattgagaacagcattcaaatgataaacaaccatgagttcatgggattcttaggcttctgttccagtcagtgatatattttattctagagtgcactgcattgggcatagtaaacaaaaagaaaaatccaaagttggtgtgaaaaaaagcttgtaaaattaagtgtgtaggacaatgacactaacaaatgttggtcaatgccta

SEQ ID NO: 34252 - DNA, 282 bp, Glycine max
  unsure (1)..(282): unsure at all n locations; Clone ID: 701107703H1
gtagtggaagaatcactcccttatccatttccacacaacataagagtcncgagnnagggggatntnttgagnctnnattcgangctntntnaaangggagtctntgnnnccgaagagcgaaccatnatggaagagtaanttaccggaaaccgaataaccgtttctccgtgaaagcctccgccaaagagattgccttngaccagcattcccgctctgntatgcaggccggcattganaagntcgccgacgctgttgggntnnatcttgggcccagagggagga

SEQ ID NO: 34253 - DNA, 279 bp, Glycine max
  Clone ID: 701107705H1
gaagctgttgcttatggtgctgcagtgcaggctgcgattctcagtggcgagggtaatgagaaagtgcaggatcttcttttgttggatgttactcctctatccactggtttggagactgcaggaggagtcatgactgtgttgattcccagaaacacaaccattcccaccaagaaggagcaggtgttctcaacctactctgacaaccagcccggtgtgttgattcaggtctatgaaggtgaacgaacgaggactcgtgacaacaatttgcttggcaaattt

SEQ ID NO: 34254 - DNA, 278 bp, Glycine max
  Clone ID: 701107706H1
tgggtattgatcttccaccagagaaggtttttttatttcaaaaatctgccctttacaagtgtaatatggctgggaaacctgctgttcttacacgtgttgtggatagcatgactgacaacttgagaccaactcgtgctgaagcaacagatgtcgccaatgctgttttagatggaagtgatgccattcttctgggtgctgagactttacgtgggttgtaccctattgagactatatctactgttggcagaatttgttcagaggctgagaaagttttcaat

SEQ ID NO: 34255 - DNA, 276 bp, Glycine max
  Clone ID: 701107707H1
attaagtgttaattaaccatcgatcatgatgaggagcaagaagcagagccagaacaagtttgttcgaatcatggcatcaccaatcagagcactgggaaaagcacgtgacatgtacgtgcggagataacgaactgcggccagcacgtgagctactacggcggcgaccccacagaaggcgcgggaaggttctcgaggagccacagcgtggccacgtcgacgaggtccgaggttgtcagcgaggattatgcggacttctcagggccgcgtccgcgagaa

SEQ ID NO: 34256 - DNA, 277 bp, Glycine max
  Clone ID: 701107708H1
gatcaagggcatgtactactccatcaccttcatggtggctcgcacgtgtgcacaagaggagaggctcaacatttccgtcactcctgattggggtgtgattcctattcagactttgtacacgagcagtggttgggatcccattgcgttcgggtttaaggcagagagtgaaacgctggagatgctgattcataaccctggaaaagaggaggatcccgcgtgtggcccgcttgttgattccgttgctctcaggactctctaccctcccaaagctactaac

SEQ ID NO: 34257 - DNA, 280 bp, Glycine max
  unsure (1)..(280): unsure at all n locations; Clone ID: 701107709H1
agcgacgactgacgtggtggattgtggaaacgcaaagagcaattgttccgagnnnnnnnnnnnnnnnnnnnnnnnnntcaatgtctcatcaggagcnagcctttgtgtctcttctctctcagctcgccctttctttcgacggtgccgttttgggcttggccttggcctacgccgccgtccgcaccctcttcaaattcaccgccacctctgccgccctccgcaagctccaccgcgccccttctgtctccgtctccgacctccgatccctcctcgccgagat

SEQ ID NO: 34258 - DNA, 279 bp, Glycine max
  unsure (1)..(279): unsure at all n locations; Clone ID: 701107710H1
gagacgtcgaagaccatctctgccgcactgaaactcttcgacgcaaagaaagagantctcaagaaagcctactacgatctccaaagtcactcctctcttctcgctccttccttctctctctcatggtcccacctcgacgcccacttcacctccctccanacctccctctcacaccgcttccacctccttcagtccctcgaatcccaacaacaatacccaccatcctctccctccaaatacctcagctttccaccctcccccaccgacccatcatcgcaa

SEQ ID NO: 34259 - DNA, 276 bp, Glycine max
  unsure (1)..(276): unsure at all n locations; Clone ID: 701107711H1
cacctccttagtttcgaaagcatggcttccctggcggcttccaccgcggctatgtcagaaatccttggaaaccccgttaacctcagatgcgcaaccaggtctgctccatcaccaactacacctgccaccttcaagaccgtcgcacttttctccaagaagaagccagctccacctccaaagaaaaagcntgccgctgtatcccccgccaatgaggaactcgccaagtggtatggtcctgacagaaggatcttcttgcctgagggtctcttggaccga

SEQ ID NO: 34260 - DNA, 276 bp, Glycine max
  unsure (1)..(276): unsure at all n locations; Clone ID: 701107713H1
gggcttggtggtgatcccagcttgggggcaggaatgtattcatctgaagctacattggcagatttgcctggtcttatagaaggtgctcacttaggaaagggtcttggtcgcaattttttgaggcacctcaggaggacccggctattggtccatgttgtggatgctgccactgagaatcctataaatgactacagaactgtcagagaagagttacgcatgtntaatcctgagtaccttgaacgaccatacgttataattttgaataagattgaccta

SEQ ID NO: 34261 - DNA, 280 bp, Glycine max
  unsure (1)..(280): unsure at all n locations; Clone ID: 701107714H1
ctccttcttcaatggtcttagggtttccggtgtccatgcgtanannctcgcagtaatgcgcttttgaaacccgtgttcatctgtatccaacgatttactagaaggaggtcgcaatttctccatcttcacatttcgctagcacgtgaaatcaaaagttatcgacactttcgcgcgacacgaaatattgggaaccaagcaaaatatctatggctgacgaaccattatatccaatagcggtgcttatagatgagttgaaaaatgatgacatccagctgcggtt

SEQ ID NO: 34262 - DNA, 281 bp, Glycine max
  unsure (1)..(281): unsure at all n locations; Clone ID: 701107715H1
ctcctttattcagttcctcttctcacactggtcaagatngtctatcttgatcatgggtttcaattctgtctatagaaacttgcaggagatatttccgcaggttgatcccaggctactgagggctgtagctattgaacacccaaaggatgctgatctagcagctggaatagttcttgcggaagtcatcccgttcatgtccaaaaaactacctgctgcaattcctccacagcacaatgaccatggagccccactagatgttgaagttgaaagtgaggaagaag

SEQ ID NO: 34263 - DNA, 284 bp, Glycine max
  unsure (1)..(284): unsure at all n locations; Clone ID: 701107716H1
ccaacaccggcacacccccgaacacttgttcgacacttgtttgacacttcttattaggtgtttggctcaaatattactttttgtnggcttaaacacttaagccgtcacatttacacaactaatatactcgtaaaaacatagaaagttggttttaaaagatgaatataccatcaatttagattattttgttatatgttattcctatttcatttaactataatctctttgtttgtgtgtgtatgtggtgttcccatgtcgtatattttagacattataactgtgtt

SEQ ID NO: 34264 - DNA, 275 bp, Glycine max
  unsure (1)..(275): unsure at all n locations; Clone ID: 701107717H1
cggtataccagttacaaggcttggccanaaatganaaagaaagattgattggacttggtgacagattgcacagcagagttgtaggacaagaccaagctgttaatgctgttgctgaggctgtgttgagatctagagctgggctaggaagacctcaacaaccaactggttcattcctattccttggtccaactggtgttggtaaaactgagcttgcaaaggctcttgctgagcaactatttgataatgaaaatcagttggtgagaattgatatgtcc

SEQ ID NO: 34265 - DNA, 280 bp, Glycine max
  unsure (1)..(280): unsure at all n locations; Clone ID: 701107718H1
catggctaccttctggtgggcccattcgtgaaggccgggcctctgaggaacaccgagatcgccgggcaagcgggctctctcgccgctggtgggcttgtgntgatcctcagcctttgcctcacaatctatgggatttcatcttttaacgaaggagacccatccactgccccgtcactgaccttgacgggccgcaagaaggagcccgatcagctccaaactgctgatgggtgggccaagttcaccggaggcttcttcttcggaggcatttcgggtgttattt

SEQ ID NO: 34266 - DNA, 278 bp, Glycine max
  unsure (1)..(278): unsure at all n locations; Clone ID: 701107719H1
tgtaaatcaaatatgggccctttccgcattcgtttaacatatactcacacaaaagggaatgataaatcttccgattgtgctgctganacttgcaaganaaganaaataggtnatccaagcatagttngagatagatcttttagcagtacacttgaaaatgattcctctgactgctgtaaattcannctagannaggcaaatgagccttgccattttacttacagttgctacaggacgcctttctattttggtggaagatacctaaagtattcacggaa

SEQ ID NO: 34267 - DNA, 277 bp, Glycine max
  Clone ID: 701107720H1
ggcgcatgcagatgctaagcgtttgattggaaggcgtttttccgatgcatcagtacaaggtgacatgaaattgtggccgttcaaggtgattcctggccctgctgagaaacctatgattgtggtgaactacaagggggaggagaaacagttttccgcggaagagatatcctccatggttcttatgaagatgaaggagattgcggaggcgtatctaggttccaccataaagaatgcggttgtcactgtgcctgcttacttcaacgactcacaacgtcaa

SEQ ID NO: 34268 - DNA, 277 bp, Glycine max
  Clone ID: 701107721H1
ggtcaattcagcaacaaagaatgcaaaggagccgtggaagcatgtgtttcatgttgtgaccgataagatgaaccttggagcaatgcaagtgatgtttaagttgaaaaattatcatggtgcacacattgaggttaaggctgtggaggattacaagttcctgaattcatcttatgtgccagtcctaaaacaattggagtctgctaaccttcagagattttacttcgagaacaagcttgaaaatgctacaaaggacacaaataatatgaagttcaggaac

SEQ ID NO: 34269 - DNA, 285 bp, Glycine max
  unsure (1)..(285): unsure at all n locations; Clone ID: 701107722H1
cccacacacgcgcgcagacgcagagtgagtgggtaaagcaaaatcanncaagtgttgttcctccctggnacttgctcnnnnnnnnnnnnnnnnnnnnnnnnnnnnnnnnnnnnnnnnnnnngatttccgcattcattcaatggnnacttacaacactctctctgctcccaccctnccactcctccctgcttctgcggcaacctccatctccgctcccacaacagcttcctttccatccattctccttcttcttgttcttccctttccttccttctgcctcaattt

SEQ ID NO: 34270 - DNA, 159 bp, Glycine max
  unsure (1)..(159): unsure at all n locations; Clone ID: 701107725H1
acaattcttcgttcgttctctgcagttatatcctttttgagcttcaatggcggacgctgaaaccttcgctttccaggctgagatcaaccagcttctaagtctcatcatcaacacattccacacaacatacgancaagcgnnagggggacgcgctganaa

SEQ ID NO: 34271 - DNA, 274 bp, Glycine max
  unsure (1)..(274): unsure at all n locations; Clone ID: 701107726H1
ggtgcccaaaaggttgggcaaaagcggggtaggttgaatgttgaagatgatgattcacagccaagaaagaaggtccgtttagggattcctgctacacaatggatttcaatttacaatgcaagacttccaatgaaacaaaggtaccattacaatgtgtctgatgcaagattagtacagcatgtcgtnngaggggttgcagatggccttcttattagttgtgtgtcttcttgttgcaatctttgggcccttattatggatgctggaactggtttta

SEQ ID NO: 34272 - DNA, 271 bp, Glycine max
  Clone ID: 701107727H1
ctcaaacctgaaaatgtgttggtccgagatgatggtcacataatgctatcagattttgatctttccctcagatgtgctgtgtcacctactcttattagaacttcctatgatggtgacccttcaaaacgggcaggtggtgcattctgtgttcaacctgcatgtattgagccatcatcaatgtgcatccaacctgcatgttttattccccggttatttcctcagaaaaacaagaagtcacggaagccaagagctgatcctgggttgccgtcca

SEQ ID NO: 34273 - DNA, 274 bp, Glycine max
  Clone ID: 701107728H1
ctccttctctctgagaacaacaccccacactcctctctctctctccgcttccttctcttctcacacctccatggcccacacttcccttccctccgccgatgccggcatggacgctgtccagcgccgtctcatgttcgaagacgaatgcattttggtggatgagaatgaccgtgtggttggtcatgattcaaaatacaattgtcacttgatggaaaagattgaagctgagaatttgctgcatagagctttcagtgtattcctgttcaactcaaag

SEQ ID NO: 34274 - DNA, 277 bp, Glycine max
  unsure (1)..(277): unsure at all n locations; Clone ID: 701107729H1
aaaaaattacantatagntgtttatgatataagnnaatttatatatgaanctgtcaacaannaacgactgttctttacatgggaaaancactaaatcatactgattggggaatggatattttgtgtcaaaaccgtattatacagatagatactaaccacatgtatccaaaatattcacgcataaaaaactttagtatgccctttttatcaattgtgttaataaaggttctctgcccctttgctacaataaatgtatgttcaggtaaggatgtgtttt

SEQ ID NO: 34275 - DNA, 278 bp, Glycine max
  Clone ID: 701107730H1
aagtttatttcctctgatcgtgtggtttctgagttctaagcactcacctctttcatacacgtttgttcgcttgttgagaagccatgggcgaggatttcgagttcccaagtgctggcaacatggaaatgcctgaggaggaagagtttgagagtccgatcctgaaggttggggaggagaaggagattgggaaaatggggctgaagaagaaattgctcaaggaaggtgaaggttgggacacccctgacagtggagaccaagttgaagtgcattatactgga

SEQ ID NO: 34276 - DNA, 281 bp, Glycine max
  Clone ID: 701107731H1
agtgaatattaattgataaattttaatatttattttgactagtttacaattatgttttttctttttattgtagatagtttataatgagataaaattataattgttaaaaaaattgaaaacctaaattattgtaggcagaaaaggcaaaactgttataacaaatatagtaatgtataccttattgacataatataacatacggcgcacgtgttcaaggccgatattcccgggctgaagaaggaggaagtgaaggtgcagattgaagatgataaggtgcttca

SEQ ID NO: 34277 - DNA, 283 bp, Glycine max
  unsure (1)..(283): unsure at all n locations; Clone ID: 701107732H1
caacaaacaacatcgtttcatatatagtgagtgagagaatctaccatcaaccatgtctgatattgctatgttggtagcagaagaatatgagaggaggacaatgaattttaagaaggctggcgctgtacaagagaggaacttgaacgtggtttcttgtgcttctttgttggttctgaaggagaagattgaggtgcagaagaaggagcttgtcaagtnggttttggaacccaaaacccaatttgcaattgctgcttctaacagtttcttttctgcttgaacaact

SEQ ID NO: 34278 - DNA, 265 bp, Glycine max
  unsure (1)..(265): unsure at all n locations; Clone ID: 701107733H1
aagaaaagnnaagccanccaaaaatggttctcacatccactgccacacacccagatgaancaagaccagagcctaaactatacttttgcttccagatatgtgcgtgaacctattccaaagttcaagatgccagagaaatccataccaaaagatgccgcttatcagataataaacgatnagttgatgttggatggtgcaccaaggctcaacttggcctcgtttgtgaccacttggatggagcctgagtgtgacaagctcataatgg

SEQ ID NO: 34279 - DNA, 279 bp, Glycine max
  Clone ID: 701107734H1
cttcacttttaagttaaatagtttttcattgtttcatttaatctacaatggctgcttcaacaatggctctctcttcatcatcattggctggccaagctatcaagcttgccccctccacccctcagcttggtgttggaagggttagcatgaggaaaacagcctccaagactgtttcttctggaagcccatggtacggcccagaccgtgtcaagtacttgggcccattctctggtgagcccccatcctacctcactggtgaattcccaggtgactatggtt

SEQ ID NO: 34280 - DNA, 277 bp, Glycine max
  Clone ID: 701107735H1
gaagagagagtattgttcttaatttcttaatcctccgtcgtgggtggcgatgttgttcttctccggagcggattctcagatccatggagcaggctcatattattaagccaaagcctctcagatccgcggtggcggcgtgacggaaatgaagtcctcaagccgtctcttcacgatcggactggtgtcggcgtggtactcctccaacattggggtactgctcctcaacaagtaccttctcagcaactatggcttcaagtatcctatcttcctcaccatg

SEQ ID NO: 34281 - DNA, 277 bp, Glycine max
  unsure (1)..(277): unsure at all n locations; Clone ID: 701107736H1
tctctctctctcttgtttcatcgatgggtggcacagttgttgctgaagtncccacaaagaggggaaggggcagaagggccctgaagncagaaaaccccntcaacgnacgatgctaacatcatcatagccacaccaatttcgccatcatccgaatgcncggcacaagttgttccctcanaggnnaancnagattcaaagaagcngcnatctttcgggngagnnttgntggagatgcaggaaatgctgcagcagntgcgcctcgagaaggannagaccg

SEQ ID NO: 34282 - DNA, 276 bp, Glycine max
  Clone ID: 701107737H1
aaacactcataacacaaagcacaaagcaaagctcatccttgagttaaaaaatggcagcagcttcttccatggctctctcatccccatccttggctggcaaggccgtgaagctgggcccatcagccccagaagtgggaagggtgagcatgaggaagaccgtcaccaagcaggtctcctcaggaagcccatggtacggcccagaccgagtcaagtacttgggcccattctctggcgagcccccgtcctacctaaccggtgagttcccaggcgactacg

SEQ ID NO: 34283 - DNA, 276 bp, Glycine max
  Clone ID: 701107739H1
aaaccctacttctacttcccccctttgctctcaaaccttatcacctaatccttatcctcccaaaccagaaaaccatgtctacctccgcagcttccctcgcactcccaaccctcactctccgaacccgacaacctctatgttctccccaatgcttctcctcgtccctctccctcacacccaacaacaaacccatttccatttctgctgtttttctcaaaccaacaactctgtcgtcgtctcgcttcgttccccacgtcgtggtgtcgtcggatttgg

SEQ ID NO: 34284 - DNA, 274 bp, Glycine max
  unsure (1)..(274): unsure at all n locations; Clone ID: 701107740H1
ggtaaaactcccttcccaccactcccatcaanttttttccgataatggaagaataacatagacgtgnagctcttcctcctcccactccattgtgttgctactccttcaattcccaaaagcaatgtcagagcgagacatagcttgggatttccatctccgtaagctctctgctagcggcagagactccaacaccgccaacgatcctgcttccgattcatctcttcttccttcggtgaagaagcttcatgaaatatgcaagaacgagtactccgag

SEQ ID NO: 34285 - DNA, 274 bp, Glycine max
  Clone ID: 701107741H1
gttgcaacaaatattgctgaaacttccttgactgttgatggtgtagtgtatgttattgactctgggtatgtgaagcaaaggcagtataatccatctagtggcatgtattctcttgatgttgttcaaattagcaaagtgcaagctaaccagcgagcaggccgagctggacggacacgtcctgggaaatgctaccgtctatatccttcccgtatttacaatgatgagtttttggacgttacagttcctgaaattcagagatcttcccttgctggca

SEQ ID NO: 34286 - DNA, 277 bp, Glycine max
  unsure (1)..(277): unsure at all n locations; Clone ID: 701107742H1
ccgcggtgcggtgtggatgaaaatgggagtcngtgtccgaagaatctctgcggaagaggcccagaaaaataccctttctcccgccgattcatncttctcgcaagcaatttgaacaatattctggacngacatttgcatttacgggggaagtgaattttatgcaagatgatgatatccgtctggagattacccgaactaaatttggaagtttgcttaaaagacacggagatttgacagagcgtcttgctagggattctgacaagataatatttgagcg

SEQ ID NO: 34287 - DNA, 273 bp, Glycine max
  unsure (1)..(273): unsure at all n locations; Clone ID: 701107743H1
ccaattcttattctttttctctctttctctctgcttgcggtgcttcncaagccaaatctaacttgtctctgttttctnccgatctagtacnnactatcaatggncggaaaaggagatggtcctgctanccggaatcgatctcggcaccacctactcctgcgtcggagtgtggcagcacgaccgtgtcgaaatcatcgccantgaccagggtaacagaaccacgccgtcttacgtcgctttcactgattccgagcgtntgatcggtgacgccgc

SEQ ID NO: 34288 - DNA, 271 bp, Glycine max
  Clone ID: 701107744H1
gagaaattattaaaaaagcatggaatgaagcagacataattgaagtttcacgaagtgaactagaattccttctagatgaagaatattatgagaggaagagaaattataggccacagtactttgctgaaaattatgaacaaaccaagaatcgacaagagtattaccattacactgctgaagaagtctcgcctttgtggcatgatcgacttaaattcctgtttgtgactgatggaacacttggaattcactactataccccttctttcgatgg

SEQ ID NO: 34289 - DNA, 261 bp, Glycine max
  unsure (1)..(261): unsure at all n locations; Clone ID: 701107745H1
ggcgactatggttgccggaaacaaatccggatgggaaagggtgtatgtagctgttcctnggatganntattgtnnataacagaacggcgtttgaagcagtgacgtgttacatcagtacatcacatcacatcacgtaaatataggtaataagctcgganaaagttttgtcgtttcacacccatctgtntggccccnaccatttncanacaagatacgangtagngncagggngaagtnnngngtnggtgngnnaggnnnnga

SEQ ID NO: 34290 - DNA, 277 bp, Glycine max
  Clone ID: 701107746H1
ggatatgttccctctccgaatgaacactggctatggtgcccgtactccggaggtgaaatgcgcaagttggaggcttgctgtggaagcacacaacatctttggctttgagaccattcctgaagagtgcgttgaagcaacaaaggaatacatccatggcgaacaatatagatcagactccaaaacagttaaccaacaagcttacttttatgccagagacctcgaagtccatcccaaggacacatttgtgttcagtatagatggcaccgtactctctaat

SEQ ID NO: 34291 - DNA, 216 bp, Glycine max
  unsure (1)..(216): unsure at all n locations; Clone ID: 701107747H1
gaaagaaggagatgcatggcattggcctattgagagtgaaggaacatggtttcccacaataagccttannctgtagccaccctcttctttctcgcattgttccttannnnnnnnnnnnnnnnnnnnnnnaccagaacaactcttcaccccgctccctccatccactcagatctctacatccacctccagccactttctccgcctccgcccctccaa

SEQ ID NO: 34292 - DNA, 280 bp, Glycine max
  Clone ID: 701107748H1
ctccaacatgccaaacgacagcgttctgagtcttttcttcttcgttaccctcttcacatgccttctctctgctacttcccacgatgaccatattttcctaccgagtcaactccatgacgatgactcagtgagttgcactgcaaccgacccaagccttaactacaagccggtgatcggaatcctgacccaccccggcgacggtgcctctggccggctcagcaacgccaccggggtttcttacatcgccgcctcctacgttaaattcgtggagtccggtggt

SEQ ID NO: 34293 - DNA, 279 bp, Glycine max
  unsure (1)..(279): unsure at all n locations; Clone ID: 701107749H1
cancccaganancgcgtcttaataaacgctcttctctgaaaacccccatttcttttgcttctttcttcgtctctttcgcttcttcgatcttcgatcttcgtcgctgaaaatgagagagtgcatttcaatccacatcggccaggccgggattcaggttggaaacgcctgctgggagctttactgcctcgaacacggcattcagcctgatgggcagatgccaagtgacaagaccgttggtggaggtgatgatgctttcaacaccttcttcagtgaaatggg

SEQ ID NO: 34294 - DNA, 277 bp, Glycine max
  unsure (1)..(277): unsure at all n locations; Clone ID: 701107750H1
aaaggattctacccgccgctcgatgggaattgcgcttcaaggcgtctcgtagggctaatccgcctcacgagggtcaccaacggcacgtgcctttggggggccgaggccccctactgctggtcggcnnacggacggcgggcgcacgcgtcgcttctagcccggattctgacttagaggcgttcagtcataatccaacgcacggtagcttcgcgccactggctttncaaccaagcgcgatgaccaattgtgcgaatcaacggttcctctcgtactaggt

SEQ ID NO: 34295 - DNA, 217 bp, Glycine max
  unsure (1)..(217): unsure at all n locations; Clone ID: 701107751H1
aaacgttaattaattacaaggcttatgtctattttcagtatttttgacatcttcgttctcctgatttttgttggctttaactttaaaccaccaattctgttccccttgtttcttcatcattagattttaagtgccatgcattgatataatataaatatataacttcatttaattaatgcaagcnattgagttttgagtcgaatctattagccacaaa

SEQ ID NO: 34296 - DNA, 275 bp, Glycine max
  Clone ID: 701107752H1
ctcccacgacaacgtatcacaagctcccaatatagcaagcagcaaacatgatttcttccgtgtcctttccagcgtctcttcccgccgttaacttctccggcaacgccatggcttcgccgtcgtgccgcgtcaaatcccggccaatagtcgccttcgccaccgccactgccaccgctgaagctcgctcttcctggacggagcaaccgagaccttcctatctgaactcctcttgctcttcgctttacgatatcctcggcatccccgctggcgcctct

SEQ ID NO: 34297 - DNA, 274 bp, Glycine max
  Clone ID: 701107753H1
atcacttgttagttcaacatggctggcagtggcacctttgcagagatcatagatggtgatgtgttcaagtactatgcacaaggccattggaacaagtcctcttctggaaaattcgttcccatcatcaatccaaccactaggaagacccacttcaaggtccaagcttgtacacagaaagaggttaatagggtcatggaatcagcaaaaacagctcaaaaatcatgggccaagactccactgtggaaaagagcagagttgcttcacaaggctgcag

SEQ ID NO: 34298 - DNA, 273 bp, Glycine max
  unsure (1)..(273): unsure at all n locations; Clone ID: 701107754H1
tgatattgaaggtggtgtggtgattggcctaatatgaaaataaagatgatatggaaggccctcaataacattaatncatttttcattcacttcagaatacagcacattgctgtctccttcggcaaatttggggttacaatcccctccaccgattcatccccttaatggtgtgttagaattagatgcggctttatgtagnacagatgctgagtgtncttttcgatttncctttaaatgtctttttgagattgnaaaatgncnaactctcttcna

SEQ ID NO: 34299 - DNA, 273 bp, Glycine max
  Clone ID: 701107755H1
ctcttgttttttgcaaattcgcaaccaacacagcaagggaaggtgcgagtgagtgagtatggccgtctccattatcagctcaattggttcaatgtcagaactcacttccacctcttcagggtaattttagccaagatgtgtctaaggttcaaaggtcgcgtgtggtatgttacggtaccagatcaccgcttggttattatggtaaagcattgacatcaagatcacataacgccctgaggttttctgtcacgcgacaatctgaagcacggtcaa

SEQ ID NO: 34300 - DNA, 272 bp, Glycine max
  unsure (1)..(272): unsure at all n locations; Clone ID: 701107756H1
cactattcgcggctatagagcacaatttagtttatctactcactgtncactgcgatttttgtcctacccncttcactattttagctatncctccgatgaagaggaaaagtggtttctttgagtgaccccanaatcgcgattgtgctcgattcnccgaggcaatgggtgtttngtagattctagtttttgatcttattttcgctgatcaaaagttttcttttntgttggtttttgaagtattggggnctagtatagcctgaatttttagttgt

SEQ ID NO: 34301 - DNA, 264 bp, Glycine max
  unsure (1)..(264): unsure at all n locations; Clone ID: 701107757H1
cgccgtcaccgacgactgcaggtacaaggtggtccacgctggcggttggcactccggcgccaatgctcgccggaatgtgacgcgaaccggcgccggcaggggtggtaagtccctgccgccgntcggcttcggcccgcgacgatgagatcaatgacacgattccgactttgggatcggagactaactttaggaatgggaagtatttgtactactcgagaggtggggattactgcaagggaatgaatcattatntgtggagtttct

SEQ ID NO: 34302 - DNA, 268 bp, Glycine max
  unsure (1)..(268): unsure at all n locations; Clone ID: 701107759H1
gttgagaactaagaagaaggaaatggcttcctcaatgatctcctccccagctgttaccaccgtcaaccgtgccggtgccggcatggttgctccattcaccggcctcaaatccatggctggcttccccacgaggaagaccaacaatgacattacctccattgctagcaacggtggaagagtacaatgcanncaggtgtggccaccaattggcaagaagaagttcgagactctttcctacttgccagacctcgatgatgcccaattggca

SEQ ID NO: 34303 - DNA, 261 bp, Glycine max
  unsure (1)..(261): unsure at all n locations; Clone ID: 701107760H1
gttgcttttgtnttgttttgttttgtctctctctaatcattccaatggccaaagaaggacccaactgggacgggttgctcaaatggagcattgctcattccgatgggactcgccccactcgcaatttaagtgaggaggatcggagatggtttatggaagcgatgcagtcacagaccattgatgttgtaaaacgtatganaganatcacacttgtgatgcaaactccagaacaagtcttgaaagaccaaggagttacccctg

SEQ ID NO: 34304 - DNA, 275 bp, Glycine max
  unsure (1)..(275): unsure at all n locations; Clone ID: 701107761H1
gaanaaaacaaggatttaaagaccatgactattaagcaactcatgggctccttacaagcatacgaagaaaaacaaaagagaaanattaaacaaaaggaggctacggagcaactactacaactcaacgtaaaggaagcaaactatgcaaattacaagagccaaagaggacgaggtcgtgaccaagatcgtggacgtggacgaggacatggaggagaaggtagaggtggttacaaaaaccactccaacaaatttcaacaatggagaaagaagttgga

SEQ ID NO: 34305 - DNA, 278 bp, Glycine max
  unsure (1)..(278): unsure at all n locations; Clone ID: 701107762H1
gttcaacctctgaatccaccgatcggtcaccgtttggttttcgcaacactattttttcaagtgaaaaaagaaaccgtttcccctgatttcatttgaaaacacaaacacagaggatttcaatggcggatgatagcnaccncngcgtganactgctatgccgcccgaagcagctcaacacaaaaggatccgacccgggaatccatttctggcttatcggatccccattcttcccgccactncaccgtcgcctccttcctccgccgcatccacacgctccc

SEQ ID NO: 34306 - DNA, 275 bp, Glycine max
  unsure (1)..(275): unsure at all n locations; Clone ID: 701107763H1
tctcgcattccgtggagatctagtgcttctgctgcaagacctcgctgaaaattagggtttcgattcggaggtagacgaagatgttcggnagggctccgaagaaaagcgacagcaccaggtactacgaaatcctcggcgtttccaagaacgcttcgccggatgacttanagaaggcttacaagaaagccgccattaagaaccatcctgacaaaggcggggatcccgagaagtttaaagagttgctcaagcctatgaggttctgagtgaccctgaga

SEQ ID NO: 34307 - DNA, 279 bp, Glycine max
  unsure (1)..(279): unsure at all n locations; Clone ID: 701107764H1
gtgcctataatcatgattggtcctggcactggattggctcntttcagaggtttcttgcagganagattagctctgaaagaaggaggagctgaactcggcccctcagttttattctttggatgcaggaaccgtcaaatggactacatctatgaagacgagttgagtcacttcgttaatactggcgcacttgatgagctcattcttgccttctctcgagagggacccaccaaggagtatgtacaacataaaatgatggagaaggcttcaganatttggagc

SEQ ID NO: 34308 - DNA, 284 bp, Glycine max
  unsure (1)..(284): unsure at all n locations; Clone ID: 701107765H1
actttctctctctttgtaactngtaagcatggagtcctcanagatctatngcttacctctncctttgcatgctcttccctctcctgccgccactgcccattctcggttgtggctactgtggcaaaccccccaaaaagcacaagcctggtanaacaccaaagacacccacagtacccgttgttaagccaccagtcacaatccctcccattgttaagccaccagtnacaatccctcccattgttaatccaccagtnacaatccctcccattgttaagccaccagtc

SEQ ID NO: 34309 - DNA, 277 bp, Glycine max
  unsure (1)..(277): unsure at all n locations; Clone ID: 701107766H1
antatggctcggnnagcngtttatgtccctcgtntccctggtaccgattctnaagaagatgatggatacttgatttgtnttgtacacgatgaaaataccgganaatcatttgtgcatgtcatcaatgcaaaaacaatgtcagcagatcctgttgcagttgtcgaattgccgcatagagttccatatggtttccatgccttctttgtgacagaggaacaactgcaagagcagggtaaactgtgataattttggcagcctcactgtaccgtcctgcctc

SEQ ID NO: 34310 - DNA, 275 bp, Glycine max
  unsure (1)..(275): unsure at all n locations; Clone ID: 701107767H1
ctgcatctgnattcgttcgtncactttcactttaccaactcctaacaatttctctctgtntccttcttcaccgcatcantggagttggacggcgttctcctcggcatgtgcaaccctctcctcgacatctctgccgtcgtcgacgacgctttcttgcaaaaatacggtatcaagttgaacgatgcgattctcgctgaggataagcacaaacctatgtatgangaattggctaacaatcctaatgtggagtacattgctggaggtgctactcagaa

SEQ ID NO: 34311 - DNA, 273 bp, Glycine max
  unsure (1)..(273): unsure at all n locations; Clone ID: 701107768H1
agcggcaggttgtcagangcttctggnattnagcacgaagatcgtcgctgttggcagancactacgctgctcatgccaaanaactaggcaacgccgttcccaaggngccggtgttgtttctganaccgacgtcgtcttacttgagtaacggtggaaccattcanatcccacacaacgagggcttantgcatcacgaggttgagctcgctgtggtcatctccaaganagcccgtgacgtctccnaatcctctgccatggattacgtcgccggtt

SEQ ID NO: 34312 - DNA, 272 bp, Glycine max
  unsure (1)..(272): unsure at all n locations; Clone ID: 701107769H1
ggttttcagttccaaggacagtacaattacagatgaggatattgacagacttattgctaaaggagaagaagcaacagctgancttgatgctaagatgacaaanttactgaagatgctatcanatttnanatggatgacactgctganttgtatgattttcatgatgagaaggatgagaacaaatttnatttcaaaaaaattgtncagtnanaattgggtcgagccaccaagaagagaacggaagcgcaattactcggagtctgantacttca

SEQ ID NO: 34313 - DNA, 251 bp, Glycine max
  unsure (1)..(251): unsure at all n locations; Clone ID: 701107770H1
ctanatatttnnctcactgtctctcnagagaacttgataganagatggcagctgcaacatgnggtgctgtgttaaatgggttgggatcttccttcttgagtggaggaaacaggagncaaacccttctggccactgctattggaggcaaagttggtgctgctgttactgttaatcccagaagactcattgtggtagctgctgctgcaccaaagaagtcatggctccctggtgttagangtggtggcaatctc

SEQ ID NO: 34314 - DNA, 263 bp, Glycine max
  unsure (1)..(263): unsure at all n locations; Clone ID: 701107771H1
cttacttccattgccatnatttggtgcataganagcctctaaatatngcagccacaagcacggataagttggaggcaggaacagtttcaagttatgacaggaaaagtgaaatcaaggcatttnatgattcacagactggtgtccaaggactggtaganaatngtgtaacanaagttcccacttatgttctatagtganaactctaatctcaatgatggcgtaaccggtgcatcatattcaaagatcagcatccccataattga

SEQ ID NO: 34315 - DNA, 269 bp, Glycine max
  unsure (1)..(269): unsure at all n locations; Clone ID: 701107772H1
gcaaatnctaatcttcgcaaatncaacaacgtctctntctgttactctganaactgacttcaagttancgtaactagctgccaagttgtgatggcattggtctctggnagangttctgctctgaacccaaatgcacctatgttcatacctgctgcacttcgtcaggtggaggatttttcacctcaatggtgggatcttgtgaaatcttcaacatggtttcgtgattattggttgagccaacataaggaggaagaattgaagaagttgcc

SEQ ID NO: 34316 - DNA, 268 bp, Glycine max
  unsure (1)..(268): unsure at all n locations; Clone ID: 701107775H1
ctccaaaacgccgaagcagcttcggtntggagaagnttcatggactctnattgncngcttagtttaatatgcaaaaaccacttcaggnactgtnttgtatttcccagtgttgactccaaggnttgcntctttncattccttgtagtgtgtggtctntngtacttnaatntanattatctagcatttnattgattttncctgtacactgagattgttgggtactatactttgggcaaggntgcttgtagaagagagagtntngtncngc

SEQ ID NO: 34317 - DNA, 270 bp, Glycine max
  unsure (1)..(270): unsure at all n locations; Clone ID: 701107776H1
ctcgancngctttgggcaactnanaatcgcttaaacaatgacagangatagcatcgttaggntttcttccttccaacganacctccgcngccaacgangcttcgcagacgcggcanananagaagagaaagtnggatcaaccggcggagtcattgatgccagttggnatgacagtccctggagcactccctttnagcaatgccgtgactcttggaggggttgcatttcccgccatggctccggtgatctccggcactcttttgacgaatc

SEQ ID NO: 34318 - DNA, 276 bp, Glycine max
  unsure (1)..(276): unsure at all n locations; Clone ID: 701107778H1
gtttccgttaacgctctccaatacaaaataaccactcactgaatattccggtcgangatgtccgcngccgaagaagctaaagttcccgccgtcgaaaagccggtggaggaggtgaaggcgccgaagcttgccaaggagaaganacctaaggctccgaaggaaaagaagccgaaacaggccaaaactgcttctnatcctccatatctccagatgattaaggacgctttgattgctctgaacgaganaggaggatcgagtccatatgcnatagcnaag

SEQ ID NO: 34319 - DNA, 274 bp, Glycine max
  unsure (1)..(274): unsure at all n locations; Clone ID: 701107779H1
tgaagatgagtatggaggattccgtagtcctaaagtagtggcggattttcgtggctacgcaaacttctgcttcaagacctttggagacagagtcaaatattgggtcactttgaatgancccttatcatttagtctcaatggctacaatggtggcacctttgcaccaggtagatgttctaaatacgttgccaattgtagtgctggcgattcatccactganccctatatcgttggacactacttattacttgctcatgaatctnctgccacatta

SEQ ID NO: 34320 - DNA, 278 bp, Glycine max
  unsure (1)..(278): unsure at all n locations; Clone ID: 701107780H1
tnaattctagtganatatntgatcaattaatggctcagtatttntnnntgtttgtnttggtgtttgcnagcnaactgatggntggnttnnntgcaccgcnacngctaccatctncgtcatatggnaatnatacnaccattctccagcatagacggtngtggtatcatgggcattattcctgcncactgttcctgaatacttanannaggntcttaaggctaaggatcgaacaacatctttagcccattattttgatgtgatatnaggnactagtactg

SEQ ID NO: 34321 - DNA, 271 bp, Glycine max
  unsure (1)..(271): unsure at all n locations; Clone ID: 701107783H1
tgcngttacgcttcangtggggtcggaggttgtttcgggttcacgcnanangctcctgcngttcatngacgcncgcttccctgggccctcgcttggaagcnggantnggaggnacgatgaaacgacgccgttnctggcgagcttnangcgggtncaccacacgancatgctgtggcacgtggaganaatggttaantgggcggangatctgacganacgtggcggaaagaagatcgttnatccttccgtggggantcccangtatggagat

SEQ ID NO: 34322 - DNA, 270 bp, Glycine max
  unsure (1)..(270): unsure at all n locations; Clone ID: 701107784H1
gctggtagttgttgcaccanatccctcancagtcacaaccattcattccttcaganccaaagtccaccacttaactatntttncctaccaatacggcaataccctttntcttacattttntccttttttnattccccagtncctttnttatttnantnacaagtnccttacttgnnccttcanacactcatttngntnttcactnanatcatggatttnttgcaagcnnaagannatcagatacttgtgggtgtggccgtggccgttgta

SEQ ID NO: 34323 - DNA, 247 bp, Glycine max
  unsure (1)..(247): unsure at all n locations; Clone ID: 701107785H1
cngnctcgaggtgagtntnttgatcnanatanctagaaacantgtnatgaaaatgaangacctgtnttnttcgntgctacaattttcgtagcatggcaatgccatgcntacnatatgttccctctccgantgancactggctatggtncccgtnctccgnaggtganatgcgcaanttggaggcttgctgtggnagcacacaanatctttngcttnganaccattcctgaagagtgcgtngaagcaa

SEQ ID NO: 34324 - DNA, 269 bp, Glycine max
  unsure (1)..(269): unsure at all n locations; Clone ID: 701107787H1
gnaacaatggccaatgtntcanttccactcccacganacggtttctccaaacccaattactcgacaaaacgcccatgtntcaccccttcagcttcaacactcagantttnttgctctggagtggctgagtttnatggatctcatcaganaanaggaggtttgtntantttcaatggaatcaagggcgtggcttgtngtattcttgcagcttgtgctgttacttctgctgcatttnctgtnactgctgctactcanaggcttcccccatt

SEQ ID NO: 34325 - DNA, 268 bp, Glycine max
  unsure (1)..(268): unsure at all n locations; Clone ID: 701107801H1
tgaaaatgaaggtccttgttttcttcgttgctacaattttggtagcatggcaatgccatgcgtacgatatgttccctctccgaatgaacactggctatggtgcccgtactccggaggtgaaatgcgcaagttggaggcttgctgtggaagcacacaacatctttggctttgagaccattcctgaagagtgcgttgaagcaacaaaggaatacatccatggcgaacaatatngatcagactccaaaacagttaaccaacaagcttnntt

SEQ ID NO: 34326 - DNA, 261 bp, Glycine max
  unsure (1)..(261): unsure at all n locations; Clone ID: 701107802H1
gtacgaatcacttgcagatcaattgacagatataattgttgatgcagttttatgtattcagaagcctgaggaagaaattgatctgtttatggtggagatcatgcatatgcgacacaaatttgatgttgacacacgcttggttgagggtattgtccttgatcatggttctaggcaccctgacatgaagcgacgtgcagaaaactgctatatctgacatgtaatgtatctttggagtatgagangagtgaagtnaactcaggc

SEQ ID NO: 34327 - DNA, 261 bp, Glycine max
  unsure (1)..(261): unsure at all n locations; Clone ID: 701107803H1
caccaattctccaccctctcattgaaaaaaaaacaaccaaacaaaaaaaatcaatcattttattttatttttctacgaaaatggttgatttacattggaaatcaaagatgcctagttccaaaacaccaaaactctctctctccgacaacaagtccttaccctctttgcaactacccttcngcaccacagatatctttccgggggcnctaccnnaangncggnnnanggnnnannatggggggntnccnaaannnannntgt

SEQ ID NO: 34328 - DNA, 272 bp, Glycine max
  unsure (1)..(272): unsure at all n locations; Clone ID: 701107804H1
ctcaaccaccctatcttaaaatcttctgtgcaaccagaaaaaaacggaccttgccctcagtctcttttttccatacatcacttcattaaacattattcactctctttctctgtactctagtttttacaacatgggctactgcggtaactgctggcagtgtccctttccagccaccaaggtccacttctntttccaagcagaaacctctaatccactgnccccagatagaattgtcttcaagaagggtttcgtngccatacaggggatgttcc

SEQ ID NO: 34329 - DNA, 258 bp, Glycine max
  unsure (1)..(258): unsure at all n locations; Clone ID: 701107805H1
ctcactcactagcttcttctctgttctcaccaatggcatcaacantatcagcaatggccatgatcaacgccaaatgcgtcaacccaaagttccccaatcccaccaagctcgcaccatcaaaaccctcccttcagatcaaccttccaaagggcctcatagcctcacccgaaagcactaaactttcccccgcgacagcaatcgcaggagcaatattcacaaccctcggaacctgcgacgccgcattcgctgttcaacaaa

SEQ ID NO: 34330 - DNA, 255 bp, Glycine max
  unsure (1)..(255): unsure at all n locations; Clone ID: 701107806H1
aaattactactcccatcaattgctgcacttcctttgttaatggcatatgctggacacacaactatagttataccaaagccacttgtcccacacattgggattgaggttttggatcttggatggatgtataaactatatatggggctattggctgttttttgcacaaattccatcaatatacatgctggaataaatggccttgaagttgggcagactgtggttatcgcatcagctatcctgatacccaatnttatg

SEQ ID NO: 34331 - DNA, 253 bp, Glycine max
  Clone ID: 701107807H1
ccccaatcgtagccgtcgcactttgcgttttctgcgtcatctccgattccccgacaatggccacccaaatgagcaagaagagaaagttcgtagctgatggagtgttcttcgctgaactgaacgaggttctgacaagggagttagccgaggacggatactccggcgtggaagttagggttacgccgatgcgcaccgaaatcatcatcagagccaccagaacccaagccgttctcggtgagaagggaaggagatc

SEQ ID NO: 34332 - DNA, 252 bp, Glycine max
  Clone ID: 701107808H1
ggaaaagatcgttactgttagagagtttctcacacttctgaatctggatccagcaaagctgcgcagtgtaataatttagagtttcttttacttgcaaattgttctgatagattatcattttgaaggattttagctaaaactttcattgggacagtttagttgttcactgtttgtgtgaactgtctaggcatttagattagctttgcacattatcaagtcagacacctcctaggtagtggatttataacttga

SEQ ID NO: 34333 - DNA, 254 bp, Glycine max
  unsure (1)..(254): unsure at all n locations; Clone ID: 701107810H1
gcttcgtnttcaaaacttttgcnaaatttctatcttcttcaccttgctctcacnttctnggtaatgtgtgnnactnngtgtnnagctagagctgtttgacaaaaatgaatattgcacaagttacagcntggcagcctgggntttgtgtnaaaaatatgtctcagntgcaccggcttcaatctaaaccatgtgttataccatngagtnttggtcctctcacttgtgttctactgagcttaagagcnagacaatcg

SEQ ID NO: 34334 - DNA, 256 bp, Glycine max
  unsure (1)..(256): unsure at all n locations; Clone ID: 701107811H1
ttcctctctgcgctgcgcaccattctcaatctccgatctataaacccccaaaccctcctancattcccagccatctctctctctctgctactannaccaagtctcgtttctctctcctcttgctgggcctcttcttcgggcttcccggcccatcgccgactccaacgccacaacctttttctgctttnncgatttagggttttcgcgcgctctcccttccttctcctggatctgctaggagaagcgctgantgctt

SEQ ID NO: 34335 - DNA, 253 bp, Glycine max
  Clone ID: 701107812H1
attgagttcaagccaggctgaaagtgtatcaagcccagctgatctaagatatcgagaagatttgctatttcctcggagactcatagaagatgctggaaatgtaagagttggtagggctttgcacaaggttattaagccttcaaggcttcttgaatcagaacaagtattctctggggagaagtttcttttaaatggtgatagtaggtgcattgacatggtattggagcaggatgctatcggcgaagatgcattg

SEQ ID NO: 34336 - DNA, 253 bp, Glycine max
  Clone ID: 701107813H1
agggaagacgatgtcgatgtcgatgtcaatgttgtatatgtgtctcttcacactcacactcgtcgtcggaatgttatctatgctatctgatgccgttgatgacaaatgtgccgcctgcaaagccgtcgcggaggagctagagattgggctttccactgagaggccacgaaatcacttggatatgcgccatcgcttagactccaaaggccagcgtgaaggaaagctaatcgattacagagttagcgaactaaga

SEQ ID NO: 34337 - DNA, 258 bp, Glycine max
  Clone ID: 701107814H1
gtgagatccacatccaaattacaagaaaagttccagaaatgcaaacaagacatactctagactctcaaccctcttcgttaagtaaatcacaccaaattcctacccagatgagagagatgatgaaaaagtttcgatcattaatagaggatgaaaatcttgaaggattaacaacaactttgagtgagttagaaagtctagaggatacacaggaagggtatataacacagttggagacagagcaaatgcttctactcagca

SEQ ID NO: 34338 - DNA, 259 bp, Glycine max
  Clone ID: 701107815H1
tggacatggctttcacacagcttatcccttcaccttcttcttcctccttaaaccctatcacactctccctaaaccctaaatccccaacctctccgccgcagcagcatttcaatctcgatattctccggcaccggcgccggaggcctaattccactcttcggtgctccgcctcctcgttctcggagaagcaccacacgaactcctcgaactccgacgacgtggtggagctccccctgttccctctccctctggtcctctt

SEQ ID NO: 34339 - DNA, 261 bp, Glycine max
  unsure (1)..(261): unsure at all n locations; Clone ID: 701107816H1
aatgcccctttcattttctctgcatctntagtatctatcaccaatcaattccactcttcttcccancacnacaacaaaaaatcaatctgggaaacaaaaacaaaatgccgtcatnagaggaggaactcttcccatcaaccccaggaaagttcaagatcgagcggtcccaccacatgaaccgccaantctatcgctgtttcgcctccaccagcaccatgttcctgtgggccctctncttaatcgccctcaccgcttctatct

SEQ ID NO: 34340 - DNA, 257 bp, Glycine max
  unsure (1)..(257): unsure at all n locations; Clone ID: 701107818H1
attcttcttgttcatcatgcctggagctgttagggttttggttttggtttctccgaccttgaacgcttcccatcttggtgagtaacacgaatctgagganaaaaaatgtcgattatgcaactttacgggcgcannngagcgtggtgaagcggtcgaagaagtacttggaagangcgctttacatgaagctcttcaaagatggaagctcccagctccatcgttcgccagagcntcaacaattcggcaagagcgaaagg

SEQ ID NO: 34341 - DNA, 256 bp, Glycine max
  unsure (1)..(256): unsure at all n locations; Clone ID: 701107821H1
cagcgaaggagctacactacgctgcgagatttggaaattgaatccctaatctaatttcgaggtccaactacctgtggagtgtgtgtggtgctttcaatctgcatgatcatatagcgaatttntgtttagcgaatcatatttgcagagtaaggatggggaaaaaccaagcctacaaagctatgcagagagccaggctcgncggcgcctccgccggccccgacgaggttgaagacggcatggtttgtaccctttcata

SEQ ID NO: 34342 - DNA, 254 bp, Glycine max
  unsure (1)..(254): unsure at all n locations; Clone ID: 701107822H1
gtttctcgccaaacaaacacaaaatggctgccttcagcggcgacgaaaccgcacctttctttggcttcctcggagccgcnctgccctcgttttttcctgtatgggagcggcgtacggaaccgcgaagagcggcgtcggggttgcgtcgatgggcgtgatgaggccggagctggtgatgaaatcgatcgtnccggttgtgatggctggtgtgttgggtatctacggtttgatccattgcggttatcataagtacg

SEQ ID NO: 34343 - DNA, 253 bp, Glycine max
  Clone ID: 701107823H1
aagagttctctctttcttcaactgatctattccattctccttcgggttttgttcagttgtacgctttcttacactggtgcttcacctgatgttatgacaatttctgcaatgccgaacaaggtggccacagatgcggcagtgcaggactcagaaacgtccgagtcactggccagggatttagacaaaatcgagttcccggatccgaagattgtcaatgaagaccacttgatggtttcagaatacttcggtattc

SEQ ID NO: 34344 - DNA, 257 bp, Glycine max
  unsure (1)..(257): unsure at all n locations; Clone ID: 701107824H1
attcacaaccgaaacagtttccatctctctcanaaaatgacaacaatatcaaattgctcccttctacttcctcttcctcttcctctccacccnccacatagcttccaccctctcaacccccaccaacttcatcaagtcctcctgcagcaccacccagtacccagccctctgcatccagtccctctccgtctacgcctccaccatccagcaagacccccacgagctcgtccagacagccctctccctctccctcaacc

SEQ ID NO: 34345 - DNA, 252 bp, Glycine max
  unsure (1)..(252): unsure at all n locations; Clone ID: 701107825H1
cagagcctaaactatacttttgcntccagatatgtgcgtnaacctattccaaagttcaagatgccagagaaatccataccaaaagatgccgctnatcagataataaacgatgagttgatgttggatggtgcaccncggctcaacttggcctcgtntgtgaccacttggatggagcctgagtgtgacaagctcataatggcttcactaacaagaatacgttgacatggatgagtatcctgtcaccactgagct

SEQ ID NO: 34346 - DNA, 230 bp, Glycine max
  unsure (1)..(230): unsure at all n locations; Clone ID: 701107827H1
gagttcagaagcttgaacctagnccatccccaaaatcccattccatagtgaaggagtannggagtagattactataagattttncaggttgacaagaatgccaccgatgaagagttgnngaaagcttacagaaagcttgcaatgaaatggcaccccgataagantccaaccaataaganagaggctgagactnagttcaagcagatatccgaagcttatgaggttctgag

SEQ ID NO: 34347 - DNA, 253 bp, Glycine max
  Clone ID: 701107828H1
tgcaactcaaggttgggtcttcaaggtgattgataggaaaactcatacttttatgctgcaaagtgtgcctaatgctttgcctacccaaaactactgcatcagtgtacaaatacaagatcattatgaatggtggtaacattggcaagcatgcagggatcacatcgttgcaaccttgtaaaagtttctcatacatttccatttatgcagagcccaaaaggttttggatttatgcagagcccaaaagtattcagcg

SEQ ID NO: 34348 - DNA, 257 bp, Glycine max
  unsure (1)..(257): unsure at all n locations; Clone ID: 701107829H1
canaaatgnnnagcgnaaacnaaaagggattgttagtgtgagcagaaattaagacacttggcgcatnccaccacgcccttagaaaccgaggacggaggaacgcagccaaccaactctcaactcccatcataccaaatccngaatacctaagtaacatcaaataaataccaaaccttcctaaggttttgaattggatgtaaatngtttgtactttgtagcataatctgcggttttctgnatttgacggtagaagatta

SEQ ID NO: 34349 - DNA, 257 bp, Glycine max
  unsure (1)..(257): unsure at all n locations; Clone ID: 701107830H1
cttgaaggcntattgantgataatgattaatgagcttgtttactaatttgttgtntcaaggacatgcnttatgatttgttaaattgcatttgggattaataccttgtatgttttttgtaagaggaattctcagccaattttaacaaaagatgcaggaatccccagagccaagacatganttttgggttggccaacgagtacatgcatctggtgactcacagagaattggtactgttaagtatgtggggcctgtagaa

SEQ ID NO: 34350 - DNA, 259 bp, Glycine max
  unsure (1)..(259): unsure at all n locations; Clone ID: 701107834H1
ttatctactcttttctgcatgtttntnctctnancgactacctccgcgaaagagtattattcaatattttngttgggttaaatcccggggttgaagcgttncagacatcacggctattctaagagtgtctcgctccctcattcatgtccgatctgtacgacggaggacgggtagttgcgtaactgccgttaacccttcgccgcacggtgggcgtggtgctttgccttctgaaggtggtagcccttcagattgctcttcc

SEQ ID NO: 34351 - DNA, 253 bp, Glycine max
  unsure (1)..(253): unsure at all n locations; Clone ID: 701107835H1
cgcgatcagttctgcaagggctttccgataaccatttcatccccagcccgaatccgtcacatcagcgaaggccttagtttgaacattgggttcactttcgcatccccgtgttcccccgcttctgagtggaccattgtgaaggatcaaccagaaggactcgctgttaaactcactgggtttaanantacagtgcccggtgtgtttacattgatganagtcccgcngatgaattntcggtacaacatcttgtttt

SEQ ID NO: 34352 - DNA, 256 bp, Glycine max
  Clone ID: 701107836H1
ctgactctgaaatacttctttgaaacaaaagttacaatcaattatccatttgagaaaggccctttgagccctcgtttccgtggtgaacatgcactccggcgatatccaacaggggaggaacgttgtattgcttgcaaactttgtgaggctatatgtcctgcacaagcaatcacaattgaggctgaggagcgagaagatggcagccgcaggacaactcggtatgatattgacatgaccaagtgcatctattgtggat

SEQ ID NO: 34353 - DNA, 254 bp, Glycine max
  unsure (1)..(254): unsure at all n locations; Clone ID: 701107838H1
aatcctttaggtctgcaactagtgaaacaactagggcaattaacatagacagcacaagtcatcatgaggaaaaaataactganataaatgatgtagctttagatggcaaggatgtagaatctaatttngaaaatgatattgaaattatattgnnagatcttcaacctggtgacatcttgcaatctgaagtcaagcaatcagatgacttatttaagagtgacagcgctggtaagagtgatgctgctggtgaaatg

SEQ ID NO: 34354 - DNA, 252 bp, Glycine max
  unsure (1)..(252): unsure at all n locations; Clone ID: 701107839H1
ctccgcagcaccaccacccaccaccctgcttagaccaggtcctctctctctctagagagaaagagaaaaaagannaaaaaaaaacaactancnttaagcttttaatagtaanacatggctcaacccagttccannggggntctgaataataaccagcancagggtcaggttcagcancaacagtancngggncantnnncggcggcggcgcacnattcaannntccagcngnaatggntggctntgcgtacc

SEQ ID NO: 34355 - DNA, 229 bp, Glycine max
  unsure (1)..(229): unsure at all n locations; Clone ID: 701107840H1
gtcatttctgggctcaacgtgatnccgaattntcaacgagactaccgcggctgccattgcntatgggctcgacaaaaaggccactagctctggggagaagaatgttctcatttttgatctcggtggtgggacttttgatgtctctcttctcaccatcgaggagggtattttcgaggtgaaggccactgctggtgatatcacttgggaggtgaagattttnataacagna

SEQ ID NO: 34356 - DNA, 252 bp, Glycine max
  Clone ID: 701107841H1
agaaggagagtccttctttggcgtcgggggtgcaaggattgggcatgggtttacccgatttgagaacgaagaaaaaggggaaacagaaggctgcttccaaagacagccacgtgtcggaggcgctcaacaagctcagggagcagaccaaagaggctgttaaagggctggagtctatttccacacccactgccgatgatttggggaaggatgccttgatggaggattgggtgaaacagtttgagcagcttgctg

SEQ ID NO: 34357 - DNA, 250 bp, Glycine max
  unsure (1)..(250): unsure at all n locations; Clone ID: 701107842H1
gccaagggaacgggcttggcggaatcagcggggaaagaagaccctgttgagcttgactctagtccgactttgtgaaatgacttgagaggtgtaggntaagtgggagctggaaacagcgaaagtgaaataccactacttttaacgttattttacttattccgtgaatcggaagcngggcactgcccctctttttggacccaaggtcggcttcggccggtcgatccgggcggaagacattgtcaggtgggga

SEQ ID NO: 34358 - DNA, 232 bp, Glycine max
  unsure (1)..(232): unsure at all n locations; Clone ID: 701107843H1
tcccactaaacaaaaaaaataaaacanaaatttaccaaaatgccttcttcttccacnaccanagtcncnagnatncgtgatccaccccgaccagaaatcaaacatgaaacccttgagactctctgtntctgaccttccaatgttgtcgtgtcactacatccaaaagggcgtgttactaaccgctccgccctcgtctttcgaggatatgatactctcttttaaacactctctt

SEQ ID NO: 34359 - DNA, 249 bp, Glycine max
  Clone ID: 701107844H1
ggaaaattggggtgattctccgctatctatgcttccaatatatcaagaacttattgaaggtggtatcagaatatgggtattcagtggagacactgattcagtagttcctgtaaccgcgtctcggtattcaatccgtgccttgaacctatctaccatcatcaattggtacgcttggtatgataatgacgaggttggtggctggagtcaagtttatgaggggctacattggttacagtaagaggggcaggg

SEQ ID NO: 34360 - DNA, 254 bp, Glycine max
  Clone ID: 701107846H1
atttggtcatgcaatagaaactggggttggctatgggcagtggcttcatggagaggctgttgcagctggcacggtaatggctgttgacatgtcatatcgcctaggttggattgatgattctctagtgaagagagttggagacattttaaaacaggctaagttacctaaagcccctcctgagaccgtgactgtggacatgtttaaatctgtcatggcagtggataagacggtagcagatgggttgctaaggctta

SEQ ID NO: 34361 - DNA, 248 bp, Glycine max
  Clone ID: 701107847H1
ctcgaattccagccaagctgctaactcaaaatcttcgtctcacgaaattcatacaaacctgggaagatgttgaaaaggtgatggaagagaatcaaaccaaaggagcatctgcatggttgacagctatagcatatgtggtgttgggagttactatactggctcttcttgcagaacccttaatagcaagtgtccaaaaattctctgaagaagcaggaatttcatcatttttcatctcattcattttagtc

SEQ ID NO: 34362 - DNA, 261 bp, Glycine max
  unsure (1)..(261): unsure at all n locations; Clone ID: 701107849H1
cctgccagtagtcatatgcttgnctcaaagattaagccatgcatgtgtaagtatgaactaattcagactgtgaaactgcgaatggctcattaaatcagttatagtttgtttgatggtntctactactcggataaccgtagtnnttctagagctaatacgtgcaacaaaccccganttctggaagggntgcntttattagntaaaaggtcnacacaggcctgcctgttgctttgctgattcatggataactcgtcggatcgc

SEQ ID NO: 34363 - DNA, 258 bp, Glycine max
  unsure (1)..(258): unsure at all n locations; Clone ID: 701107850H1
ggtacgctgaactactttgggaaacccatccccatcaatcttattgtggctgtcattgctgagattgttcttgtgggaggtgcagagtactacagaattattaatggcctgaacttcgaagacaaacttcatccaggtggtccatttgacccattggggcttgcaaatgatccagaccaagctgcactgctaaaggtgaaggaaattaagaatggcagacttgctatgtttgccatgcttggtttctnattccaagca

SEQ ID NO: 34364 - DNA, 256 bp, Glycine max
  unsure (1)..(256): unsure at all n locations; Clone ID: 701107851H1
cctttgttcactcttcttctcttgcggctagggttttagcgcanttcttctagatttaaggaagatgggtaaggaaaaggttcacatcagtattgtggtcattggccatgtcgactctgggaaatccactaccactggtcacctgatttacaagcttggaggcattgacaagcgtgttattgagaggtttgagaaggnagctgcnnagntgnccaaaaggtnctnncaaagntccntgggntnnnggnnancnnag

SEQ ID NO: 34365 - DNA, 245 bp, Glycine max
  unsure (1)..(245): unsure at all n locations; Clone ID: 701107852H1
cttctcttcattcttcactttggaaacaatcataatggcgttctgtaataaggtnggaaatgtcttgaggcagggtgctgctcgcagcacacatgcccctgttgcgtccatgcttaattacatccgctgcatgtcttcaagcaagcttttcattggaggcctttcatatggagttgatgaccagtctcttaaggatgcattttctggctttggagatgtggttgatgcaaaagttataactgata

SEQ ID NO: 34366 - DNA, 252 bp, Glycine max
  unsure (1)..(252): unsure at all n locations; Clone ID: 701107853H1
tttttgtggnanatnggntgtnagacctatntggnccagtntnnaccaatgantgctgncgtgtgnntgagcctcatcaaaattgtntnaagannggacgncctgattcagagtacctctactggngtngaccccacgagactgtaaattgcccaaattcantcccagaaagtttctcaaantcatnagaaacnaatcattgtcattcattggtgattccntntcccgcaaccaagttcagtccctactttg

SEQ ID NO: 34367 - DNA, 87 bp, Glycine max
  unsure (1)..(87): unsure at all n locations; Clone ID: 701107854H1
ctcttntcttcttttctacttgactctctatcctcaactcagtacaattcctnctttctctttccacaccnacanaananganagcg

SEQ ID NO: 34368 - DNA, 249 bp, Glycine max
  unsure (1)..(249): unsure at all n locations; Clone ID: 701107855H1
aattaacaagtcctcaattttnttaacacaccaccaaccccaaatcctaaggttcatttcaatatggcaatcttgtcaagttttgctcctttgaccattcttagtttagtcttgttagtggttggaatcattgtgtctggggttgaagctaggccaagagcattctttgtgtttggagattcacttgttgacaatggaaataacaattacttggccaccacggcacgtgccgatgctcctccttatggg

SEQ ID NO: 34369 - DNA, 256 bp, Glycine max
  unsure (1)..(256): unsure at all n locations; Clone ID: 701107856H1
attattcttcttccgaccatccccaanaatgcntttctcacccttcctcactctcacttnctncccncctcttctcttcttccgtngctncaggtttactcagcggcaacatgttctaacatagtgccgctgagataccgcagcgacagaatctccataacggacttcggtggtgtcggcnacggccgcaacgctgaanacgaaagcgttcagagngnccgtgnaccgnattnagcactgaaaaagggggggngaa

SEQ ID NO: 34370 - DNA, 218 bp, Glycine max
  unsure (1)..(218): unsure at all n locations; Clone ID: 701107857H1
ttcgcaaaccctaatttncggaaagatcggcgatggctgcctaccaaggatcgcgaganccttacgtctacatcgccaagcttcgccgaacaggccgagcgataacgaagagatggtggaattcaatgaagaacgttgcgaatctcgncgttgaactgcactgtggaggagcggaatttactttcctgttgggtacaagaatgtgattggtggctcgg

SEQ ID NO: 34371 - DNA, 250 bp, Glycine max
  unsure (1)..(250): unsure at all n locations; Clone ID: 701107859H1
tctccccaattccttntccaactnttatgnaatctgctttntgtttcantcatttcttcgtattccttcaacacccatcagattaatggcaaaagctatcctcttgngcancaaatggtacggacatgagcaattctgggtcacacgttcttaccccanaatacngaaattcagccncgggaaaatggatctccaggtgaaggcagcaactnccttgaattcacatgccaatanaganggnaatttgttt

SEQ ID NO: 34372 - DNA, 252 bp, Glycine max
  Clone ID: 701107861H1
tgacttttaagcgcaggaatggaggtcgcaacaaacacggccgtggccacgtcaagttcattcgatgctccaactgcggcaaatgctgtcctaaggacaaggctatcaagaggtttctggtgaggaacattgttgaacaggctgcagtcagagatgttcaggaggcttgtgtctatgaacaatacacgcttccgaagctttatgtgaagatgcagtattgtgtttcctgtgctatccactctcatgttgtga

SEQ ID NO: 34373 - DNA, 256 bp, Glycine max
  unsure (1)..(256): unsure at all n locations; Clone ID: 701107862H1
gtttgctgaactcatgaccaagattgacaggcgatctggcaaagagcttgagaaggaacccaagtttttgaagaatggtgatgctggttttgttaagatgattccgaccaaacccatggtggttgaaactttctctgagtaccccccacttggtcgctttgctgtcagggatatgcgtcaaactgttgctgtgggagtcatcaagaacgtggagaagnnggatcctactggagccaaggtcaccaaggctgcccng

SEQ ID NO: 34374 - DNA, 259 bp, Glycine max
  unsure (1)..(259): unsure at all n locations; Clone ID: 701107864H1
cgaggagacacaccttcagcagcagcagccatggttctcaaaaccgaactatgccgattcagcggtgccaagatctacccagggaancggcatcagatttgttcgtggtgattctcaggttttcctgtttgctaactcgaaatgtaagaggtatttccacaacaggttgaagccatcaaagctcacctggactgcaatgtacanaaagcaacacaagaaggacttgctcaagaagctgtgaagaaaagaagacgtgctg

SEQ ID NO: 34375 - DNA, 256 bp, Glycine max
  Clone ID: 701107866H1
cttgctttagccatcactaacactcagtctctgaattgcggctgagggtttcgagtaacgttttttttttctgagtttaagatatcatgggtaaagagaaggttcacattaacattgtggtcattggccatgttgactctgggaagtcaaccaccactggccacttgatttacaagcttggaggtattgacaagcgtgttattgagaggtttgagaaagaagctgctgagatgaacaagaggtcattcaaatacgc

SEQ ID NO: 34376 - DNA, 253 bp, Glycine max
  unsure (1)..(253): unsure at all n locations; Clone ID: 701107867H1
ggatgagggaacgactgtctgtactgnnctgntttcaacaaaggagtctgcccaaatgtatgcaaaacacttggcagagcttgctgttaatttaggctttgacgggtggctgttgaatatggaggtatcattgaagccggaacagatttcnaacttaaaagagtttgtcaatcatctatcattaacaactcattctcagtgcccggatcnctggtgatatggtatgacatgtcactattaacggtgatctatg

SEQ ID NO: 34377 - DNA, 255 bp, Glycine max
  unsure (1)..(255): unsure at all n locations; Clone ID: 701107868H1
agaagaaggaaatggcttcctcaatgatctcctccccagctgttaccaccgtcaaccgtgccggtgccggcatggttgctccattcaccggcctcaaatccatggctggcttccccacgaggaagaccaacaatgacattacctccattgctagcaacggtggaagagtacnatgcatgcaggtgtggccaccaattgggcaagaagaagttcgagactctttcctacttgccagacctcgatgatgcccaattg

SEQ ID NO: 34378 - DNA, 252 bp, Glycine max
  Clone ID: 701107869H1
cttgagttatggcacttgttgaagcctatgcttctctttcaatctcttctggtgttgctcgtacttttcactccaccaaaatgctctcccaccgctcactttcctcatcggaattttgttgcaactcgaccatcattcatcgttggttccccactcttgattcaaagaaatcatggaaggaaagctgcatgcaaagcaatccctgttccaataagatgtgagcaaagtacccaacaagggaatggtctggat

SEQ ID NO: 34379 - DNA, 253 bp, Glycine max
  unsure (1)..(253): unsure at all n locations; Clone ID: 701107870H1
gttctctgctctttttcttcttctacccccacaccggaggaganaaaaccaatatcactacttcaccgttanggtttgggtttcggtttccccctaatccaatcgcgcanaggcagcagcgagatgggcgccaattcgttgtcancggcggaatcaaccctcgatctcgacgagcagatatcgcagctcatgcaatgcaagccactctccgaacaccaggttagagttttatgtgagaaggctaaggagattt

SEQ ID NO: 34380 - DNA, 248 bp, Glycine max
  Clone ID: 701107871H1
gcagttttaaaagtataaagatggcagagacattcctatttacctacagagtcggtgaacgagggacaccctgacaagctctgcgaccaaatctccgatgctgtcctcgacgcttgcctcgagcaggacccagacagcaaagttgcctgcgaaacatgcaccaaaaccaacttggtcatggtcttcggagaaatcacgaccaaggccaacgttgactacgagaagatagtgcgtgacacctgcaggaa

SEQ ID NO: 34381 - DNA, 241 bp, Glycine max
  unsure (1)..(241): unsure at all n locations; Clone ID: 701107872H1
gttggaattgtgttaagatgaatggtctctaatttcnacaattcatcacangtttcataacatccaaattagagaccattcatcttaacacaattccaacagaancttagacgcatggtctctantttngatgttatgaaacttgtgatgaattgttgaaattgncccctntatttgatgaaananaaannannaaananaaaaagannaaaaaanagggggggncngnannntnggnnnc

SEQ ID NO: 34382 - DNA, 249 bp, Glycine max
  Clone ID: 701107873H1
gtgaccgctcttgttggagtcacggcaaatcagaatgcatacttcaaaggattattttatgcatcttctactgcagctaccgctatgagtaatctgataccggcattaacgtttgtaattgcagcaattgcgggatttgagaaagttgacataagcttaagaagcacggccaagatattagggacagtttgttgcgtggctggagccttaaccatggcattggtcaaaggacagaagctgttacacacg

SEQ ID NO: 34383 - DNA, 251 bp, Glycine max
  unsure (1)..(251): unsure at all n locations; Clone ID: 701107874H1
gttttatcatcattctttcatctgtgttgtgttgttttgtgtgtgcaatcctcattnnnnnnnnnnnnnnnnnnnnnnnngcctatcaccctccccatccaccaactgatacccgtaacttcttcaccttcctctccttccccaatttaaaactaaataaaaaaactgnccactaaggttgaggcacgtcaccatctcgtccttcccctcgctcatctncaaatccatggttcggaattagggtttccatt

SEQ ID NO: 34384 - DNA, 247 bp, Glycine max
  unsure (1)..(247): unsure at all n locations; Clone ID: 701107875H1
aagaaaatgaaagtccttgttttctttgttgctatagttctagcagcatggcattgccatggctacagaccatgaccatgaccatggncacacctaccaaattttccctctgagaatgaaaactggccatggtggccactacattccggaggtatcatgccaaagttggaggcttggtgtggaagcacacaacgtcattgactggaaaaccgttcctcaagattgcgagggatatattgggaataca

SEQ ID NO: 34385 - DNA, 247 bp, Glycine max
  Clone ID: 701107876H1
ggcagcaacattgatggcagcaacaacaagttctggtactcttaaagcaactcctttccttggccaaggcaagggtgccaatgccaatgctcttagggatgttgtctccatgggaactgggaagtacaccatgggcaatgatttgtggtatggaccagacagagtgaaatacttgggacccttctcagctcagaccccttcatacttgaaaggagaattccctggggattatggatgggacatgctg

SEQ ID NO: 34386 - DNA, 251 bp, Glycine max
  Clone ID: 701107877H1
ctctctcgcacgctatggccactgttctcagaacccccaccttccggccaccgcctccgccgcgcgccgcaaagtcgccgaaatcatcgcgcttcgccgtcgtgtccttcagacagagcaccacctgcgggagaaaaccctcctcgcttctctcctccctgccgttccctaatgttccctctctacggttcgtcaggttcgttcccttcgctttcgacggcgacaccgaggccccgcaagttcaggagccg

SEQ ID NO: 34387 - DNA, 73 bp, Glycine max
  Clone ID: 701107878H1
gtggaatcaccaatcttgtaacggaactttttgataactagctgtgtgaagacgaacaactgcgcacccattt

SEQ ID NO: 34388 - DNA, 256 bp, Glycine max
  unsure (1)..(256): unsure at all n locations; Clone ID: 701107880H1
attantattaattactaaggaactctcccagaaaagaggnatcagttgcaatggctcgttacggtgagggcgacaagcggtggatcgtggaggaccgccccgacggcaccaatgtccacaactggcattggtccgagaccaactgcctcgactggtccaagaccttcttcaccagcctcctcactaacctcccaatcctcgacggcgagggtaacctcttcctcaaaacgacgtcgcttcgctccctcgacggcga

SEQ ID NO: 34389 - DNA, 258 bp, Glycine max
  unsure (1)..(258): unsure at all n locations; Clone ID: 701107881H1
ggttgggttntctggagaagcaagcaggacttgcctgaggaactcatctttcacatcaactatcttggggctgatcaacccaccttcacccttaacttctccaaaggttctagccaagtcattgctcaatactaccaactgattcgccttggttttgagggatatagnanacgtgatggaanactgcagggacaacatgctggtgctgaaacagggactngagaaaacagggcgattttcaattgtgtccacagacat

SEQ ID NO: 34390 - DNA, 192 bp, Glycine max
  unsure (1)..(192): unsure at all n locations; Clone ID: 701107882H1
ggaattgtngtaacttnttgattcctnantnctctaaaattcgnaattctnatttcgttaggggaaagagattgtttgtgtgtgngtgagtatggcngnaaaaggcgagggtcctgctatcggantcgantngggaacgacgtnntctngcgtcggcntgtggctacacnatcgtgnngtnntcatanccag

SEQ ID NO: 34391 - DNA, 257 bp, Glycine max
  unsure (1)..(257): unsure at all n locations; Clone ID: 701107883H1
atantggcagaaacagaagacaaaacccttcaagcctcgcccatgaacgaaaccaagaagatgaagaagaataagaataagaagnagagcgacaaancaagacctcgggagattgctaccgaggagcgtccagaggaagaggagaatgagaataatacagatagcgatggagaatcctcnnnnnnnnnnnnnnnnnnnnnngtggnaggngaaagtgaagtgnaggggaaacaggtgaaggaccattggngnctntg

SEQ ID NO: 34392 - DNA, 252 bp, Glycine max
  unsure (1)..(252): unsure at all n locations; Clone ID: 701107884H1
gnctcagggagagaatggagagtagcgaggaagaagatgatttcccttccattgagagcatcattccccagtccaaggttgactctctctatcagtctcacaccgaaaaggggatcaggaagctttgctgtgagctcctagatttaaaggattctgtggagaacttgtgcggcaatatgcactccaagttcttggctttcttgaggatatctgaagaggctgtggaagtaaagcatgaattgattgagctgc

SEQ ID NO: 34393 - DNA, 253 bp, Glycine max
  unsure (1)..(253): unsure at all n locations; Clone ID: 701107885H1
gccanngagctattanaanaccatgaccttgaggttagnggncgatctaaattacttagccagcagaaattgtcctacaatgggttagagattatattttccgcatatggtgagttttggagcntccattagaaaaatttgtgttgttcatgtccttagctccaggcgtgtctcaatgttttcctcaatgagagaatttgagatcnagcaaatgattagaacaatatccttgcacgcctcatccttcaaaagt

SEQ ID NO: 34394 - DNA, 240 bp, Glycine max
  unsure (1)..(240): unsure at all n locations; Clone ID: 701107886H1
aagaaaatacacattacattactaagtctttgttcatttgagtagtagtgatngctagcctcaagnntgcatgtgtggttgctgtgatgtgcatggttgtggtggccatgagtgctgcacccatggcacaggccgcaatcacgtgcgggcaggtcgccggcgacatgtctccgtgcttcagttatcttcgaagcggcggaaaaccgtcgcaggcctgctgcnacggagtgaagtccctcc

SEQ ID NO: 34395 - DNA, 247 bp, Glycine max
  Clone ID: 701107887H1
gccaaagagctattaaaagaccatgaccttgaggttagtggacgatctaaattacttagccagcagaaattgtcctacaatgggttagagattatattttccgcatatggtgagttttggagagaaattagaaaaatttgtgttgttcatgtccttagctccaggcgtgtctcaatgttttcctcaatgagagaatttgagatcaagcaaatgattagaacaatatccttgcacgcctcatcttcaa

SEQ ID NO: 34396 - DNA, 253 bp, Glycine max
  unsure (1)..(253): unsure at all n locations; Clone ID: 701107888H1
tacgaattgaacttgcgtngctgaagaataacatagtgagttgtgcactctgcagaanctccacgnacttccncacnacctanaaaaangaaaatgaagcntgacgtagatgtcttgagatancnctccaaanatgannttagggttctcactgctgttgaattgggcatgcggnancatgaaaancgnacccactgaanncanagaccgaattgcgcgtctcaagcatngaggcagtacaangntttgaaaa

SEQ ID NO: 34397 - DNA, 249 bp, Glycine max
  unsure (1)..(249): unsure at all n locations; Clone ID: 701107889H1
gaggaagaagtgtganaaaatggcggcggctgcgaactctgagggcaatgctcagaaaccgagttcggaaacgtttcagttattctcttcctccgcttccgccttcggaatcttcgacgatgctgcgcaacaagtnnnnnnnnnnnnnnnnnnnnnctgcgttgaagtcctcgcttctgaggttccttcatccctcaaacacaacgtggactctgtaaatttagatggagttattttgttaaaggggcg

SEQ ID NO: 34398 - DNA, 247 bp, Glycine max
  unsure (1)..(247): unsure at all n locations; Clone ID: 701107890H1
aaaaagataagtcaagttatacaagcaaagggaggacanataaggatctcatctgatggtgcccctactatgaggcatagcctctctgatggttccttggacacaatggctcgaagacctgctgatcctgaggaagaactccgatggatgtcacaagaagttcgtggatatgttgaagcagttttaaatagtttagctgctaatgttccaaaggcagttgtcctttgtcaagttgaaaaggctaagg

SEQ ID NO: 34399 - DNA, 249 bp, Glycine max
  Clone ID: 701107891H1
tctggtcatcgttgggatctccatacgccggatctgctaaaatacgcttgatccatatgggcctcctacgaccacttgtgggacgacaccgtcgccggcccaaggccggaaaacggtctcggcaagctccgaaaacaccacaccttcactttccgacctagctccggcaagggtacgccctgcctcgttaatcatactcatataattcaccaacgattttcgttaactacaagtccacaactacaatcg

SEQ ID NO: 34400 - DNA, 254 bp, Glycine max
  unsure (1)..(254): unsure at all n locations; Clone ID: 701107893H1
gcttctncactccagaaagacaantggaagctctgctctcccaattncaacttcctctccagaccaggccctacaagacaagnncttcgatccttcgacanccgaagatcnaatgaagctgttcganatcgagtcctacaaggcatgggcagcagctgagcttgagcaagaganagnggtggaagaagcagaggctggcatggaagaagctgaggagtaccttgactcagtgatggagagtgccatggatgngt

SEQ ID NO: 34401 - DNA, 254 bp, Glycine max
  Clone ID: 701107895H1
gtcttgatacaaaaggtaaaaagaccaaccttctttcatcctgaacatggctgctttctttggttccccaccaattttctccctcccccttactattattagaactcatcacatttcttcatcatcacaaactccaccaccaacaccttcaccacaatctcagcctccaacttcgtctccacagcagctaagaacaacaaatttgaatgaggaatcagtgcaagtgtccatgaagctaagcaacagaagcccat

SEQ ID NO: 34402 - DNA, 277 bp, Glycine max
  unsure (1)..(277): unsure at all n locations; Clone ID: 701107903H1
gtntgttgtgagctataagctagtttatcgtgaggagaatatgaagttgtttgttttctttgttgctgcagtagttttggtagcatggccatgccatggcgcaggctaccaaaggttccctctccgaatgaaaactggctatggtgagcgttcttcggaggtaaaatgcgcaagttttaggcttgctgtggaagcacacaacatccgagcctttaaaaccatcctgaagagtgcgttgaaccaacaaaggactacattaatggcgaacatttagatc

SEQ ID NO: 34403 - DNA, 281 bp, Glycine max
  unsure (1)..(281): unsure at all n locations; Clone ID: 701107904H1
ttcgagataactagaaacagtgtgatgaaaatgaaggtccttgttttcttcgttgctacaattttggtagcatggcaatgccatgcgtaacgatatgttccctctccgaatgaacactggctatggtgcccgtactccggaggtgaaatgcgcaagttggaggcttgctgtggaagcacacaacatctttggctttgagaccattcctgaagagtgcgttgaagcaacaaaggaatacatccatggcgaacnatatagatcagactccaaaacagttaacc

SEQ ID NO: 34404 - DNA, 279 bp, Glycine max
  unsure (1)..(279): unsure at all n locations; Clone ID: 701107906H1
gcaccgaaagcaaagtgtctctctaacctctgcaaaagtccaaggttgcacggttttaactgcttaggtttttgtcttcaaaattaaaactgtgcaactttggttgcaaagtcataggggttaagttgtgtttgcatganagtgggcttgagataattgtgcctcttgtatgatggaatccctttggaagcttttgtatttgctggagcctgcgcctgtcacacttatcactacagctgtggctgtnacatttggtgctgcttttcgagctctaaacta

SEQ ID NO: 34405 - DNA, 264 bp, Glycine max
  unsure (1)..(264): unsure at all n locations; Clone ID: 701107907H1
tctaaaagagatctttttctgctctttgaagaaagaagggtctttgcttgattttggagatgtctctgctctcagatctcatcaaccttaacctctccgataccaccgagaaggtgatcgcagagtacatatggatcggtggatcaggaatggacctgaggagcaaagcaaggactctcccaggaccagttagcgacccttcagagctncccaagtggaatatgatggttccagcacaggtcaagctcntggtgaagacagtga

SEQ ID NO: 34406 - DNA, 281 bp, Glycine max
  Clone ID: 701107908H1
gcaacttgtggactccctgtggagcacttgcttcaacgagccatcttctcttcgagagaaaggtcttcttgtgcttccaggtgaagatgcaccccctccagatgttgctagcaaattttttgagcctcctcttagatcttcgactgcgaatccatcttccaagaaagactcaaacaatgaaaagaaagagatccctttgcttttagggtcagggccttctcttgcagacactaacaaccaaggttcaaatagagaaaatgctaatagctgaaagttggatg

SEQ ID NO: 34407 - DNA, 245 bp, Glycine max
  unsure (1)..(245): unsure at all n locations; Clone ID: 701107909H1
tccatggaatccaatagtcggcgacgctttcactctctccggcgacgatgaactcatcgccgacgaaatgagtttgcgccggtttcttctctctcctcgttccgtgagttccttcctctcactccttctccgttctccggtcgccggaaaatttatccggtgttagcgatacggaaaactcatcgcgattccgttttcttcttcgtncgttttctacttctctttatctttcacttacattacct

SEQ ID NO: 34408 - DNA, 273 bp, Glycine max
  unsure (1)..(273): unsure at all n locations; Clone ID: 701107910H1
tttttcaagtaacttaaggtttcaaacctaggaagttggaagtcatggcagcaacattgatggcagcaacaacaagttctggtactcttaaagcaactcctttccttggccaaggcaagggtgccaatgccaatgctcttagggatgttgtctccatgggaactgggaagtacaccatggtactcttcttcttcatgttttatgttttactatcacaaaagttttatggtgttgattacgtaggtggttgatatgtnatntgggtttgtgttt

SEQ ID NO: 34409 - DNA, 265 bp, Glycine max
  unsure (1)..(265): unsure at all n locations; Clone ID: 701107911H1
ttcactcgcacaacacagtacaggagctcaaatatggataaagcaattcaaagacagagagtcctgcttgatcatcttcaacccatttcttcaagttcaaatttttcttctcaaacccatcaatctacggatctctcagcttcattatgttttgccaagaattcttcgcacggtcaaataggtggatcagatgacgacgtggtgattgtagctgcatatcgtactgccatctgcaangcaaggcgngggggctttaaggnncccc

SEQ ID NO: 34410 - DNA, 141 bp, Glycine max
  unsure (1)..(141): unsure at all n locations; Clone ID: 701107912H1
cttaaaaaaacccaaaaaaccaaaaataccataaantttttcagcttctccnccgccgtacagccaccaccttccgtttcggatctccggcggacctactatccctactactctatttacacgnaaganacaaaanaactt

SEQ ID NO: 34411 - DNA, 135 bp, Glycine max
  unsure (1)..(135): unsure at all n locations; Clone ID: 701107913H1
tgcatatggncatggcanctacaactgcagttacactaatgttacatcttcattatatccacaatcgggttgganntgttcttgcagcgatggctcgagggaaacccctacatacaaganggctgtaaattaagt

SEQ ID NO: 34412 - DNA, 118 bp, Glycine max
  unsure (1)..(118): unsure at all n locations; Clone ID: 701107915H1
caacgaaatgcatttcccggaaaacagaatgtggtgattacncctagaaaggtggccttaccagagcatgtggcactttagcaaacagttagtggtagtttatgttccaatcttgaac

SEQ ID NO: 34413 - DNA, 138 bp, Glycine max
  Clone ID: 701107916H1
ggatttgatacgcaaatcagccaatgagataagagggccttcaacagccacaaccttgatcttgcacttagccagttcggtccctcacttaagccactgtgtggaactaacaacaacacaaggccatcatcatggcag

SEQ ID NO: 34414 - DNA, 137 bp, Glycine max
  unsure (1)..(137): unsure at all n locations; Clone ID: 701107917H1
gttgaaatgactctgaagttgatggagcgttttggagtttctgtggaanacagtggtaattgggataagttcttggtccatggaggtcaaaagtacaagtctcctggcaatgcttttgttgaaggtgatgcttcaag

SEQ ID NO: 34415 - DNA, 281 bp, Glycine max
  unsure (1)..(281): unsure at all n locations; Clone ID: 701107918H1
aaattgtgtgaatcaaatgaactacttgaaatgtgtagtcaaagaaactttgagattancatccaccccttcctacttttgattgcncgagagacatcatcaagtgtaaaactaaganggtacgatattcccgcaaaancaatggtatttatcantgcntgggcgatccagagggatcctgaattatggggatgattctgaagaatttattcccgaaagatttgaaactagccaagttgatcttaatggncaagattttcaattaatnccgttcggtatng

SEQ ID NO: 34416 - DNA, 267 bp, Glycine max
  unsure (1)..(267): unsure at all n locations; Clone ID: 701107919H1
atatttttctcactgtcttgtctctccagagaactgtatagagagagatggcagctgcaacatctggtgctgtgttaaatgggttgggatcttcctcttgagtggaggaaacaggagccaaacccttctggccactgctattggaggcaaattggtgctgctgctgttactgttagtccnagaagactcattgtggtagctgctgctgcaccaaagaagtcaggtccctggtgtcaaagtggtggcactcgtcgacccagatggctg

SEQ ID NO: 34417 - DNA, 276 bp, Glycine max
  Clone ID: 701107920H1
atcacatgcacccgcgattcctacgatcccttcccatggtctcttctctgcaccctgcgccgtaccttctagaaccttccctcagatctcaattccccttccgctttctcctttcatggaaatggcttccactccccgcaccgtcgaagagatcttcaaggactacaccgcccgcagaaccgccatcgttcgcgctctctctcaagatgtggatgaattctacggactctgcgatccagataaggagaattgtgcctctatggacatccgaatgaa

SEQ ID NO: 34418 - DNA, 268 bp, Glycine max
  unsure (1)..(268): unsure at all n locations; Clone ID: 701107922H1
cacatatttgccgtgagcatgncntgatgactttgacagattcatgaaggtgcctaatgagtgggctcctcctgaaactaagccatatgctccaggggaaaatcttcaacactggctcactgatgcaaaggccagggaccagtttgtgattcgtgctggttcggatactgaggttttgtggaacgatgccaggcatttaaagcctgatcctgtttataagcgtgcattttggacagagagttttgtgcaatgncctcctttggggaca

SEQ ID NO: 34419 - DNA, 277 bp, Glycine max
  Clone ID: 701107923H1
gtgaacatctaccctagcggtgtgaactgaaccaacttcactgcaccagaaaggctttcaaccatctactccacttcttcacactctgtgtgtgtcctgactcctgatgttctgctttgttttctctttgacaaggaaaataacaatctcttcttaatggaaataagtattgcaaggtctcatctcgaaacacagggaatattcttttcaaatgtttcaagaacgataggatgggaaagcaccaagaaacttccatgtaatgtggcttcccagagtt

SEQ ID NO: 34420 - DNA, 272 bp, Glycine max
  unsure (1)..(272): unsure at all n locations; Clone ID: 701107926H1
gcaaaagcaagaagaactagtctaagcagaaatggcctcttcagtgatggcatctgtggccctcaaacctgcccctttcactgttgagaagtcctcagttagaggccttccctccctctcaaggaactcctcttcattcagagttgtggccagtggtggcaagaagatcaagactgacaagccttatggnattaatggtggcatggctttgagggaaggagttgatgcatctggcaggaaaggaaagggaaagggcgtttaccagtttgtag

SEQ ID NO: 34421 - DNA, 132 bp, Glycine max
  unsure (1)..(132): unsure at all n locations; Clone ID: 701107927H1
ctgtcatgctggtgaccacttgcttaatgtctctagttatagtcttgtgctggcacaagaacatactgctagcagtttgcttcatattgttctttggttccattgaagcacnctatntctcagcatccctca

SEQ ID NO: 34422 - DNA, 265 bp, Glycine max
  unsure (1)..(265): unsure at all n locations; Clone ID: 701107928H1
atcgcaattaccccaaattcctcaccctagcgtagagccgatctcttcttccttcgtgaattctggttcagggtggctgccatgtatggcacttagtattttccctttttgaagattaggggtgggtgggttgtgtctcgcttagggttccaaagtttgttgttttgaatggaaccncgcgtngggaataagtttcgcctgggtcggaagatcggaatggncctntggggagntctagtgaggcatnngantcagacaaatggag

SEQ ID NO: 34423 - DNA, 272 bp, Glycine max
  unsure (1)..(272): unsure at all n locations; Clone ID: 701107930H1
ctggccttttgttctcgtgtcaatttctaaatccaccaccacacnctctcttctattctctattattattatctccacacccttcactctcnctcactcttctctgcgaatcttccaccgcaatggccacnactggccgagaaactctccgctctcaaatccgccgtcgccggattgancgaaatcagtgagaatgagaagaacggattcatcagcctcgtcggcngcnatctcagtggcgaaggcagcatgtggatggagcaagatccaga

SEQ ID NO: 34424 - DNA, 84 bp, Glycine max
  Clone ID: 701107931H1
aatccttttataacatttatagtttcattcttaatcgttgggaaaaatgttcatcgagaattttaaggtagagagtcctaatgt

SEQ ID NO: 34425 - DNA, 272 bp, Glycine max
  Clone ID: 701107932H1
ttacaatctcccaagtttctaatctcagctaagaaaaaccaaaagatgtctctgattccaggtttcttcggtggccgaaggagcaacgtgttcgatccattctcactcgacatgtgggatcccttcaaggattttcatgttcccacttcttctgtttctgctgaaaattctgcattcgtgagcactcgtgtggattggaaggagaccccagaggcacacgtgttcaaggctgatattccagggctgaagaaagaggaagtcaaggttcagat

SEQ ID NO: 34426 - DNA, 275 bp, Glycine max
  unsure (1)..(275): unsure at all n locations; Clone ID: 701107933H1
gagtttacatcatacttccactactgccgaacgtncgcggtttgaagataagcctgattattcttatcttaagagactatttcgggacctattcatccgagaaggttatcagtttgattatgtatttgattggactatgctgaagtatcctcaaattggatccagttctagagcccgagtgagtacttaactagtgtggtttcattgcattctagcganaattaaaggttcttgttaatcatttttggctgcattttcaacagccagtgggaanc

SEQ ID NO: 34427 - DNA, 275 bp, Glycine max
  unsure (1)..(275): unsure at all n locations; Clone ID: 701107934H1
gnncatgnntcnggananggttctnctnctttncggggacttcatggnagactntgaagccatggttccatttcaggcnttgcaagccttcggtctcgccgtcgangcgtctgtcccggaaagaaatccggcgatgtctgccgnaccgntgtccatgtacttgccggcgcccagacttatagtgagacggttggncacaatttttcactcaatgcaacgtttgatgaagttgatgctgcaagctatgatgggttgtgggtgccaggtggganggt

SEQ ID NO: 34428 - DNA, 268 bp, Glycine max
  Clone ID: 701107935H1
ttatattctctcactctcttactctttcactctacttctctctcctattgcggctagggtttaggtttttctttcaccgtctccgttccttcaatcttcttattctctttcatctctgatggagacgttgcgggtttagttctaaggggtggttctggccttgggtttttggaacgtacggtgtcgttttggggttgggaaaacaaatctgagagatggcaaccacgaacccttttgattgttgggtgacgacgctgaggaccctctc

SEQ ID NO: 34429 - DNA, 271 bp, Glycine max
  unsure (1)..(271): unsure at all n locations; Clone ID: 701107936H1
tcaaaatcaaaattttcactcgcancacactgcnnaatttcggagtgtggctggctccatggctgaactctacaggctcagctccgtcgagtggagcccttctccggtcatcgctttagccaccangnntcgacggctcccgagtagccgncgctcgcaaagacggctccctcgaaatctggctcgtctctcccggctccatcggctggcactgtcanctgactatacacggnaaccctaccggaagntgacgtcgttatttggngnccgg

SEQ ID NO: 34430 - DNA, 272 bp, Glycine max
  unsure (1)..(272): unsure at all n locations; Clone ID: 701107938H1
gaaaatcactgtcatgactgctgatgnccaaatcatcacgttagatgtggatccccacgaatctgtggaaaacgtcaaagcattgctcgaggttgagacaagtgtgcctcttcaacaacagcagcttctgtttaatgggaaggaagtgaggaattctgagaagttgagtgctcttggtgttaaggatgatgatttgctaatgatggtgtctggtgctggcgctggcgctaactgcttctagtggatctacgatgattngagcttaaatgctg

SEQ ID NO: 34431 - DNA, 272 bp, Glycine max
  unsure (1)..(272): unsure at all n locations; Clone ID: 701107939H1
tataaatccttcgtggtttttggtgaccctttgggttctatagtgagtccaaggtaacccactttggattggaaggttgtcgcaatggggaaggttgtgttgttgtttctttgcannnnnnnnnnnnnnnnntctttggcttgtgctgattcaattgagaagcttgaggttcagaagcacttgaagaacttgaatagacctcctgttaggtccatcaagagtcctgatggagatgttattgactgtatccatgtctcacaccagccagcttt

SEQ ID NO: 34432 - DNA, 265 bp, Glycine max
  unsure (1)..(265): unsure at all n locations; Clone ID: 701107947H1
ccactccttcactgctcatccaaaagttgacccatttactggggagatgtttacacatacagngtaatttcaaaggatggttatatgcatgatccggtacccataacagtatcagatcccatcatgatgcacgactttgccatcacagagaactacgcnaatatttttggatcttcctttgattttaggccaaaggtattcccaggtggtttcggtcctatattctcgtaaaagcttaattccaggtggaanctctttttntggg

SEQ ID NO: 34433 - DNA, 269 bp, Glycine max
  unsure (1)..(269): unsure at all n locations; Clone ID: 701107948H1
tttgatacgcaaatcagccaatgagataagggggccttcaacagccacaaccttgatcttgcactaagccagttcggtccctcacttaagccactgtgtggaactaacaacaacacaaggccatcatcatggcagctgcttctcctatggcaagccaactcaagtccaccttcactaaaactcttgtagctcccaagggcctctctgcctcttcaccattccacctcctgccttctaagaggcatttagcttcantgttngggccatcc

SEQ ID NO: 34434 - DNA, 144 bp, Glycine max
  unsure (1)..(144): unsure at all n locations; Clone ID: 701107950H1
ttcanacataagctacaanctagacttcgtcanacaaaaatctgaaatttgagctcanaacanganaaaaacaagaatgaaacctacgntcaccantttgngctctctactanntttnatagcttcnccctccttgggnacccg

SEQ ID NO: 34435 - DNA, 268 bp, Glycine max
  unsure (1)..(268): unsure at all n locations; Clone ID: 701107951H1
gataataaatgaactgctgctggttcttcaaccgctactatgactcctagctcgtcttcaaaacgtcgccgttttggagtctcacgagcggcgaatcggaattatcgaggtcgaccgaaacggccttggagttgagcaggatngaaccggacggaaacctcgccgccagctgttccgggatcgccgatatgcccctcgctggaanatngttgtctccgagggcgaggcatttgnaagatgaattgaacaagcgcgacgtcgtttccag

SEQ ID NO: 34436 - DNA, 271 bp, Glycine max
  unsure (1)..(271): unsure at all n locations; Clone ID: 701107952H1
gtgtgnttgnaanttaagaagtagcaaagatgtttccattccgggcacaanggnccaaaagatnaaggggactatggtggttatgncgaagaatgtgttggatatcaacagcatcannagtgttgacgggatcgtcggcaccggcttagacttcttangcagtgcactcgatacagttacttttttagcctcctccatctccatccaacttattagtgctaccaaggntgatggtgggaaagganaagttggaaaggctacaaatttgaga

SEQ ID NO: 34437 - DNA, 269 bp, Glycine max
  Clone ID: 701107953H1
tgggagggtccgaagttggagatagtgattctggttctgttctgttcttctttctactcacaacaacatcagaatcagaaacaacaatggccaacactaacttggaagatgttccctctctggatctcatgactgagctccttcgtcgtctcaagtgctcttccaaacctgacaagcgtcttattctcattggcccacctggatctggaaaaggcacccagtcaccaatcataaaagatgagtactgcttatgccattagctaccggtg

SEQ ID NO: 34438 - DNA, 270 bp, Glycine max
  unsure (1)..(270): unsure at all n locations; Clone ID: 701107954H1
attaagttggaccttggtctttctattgtagcttggaatggtcagtactgttgccatatatgattagttaatggagangaaagaatggctacatacaaattgcaatgacatcagttggaagtcttcaaagtttttattatgtgaaagatgatcaatgttgtatgcatggtgtgtgtgattctcaatgattttgtgatcatttctaatgtcaataatgggatgatcagtttaatggcatttatggggtgttatgtccaggagggagacatg

SEQ ID NO: 34439 - DNA, 271 bp, Glycine max
  Clone ID: 701107955H1
gagaatgaggaacacatatgcgtattgaaggaccgcaacaaaccaataatcttcaccatggcaaggcttgaccgtgtgaagaacatcacggggcttgtcgagtggtacgggaagaacgcacgcctccgcgagttggtgaacctggtggtggtggctggagacaggaggaaggagtcgaaggacttggaagagaaggccgagatgaagaagatgtatggcctcatcgagacctacaagttgaacggccaattcagatggatatcctctcaga

SEQ ID NO: 34440 - DNA, 243 bp, Glycine max
  unsure (1)..(243): unsure at all n locations; Clone ID: 701107957H1
gtttttttaatacatatgtgtttacntaatggggtgtgtacgagtctgtttcctatgatnctgtctctaggtctgtagattagatcagaattgaatccaagtggtgcagaattcagagcagcatttggtgtccaaaagaagaggagtaataggagagaggtgataaaggtgtcaagaatggggatacctggtgttgatggagaattgaagaagattttgaacgctaacatggacgaattggtg

SEQ ID NO: 34441 - DNA, 265 bp, Glycine max
  unsure (1)..(265): unsure at all n locations; Clone ID: 701107958H1
ggcaaaagctggaaaactcgacccagtcataggaagagatgatgaaatacgaaggtgcatccaaattctctccaggaggacaaagaacaatcccgtgctaattggtgaacctggtgttggaaagactgctatttctgaaggactggctcagagaatagtgcacggagatgttcctcaagcttngatgaaccgtaggcttatatctctcgatatgggagcacttattgctggagcgaagtaccggggagaattcgaggataggctg

SEQ ID NO: 34442 - DNA, 264 bp, Glycine max
  unsure (1)..(264): unsure at all n locations; Clone ID: 701107959H1
attttaatcacgcgcacatcagcacaacacancaattccactaagctaaaatcacttcatcatggcttcctcgtgtgcttcctctgccattgcagctgttgccatctccacaccaagttcccagaagaatggatcactcttgggaagcacaaaagcttcttttcttagtgggaggaaactgaaggtgaacaactttacagcaccagttggagcacgatccagcactacagtttgcgcattgctgagcctgataggcctctgtgg

SEQ ID NO: 34443 - DNA, 138 bp, Glycine max
  unsure (1)..(138): unsure at all n locations; Clone ID: 701107960H1
gaagaagangaanaaaagggttttgtgtgtgtcgaagtggataattccttccttcaattaatctccgatccgaaaccgtatggggattctatacgcactggtaggtcgcggatcggtggtgctggcggagttcagcgg

SEQ ID NO: 34444 - DNA, 141 bp, Glycine max
  Clone ID: 701107963H1
cttgccataccatcttacttttactttgttttcacaacatagccatggccatctccagcaacgcttctccttttgattccatcatcttcgatttggacgacaccttgtacccgtcaagcaccggtattgacaagtgcgtca

SEQ ID NO: 34445 - DNA, 211 bp, Glycine max
  unsure (1)..(211): unsure at all n locations; Clone ID: 701107964H1
cgaacaaacacaaacatggatgcatcnaaactcaatcnattgaagcatttcatcgaacagtgcaagtccaacccttccctcctctccgatccttcactctccttcttccgcgactatctcgaaagtctcggggcgnaactccctgaatctgcttattccgaatcgacgggcgtggagagcgatgaggncatagaagatgttacggaggagc

SEQ ID NO: 34446 - DNA, 271 bp, Glycine max
  unsure (1)..(271): unsure at all n locations; Clone ID: 701107965H1
atttccaactaaccaactactctctctatcactctcccatggctttccncttccctctttctctcactctctctcaccctttgccttgtttccgtctctggctatgctcacaaatctnccttaaccctacctgtgacaaaagacgattcaacccaccaatacctaacaaccctctcttatggcacccctgttgagtctgcnaaattcgtgcttgatctcggaggtcaatcctctgggctgactgtgcatccagaaccaccccatcttccac

SEQ ID NO: 34447 - DNA, 266 bp, Glycine max
  unsure (1)..(266): unsure at all n locations; Clone ID: 701107966H1
ctcactttcatttctacatccctggctctgttccgtcgatgacgatggcgtttagggtgcgaaaccctgacctccgctttctcattcttctcttctctcttgtccatcacttccgccaaggtcttcttcgnggagcgtttcgatgacngatggggaaatcgttgggntaaatcagattggaaaaaagatgagaactggctggggagtggaaccacacctctngccaatggaatggagacgctaacgacntaggtattcaaacagtg

SEQ ID NO: 34448 - DNA, 265 bp, Glycine max
  Clone ID: 701107967H1
gagcaacaagaatcacacacagagcacaaggaatagtggcaattgccacaagatggcacatgcttgtgactgaagcatcttctgaatcaaagcaatgcaaagctcgagtgtcagaaggacttgctagtgacagtgattctgatgattcctccaacatacatgtgtcagtgatcccatcacaactttcttctttccaaaccagacaaactttagtgacgtatttacaacacaatcaaaggggataacggtgtatgggtatcattga

SEQ ID NO: 34449 - DNA, 266 bp, Glycine max
  Clone ID: 701107969H1
cgagataactagaaacagtgtgatgaaaatgaaggtccttgttttcttcgttgctacaattttgcgtagcatggcaatgccatgcgtacgatatgttccctctccgaatgaacactggctatggtgcccgtactccggaggtgaaatgcgcaagttggaggcttgctgtggaagcacacaacatctttggcttgagaccattcctgaagagtgcgttgaagcaacaaaggaatacatccatggcgaacaatatagatcagactcca

SEQ ID NO: 34450 - DNA, 218 bp, Glycine max
  unsure (1)..(218): unsure at all n locations; Clone ID: 701107971H1
cagaacaaacaaaacccacacttcactcccatccaattccaaacccacgttgttgntggtgcatggaatgaccgagtaccggatgaacctgtggaccgacgacaactcctccgtcatggaggccttcatgagctcctccgacctctcctccctctggcttgccacgccgcagtccgccacctccaccacaactccaggcncggcaaaagcccctcctc

SEQ ID NO: 34451 - DNA, 269 bp, Glycine max
  unsure (1)..(269): unsure at all n locations; Clone ID: 701107972H1
gtccaaatccaagtacggttgggttngagagaaaatgcgtccctgctgaaaacaccaaaccctaaaacgcgaaaagggttctaagaatttgcgaaggaaagagctagcggagatggagattcactacagtaacagctatttcgagaggcgccccatcctcaagtccaaggctgccgctgtcaaatgggtcaaagaatgggttccccaagatcttgtgacaacaggagggaagtgcatgatcttaaaatgggtaacngaggntacttgna

SEQ ID NO: 34452 - DNA, 262 bp, Glycine max
  Clone ID: 701107973H1
ggactctctatgggaattcaaggtactgaagtggcgaaagagagctcagatattgttatattggatgacaattttgcatctgtggtcactgtcttaaggtggggaaggtgtgtttacaacaacatccagaagttcattcagtttcaattgacagtgaatgtggcagcacttgcaatcaactttgtggcagcagtgtcagctgggaaagtgccactaacagcagtgcaattattatgggtgaacttgatcatggacacattag

SEQ ID NO: 34453 - DNA, 263 bp, Glycine max
  Clone ID: 701107974H1
acagaacagggactcactctgggcagcggcactctcggtggctataatctttctgtggtgagttgtcaagatgtacacatcaaggaagaaaatccacaaggataaggatgctgagccaactgaatttgaggaatcagtcggacaggcattgtttgatctggaaaataccaacaatgagctgaaaagtgatctgaaagatttatacataaactcagctgtccaaattgatgtttctgggaaccgcaaggctgtggttatccatg

SEQ ID NO: 34454 - DNA, 261 bp, Glycine max
  Clone ID: 701107975H1
tcaatcaccattttcctcatagggggtgaagaaaaattaagaagcattataattaagccaaagtggtcatagatatggagggtcttctgcctcttgtttacaaagcaatcaagagaaacaaaacacgacggcaatatgagtgtctttcatcaggaacctctctagggtacaacatcagcatgcccgagatgtaccctcaaactcaggaccatgtccttcagaatcagacacatacccagaaaatgtttcaccaccctgaag

SEQ ID NO: 34455 - DNA, 260 bp, Glycine max
  unsure (1)..(260): unsure at all n locations; Clone ID: 701107976H1
attcgctctgtgcagtttcctcgctctcttttctgcaattttcttttttgttccttctctgcggttatctttttgagcttcaatggcggacgctgaaaccttcgctttccaggctgagatcaaccagcttctcagcctcatcatcaacaccttctacagcaacaaggagattttcttgcgtgaactcancagnaacgcttctgatgctttggataagattcgatttgagagtttaaccgacaagagcaagctcgatgctc

SEQ ID NO: 34456 - DNA, 259 bp, Glycine max
  unsure (1)..(259): unsure at all n locations; Clone ID: 701107977H1
ctcagatcaacgaaaaaaagaggtttcattgtcatggagntgaattcacagaagagaccattttcaatcaaattatggcctcctagtcagaacactaggcagacccttgtggagaggatgnccaacaatcngactactaaatctcttttcacacagaagtatggncctttggacaaggaagaggctgaagagatgcaaagaggattgaggatgtggcttttgctactgngaatctacactatgagaaaggccagntggt

SEQ ID NO: 34457 - DNA, 137 bp, Glycine max
  unsure (1)..(137): unsure at all n locations; Clone ID: 701107978H1
gcaatggcctcaacctcttctgcnctcactatatcctcttcttccacccttcttgatggcaaggctccaagacagtcaccagctgcttcccctcaatgtgtgagcctcncccctccccctttgcactctcagaaccg

SEQ ID NO: 34458 - DNA, 139 bp, Glycine max
  unsure (1)..(139): unsure at all n locations; Clone ID: 701107979H1
tcaaaattacacacatttagctancnttactttctatggcntccaacaaactcctggccncccattttggtgctttctctcctctctnactcaacattacactcatgccaattgcccacnanccactccatctcnaaag

SEQ ID NO: 34459 - DNA, 140 bp, Glycine max
  unsure (1)..(140): unsure at all n locations; Clone ID: 701107980H1
aattcattccattggcagtagtagcnacgtncgttgtgtggcggtgncaaccatggccgactcatctcaagaccttgaaccaacttctcgatagtggctttggatgattgtcagtcnttcaacctcaatcctccccctcc

SEQ ID NO: 34460 - DNA, 261 bp, Glycine max
  unsure (1)..(261): unsure at all n locations; Clone ID: 701107982H1
aacaagtggcgannccagtttgancgctatttttgtttgtgttcccagcgaaagggcaaaacaaagtataagaccttgctttgatttgcttcccttttcttgttgtcgtgtcaaccatggcgtcgtttgggtctctgaaatccaccattttcgaaaaagaagagagaaaacagcagtatcagtcgcatattcgaggcctcaatgcatacgaccgtcacaananattcnggacngattacgttaaattttaggaaaagaaag

SEQ ID NO: 34461 - DNA, 263 bp, Glycine max
  unsure (1)..(263): unsure at all n locations; Clone ID: 701107984H1
agaaacagtgtgatgaaaatgaaggtccttgttttcttcgttgctacaattttggtagcatggcaatgccatgcgtacgatatgttccctctccgaatgaacactggctatggtgcccgtactccggaggtgaaatgcgcaagttggaggcttgctgtggangcacacaacatctttggctttgagaccattcctgaagagtgcgttgaagcaacaaaggaatacatccatggcgaacaatatagatcagactccaaaacagt

SEQ ID NO: 34462 - DNA, 231 bp, Glycine max
  unsure (1)..(231): unsure at all n locations; Clone ID: 701107985H1
attgtttgaactatttaacttacttttgaacttagccgaatttatttctcatatgaacaatgttacttaagatttaagttttgtcgagttttgtntgtggttttgtccgtgaatgttgtacttctgttatttggtcctgcatcggtgtatttttgatccataggattttgcatcggtgttggttcgaactatttgggaattttgcttgaaagataagatagtagtattttc

SEQ ID NO: 34463 - DNA, 265 bp, Glycine max
  unsure (1)..(265): unsure at all n locations; Clone ID: 701107986H1
tgactttgggttgggtttcgtctcaactcaacaaacgtcgtcgncctgcatttcccaaccttcctccaatggcttctgcttccttaatcaactcgttgacttgttcttcgcgtgctcccactcagcactgttccactttcacccgcaccnccgccgccacgtcactgagacaatttaacagccactgtcggagaccactcgcgacgaggatctcgccgccttccaccgttgtctgcaaagctgtctccgttaagccccaaaccga

SEQ ID NO: 34464 - DNA, 244 bp, Glycine max
  unsure (1)..(244): unsure at all n locations; Clone ID: 701107987H1
aacctccaaaacacaacaccacaangaaacaaaacaacccattgagagcttgcacaactctcatggtagtagtagcactactacttcacacactctctctctgagtgcctcacaccacagattctgtgatatatataccaatggaggccctcaatgctgctggcttgacccctctatctgtgctctctgatgcaaaaacaacaagaactaaacacccttctgtttctgtatgcaaagtctcaaa

SEQ ID NO: 34465 - DNA, 140 bp, Glycine max
  unsure (1)..(140): unsure at all n locations; Clone ID: 701107988H1
ccagttcctngatctctcctctcaagatgcagatattcgtgaaaactttgnccggcaagaccatcacccttgaggtngaatcctccgnccaccattgacnacgtaaaagctangnttcaagacaaggaagggatcccact

SEQ ID NO: 34466 - DNA, 259 bp, Glycine max
  Clone ID: 701107989H1
gagcaactaccatggctaccgctccttcgcttctacactcatctgggtcctcttttttctctcaatttcgagcctttcaattctcttcttcttcgctgttccctcatggaaacaggcatgggaatgccgtggtctctgtgaaggcctctgcttctggggttgtgttggtggagaagtctgaggcagagaaggccaataggctcaaaacagcttacactgagaaaattattcccttgctcaggaagagttctcttacacc

SEQ ID NO: 34467 - DNA, 259 bp, Glycine max
  unsure (1)..(259): unsure at all n locations; Clone ID: 701107991H1
ttcataatttcttccaacaaattatatttttcttacaaaaaaaatggcaggtgaggtggtgaagaaggaagagtctctcaacctgaaagtcactaacaagagccatgttcaatcagaggagaaaattggaagaaaagagtaccaattggtcacttttgatcttccctacttggccttttactacaaccagaagctcttgtttnacnagggtgaagatttcgagggcatggtccaaaaactcanagttggacttggagtg

SEQ ID NO: 34468 - DNA, 258 bp, Glycine max
  unsure (1)..(258): unsure at all n locations; Clone ID: 701107992H1
gcttcttcactccagaaagaaaaatggaagctctgctctcccaattcaccttcctctcagaccaggccctacaagacaagaacttcgatccttcgacaatcgaagatctaatgaagctgttcgagatcgagtcctacaaggcatgggcagcagctgagcttgagcaagagaaagaggtggaagaagcagaggctggcatggaagaagctgaggagtaccttgactcagtgatggagagtgccatggatgngtttagac

SEQ ID NO: 34469 - DNA, 260 bp, Glycine max
  unsure (1)..(260): unsure at all n locations; Clone ID: 701107994H1
ccaaattaggattaggattagggctaccaataccaataccaataccaattctattctatggcttgctcaagcgcccaaatacacggtctcggaaccccttcctcccgaaccctatttttaggtcagaggctaaataccanggccgcctttatcaagctcaagtccacacctagaagactccgccctctcagagtggttaatgagaaagtcgtcggtntcgatttgggaaccaccaactcngccgtggcngnnnnggaggg

SEQ ID NO: 34470 - DNA, 135 bp, Glycine max
  unsure (1)..(135): unsure at all n locations; Clone ID: 701107995H1
gactagggaacagtataagcttttctgaatgtggagggattganattgaggagaattgggataaggtcaagactgtatttatgccaacaggagtgtctcttacatcagagagtattgccccacttgttgcaacac

SEQ ID NO: 34471 - DNA, 288 bp, Glycine max
  unsure (1)..(288): unsure at all n locations; Clone ID: 701108002H1
cggatctagagtcttcagtttctcctcgttgttcttcgctttcctgttttcaatttcgnttctntcgttaatttaataagatgtttgggagggcaccgaagaagagcgataatacgaggtactacgaaatcctcggcgtctccaagaacgcttcgcaggatgatctgaagaaggcttacaagaaagccgccattaagaatcaccccgacaagggcggtgatcccgagaagtttaaagagctggcgcaagttatgaggttctgagtgaccctgagaagcgtgagatata

SEQ ID NO: 34472 - DNA, 285 bp, Glycine max
  unsure (1)..(285): unsure at all n locations; Clone ID: 701108003H1
cacttacaaagtagtactacttggtttcaatcaaaacaaaaactcacactttggtggccacagcaacaataacaatggcagcctcactacaagctgcagctaccttcatgcaacccaccaaggtgggcatggccactcgcaacctcaaatctacacaatgcatttctaaggcttttggcttggaacccgctgcagctanactcatttgctcccttaagcccgatctcaaagattttgctcaaaaatgtgtcgacgccaccaaaattgcaggattcgcccttgcca

SEQ ID NO: 34473 - DNA, 280 bp, Glycine max
  unsure (1)..(280): unsure at all n locations; Clone ID: 701108004H1
catttcttcgcacnagtnttgtagtttaagcaagagcttacagatggtncatcagnttcggntttttcgggatctgatgaatgagggcgtctttgacatcgtcactgatgtcttgcaaagtcaagacaagaagcttgttcttactggcacagatatcctcattctcttcttgaatcaggatcctaatcttctgcagtcttatgttgttcaacaggagggaattacacttcttgggctattggtaagtttttgtatgcaaatgaggtctcatcttctttcc

SEQ ID NO: 34474 - DNA, 277 bp, Glycine max
  unsure (1)..(277): unsure at all n locations; Clone ID: 701108005H1
tgtctttgtatcacgaaaactatacgattcgattccttgttttcaatggacaccttcttcaannnnnnnnnnnnnnnnnnnnngagaagccgctggagttacgatactctcaagaatttccgtgagatctctccgctggttcagaatcacatcaaacgggtttattttacgttatgttgcgctgtggtggctgctgctgttggagcttttcttcatgttctgtggaacattgggggttttctcaccacgttggcttccattggaagcatggtttggt

SEQ ID NO: 34475 - DNA, 279 bp, Glycine max
  Clone ID: 701108007H1
gtttgcagtcactgctttgtttagatcagaaccagatcgtgttctcttcttccattggcaaacatggcaactcaaatgagcaagaagagaaagtttgtggcggatggagtgttcttcgccgaactgaacgaggttctgacacgtgagttggcggaggacggttactccggcgtggaggttagggttacgccgatgcgcaccgagattatcatcagagccaccagaacccaagccgttctcggtgagaagggaaggagaattagggaattacctcagtgg

SEQ ID NO: 34476 - DNA, 279 bp, Glycine max
  Clone ID: 701108008H1
ggaagaaccaccactaccttatccatttccactcctcaccaagccacaccatggcctcaaccaacgccctctcttcagcttccattctacgctctcccaaccgccagtctctgaccagaagagcgaaccacaacggaagagtaaattaccgtcaaccgaatagccgtttctccgtcaaagcctccgccaaagagattgcctttgaccagcattcccgctctgctatgcaggccggcattgacaagctcgccgacgcgtcgggctcatcttgggcccagg

SEQ ID NO: 34477 - DNA, 278 bp, Glycine max
  Clone ID: 701108010H1
cttgaagcttactatgatgcatgggacaaatacataaagtcttggatagtcatccaagattaaggacccaaactgtgtcttccaatggcgcttacaggctgagattgccatgagggaggcaggcaaccctggaatgacagatgatgaggtgagagattttgtttcacgctacctaccggcatactatgcataccttcctacactttactcggagggaccaaatggatcagatcctcaacatctcctaaccattgaaatagatgaagggagaaacccca

SEQ ID NO: 34478 - DNA, 235 bp, Glycine max
  Clone ID: 701108012H1
ggaggttcaaagtctcagctttgagaataacattttgtgggttggctcttttgtggaggctttggtgcttgacactttccttgccactgccaaatctcttgcttgctttgtcatcttgactggatctctccttacggatgtcaataatttagtgtcaccgatggtggatggaaggtttcctttagaccaactgtgcaagggaaaacatacttttgaagaaaacaaggatgctagt

SEQ ID NO: 34479 - DNA, 276 bp, Glycine max
  unsure (1)..(276): unsure at all n locations; Clone ID: 701108013H1
cacgcgtgccattctggtattctaagtcatagccgaagtgncgttcctttcaccggagatcttagacaagccaaatctggtgtacaaagttgctcaacattaggtcccaaaagtaggttagctgtttatgctcctccttccacacttggaggctgtgctctagcattgcactatgccaatgtcataattgtcattgagaagctgcttcgctacccgcatttagttgggcgaggaagcgagggatgatctatatcagatgctaccgatgagcttaag

SEQ ID NO: 34480 - DNA, 275 bp, Glycine max
  Clone ID: 701108014H1
agaaattgaaaagtgaaggttccaagattttgcttattgaaatatgaaacaattagcatccttgtgaatgctactgcttatttttgatgcattgtcattttttaaggggtttgctgatacttttatatattttggcatctttatgaacagttgttctaggacacgaccctctctctaaaatgccttgtaacatgggttgtatcgttacgttacatgtttcgtacaatgcttccaggtagaattgagctatcattcattacttgctatttgctgtg

SEQ ID NO: 34481 - DNA, 254 bp, Glycine max
  unsure (1)..(254): unsure at all n locations; Clone ID: 701108018H1
ttttactttctccgcaactttctcagnantctacantgcccatttctgcttncatgnctgaaccacacaaacgtagctatctaaagcttcgacttcaaccttttttcagtaaagagagagctgagtagttctcagtaagaagcagctgaaaaaanaattananaaaaattctcagtccttctaggggtttgttttatnntgcattgaaattgaaatcccactactcaaaattcaaaatcccagaccttctctct

SEQ ID NO: 34482 - DNA, 279 bp, Glycine max
  unsure (1)..(279): unsure at all n locations; Clone ID: 701108019H1
cgttgttgttgttctaaaacgtccacacattctccgtcgccacaacaacaatggctccgncagaaaggtgtgaaangttccnttntagcagcnngaagnnggttcatnnnaaggtgacgaatcctttgttcgagaagcgtccgaagcagttcgggatcggaggcgcgctgccgccgaagcgggacctgacgcggttcgtgaagtggccgaagaacgtccaaatccaacgcaagaagcgcatcctcaagcagaggctcaaggtccctcctgcactcaacc

SEQ ID NO: 34483 - DNA, 276 bp, Glycine max
  unsure (1)..(276): unsure at all n locations; Clone ID: 701108020H1
gataggcctcagaagaagaagagagaggtctctcaacaatggccactgccactgtttcaatttcaactttatgcnctactttnggaanccattgcgccatttnccacaacccanaacctcctattttctcaacctttcaatctcaatcactttcctctaactcttacaagctcgctttctcgcctcgctcacctctttcaccccttcccaaggcctctgaatccgcggtagccgaaaccgaacccggttnggccgancncgaaccggnccaaattt

SEQ ID NO: 34484 - DNA, 274 bp, Glycine max
  unsure (1)..(274): unsure at all n locations; Clone ID: 701108022H1
caaaaaatgaaaacccaaagtgcttctctcctgntgtctttttctctctcttgctatccttttggctagtngcactgctgcaagtncaactccaagaagcgcagtgccaagncagcatgtttcaacattcaacagaagcctttttccttccacttttctctttgganatggttcttctgcttaccaggcagaaggagcagcaagtgtagatgggagnagnccaagcatatgggacacctacatagacagcatactgaaaagattgggatnatac

SEQ ID NO: 34485 - DNA, 274 bp, Glycine max
  unsure (1)..(274): unsure at all n locations; Clone ID: 701108023H1
cttggctgcaacttttggtctctccgcagaatctcgttccaattngagttcatcctctaaaggggaaggtggtgtttggaatctgggaaaatgggtttgttttctgggatttttatgggggtgttgttcggcatcgcattgatggctggatgggcgcgcatgatgaagtaccgaagtgccaaacgaattgcaaaggcagctgacattaaactccttggatcccttaatagagatgatttgaagaaaatttgtggtgataatttgctgagtggat

SEQ ID NO: 34486 - DNA, 275 bp, Glycine max
  Clone ID: 701108025H1
cttctcccgccgcaactcactgtcttccttctctagggtttttagctcccccaatttcttcgctcaacatggttcttcaaaatgatattgatttgctaaatcctccggttgagcttgagaagaggaaacacaagctcaagcgtcttgttcagtcaccaaactctttcttcatggatgttaagtgccagggttgcttcaacataaccactgtctttagccactctcagactgttgttgtatgcggaaactgccagactgtcttgtgtcaaccaacc

SEQ ID NO: 34487 - DNA, 274 bp, Glycine max
  Clone ID: 701108026H1
gtgaaagagaatccgaggcgaagagaagagaaaaattaagatggaggggaaggagcaggatgtgtcgctgggagcgaacaagttcccggagagacagccgattgggacggcggcgcagagccaagacgacggcaaggactaccaggagccggcgccggcgccactggttgacccgacggagtttacgtcatggtccttttacagagcagggatagcagagtttgtggccacttttctgtttctatacatcactgtcttaaccgtcatgggagtc

SEQ ID NO: 34488 - DNA, 262 bp, Glycine max
  Clone ID: 701108027H1
gaggaatctcatatgaaattgagtggagagattcccagagtgtctgctgaggaactggctgatttgaaaaaaatgcttcggaaagagactcatctaagaaaagctgctgaaggggaagtaaacaatctgaagattcaagtggctgaactaaaaaagtcagaggcatcaagaaagtcagagatcttaaaacttcataccatgttggaagataaggaacgccaaaaagagaaacttgaaggagaaatagcatattacaaagtca

SEQ ID NO: 34489 - DNA, 272 bp, Glycine max
  Clone ID: 701108028H1
gaccaagtcgcaaacatgtatctgtggccaaaggcttagaggtgcaaataatggatccaacaaaggccatgaaagttccagttggaatccttcatgtgaaagttgtgagggcagagaagcttaaaaagaaagatctactgggggcgtcagacccttatgtgaaactcaaactcacagaagagaaacttccttcaaagaaaacaactgtgaaatacaagaatttgaatccggaatggaatgaggaatttaatgtagtcgtcaaagatccagaa

SEQ ID NO: 34490 - DNA, 98 bp, Glycine max
  Clone ID: 701108029H1
tgcaagtcctcagtgcataaatgcacggtagatactgtgctgccggattcctgagcaagaactttcaccaacaggttatgatgggcaaagatgtcgtt

SEQ ID NO: 34491 - DNA, 92 bp, Glycine max
  unsure (1)..(92): unsure at all n locations; Clone ID: 701108030H1
tacattagattggtggtaatggcagcgtcactacaagcagcagctactttcatgcancnccaccaagttgagcaggagcaacactttgcagg

SEQ ID NO: 34492 - DNA, 284 bp, Glycine max
  unsure (1)..(284): unsure at all n locations; Clone ID: 701108033H1
catcnaagttttntcctttctctgntctttgncttctctggacacatttggtgccttgtagagcgtgttttggcaggaaggtggtatggcgaangacgttgaggttgctnagcgtggctccttctctgggaaggactaccaggaccctccaccagcaccactcattgatgctgaggagctcacaaagtggtccttttacagggctctcattgctgaattcattgccactttgctcttcctctacattactgtgctcacagtcatagggtacaatcaccagactg

SEQ ID NO: 34493 - DNA, 281 bp, Glycine max
  unsure (1)..(281): unsure at all n locations; Clone ID: 701108034H1
agtttatcggtttctcaatcgttagatctcatcttatactcaccggcgagtccatctcgcgccaggttcgtagccgctccggccaccgcctttggttccctcactttctcgtccttcttcttctcagaaatatgccttctcaaaaagttgaaacgggtcatcaagacacggtccatgatgttgcaatggattactatggtaagaggctggccacggcttcatcagatcacacaattaagataattggggtgagtaatacgggctctcagcntctcgcaaca

SEQ ID NO: 34494 - DNA, 275 bp, Glycine max
  Clone ID: 701108035H1
ggagcatggctccgaagaaggttcttctcctttgcggggacttcatggaagactatgaagccatggttccatttgcaggcattgcaagccttcggtctcgccgtcgacgcgtctgtcccggaaagaaatccggcgatgtctgccgcaccgctgtccatgtacttgccggcgcccagacttatagtgagacggttggtcacaatttttcactcaatgcaacgtttgatgaagttgatgctgcaactatgatgggttgtgggtgccaggtgggaggt

SEQ ID NO: 34495 - DNA, 272 bp, Glycine max
  unsure (1)..(272): unsure at all n locations; Clone ID: 701108036H1
caagaggctttagcaactcttgtggtnaacaaacttagaggatcactnaagattgcagcactgaaggcccctgggtttggagagcgcaagagccagtaccttgatgntattgccatcttgactggatgtactgtaatcagagaagaggttggccttactttggacaaagctggcnaagaggttctcggatatgcctccaaggtggtgctcaccaaggntacaaccacaattgttggtgatggaagtacccaggaagcatgaacaagagagtt

SEQ ID NO: 34496 - DNA, 274 bp, Glycine max
  unsure (1)..(274): unsure at all n locations; Clone ID: 701108039H1
aaaaaagaggaagaagaaaaagaaaatacacttttaactgagttgatatcatcactaagaaaaaagtgtactaattcctgaagtccccatttcaagctttcaaccattttgctctttcattcctcttatcttctcttagagattaatttgaaaacagaagttccttttcnttgtttcattttttgtgtttttggttttgtacatgatcaatggcttctttagtgtcttctccatttaccttacccaattctaaggttgatcaactctcttctct

SEQ ID NO: 34497 - DNA, 274 bp, Glycine max
  unsure (1)..(274): unsure at all n locations; Clone ID: 701108040H1
agcagatgcagcatgcctgcaatgaatgtaagggtactggagaaactatcaatgacagagatcgctgcccacagtgcaagggagaganggttgtgcaggagaagaaagtccttgaagttattgtagaaaaggggatgcagaatgggcagaagataacattccctggcgaantgatgaagcgccggacacaattactggggatatcgtctttgtccttcagcagaaggaacatcccaaattcaaaagaaaggctgaagatctttttgtagagcac

SEQ ID NO: 34498 - DNA, 240 bp, Glycine max
  unsure (1)..(240): unsure at all n locations; Clone ID: 701108043H1
gaggaaatggttaaggatatgtcgtctgattnnaagttagacattttttctcagcatgattctgaagaacccnggttagncaccaccataacatcgaaaatgtttctagatgaaaaggctaattctgtacaaacaattcgtnagcaaggaaagttgtcaatcaacaactttgccncaaatgcagagcgcagaactttgnatgatagatttctganagcnaatanagctacanttggtgat

SEQ ID NO: 34499 - DNA, 133 bp, Glycine max
  unsure (1)..(133): unsure at all n locations; Clone ID: 701108044H1
ctttaatactataactaacatcccaacaccattcatggattggactagaggccnccaccctccnccgcggctccancgcggccgtctacatcggggagtcccaccggtccggtgaagtgtttnccgtgaagtg

SEQ ID NO: 34500 - DNA, 134 bp, Glycine max
  unsure (1)..(134): unsure at all n locations; Clone ID: 701108045H1
tgggacgacggtccnaggttgggacttggatacgccgccaagaaaccactnacgtgccacgtgttggagataccatacccaaatgccgttgattggaggaaggaaggtgctgttaccccagtcaaaaaccaagg

SEQ ID NO: 34501 - DNA, 132 bp, Glycine max
  Clone ID: 701108046H1
caaattctgataaattaaatggtctgacggaatccccttccatgggtaatacaaacaactacaggaattctattgcatttgctttgggtaaaaagttgcaaaacggttctggtttaagccaacccccaggat

SEQ ID NO: 34502 - DNA, 133 bp, Glycine max
  unsure (1)..(133): unsure at all n locations; Clone ID: 701108047H1
cttttgtgntagtgagagaaagttctctctgcttntctctcttagactcaaaaccctattgcgtgctttgcaatcgaccccgnttatggccaacagtaacctccctcgaagaatcatcaaggaaacgcagcgt

SEQ ID NO: 34503 - DNA, 264 bp, Glycine max
  Clone ID: 701108051H1
cttacggctaaattctcaaagatttaaactttgtctcagagtttccaaattcacccaaccccagagagaaaatgtctctaatcccaaatttcttcggtggcagaaggagcaacgttttcgatcctttttccctcgacgtctgggaccccttcaaggattttcctttcccaaacactctttcttcagcttcctttcctgaattttctcgggaaaattctgcattcgtgagcactcgtgtggattggaaggagaccccagaagcac

SEQ ID NO: 34504 - DNA, 267 bp, Glycine max
  Clone ID: 701108052H1
agagtttgttgtgagctataagctagtttatcgtgaggagaatatgaagttgtttgttttctttgttgctgcagtagttttggtagcatggccatgccatggcgcaggctaccaaaggttccctctccgaatgaaaactggctatggtgagcgttcttcggaggtaaaatgcgcaagttttaggcttgctgtggaagcacacaacatccgagccttaaaaccattcctgaagagtgcgttgaaccaacaaaggactacattaatggc

SEQ ID NO: 34505 - DNA, 247 bp, Glycine max
  unsure (1)..(247): unsure at all n locations; Clone ID: 701108053H1
ctcaagctgaaggcagctttaagantgggtatttttattncnaagcaggctgctgagagacccggcacaacttgttgaattggatgacccatagagatcttggggggcactactgatctttagtgatctgaacaataatttttctggttatagcatccaaggcttcttagtctttcctgacattcagaattggtgtcatgctgaaatctcatagcaggagcaaggatatgaaatctggactgaatta

SEQ ID NO: 34506 - DNA, 270 bp, Glycine max
  unsure (1)..(270): unsure at all n locations; Clone ID: 701108054H1
gaaaaatccagcttcttttccatgatatccatcaacttgggtaggaatccaccaccccaaaatggnacaacaacaacacaagggtcacctctttggtcagctccaccttccttgcccaacatgtcttgtagttttggtgctatgctatcaaagcttccatatgttactccttccaataatccccctcaagttcttgaaaccantaagaccaaccacaaagtgaagattgaggagtgcagatttcatggtgctgctaatggagatcagaac

SEQ ID NO: 34507 - DNA, 271 bp, Glycine max
  Clone ID: 701108055H1
aagagttatttgtttacgatctcattagtcattacaatctgccaagtctctaatctaagctaacaaatatcaaaaagatgtctctgattccaagtttcttcagtggcccaaggagcaacgtgtttgatcctttctcacttgacgtgtgggatcccttcaaggattttcactttcccacttctgtttctgctgaaaattctgcatttgtgagcactcgggtggattggaaggagaccccagaagcacacgtgctcaaggcagatattccagg

SEQ ID NO: 34508 - DNA, 268 bp, Glycine max
  unsure (1)..(268): unsure at all n locations; Clone ID: 701108057H1
aaaatggccaaatcaatcaaattctttgagttgaacacaggggccaagattccttctcttgggttagggacttggcaagctgaacctggtgttgtagctgaagctctcaccacagccattcaggttggatacaggcatattgactgtgctagtgcgtataagaatcaagcagagattggttctgctcttaagaagctttttgatgatggtgtggtgaagcgtgaggacttatggatcacttccaaactctggtgttcanatcatgcac

SEQ ID NO: 34509 - DNA, 268 bp, Glycine max
  unsure (1)..(268): unsure at all n locations; Clone ID: 701108058H1
ggcgaagacatgctgagaactctagttgtgaagcgcancttgggtcaccactggcactcgcattctcagcacctccgactccagcggcaattctcatcatccccggagcccaactcctccgtggatncagaaacccgcaagtacgcgggctatgctgccctcctcctcttctgcggcggcgccacctactacacattccccctcccggacgacgccaagcacaagaaggcgcagatcttccggtacgctccgctgccagaggacctgc

SEQ ID NO: 34510 - DNA, 129 bp, Glycine max
  unsure (1)..(129): unsure at all n locations; Clone ID: 701108061H1
ctcagtgtngatcttaaaggggaaaatgagttacttgggtttgggtgttagtccaggtactgttccagtgtaccatggaacaaaacttaaagtgttggataggagggtgaggataacagagctggtgtt

SEQ ID NO: 34511 - DNA, 132 bp, Glycine max
  unsure (1)..(132): unsure at all n locations; Clone ID: 701108066H1
taaataagtcaagcganagaagtatgtgtggttcgacgaaattgagtagaacgtgtgtnaaaacacattcgntcattttgtcaagntttattactcactactgacagatgatctctctaggncttngcatnt

SEQ ID NO: 34512 - DNA, 265 bp, Glycine max
  Clone ID: 701108069H1
gcacaaagcaaagctcatccttgagttaaaaaatggcagcagcttcttccatggctctctcatccccatccttggctggcaaggccgtgaagctgggcccatcagccccagaagtgggaagggtgagcatgaggaagaccgtcaccaagcaggtctcctcaggaagcccatggtacggcccagaccgagtcaagtacttgggcccattctctggcgagcccccgtcctacctaaccggtgagttcccaggcgactacggctggga

SEQ ID NO: 34513 - DNA, 267 bp, Glycine max
  unsure (1)..(267): unsure at all n locations; Clone ID: 701108071H1
aacacttttaggtacctgaatattcttactcccttgatgaagagggtatttgcaaacatgcctttgagttgatttttgcatttgatgaagtcatctctcttgggcacaaggaaaatgtgactgttgcacaagttaagcaatactgtgagatggagagtcatgaagagaagctgcacaagttggttttgcagagcaagattaatgaaactaaggatgttatgaagcgaaaagctagtgagattgataaaagcaagattganaagaaca

SEQ ID NO: 34514 - DNA, 266 bp, Glycine max
  unsure (1)..(266): unsure at all n locations; Clone ID: 701108073H1
aaaaatttngttcaagcgcacatttcaaagagtaatagacaccttgattttagtccttctcctcttgaatctcagtcatcgtgttttctcatccaataatttcactttcccatggttccttgctttcatatgcgaatcctggttcaccttcatttggattgtgattcttaacaccaagtggagtcctgcagtaaccataacccacccaaatcgtctccttcaacgggtacctgagcttccacctgtagacatgtttgtgacaacag

SEQ ID NO: 34515 - DNA, 227 bp, Glycine max
  Clone ID: 701108074H1
aaaggaagaatgagtgcagagtgataacttttggtgatcaagagtcgttcaagttgatgtttttgctctttttgaacaaccttttctgaatggggctgattaaagaatggtgaacacctgagtgtaatagatgcagtttattttaatttttaattttgtttttgtaaataagtttgttagaaactgaggtgtatatctttgcaaagttacaaattttgagtgctaaa

SEQ ID NO: 34516 - DNA, 263 bp, Glycine max
  Clone ID: 701108075H1
caaaaggaggtgaaatgggaggagaaggagggagagaaggggattgggagtgcagcagttgcaacaacaggaactacgccttcagatcattctgcaaccgatgcaagcaaccccgcctcctcgtcgacaccaaaaccccctctgattccaagtggctccctcgtattggcgattggatctgcaccggttgcactaacaacaattatgcatcaagagagaagtgcaagaagtgcggacaaccaaaggaggtagcagccatgcca

SEQ ID NO: 34517 - DNA, 262 bp, Glycine max
  Clone ID: 701108076H1
gggattttgcagagcttccgcgttgaaaccatccaaccctcttagcctcatattcgttgtctatacttccctccttccttcgtgtaattacatttttttcatcagcagttccaggaccaaattgatacacaagatcgctgtttttttagagagagattgagagaggatgtttggttcaaagaaaactcctctgagagatgctaaacctagttctgttggccatgcccataacccctttgattctgatgaagagacaaacgat

SEQ ID NO: 34518 - DNA, 128 bp, Glycine max
  unsure (1)..(128): unsure at all n locations; Clone ID: 701108077H1
ctctaaaataaaaaaccctaacttctgaacctttcaccgcatcgccaccgattccctatctccactaatcaaagaaaaganaatgagtagancgctcgagcagaactgtctacgttgggaatctacnc

SEQ ID NO: 34519 - DNA, 129 bp, Glycine max
  Clone ID: 701108078H1
cttccctttcgtctctgccctcacctgcagaacagaacgcgtcgtctccatttctctcccgcatcgccgtcgcaacaacaccgccgagaagataacctcttcaatcggaaaatgaacgctgataacggt

SEQ ID NO: 34520 - DNA, 250 bp, Glycine max
  unsure (1)..(250): unsure at all n locations; Clone ID: 701108079H1
cgngctggcggttcncccaactgcttcacgttccccatggtagtaaagtcttgacnccantgngaacgctgccaaagaaggagtnnaggttcattgcgttgtagccaaacgcggctttaagtcgaacacgtttgtggggtgcgcgttgattcacatgtattcattgagagggggagtgtttgttgctgatgcttacaatgtgtntgctgaaatgcgngacaagaacgtgttncgcttggacngctgtngt

SEQ ID NO: 34521 - DNA, 269 bp, Glycine max
  Clone ID: 701108080H1
gcaaagagagagggagatggagggaatagagcacaggacagttgaagtaaatggcataaaaatgcacattgcagagaaaggagaaggccctgtggtgttgtttctccacggcttccccgaactctggcactgttggcacaaccagattgtggctcttggttccctcggataccatgcggtggcaccagatctccgaggctacggtgacaccgatgcaccaccttcaatagacagctacacatgctttcatatagtggctgatctcgttg

SEQ ID NO: 34522 - DNA, 274 bp, Glycine max
  unsure (1)..(274): unsure at all n locations; Clone ID: 701108081H1
ctaaaacatctcaatgggttcttcttctattacaacatcgacctccaaccatgaccatggctgcgatcgtgctcctgttcanggtctttgccgtttcctccgncctagacatgtcgataatctcgtacgacagcgcccacgcggacaaggccgccacgttncgcaccgangaggagctgatgtccatgtacgancagtggctcgtgaagcacgggaaggtgtacaangcgctcggcgagaaggagaagcgcttccagatcttcaaggacaacct

SEQ ID NO: 34523 - DNA, 266 bp, Glycine max
  unsure (1)..(266): unsure at all n locations; Clone ID: 701108082H1
tggaagataagttaatggtgcttgggtgcagggatctngagaagaggattgtngaagctgagatggaattgacattggctaagagccaagggtacctaaaggggcaaggccagagaagcggctcttctgatcgtaggcttcttgctgttatcggagtgtatactggatttgggagtaaattgaagagaaatgttttcagggggtcttggatgcccagaggtgatgccttgaaaaaacttgaagaaagaggagtggtcatacgtttt

SEQ ID NO: 34524 - DNA, 256 bp, Glycine max
  Clone ID: 701108083H1
tttttggatcagctgattacaaggtttatggttatgatcttcgtcacactagaatcccttggtgcacattagctggtcatggcaaagctgttagctatgtaaaatttatagattctgaagcagttgtctctgcttccactgacaactctttaaagctttgggacctgaacaaaaccagctcttctggtttgtcatctgatgcttgtgccatgacctttaaaggtcatagtaatgaaaagaatttcgtgggattatc

SEQ ID NO: 34525 - DNA, 263 bp, Glycine max
  Clone ID: 701108084H1
atttttcaagtaacttaaggtttcaaacctaggaagttggaagtcatggcagcaacattgatggcagcaacaacaagttctggtactcttaaagcaactcctttccttggccaaggcaagggtgccaatgccaatgctcttagggatgttgtctccatgggaactgggaagtacaccatgggcaatgatttgtggtatggaccagacagagtgaaatacttgggacccttctcagctcagaccccttcatacttgaaaggaga

SEQ ID NO: 34526 - DNA, 263 bp, Glycine max
  unsure (1)..(263): unsure at all n locations; Clone ID: 701108086H1
taaaacggaaaaacgggtgcgcagtgttccacacccacccacgcanaagcagaagcgcgtgtaaccctaattagggtttggaagccgatttgagattcacctttcgcgtaatcacagcgctggatccgtaccgtgttcctccgtctacggaagcnccttttgctcggtccttcgctgaacacggaagcatgtacggtccccgangggcaatgttgggaagcgggggggtttcagacgggtacgaggttggctcaaagagacaa

SEQ ID NO: 34527 - DNA, 265 bp, Glycine max
  Clone ID: 701108087H1
gttacaacttacggctaaattctcaaagatttaaactttgtgctcagagtttccaaattcacccaaccccagagagaaaatgtctctaatcccaaatttcttcggtggcagaaggagcaacgttttcgatcctttttccctcgacgtctgggaccccttcaaggattttcctttcccaaacaatctttcttcagcttcctttcctgaattttctcgggaaaattctgcattcgtgagcactcgtgtggattggaaggagacccca

SEQ ID NO: 34528 - DNA, 266 bp, Glycine max
  unsure (1)..(266): unsure at all n locations; Clone ID: 701108088H1
gcacaaggcaacatttccgtggctattgattggcttaataaatatctggaaacattcatggcagatcatgaggcatggagagaattggctgaaatatacgtctccctgcaaatgtataaacaagcagcgttttgctacgaggagttgatattaactcaanctactgttccactcttccatttagcatatgctgatgtactttatacgcttggtggattagaaaacctccaaactgccaagaaatactactcatctactatcgactt

SEQ ID NO: 34529 - DNA, 264 bp, Glycine max
  Clone ID: 701108089H1
ctcactttcgggtcagtcttctgaagatcttttggggggttgtgaatttgtgtcttcttggctcccaacccacacgcaacgcaaccatagaatggaatgaatgaaggcaaagcttatacttataaaagagagatagaaattggttgtgaaaaacagaagcactttgtttctaagtaaaaggaatcttcagctgccatgtttcatcgctggagcaattctcatcaacaggatcagggaagcagcgagctttatgctgaatccaag

SEQ ID NO: 34530 - DNA, 261 bp, Glycine max
  unsure (1)..(261): unsure at all n locations; Clone ID: 701108090H1
gtttgttttttgagtcttctaaaacaggtagagatgacagcttgaaagcgcaaacctgttttgagctggtaaacaattgtcctcatctaacttctttatcccttagagggtttaagctacacgattgcaaagttcgcgtcctggttnngggatttaggaaactgaaatatgttgatttttcaacatcctattcaatcactggtaacttcttaagaaaccttggaagctgcaatggtgggaacttacttgaggtcttaattt

SEQ ID NO: 34531 - DNA, 121 bp, Glycine max
  unsure (1)..(121): unsure at all n locations; Clone ID: 701108092H1
catttctccatttccattttctctctcacttttcaagaatcgtaagcnatgggaaagtctacccaactgtgagtgctgattancagaaggccgttgagaaggcggagaagaagctcagagg

SEQ ID NO: 34532 - DNA, 233 bp, Glycine max
  Clone ID: 701108093H1
gatatgggttcgaagaggtatgcgctattgatgtgcggtgaggattcggagtacttggtgaagatgcacggaggcacctatggggtattcatgaagttgctccaagagcaagaggaaaagtgggacctctacaagctcgtccaaggagagttcccggagcagcatgacttgcctctctacgatggctttgtcatcagtggaagctgctatgatgcacatgccaatgacccatg

SEQ ID NO: 34533 - DNA, 231 bp, Glycine max
  unsure (1)..(231): unsure at all n locations; Clone ID: 701108094H1
accactttcttcttcacttcttctcagttctcacactcataaagctnattcttattattactactcgcaccctttcgttttgttttgttctcatgggttgaacttgaccccccgctgctgccactgcgacgccgtttctttgttaaatggagtgggacagcaattccgatctcagcgacgacgaggccgtttcgtttatgttaaacgncgacnatgatgacgccgnnnnnc

SEQ ID NO: 34534 - DNA, 266 bp, Glycine max
  unsure (1)..(266): unsure at all n locations; Clone ID: 701108095H1
cttgaaataatgcccagtatactaaatgtcttngtcttaagaggggggaaaaactggaattccaatgattcttaatttcttacaatccaatctgncaaactgagtgagatatataacttgtttttgatttcttcctnatcattttgcatatacaaagattaaaatggaagggttttttggaaattgcttcaatatgatttnnctgatgttgtgcttcaccaacttgagcatngcttttgctcaaagtcatatgaatggatttggng

SEQ ID NO: 34535 - DNA, 301 bp, Glycine max
  Clone ID: 701108102H1
caatttcagagttcgggcttcatttcagactcagagtaacactacagtacagagtacaaacatcaaacaccttctctgcacgcaaaaaccagaatcgaagatgcagagatttaaagctctgctacctcaacaaactaggtcctcacttcgcactttctgttctcaccgtcgagctttctccgctcaaccaaattactcagagcaccacgacgacgattctcaggaacagattttggtcgaaggaagagcgaaatcgcgagcagccattctcaacaggccgtcttcgctgaatcgctcaatg

SEQ ID NO: 34536 - DNA, 295 bp, Glycine max
  unsure (1)..(295): unsure at all n locations; Clone ID: 701108103H1
ctctttcttttccctctctcaattccaaacagtagatttantgcanccttttggaaaaggaagtgttttttgagggaaaggagggaatnttttgtgtgggagggtggaacccggaattcggtttggttggggtagagaggatgaagattcagcgtaacgtgtgtgaggctgcggaggccaaggttctttgttgtgctgatgaggctgggctgtgttgggagtgtgatgagaaggttcatgcggctaacaagcttgccagcaagcaccagagagtgcctctttctacctcttcctc

SEQ ID NO: 34537 - DNA, 284 bp, Glycine max
  Clone ID: 701108104H1
taacaggataaggttcattcaattcgtgaagcagctgctaacaacttgaaacgccttgctgaagaatttggtcctgagtgggctatgcagcacataattcctcaggttttggagatgaacaacaacccacactatttgtatcggatgactattcttcgtgctatctctctgcttgctcctgtgatgggccctgaaatcacttgttcaaacttgttaccagttgttgttgctgcatcaaaagacagagtgcccaacataaagttcaatgtggcaaaggtattaga

SEQ ID NO: 34538 - DNA, 279 bp, Glycine max
  Clone ID: 701108105H1
atacaacgttgcttttgttttgttttgttttgtctctctctaatcattccaatggccaaagaaggacccaactgggacgggttgctcaaatggagcattgctcattccgatgggactcgccccactcgcaatttaagtgaggaggatcggagatggtttatggaagcgatgcagtcacagaccattgatgttgtaaaacgtatgaaagagatcacacttgtgatgcaaactccagaacaagtcttgaaagaccaaggagttacccctgcagacattgaa

SEQ ID NO: 34539 - DNA, 286 bp, Glycine max
  Clone ID: 701108106H1
ttcactctttgtatttttcgctgactccggcgtcactttccgttgagtctccgtccaccggcgtgacgatggactcggaatcttcaaactcagattctcaaccgcaccctctctcgaacccaatcgacgacgcgtgccacgacatgagctccctggaagagctcgcgaaccgcggcgcgtggcgttccatcatcgacaaggtctcacgcgcccgcgccctctctctcctccacaagccccacgaccacctcacctaccttgccttcaacgccctctccttcaccaa

SEQ ID NO: 34540 - DNA, 133 bp, Glycine max
  unsure (1)..(133): unsure at all n locations; Clone ID: 701108107H1
cgaagaggaagaagaagggacgcccctctcttttggatcttcaaaagcgatctctcaaaaaagaacagnaaaatcaccaccagcagcgacaaagcaacaactccaattcagccaattcccacaacaacaagaa

SEQ ID NO: 34541 - DNA, 287 bp, Glycine max
  Clone ID: 701108108H1
ctctctctctctctgttgcaaaatccgttcccctatctttctgcgtttcgagttgttgctaaagagtgatggactcaccgcccagtaatcaccacgccgtcgacggagacgccaacgacctcgttagacccttttcccaccgcgacgacgacggcaaaccccaacccctcaccggcgacggcgccagtcccggaaagatattcatagggggtttagcgagagaaacgacgattgcgcaattcatcaagcactttggtaaatacggtgagataacggattccgttatc

SEQ ID NO: 34542 - DNA, 288 bp, Glycine max
  Clone ID: 701108109H1
gccttccattatagtatccctacttacgaaaggggcttgtgcatcagatttgacttttgatggtcagagtgctgttagtatttgtaggaggttgacaaggccaaaggattatcatgcaaaaacagagcaggggaaagaaacaaacaaagatcggatatgcatcgatgttcttgaaagagaaatgtggaggaatccattggctggggatgcctgtatgtctcccataccatggctgatgatctccacatgaaactactataccttgagaacagagtggcatttgcaaga

SEQ ID NO: 34543 - DNA, 287 bp, Glycine max
  unsure (1)..(287): unsure at all n locations; Clone ID: 701108110H1
caacacgatggggagaggnaaaggagggaaagagcatttccagcagaacagagagnnnntgtggacatggaaacgttctaaatcagatcctattcctctctgcaatccctacgctactcaaagccccgctttcgatcactattacaaggagcagggaatcgctttcgataaaacatgtccatgtctagaaatggatatattgattgtcttacacatggaaaagtcgagcatgattcgtatttctggagtttaggaggaaataatgccttcattgcttatgattatga

SEQ ID NO: 34544 - DNA, 287 bp, Glycine max
  unsure (1)..(287): unsure at all n locations; Clone ID: 701108111H1
agattgcagtagtgctaagtgctaacacctgcagtgaacaatggcctctgcatcagcatctctgctcaagtacttcacttgttcttgacaagtctgagtgggtgaagggacaaacccttcgccaaccttctgcatcagttgtgagatgcaaccccaccaccccatcaggcctcaccatcagagctggttcctatgctgatgagctcgttaagaccgcgaaaacagtggcttcaccagggaggggtatttcnccatggatgantccaatgcnacctgtgggaagcgtt

SEQ ID NO: 34545 - DNA, 285 bp, Glycine max
  unsure (1)..(285): unsure at all n locations; Clone ID: 701108112H1
ctctgtttctgtctctgtgtttgcggctgaggattccgaacgagcgncccttcttcgtttctcgcaaagtttaagtcatcatgggtaaggacaagactcacatcaacattgtcgtcattggacatgtcgactctgggaagtcaactaccactggtcatttgatctacaagcttggaggtattgacaagcgtgtgattganaggttcgagaaggaggctgctgagatgaacaagaggtcattcaagtatgcctgggtgcttgacaagctcaaggctgagcgcgaaa

SEQ ID NO: 34546 - DNA, 192 bp, Glycine max
  unsure (1)..(192): unsure at all n locations; Clone ID: 701108113H1
tntgttgatcgagataactagaaacagtgtgatgaaaatgaaggtccttgttttcttcgttgctacaatttnngtagcatggcaatgccatgcgtacgatatgttccctctccgaatgaacactggctatggtgcccgtactccggaggtganatgcgcaagttggnggcttgctgtggaagcacacaacat

SEQ ID NO: 34547 - DNA, 287 bp, Glycine max
  unsure (1)..(287): unsure at all n locations; Clone ID: 701108114H1
aatgatgtccctcaaaatgaagaagatctttcatacatgttagatgatgaaacaactccagttaaggcttgtggtgatttggcatataatgtcaataatgctgataatatgcaaaaggaactggaggaatgtagggagacttattcgcaagccaagaggcggcggatgctacagttcaacagccaagagagcgatcaatctctatccaatgaagggatgtctttgtcatatttaaaaaatgggaaggnagacccagttaaggagatttttccagaggtgtcgcaang

SEQ ID NO: 34548 - DNA, 288 bp, Glycine max
  unsure (1)..(288): unsure at all n locations; Clone ID: 701108115H1
atgaactgtcttcagaatctttctcgattctctgttttgcccttcgatacacttgttacgcgcccaccgcaagaaccttcccctttccctgggtttcgtcaataattctcatcaaaatctaactatggcactcaaggctgcctcaggttctataccgagtgcagacacaagtagtgccgataaggaggaagaaaagtctgagacatatagtcatagcatgacagangccatgggtgctgttttgacttataggcatgaattaggaatgaactataatttcatccgtcc

SEQ ID NO: 34549 - DNA, 293 bp, Glycine max
  unsure (1)..(293): unsure at all n locations; Clone ID: 701108116H1
cttcataaaaaatacagctagagagcacatgggaaccactatggattcaagcaaattttcttctttctcatattgcagttcaagaagaatagctgcaacaatcaatgtgccgaagattaaggtaaccaaagtctccactccaaggcctcccaacaaaaacttggtggcagaattgaattatctaaataattacatttcagccaccggcacaactcatgcaaaagagaatccttactgctccaatctcagcgccaagagttccacagcacctagaacangcacaccaaattcca

SEQ ID NO: 34550 - DNA, 305 bp, Glycine max
  unsure (1)..(305): unsure at all n locations; Clone ID: 701108117H1
ctcgattagccgaaaattgcaagaacggcttcagngctcttgcgatcaacaaaacgcagcgttttgatctcagatttgagggggagagaatggcaacaacagtgagaagtctgaagataaagncaagtacgtgcaaacgtatagtgaaggagctgcattcttatgagaaggaagttgagagagaagctgccaaaacagctgatatgaaggaaaaaggagccgatccctatgatctcaagcaacaggaaaatgtcttggctgagtctaggatgatgattcctgactgccgcaagcgccttgaggcc

SEQ ID NO: 34551 - DNA, 294 bp, Glycine max
  unsure (1)..(294): unsure at all n locations; Clone ID: 701108119H1
cngatggccgctaattctgggaatatctcgtttgcntcgtctcagtctagttcacagattcatgggagcactgatactgtccaggttgcagtgtgttctctttgtcaaaaggccctatcacctgataatgagatggcaagcgatcttgctagcagtggtgtgtgtggtgattgtaaatttttgttacttgaagactttgggaatcatacagttacccaaagctcacgaaggaggcttagaggaagattcaggcacaatagttctgaatccgttgagaataatttctcacaacag

SEQ ID NO: 34552 - DNA, 289 bp, Glycine max
  Clone ID: 701108120H1
cgcaatcgtcttctgcttcaaggaaggagagcttgttattctctatcaacaaggaaaatgtcaggtgaagaggttgttgttgcagctgagccagctgctgccatcccaggcgagcctatggatatcatgactgccttgcaacttgtgctcagaaaatctctggcttatggtggtcttgcacgaggccttcacgaaggggcaaaagtgattgagaagcatgctgcacaactctgtgttctagcagaagactgtgaccagcctgactatgttaaactggttaaggcccttt

SEQ ID NO: 34553 - DNA, 286 bp, Glycine max
  unsure (1)..(286): unsure at all n locations; Clone ID: 701108121H1
aaagaagaaagaaatggataagggtgtcatttggtgtgggcatatatccaaccaaaaagggacattttgcgggtatttgtnnnnnnnnnnnnnnnnnnnnnnncagtttcagacacagagagaggggtttgggattggagggattgacgctgcgtctcttcctcttctctttcgatccatccctcattcctaatcctccaatccaaccacctcagcctcacactcacatatacacatatctgaacgcgtatcgtccctcctatggcttcaaagcgcatcctcaagg

SEQ ID NO: 34554 - DNA, 287 bp, Glycine max
  unsure (1)..(287): unsure at all n locations; Clone ID: 701108122H1
caacgaaccactctgaagccgctcacgttatccacaacactctcaaccctccttaaaccctaaccaatccaaccatggcttcttcttccaccttcactgcaatgnncgcctgcaagctctcctcctccgccgccatctcctccttcccctcccgccgccgctccaacgccgtcgttctgtcgaggcgcaggcgccgccagggtctccgccatggccaaggagttgcacttcaacaaagacggcaccgcaattaagaagctccagagcggtgtgaacaagctcgcgga

SEQ ID NO: 34555 - DNA, 287 bp, Glycine max
  unsure (1)..(287): unsure at all n locations; Clone ID: 701108123H1
ggaaattgtgaaggcgaanagggccttggaaagaaagaagaagttagcagagaaagctgcagccaaagcagccatcagagcacaaaaggaagctgagaagaagcttaaggaccgtgagaagaaagcaaagaagaaatcaggcactgcagccgtggccaaccctgaggacgaaccgaaggatgaagttgtcgaggttacagagccagaaaagattaacgatgatgtccaagccccggctccagtgaaggaaaaggtccaaaaggagagtggcatcaggtccagggccg

SEQ ID NO: 34556 - DNA, 289 bp, Glycine max
  unsure (1)..(289): unsure at all n locations; Clone ID: 701108124H1
aaagtcttatgagatacacttcaaagttccacttctttccctctnnnattccttcaatttcgtgctnnnnccccttctctctttcttttcctgccattaaagcatcctcttcaagcttcttatccaaggcaattcttggtggtgaagctccttcttccttggcttattccctagtggatggtgcctcccctatcctcttctcctttgccttccgctgcatctccatggtgaaaaatcaccattgaaggacctcattgaagctcaaagatccagcctccatagaagctcc

SEQ ID NO: 34557 - DNA, 286 bp, Glycine max
  unsure (1)..(286): unsure at all n locations; Clone ID: 701108125H1
cttgtnttttgcaaattcgcaaccaacacagcaagggaaggtgcgngtgagtgagtatggcgtctccattatcagctcaattggttcaatgtcagaactcacttccacctcttcagggtaattttagccaagatgtgtctaaggttcaaaggtcgcgtgtggtatgttacggtaccagatcaccgcttggttattatggtaaagcattgacatcaagatcacataacgccctgaggttttctgtcacgcgacaatctgaagcacggtcaattggatataggagaat

SEQ ID NO: 34558 - DNA, 285 bp, Glycine max
  unsure (1)..(285): unsure at all n locations; Clone ID: 701108127H1
aaccagccggggatgcatttaaagctaatcatcctgaggcattggtnttcattaacaattgcaatgttattcttagggctgtaatggagaagtgtggggacacagatgattgtatctcaacatctgaggctgcagaattggctgcaaagcttgatgagaaggaaataagtagtttaccaatgcctggacaagttgatttcattaatggtggtcctccatgccagggtttctctgggatgaataggtttaaccagagcagttggagtaaagtccagtgtgagatga

SEQ ID NO: 34559 - DNA, 283 bp, Glycine max
  unsure (1)..(283): unsure at all n locations; Clone ID: 701108128H1
agttattcagtatgtatgtntgtntgttttaattcccttgtgcngcaattattttgatatttctgctgcgattattcagtataattaagttattcagcgtatattcagttatttagtacattgttattcagnatacataattattctttgtatatatatagttattctgtagtttacatagtaattctgtatagtataaatggttttntctgttttctatacagttattttgctgcgattgtatactgattaaattaatgcatgtnctgtttaagttcttacc

SEQ ID NO: 34560 - DNA, 94 bp, Glycine max
  unsure (1)..(94): unsure at all n locations; Clone ID: 701108129H1
tcttagaaancttnattcgaagttnntgatggctgnngcgatacatcctaccnaacgatagtgttccctcagtcntancgngggagctgatact

SEQ ID NO: 34561 - DNA, 115 bp, Glycine max
  unsure (1)..(115): unsure at all n locations; Clone ID: 701108130H1
cacaactnncagccacttcttcttcagtttcaccgacacaatgccttntcatnctnccaaaatttcagcggccaaaccgattacacccttctttggttccgccacnccncatgng

SEQ ID NO: 34562 - DNA, 290 bp, Glycine max
  unsure (1)..(290): unsure at all n locations; Clone ID: 701108131H1
caaagttagaaacaaggagaaaganagaagatgggcaggaaagaanatcccagatgtgttgctgaattcaggacacaaaatgccagttataggcatgggaacttcagtggagaatcgtccatcaaatgagacccttgcttctatctatgttgaagccattgaggtgggttaccgtcattttgacactgctgcagtgtatggaacagaggaagccataggcctagccgtggccaaagccatagacaaaggccttataaagagtagagatgaagttttcatcattcaaagcc

SEQ ID NO: 34563 - DNA, 292 bp, Glycine max
  Clone ID: 701108132H1
gagtaaaggaggcataccgatgacgatggcgatgacggcgtcgcagttgcggtgcggttgggggtggaggccaacgccgaatcagcagcagcaacgacgtctatggttccggtggtgtgttccatcgctatagagaacgcgaagaacaaagagagagcgaaactgaagaagctcttccgatgaagcgtacgagaggtgccgcactgctcccaccgaagcgtttccttcatctccaacaattcaccgacgctctcgacaagtacgacttcaacgccgaaatgggcaccaaggt

SEQ ID NO: 34564 - DNA, 300 bp, Glycine max
  unsure (1)..(300): unsure at all n locations; Clone ID: 701108133H1
cttcctctttttctcaaccaaaaggggttcaattctagctagttctattacatcgtccgcnaccatgaacatggcgatcgtgcttctgttcatggttttcgcagtttcatcagctttagacatgtcaataatatcacatgacaacgctcatgcggatagggccacgaggcgcaccgacgacgaggtgatgtcaatgttcgaggagtggctggtganacacgacaaggtgtacaacgcgctcggtgagaaggagaagaggtttcaaatcttcaagaacaatctgcgctttatcgatgaaga

SEQ ID NO: 34565 - DNA, 294 bp, Glycine max
  unsure (1)..(294): unsure at all n locations; Clone ID: 701108134H1
gttgttactgtttaatgtatataacaattaaaaaccaaccttanacctttgtngattgtagagagcagagatgttaaaaggaaagagtaagttggtgatcnaaaanctagttcaattaaacatctctgctctctacaatctacaaaggtgtaaggttggtttttgattgttgttactgtttaatgtatataacaattttcatctgatgtcgttctaactggaatacaaaannanaaangaanancnaaancgngagctncantntgnngtnncggcntcgctgaancgctnanc

SEQ ID NO: 34566 - DNA, 292 bp, Glycine max
  unsure (1)..(292): unsure at all n locations; Clone ID: 701108135H1
gcagaagaggtaaccgtgtttgttcattcactttcctncatcctagaacgaacgaacgaacgaacgaagacactgcaatctagaaaaaagttttgaactttgatgcacggaaagccttcatgcccgaccatgacatgtaccattttgatcacatggacgaagacgatttttttgacgaaattgatgaccaaaaccatggtaggggtgttggggatgctgctcttgatgaatatgagatgcttactaaggtgactgatacaacagctgctcaagcaagaaagggaaaggactt

SEQ ID NO: 34567 - DNA, 267 bp, Glycine max
  unsure (1)..(267): unsure at all n locations; Clone ID: 701108136H1
atgaccgtgaccatggcggctgcactttacaagtacaagacncaacactgagactgtcaaangttggagagagcagaggtttgcagctgcgtaagtgtaaccctaatcctaataagctgaaggttatgggggggtttggaggttgttctggagtggcagtgggtgtgagagaaagaaaaggaattggaagggttagggttcgggttcgggcgagttcttcgtcggacgaggcagtgagtgcgcatcaaaagtgactcagaaagtatt

SEQ ID NO: 34568 - DNA, 286 bp, Glycine max
  Clone ID: 701108137H1
cctcgttgccccttccatttccttcgcctccagaaattacgccaacgtgccggggcaaaaggaaaacaaagttaaggtccctctggctttgtttggaggttcaggaaactatgcctctgctttgtatattgcatctgtgaaagctaatgcagtggcaaaggttgagtctgagcttctgcaatttgttgaggctgtaaagaatagtcccatattttcacagtttataagggacttgtctgtggctaaggatgttagagtaaaagtcatccaggatatttgtggtgaa

SEQ ID NO: 34569 - DNA, 284 bp, Glycine max
  Clone ID: 701108138H1
gcagaaagcaagctcatcctagagttttaaaaatggcagcagcctcctccatggctctctcttccccatccttggctggcaaggccgtgaagctgggcccatcagcccccgaagtcgggagggtcagcatgaggaagaccgtcaccaagcaggcctcctccggaagcccatggtacggcccagaccgcgtcaagtacttgggcccattctctggcgagcccccgtcctacctcactggcgagttcccaggtgactacggctgggacactgctgggctttcggcc

SEQ ID NO: 34570 - DNA, 285 bp, Glycine max
  unsure (1)..(285): unsure at all n locations; Clone ID: 701108139H1
acatgggcaagagtggtggcactccaacagaaccaactatctttctctaccttagcttcctctctttctgacttcagtggaaccagacttcaaactcaacttcagttcaagagaaagcaatgccatccaaaagggtctttctacgtctccgcatcgagcaccaagaanctcctaataatgggaggcaccaggtttattggtgtgtttttgtctaggctccttgtcaaagagggtcaccaggtgactttattcacaagaggtaaagcgcctgtcactcaacagttg

SEQ ID NO: 34571 - DNA, 283 bp, Glycine max
  Clone ID: 701108140H1
tagttccccgtggaatggctcttggcatggttactcaattgcctgacaaggacgagaccagcatttcccgtaaacagatgcttgctacgcttgatgtttgcatgggaggtcgtgtcgctgaagagctaattttcggagagaacgaagtcacttctggtgcatcctcagatctcaggaaagcaactagtctggcaagggagatggttaccgaatatggcatgggcaatgaagttggactagtcactcacgattatgaagatgatggtaggagcatgagctcaga

SEQ ID NO: 34572 - DNA, 285 bp, Glycine max
  Clone ID: 701108141H1
gaggcagtacatgactcgccctgcatcaaagtttttttctaatcaagcagttatttccaatgacatgtcatcatattatacaaatggatctggaaagctgcaggactcaatgattgccgaaggatcctccctgcaaaaagatactaatttgctgcaagagggtttgggtgcaacacatggttctgccggcacatttgactcatgttcctcttcaaaaaagaataacgaaaaaacaaaaagtaatggagctttaagtgaacttactcctgatgatattgcttcatc

SEQ ID NO: 34573 - DNA, 281 bp, Glycine max
  Clone ID: 701108142H1
ttaaattccaggttctgttggaatatccaaaatggcaaaaggtagcaggggacgacacaggattgcttctcgtcaattcagagtgactccatacccactggcttcttgcaaaagggacatttgtgaggacatgtgccaaaagaaatgttctaaggctttggaaaagaaagagttggaagatgttacgtgttctgtgtgcatggaatatccacacaatgctgttcttcttctttgttcttctcatgacaagggttgccgtccctatatgtgtggaatagctt

SEQ ID NO: 34574 - DNA, 287 bp, Glycine max
  unsure (1)..(287): unsure at all n locations; Clone ID: 701108143H1
gcaacaacagctcctcccccatcgcaggagctggacttggacaacctcaaactcctcaaagtcctaggaaaaggcgccatgggaactgtcttcctcgtacacganacaaccaacacccccttnnccctcaaagtggtggacaaaacgtgcgtccacgcgaantcgacgcggaacggcgcgcgcgttgggaaatccaagtcctctcaacgctctcccaccctttcctcccttccctcatgggaacgttggagtccccacagttcctggcgtgggccctaccctactgc

SEQ ID NO: 34575 - DNA, 283 bp, Glycine max
  unsure (1)..(283): unsure at all n locations; Clone ID: 701108144H1
gcatcttgatttcgcaacctcgtctagcaattctccatggagggtgctgggatggaagagaataatattattaatgatgataataagtctgangcgcatttgacttctgccgctgcttttgtggagggtggaattcaggatgcttgtgatgatgcttgcagcatatgccttgaagctttctgtgatagtgatccctccacggtgacaagttgcaagcatgagtttcatcttcagtgcattctggaatggtgtcaaagaagctcccagtgccccatgtgttggc

SEQ ID NO: 34576 - DNA, 285 bp, Glycine max
  Clone ID: 701108145H1
ccaaaaccagcaccacccctcttttcctctctatctcttttctcccgtgttgccgttgaacttccttatcctaaaaatgtccaattctatctccgacccgacccgaataattcactctcaggatccgaataccaccgcggaccctcaggttccgcttcggaacctttcccaggttcggaacagaatggattctctacaacacttcctatctcaatccatcaataccaacactcccctcaccgtcgatcaaatcgccatggtctccagccagatcctctcctccat

SEQ ID NO: 34577 - DNA, 286 bp, Glycine max
  unsure (1)..(286): unsure at all n locations; Clone ID: 701108147H1
ttcttttctcttctcctcctccttcaatggattctctgacttccatcaacggcgatttcngcttcgccggcggcaccgatcgcagattcgcgttttcgcgccaagcctccttccaacagcctcacacgccgatagacattccggcgcacggccaccactactggtccgcgcgtgacgataaaccctcctccgcctcgctccaaagatcctctctgtcctccttcgttttctccgttttccgaaacgttaggtccggccacaggtacatgaagaggctctttctctt

SEQ ID NO: 34578 - DNA, 267 bp, Glycine max
  unsure (1)..(267): unsure at all n locations; Clone ID: 701108148H1
ttctcttctctgcagaaaatcgaatcaatcgatggatgctttaatttcgtgtggttattgaggaaatttcatatccgcaagggcagagagtagaaggnagnagagagaaagagggaagctgctgctgaatcgtaatcgatcttatatctacactctaccatggacattgatgatgatttcacattttgtcaggtcagtgcacctgttgatgttgaaacaaacaagcttgcttcagatatagctgatatttccataaagaagaatctc

SEQ ID NO: 34579 - DNA, 300 bp, Glycine max
  Clone ID: 701108149H1
gttatagttttctgcttccttaaaatcttcactagcaatgaagattgagtttgtccagtttttcactttacattaccaaaagaaagaactaggaagaatgggagttcagcaaaagctcatttctttcctctttcatacttgtcttgttttcattatgttttcccttgtaagctcatcacaagagcaccaccaaattacaagcagcccttcaaaaaccaaagatagcaaccacattaagatgagtcctggacttcagtttcagattacattacatggctttctcctgtgggcttcaatggg

SEQ ID NO: 34580 - DNA, 251 bp, Glycine max
  Clone ID: 701108150H1
tcttagatctcttctttctctacgccgcacgccgaaaccatggccggaaaaggagagggtcctgctatcggaatcgatctcggaaccacctactcttgcgtcggtgtgtggcaacatgaccgcgttgaaatcatcgccaacgaccaagggaacagaaccacgccgtcttacgtcggattcactgacaccgagcgtctcatcggtgatgcggccaagaatcaagtcgccatgaaccccatcaacaccgtctt

SEQ ID NO: 34581 - DNA, 291 bp, Glycine max
  Clone ID: 701108151H1
aaataacaaatatcaaaaggttcgcagctaggcaggaacaatgaatcactcatacgcgaatcaatacggctcaagaagttaatatagttacagaggacacaagaagatctgcaaattataaacccaacatttggaaatacgattttctgcagtcacttgacagtaaatatgatgaggaagaatttgttatgcagttgaacaagcgggtgacggaagtaaagggtctttttgttcaagaggcaagcgttttgcaaaaactagagttggctgattggatccaaaagctaggcc

SEQ ID NO: 34582 - DNA, 287 bp, Glycine max
  unsure (1)..(287): unsure at all n locations; Clone ID: 701108152H1
ctgcaattcactctgtacaattcttcgttcgttctctgcagttatatcctttttgagcttcaatggcggacgctgaaaccttcgctttccaggctgagatcaaccagcttctaagtctcatcatcaacacattctacagcaacaaggagantttcttgcgtgaactcatcagcaatgcttctgatgctttggataagattcgattcgagagcttaaccgacaagagcaagctcgatgctcagccagagctcttcattcgtcttgtgcctgacaaggataacaagact

SEQ ID NO: 34583 - DNA, 282 bp, Glycine max
  Clone ID: 701108153H1
agactgtgtcccgaacgcgcttcccgaggcaggtacttcgattttcgttccaatttcgttcccgcctctgttgaattcgctcaggtctcgcccctctgcaccactctgtacaaaggcgggttccgaattcgaatgtggaagaagttggtttgacggtggccactgatcttgatggcaaaagtgttgagaaaatggcaccacatgtgaatgaaccagtgtatgcttggagaaatgattcttttgttgctgcattccttccgaagtggttcgaataacttatgg

SEQ ID NO: 34584 - DNA, 285 bp, Glycine max
  unsure (1)..(285): unsure at all n locations; Clone ID: 701108154H1
aaatggcaacagaaacaaaagtgcaaganttaggtggcatcaccgatgtgcatggagctgccaacagcgtacgagatcaacaatctcgctcgctttgctgtngaggaacaaaacaaaagagagaattcagttctggagtttgtgagggtgattagtgcaaagcagcaagtggttgctggagtgaattactacataacattggaagcaaaagatggtttgattaaaaatgagtatgaagcgaaggtttgggtgagggaatggttgaactccaaagagttgctagaa

SEQ ID NO: 34585 - DNA, 282 bp, Glycine max
  unsure (1)..(282): unsure at all n locations; Clone ID: 701108155H1
tttggaaggttccactttggttatggaagcaacttagctcccttcctctctctttattttccacattgtacaaatgnnctttcagggtacttgttggtagtggtggttgacaaagatattgaagatgggaattttgagcactatagcaagcttttttggatttggaatgggaacttcaattgggctagtcattggatactatttgttcatatacttccagtcaacagatgttanggatccagtaattcaacctttgattgagcaagatgctaaaacattaca

SEQ ID NO: 34586 - DNA, 166 bp, Glycine max
  unsure (1)..(166): unsure at all n locations; Clone ID: 701108157H1
cnaaggatgagtttttttctttgcttttaagaaaacacacaacatgcaagtntttttgttttatatttcatgttaaaattaacttttctatcttatacacgtgtgtacattnaggaataatattcctgtaaatactcttaattacttaaaaaattgcatttatgac

SEQ ID NO: 34587 - DNA, 283 bp, Glycine max
  unsure (1)..(283): unsure at all n locations; Clone ID: 701108158H1
caattttctagggttttattcattttccgatggcttctgcagatgttgagtaccgttgctttgtcggtgggctcgcttgggccactgacgaccatgccctcgagagagccttctctcagtacggcgaaatcgttgaaacgaaggtctgtttgttgcaggcatcacatctgatctcacacgattcggattcggaattttctcgatcccgttctgatctgtgatctctgatctgtttgcgttacttgatcttatgatacttgtgttactatatgantcttttatt

SEQ ID NO: 34588 - DNA, 286 bp, Glycine max
  unsure (1)..(286): unsure at all n locations; Clone ID: 701108160H1
ctcgactcacttccttgtccgattccgccaacgaggcnagtnnnatcagatctatctgcttcttcgtcatggccaccggacaactattctcccgcantacacaggcttncntttacaactataagcaacttcccatacagcggatgcttgattntgacttcctttgcggcagggaaacacnatcagttgctggaataattaaccctggttctgagggatttcaaaaacttttttttggtcaggaggnaattgccatcccagttcatgccaccattgaagcagcttg

SEQ ID NO: 34589 - DNA, 248 bp, Glycine max
  unsure (1)..(248): unsure at all n locations; Clone ID: 701108161H1
caagaagaaagcagagcctctactacatcatcactcnncacatttcannaccttctctttctcccagtctctcacncacaacaattgaagnagaaaatggttgacaatgattcgctctcggaattcctcgcatctgcggtcgacgcggctcagaaagctggcgagattattcgaaaaggcttctaccagaccaaaaatgtggaacacaaaggacaggttgatttggtcacagaaactgataaagcatg

SEQ ID NO: 34590 - DNA, 282 bp, Glycine max
  unsure (1)..(282): unsure at all n locations; Clone ID: 701108162H1
ttttcttgtatttatcattttattgttacttagaaacttatgattctgattgatatgtaattccctaataatcagtattggttacatcataaggcatacccatgcaaccctgtgatcatctatgaatgttatgaaccactttangcctgtgacattgttaacgtgagaaggcacatgatagatgggcgaagggtgtatgttagctgtcagttagttaggatagcaaggttaactaactgttagttagttaagaagctataaataatcnttagagggaagtta

SEQ ID NO: 34591 - DNA, 284 bp, Glycine max
  unsure (1)..(284): unsure at all n locations; Clone ID: 701108163H1
cttattcatccttctcttctgaataatccagatctctttctgcccttntctccgtcacgcttttcgtgaccggatctgtatggatttgatccagatctacacgccgatggttgttttggccgggtctttcatagatctggtgcgtagaggctcagatctacggtaccgaggtacaacagagaatcgatgacaagaacgcagatccgacggtagatccagccgattccgcttgttcgatcgctacagacccctgtatcggatcataagcagcgtgtctcgcgcgt

SEQ ID NO: 34592 - DNA, 288 bp, Glycine max
  unsure (1)..(288): unsure at all n locations; Clone ID: 701108164H1
cttctttctaaggttccaggntcagatctcgttccctcgccactcatcctcggccgcgcgtcgctcgccacgcgccaccatcaaccgcacctctcgccgtgaatgatcaataatatattcaatattttattgcaacttggaactagcaatggcatctgaaacagttctgaaggctgttttccctttcctggacggtgttgatcttgcttcttgtatggctgttgataagcagtggaaagacatagctagcgatgattccttggaaatgtctgtgtgccaagagatggc

SEQ ID NO: 34593 - DNA, 296 bp, Glycine max
  unsure (1)..(296): unsure at all n locations; Clone ID: 701108165H1
ttagcacttcttcttttcacacngccgctgcaacaatggcttcagagaagaaactttcgaacccaatgagggagataaaagtgcagaagctcgttctcaatatctctgttggcgagagtggagatcgtctcaccagagccgccaaggtgttggaacaacttagtggccaaaccccagtgttttccaaagcaaggtacactgttcgttcctttgggattagaaganatgagaagattgcatgctatgtcactgtcagaggtgacaaggcaatgcaacttttggagagtggtttgaag

SEQ ID NO: 34594 - DNA, 289 bp, Glycine max
  unsure (1)..(289): unsure at all n locations; Clone ID: 701108167H1
ttagattacacctcaaggaagaggctggggagtacttgcaggagtctaaactgaaagaattggtgaagagatactctgaatttattaacttccctatctatatttgggcaagcaaagaggttgatgtggaggttcccgctgatgaagatgattccagtgatgaagaggattcatctgaaagcagctccaaggaggaaagcgaagatgaagatgctgataaaagtgaagacgaaganaaaaagcccaagacaaagacggtgaaggaaacaacttatgaatgggaactttt

SEQ ID NO: 34595 - DNA, 286 bp, Glycine max
  unsure (1)..(286): unsure at all n locations; Clone ID: 701108168H1
tcggatctagagtcttcagtttctcctcgttgttcttcgctttcctgttttcaatttcgattctttcgttaatttaataagatgtttgggagggcaccgangaagagcgataatacgaggtactacgaaatcctcggcgtctccaagaacgcttcgcaggatgatctgaagaaggcttacaaganagccgccattaagaatcaccccgacaagggcggtgatcccgagaagtttaaagagctggcgcaagcttatgaggttctgagtgaccctgagaagcgtgaga

SEQ ID NO: 34596 - DNA, 281 bp, Glycine max
  unsure (1)..(281): unsure at all n locations; Clone ID: 701108169H1
tcaaaganggcgtcttcataaacgcctttcttctccgtttccgtttcctcgttcaaattcgctttttgatctgcgaaaatgagagagtgcatctcgatccacattggtcaggctggtatccaggtcggaaatgcttgctgggagctctactgcctcgagcacggcatcgggcccgatgggcaaatgccaagtgacaagacagttggcggtggtgatgatgcttcaatactttcttcagcgagactggtgctggaaagcacgtgccacgtgcagtgtttgta

SEQ ID NO: 34597 - DNA, 284 bp, Glycine max
  unsure (1)..(284): unsure at all n locations; Clone ID: 701108170H1
cgacatccgcatcaaaagaccttctctttctcttgccatcatttcattccccatacgctccatccatcaccctttctttccattctgttgggaaatggangtcacactttcagcgtgcaagtccattagctcgccttctgttcccgtcgcagctttatttgcggggaaagcaggaactaagagttcgcaatgcagttttttagctggagcaaacaaagtgaggtttcctaggcaagtcggtcaagttagccacgttcgcaaacagcgccaaacgcgtcactgtg

SEQ ID NO: 34598 - DNA, 282 bp, Glycine max
  unsure (1)..(282): unsure at all n locations; Clone ID: 701108171H1
tcatctcttaaaccttcttatccgctccctaagctttcaaaaaccacgatgatgacagctaattgcgttagattcagtttcaactacaacaacccatgtctcttattcgcaaatgggtacccttcttcttcttcacttccactttctcttcagaataagcccaganaatcagcatcagtgattgtgagtgcccgaaagaaagataagaaagaagatacccatagctctgttcccaaacccgatgaggtcacgggtttcttccccgaagccgtgctccttaaa

SEQ ID NO: 34599 - DNA, 284 bp, Glycine max
  unsure (1)..(284): unsure at all n locations; Clone ID: 701108172H1
ctttctgttcttgttgggctgctaatgctatccctgttcgncctcgnctgcagtactcaaactccttcattgcagctacactcaacaccgtgtttggatggaagcctaagttttgcggcaactttggaaaatacttcaaaagtgcgttcaagtctcacaaaacggtgcgttggaacacgtgtcaatggattaaaacggtaaaacgaacacacccttgttacttggacgtggaaattcacgttcgcgctcctttttatcttggcattgcgtttgtntgtgtgcna

SEQ ID NO: 34600 - DNA, 283 bp, Glycine max
  Clone ID: 701108173H1
cttcaaaacactcataacacaaagcacaaagcaaagctcatccttgagttaaaaaatggcagcagcttcttccatggctctctcatccccatccttggctggcaaggccgtgaagctgggcccatcagccccagaagtgggaagggtgagcatgaggaagaccgtcaccaagcaggtctcctcaggaagcccatggtacggcccagaccgagtcaagtacttgggcccattctctggcgagcccccgtcctacctaaccggtgagttcccaggcgactacggc

SEQ ID NO: 34601 - DNA, 277 bp, Glycine max
  unsure (1)..(277): unsure at all n locations; Clone ID: 701108174H1
gggtgccaattttgtgttggatctgtaaatgtntganagtttgaattttggatttgggtctaccccgttgtggaanaaaacttttntnttcttgggttgggggattcaaattgtgaaattttcaaggggtggttttttgaaaagggtcttngcgttttgtgttgcttctggatttggatttnganttgttgtnttattgatttannttnatganacatnttcntattcggtngctccatgttgagatgtntngctgtatatcaatgtntagttcttg

SEQ ID NO: 34602 - DNA, 282 bp, Glycine max
  unsure (1)..(282): unsure at all n locations; Clone ID: 701108175H1
ttgttactgtgccaacgcattgtgaggccacaagtacctaacacccagctaagcttttggaacttagagttaagcagttaccttcctccaactataatatctcaaccaatcaaaatcctttttctcaatnnnnnnnnnnnnnnnnnnnnnnnnnnnncacaataagtgttgattttttcctaaataagtgaaagtgtagttacacctttttttagtgttttaccacttttgtgtgccagagttttctgagtttcataggagaaaaaaatgacagaagaacaa

SEQ ID NO: 34603 - DNA, 282 bp, Glycine max
  unsure (1)..(282): unsure at all n locations; Clone ID: 701108176H1
aacgaagcaatcgcaagtcgtctgttctgtcccgcgggagcagacgacctgtcttcatcgccaaacaaccttcaaaaacattcatcaacgttcactattaatccatccatcattaagtaagaaaatnaggttcgatttttttatctttgttttgcttctgatccatcatggaggtgccgagttcctgggatgcccttcgcaaacaggcaagaaaacttgaagctcagttggatgagcagatgaattcttatcgtaaattggtttctaataatgtttctacaa

SEQ ID NO: 34604 - DNA, 283 bp, Glycine max
  unsure (1)..(283): unsure at all n locations; Clone ID: 701108177H1
gctagcaccacattcacctgaggcttccaaagcaatggcttcccttgcagcatccactgctgctgcttcccttggcatgtcagaaatgcttggaaaccccatcaacttcagtggtgccacaaggccagctccatctgcttctagtcctgcctccttcaagactgtggctcttttctccaaaaagaaggctacaccaacacctccaaaaaaannnnnnnnnnnnnnnnnnnncaatgatgagcttgccaagtggtatggtcctgacagaaggatcttcttgcct

SEQ ID NO: 34605 - DNA, 79 bp, Glycine max
  Clone ID: 701108178H1
cacaacttaaatttcttttgcagtcaccgagttactctacgatgaaaactaatctgctggctacaaagttgtattattc

SEQ ID NO: 34606 - DNA, 287 bp, Glycine max
  unsure (1)..(287): unsure at all n locations; Clone ID: 701108179H1
cagagattctctccaccccattcaagtcaaagaaganagaatagagggaatttttcttctttttntaaaaaagaaaagaaggaaaagttggtatggaatgggatgagagagaggaagaaccacagctcatggcatatattccccnaacataaccccacttatgtttcctgatatggagtgaganccatagaacnacacaaccacntccaagttataaagagaactatagctggcacatattgatgcatacntagctaaaaggatcnaaaggcacatctatgtttcag

SEQ ID NO: 34607 - DNA, 278 bp, Glycine max
  unsure (1)..(278): unsure at all n locations; Clone ID: 701108180H1
aaatgcatctaggttgtgggcacttgaaattggagagaggtgcaaaccttgggttcgttcacttcataggacggacaaaattggttctctgtctgaagcacgtgaggtgttgagaactgccaggcaacaagtaaagaagactgttccacatttgcctcagcanctggcttgtgtagatgtgattgaacatggaatagtccatggaggctacagtggtgttctaaaggaggcagaagtattcaaacaattggttgtatctgacaccgcaaaaggtttaa

SEQ ID NO: 34608 - DNA, 295 bp, Glycine max
  unsure (1)..(295): unsure at all n locations; Clone ID: 701108181H1
cgncctcccaatttgggaatttttcgaaaccctaaaaagatgaacccctacgacagcagatattctgacgcctcttcttttcgcggccgtcgtagtgatttcgttggacctattccgccgccgtctttcgtcggccgcggcggcgcggtttcctacggcgtccctggacccaacgggttccgatccgcacccgttgctccggtcccaccctttgtncctccttccggaggctttaatgtaggtcgaggcggtggcagagcgggctatggtcacgtgagtnatagaatgggtcgta

SEQ ID NO: 34609 - DNA, 291 bp, Glycine max
  unsure (1)..(291): unsure at all n locations; Clone ID: 701108182H1
ggctcagctcagccatattctatctccacgccgctcactctctctcacannnnnnnnnnnnnnnnnnnnnnnnnnnnnacccttcactttactctctctctctgacagctaaaatgcaaggaggaatgagatcatttttgtcacatgggaatgtcattagaaatgctgttctacaacgcgtgcgcatggtgaaccccctgctacagacaattgcctcttcgcggtttgaatctgttacgcctgctcgcattgaggagcatggttttgagagcaccacaatttcagacatct

SEQ ID NO: 34610 - DNA, 288 bp, Glycine max
  unsure (1)..(288): unsure at all n locations; Clone ID: 701108183H1
ccctaccacatatctccccacccatgagcaattcncggcaaaatgtataattattgaacagcggaacatacgatgatcacccgccaccatgcctttgtccgctaaaattagttcgctgcaacgacaaatacaaaggttgcgtatcgnnnnnnnnnnnnnnnnnnnnnntgctgcnactgtcactgcttgctacacctcactcttcagcttcggagattccctcactgataccggcaacttgtacttcatttcccctcgtcagagccccgattgcttgctccctcccta

SEQ ID NO: 34611 - DNA, 283 bp, Glycine max
  unsure (1)..(283): unsure at all n locations; Clone ID: 701108184H1
cnagaaaacacttgtctctgagcttgagggcaagacagttggtctgtatttctgcgtgaagtcattcggatcatgcagtgactttaccccaaagcttgtggaggtttatgagaagctgaaggcccagggggagaactttgaggttgtgctgatacccctagatgatgatgaagagtcattcaaggaactattagaaagtgtgccttggttatccttgcctttcaaggacaaaatctgtgggaagctagctcggtacttcgagctttcaaccctccccactttg

SEQ ID NO: 34612 - DNA, 281 bp, Glycine max
  Clone ID: 701108185H1
gaacactaccctgaacatagtaaagaagccagtgctaggatttgttagtgaagcaatggctcaaaccatgttgctcatgtctagtgtctctagcagttattccgtggatttgaagaaagaccttttcctccaattgcagagtcaaagtttaaggcctaagttctctcagctctcattcaacccacttccatcatcaacttcttccttttcttcaccccgtacattcacaactctggccctcttcaaatctaagaccaaagccgctcctgctaagactaagg

SEQ ID NO: 34613 - DNA, 282 bp, Glycine max
  unsure (1)..(282): unsure at all n locations; Clone ID: 701108186H1
ttcctaattgtttaaacctaattctcatttcttcatcgttcgattcttctcctcctaaagatgcagatcttcgtgaaaactttgaccggtaagancatcanccttgaggtggagtcctccgacaccatcgataacgtgaaagctangattcaagacaaggaaggnctnccacctgaccagcagagacttatctttgcgggtaaacagcttgaggatggtcgaanccttgcngagtacaacatcnannaggaatccactctncacctcgtgcttcgcctcagg

SEQ ID NO: 34614 - DNA, 261 bp, Glycine max
  unsure (1)..(261): unsure at all n locations; Clone ID: 701108187H1
ggatcactccaatctccatttggctactccagaaaagcctcctttcttgttaaggcagcngctactccccctgtcaagcaaggatcagacagacctttgtggtttgcatcaaagcaaagtctttcctacttggatggcagccttccgggtgactatggatttgaccctctgggactttcggaccctgaaggaacaggagggttcattgngccgaaatggctagcatatggtgagataatcaatggtcgttatgcaatgttg

SEQ ID NO: 34615 - DNA, 284 bp, Glycine max
  Clone ID: 701108188H1
gcaaaagcaagaagaactagtctaagcagaaatggcctcttcagtgatggcatctgtggcccttcaaacctgcccctttcactgttgagaagtcctcagttagaggccttccctccctctcaaggaactcctcttcattcagagttgtggccagtggtggcaagaagatcaagactgacaagccttatggaattaatggtggcatggctttgagggaaggagttgatgcatctggcaggaaaggaaagggaaagggcgtttaccagtttgtagacaaatacggt

SEQ ID NO: 34616 - DNA, 261 bp, Glycine max
  unsure (1)..(261): unsure at all n locations; Clone ID: 701108189H1
ggggaagaaaggcgaagatatggaaccgctctttgaaggnctggtgctgtttaaccctgccgaagagaaagacaatggtagtgatgattctctcacaatctcaagttgttcgcaatcacaaccccttgatgagaatctcttctctgacctcacgcttgtggtagatcccctccaaaacctagaagtagctgaggccgagcgcgatctccaatcgagacagggtcatgcccccgccagaaggagaaaacgatctggcttgag

SEQ ID NO: 34617 - DNA, 277 bp, Glycine max
  Clone ID: 701108190H1
gctgggcctgtcattagtcttgtttatcctctatatgcttcaattagggcaattgagagcaagtctcctattgatgatcagcagtggctcacttactgggttctctactccttgatcaccctctttgaacttacttttgctaaagtccttgagtggattccaatatggccctatgcaaagctgattgcaacctgctggttggtccttcctactttagcggtgccgcttatgtttatgagcatatgtgagaccttctatgtcaatcctcagaccatta

SEQ ID NO: 34618 - DNA, 283 bp, Glycine max
  unsure (1)..(283): unsure at all n locations; Clone ID: 701108192H1
agaacaagaacaacaaagtaacgtgaaagagagagaganggaggcgattgttccagtggtggatttccagaggctttcagaggaagaggagcgcaagaagctgancaaaacatgtgagaaaccagggtgtttcagaatcatcaaccactcaattccactaacactcatggctgacatgaagtcagtggttaaatacttgcatgaccttcccacggaaatcaaaatgcgcaacaaaccctccgtccctgagagtggctatagggcggcaatgccaacaagtcct

SEQ ID NO: 34619 - DNA, 284 bp, Glycine max
  unsure (1)..(284): unsure at all n locations; Clone ID: 701108193H1
aaaaagtaaaaaaccagtcagggaccggggaaaacacacaattcacaaaggcattcgacggagaatggaacagaagcggaagaggaagcagcaggtgaagcgcgacggagagccaaagcccaaatcggttcgtgcgggttcaactcgaaccgacaatgtgaaagatccatttccatctcatgctcgacccaccccacaggaatgcgaanccgtgcgtgacactctcttagccctacacggcattcccccggaactcgccaagtaccgcaaactcccaccgtccg

SEQ ID NO: 34620 - DNA, 284 bp, Glycine max
  unsure (1)..(284): unsure at all n locations; Clone ID: 701108194H1
ccaggcgcacgttagcacaaactatcatggccacggcaacagcagctgccacctcgtcctttatggggacgcgtctcctggaggctcactccggggcggggcgagtgcacgcccgattcggcttcggcaagaaaaaggctcccgccccaaagaaagcctccaggggatcgggccgagacaccgacagacccctttggtatccgggcgccaaagcgcccganatacctcgatgggagtcttgtcggagattacgggttcgatccgtttgggctagggaagcccgc

SEQ ID NO: 34621 - DNA, 266 bp, Glycine max
  unsure (1)..(266): unsure at all n locations; Clone ID: 701108195H1
ggnctttttccatctgagtgttgaaacagagaagaagggagacgccaatcatgggttccanntcactaccatctttcattcagatgtcatctactacacactccagcttcagtgaaaaactcatcacccctcaaaagaagtttcaaattgggacacccacaacaactgcaagagacacacanncaacaatttcttggtcttttccttctcctttatgcaaagctcttcacaaatcagttcctttggctgcttcactttcaatcttc

SEQ ID NO: 34622 - DNA, 278 bp, Glycine max
  unsure (1)..(278): unsure at all n locations; Clone ID: 701108196H1
tgcaattcactctgtacaattcttcgttcgttctctgcagttatatccttttngagcttcaatggcggacgctgaaaccttcgctttccaggctgagatcaaccagcttctaagtctcatcatcaacacattctacagcanncaaggagacnttcttgcgtgaactcatcagcaatgcttctgatgctttggataagattcgattcgagagcttaaccgacaagagcaagctcgatgctcagccagagtcttcatcgtctgtgctgacaaggataaca

SEQ ID NO: 34623 - DNA, 260 bp, Glycine max
  unsure (1)..(260): unsure at all n locations; Clone ID: 701108201H1
tcagatattgaaagaaacacgactgaataaaacattgacgaacgtggtaataccaactttcgacgagaggnaaaccaagccagtnatattctcaaactataagctcaagacggaaacttacttaaatgccaaactctcagatatatgcatcgggacttcggctgcaccgacttatctaccgccgcaccaatttcagaatgacggtgttcaatttgatttggttgatggtgctatgtctgcnaataanccaggtnggttgc

SEQ ID NO: 34624 - DNA, 258 bp, Glycine max
  unsure (1)..(258): unsure at all n locations; Clone ID: 701108202H1
gagtttgttgtgagctataagctagtttatcgtgaggagaatatgaagttgtttgttttctttgttgctgcagtagttttggtagcatggccatgccatggcgcaggctaccaaaggttccctctccgaatgaaaactggctatggtgagcgttcttcggaggtaaaatgcgcaagttttaggcttgctgtggaagcacacaacatccgagcctttaaaaccattccngaagagtgcgttgaaccaacaaaggactac

SEQ ID NO: 34625 - DNA, 164 bp, Glycine max
  unsure (1)..(164): unsure at all n locations; Clone ID: 701108203H1
caagtggtgaacccatgggaagtttccgccaaaggcaaaatcgattacgacnaactcattgaccgtttcggttgccagaagctcgacgaagccctaatttcgcgtctcgagcgcatnacctctcgcactccccacgtctttctangacgcggcgttttcttcgc

SEQ ID NO: 34626 - DNA, 249 bp, Glycine max
  unsure (1)..(249): unsure at all n locations; Clone ID: 701108204H1
aaaattgactgtnacgtagctgaagctgattgagctacgttggtctcagagcgccactgaggaccttcaacttttcttctcctcaagctgccaaaattcctcgctcccaacgccttttcgtcgtcagagcctccgattcggagttcgaagccgccgttgtcgccggtaaggttccgccggcgcctcccgtnccgcccagaccggcggctccggttggaacaccggtggttccttcacttccacttcacg

SEQ ID NO: 34627 - DNA, 257 bp, Glycine max
  Clone ID: 701108205H1
aagtttcttcctttctctggctctttgtcttctctgacacatttggggccttgttgagtgtgtttttgcaagagggtatggcgaaggacgttgaggttgctgagcgtggctccttctctgggaaggactaccaggaccctccaccagcaccactcattgatgctgaggagctcacaaagtggtccttttacagggctcttattgctgagttcattgccactttgctcttcctctacattactgtgctcacagttata

SEQ ID NO: 34628 - DNA, 248 bp, Glycine max
  Clone ID: 701108206H1
cagaaagcaagctcatcctagagttttaaaaatggcagcagcctcctccatggctctctcttccccatccttggctggcaaggccgtgaagctgggcccatcagcccccgaagtcgggagggtcagcatgaggaagaccgtcaccaagcaggcctcctccggaagcccatggtacggcccagaccgcgtcaagtacttgggcccattctctggcgagcccccgtcctacctcactggcgagttcccag

SEQ ID NO: 34629 - DNA, 248 bp, Glycine max
  unsure (1)..(248): unsure at all n locations; Clone ID: 701108207H1
ttcagatagtaacactaacacagcttttctacatacaaagaacctttataaaaaatactagaaaaagaaaagtataatagaaatctatttaattgtttttctttttaattttaaccgacatcagattacggtgttggtctaccacggtaggcttgcttgcaanccagagctaggtttctgcgcggnggagcacagctgcgacgaccctgggcacgcctgcaggcaattgtcncccaggctgccggaaa

SEQ ID NO: 34630 - DNA, 253 bp, Glycine max
  Clone ID: 701108208H1
ctcaggtggattacttgcttggaaaacaagccttctttggccaaactgatgctgagggtggttttgattccaatgctgtggcaactgcaaacatcttggagagttcaacgcctgtcattgatgggaaacagtactacagtttgactgtgttgacaaggacagctgatggagatgaaggtggcaagcaccagctgattgcagcaactgtgaaagatggcaaactatacatttgcaggctcaagctggagacaag

SEQ ID NO: 34631 - DNA, 253 bp, Glycine max
  unsure (1)..(253): unsure at all n locations; Clone ID: 701108209H1
gcagattccatcatacctgaccggagaattccctggtgactacggatgggacactgctggattatcagctgacccggaaaccttcgccaggaaccgggagctggaggtgattcacagcagatgggcaatgcttggtgcccttggctgcaccttcccagagatccttgagaagaatggtgtcaaattcggcgaggccgtgtggttcaaggccggtgcacagatcttctcagagggaggccttgatantgggcac

SEQ ID NO: 34632 - DNA, 251 bp, Glycine max
  unsure (1)..(251): unsure at all n locations; Clone ID: 701108210H1
tcgccggctaagctcgcaaacgtaaacgaacttgagttggaacttctccgacgagtacaaccaattggtctcaaaccctatcgccttttgcttcaattcaccgcattctcgaatttccccttctctgtgacgcgtggcaaaaattttccccttaatntcttttctttaggagagaacatggcatcgaaaagggaaagggaagcgagtgatagagtagaggatgaaggggttgataatgagtcgaaaaggca

SEQ ID NO: 34633 - DNA, 254 bp, Glycine max
  Clone ID: 701108211H1
ctggggatgaagcagcaaaaagtcgtcatatagttgaagctgtgccaggatttgagcaggcaatccaaggatatgcaatccatgtcctttccttgacttaccaaaggattcctagaactgtgcttgctgaggctattaacatagaaggtttatccttggacaaattcattgaacatcaagtagccaacagtggttgggttgttgagaaaagccaaggcaggggtcaactcgttgtcctccctagaactgaattt

SEQ ID NO: 34634 - DNA, 253 bp, Glycine max
  unsure (1)..(253): unsure at all n locations; Clone ID: 701108212H1
ccatttcctcacctccttcaaccgctgctaaattctagggttccgnaatggacgctggcggaaagatcaagaagggcgccggaggtagaaagggcgnnggcccaaagaagaagccggtttcaaggtccgtcaaagccggtctccaattccccgtcggaagaattggccgttatttgaagaaaggaaggtacgctcagcgtgtcggtaccggtgctcccgtatacttggctgcagttctcgaatacctagctgc

SEQ ID NO: 34635 - DNA, 251 bp, Glycine max
  Clone ID: 701108213H1
tttgaacattcacccaatttgcagagttccaagttatatacatacactgcataattaagagaaaatgtctctgattccaagcttcttcggtggccgaaggagcagtgttttcgaccctttctccctcgatgtgtgggacccctttaaggattttccatttcccagttctctttctgctgaaaattcagcctttgtgagcacacgagtggattggaaggagacaccagaagcacacgtgttcaaggctgata

SEQ ID NO: 34636 - DNA, 236 bp, Glycine max
  unsure (1)..(236): unsure at all n locations; Clone ID: 701108214H1
catttttcttcatcccccaaagttncnaatctttgtattcaangtcaccctttctctctctcaatggccacttgtgttgatgccccaacccctctttctcggaagcctagcgggtcccaatccgatgatcgttccttcaattacatgaaattctgccgacccactttctctgatcgcgttccctgcatacccatttgcaagaatcgtgacactggccttcacacgcgtggaggagt

SEQ ID NO: 34637 - DNA, 255 bp, Glycine max
  unsure (1)..(255): unsure at all n locations; Clone ID: 701108215H1
cngctggcgactctgtcaagttcgaaggctgtgaacgaatttcttgagcatcagaaggaaaatataacaaatttgataaaacagagtttggcanttggtgatatttataagcgtgaaaatctgcagtttgttactgaggaccttgtcaaagaggttgagaattccattgctgaattcaaacgtcaaaaccaagaatatgatgaggaacgggtgaagggacaggttcaaganatactagaaggagctaaagtgctt

SEQ ID NO: 34638 - DNA, 97 bp, Glycine max
  unsure (1)..(97): unsure at all n locations; Clone ID: 701108216H1
ctctctctctcaactcccaattactttgtngcattccacacancanncgncannnngaagagagaagagagaagagactcttccttccatcctgcaa

SEQ ID NO: 34639 - DNA, 263 bp, Glycine max
  unsure (1)..(263): unsure at all n locations; Clone ID: 701108217H1
aaaanaaagaaaaaaaaaacccttagccaacacaaccatcatggccacctctngctattcagcaatcagcattcactggtcaaactgctctgaagcagctcaatgagttcgtccgcaagaccggtggcgccggcaaaggtcgcactaacatgcgccgcaccgtcaagagtgctcctcagagcatttggtatggccctgaccgtcccaagtacttgggtccattctcggagcagattccatcatacctgaccggagaattccct

SEQ ID NO: 34640 - DNA, 262 bp, Glycine max
  Clone ID: 701108218H1
ctttactgtcacgtgaaatctaacaccgagcgtgtagatagtctatgaaatccaattaaatgttcttctgagaacaaagaacataagataacaaacagaaagcgcttataaatggctttccacgaccatctaccgcacgaaatcacgttccagccgtttaccgaggagcagcagttaggtcagagcagggacatgcagcggctgctcccgctctccggcggggcgccgacgtgggctgaacaacagcaccgcggcgacgctt

SEQ ID NO: 34641 - DNA, 259 bp, Glycine max
  unsure (1)..(259): unsure at all n locations; Clone ID: 701108219H1
cnaganaactagaaacagtgtgatgaaaatgaaggtccttgttttcttcgttgctacaattttngtagcatggcaatgccatgcgtacgatatgttccctctccgaatgaacactggctatggtgcccgtactccggaggtgaaatgcgcaagttggaggcttgctgtggaagcacacaacatctttggctttgagaccattcctgangagtgcgttgaagcaacaaaggaatacatccatggcgaacaatatagatcg

SEQ ID NO: 34642 - DNA, 258 bp, Glycine max
  Clone ID: 701108220H1
accttctctgcaccatcaaacagagaaaaattgtttttactaattcggacaggattcacgcgatgaggtcgttggatagacttgggatcaaggactgtttcgagcaaatcatatgtttcgagactataaacccgaaccttccatattccacccgacccgatgaattcctcatcctccttaaaccgtctctcgacgccttcaagatcgcccttgacgctgccaacgtggatcctcgtcgtacgttatttctggatgaca

SEQ ID NO: 34643 - DNA, 256 bp, Glycine max
  Clone ID: 701108221H1
ctcaatcttcatctccaacaagtgtttctgtaaccatggcatccaccactctatcccctacaaccccttctcagctatgctcaggaaagagtgggattttcagtccctcacaggcacttcttgtgaagccagtgaagaggcagatgatggggaagagcaagggaatgagaattgcatgccaagccaccagcattcctgctgatagagtccctgacatgggcaaaagacagctcatgaatctgcttcttcttggtgc

SEQ ID NO: 34644 - DNA, 255 bp, Glycine max
  unsure (1)..(255): unsure at all n locations; Clone ID: 701108222H1
ccnaaactttggagtccggacatgagacanaaagatgaggagggaggtgtaaganactgggaagagaaggtggtggtcttgttgccattctgatctaaagcttgtgtctttctgcttcgtttgcatcttctgctgcgtaaagttgattcttttctgattcttccgtagatttcatctctgaaactagttctaatactttatctacagatctctatattctaggtgaaggtttgcttttgatccggcttgggagtt

SEQ ID NO: 34645 - DNA, 255 bp, Glycine max
  unsure (1)..(255): unsure at all n locations; Clone ID: 701108223H1
aatcacgcatcaatgccttgccaaggtacttgactgttcagtttgtccgtttcttttggaagagggaatccaaccaaaaggctaagattttgcggaaagtagattatcccctggagttggatgtttatgatttttgttcagatgatcttcgtaaaaaattggatgctcctagacagatcctaagaaatgangaaggcaaaaagcttggtctgaaagtgaatgagaaaagctctgttcagaaggaaagtgatgtaa

SEQ ID NO: 34646 - DNA, 256 bp, Glycine max
  unsure (1)..(256): unsure at all n locations; Clone ID: 701108224H1
caaggttgttctgttcttctacgcagacacacacanaaacacataacataacgcccctccttctcttcttctttcccttcaaattctatttcttcatccattttgtgctccaaacagcacaaacattacaatcacaccggtgttcttcgctttctactcttctaaaagtgacttaacagctcatattgaaacttacctacagaatagaggatcatgggttgctttggcttctgcaaaggagatgatagtgtcacag

SEQ ID NO: 34647 - DNA, 255 bp, Glycine max
  unsure (1)..(255): unsure at all n locations; Clone ID: 701108225H1
cncagttctcacactcattccgtgctctaaatctcaaattctagggttagggttcccaatttctccgccaatcagaagatgagttccaccggtggtttctaccaagggcggaaggggcaagcccaaagcctccaaatccgtttcaagatcgcagaaagctggtctccaattccccgttggaagaatcgctcgattccttaaggctgggaaatacgctgagcgtgttggtgctggtgctcctgtgtacctctctgc

SEQ ID NO: 34648 - DNA, 254 bp, Glycine max
  unsure (1)..(254): unsure at all n locations; Clone ID: 701108227H1
cttcagtctctcccacacacccttcttcttcagctgagttgtttgnnatacagcaagatgaatccatggaacatgagaacttccaagttactctctcaaacaagtttcttatcctccttatctctttgtagaagagattccaaacatgggaaattccagtgttgtgaccaaggatgctagaggttcacagctgacaatcttctatggtggccaagttcttgtcttcgatgatattcaagctaaaaaagccaagg

SEQ ID NO: 34649 - DNA, 256 bp, Glycine max
  unsure (1)..(256): unsure at all n locations; Clone ID: 701108228H1
tcggtggcttgcgnaaacatgaaagangggcattgtgttatggcatgttcaatggcatgtcattgtggcttcttacaatgccttttcattttcaccaaccagagagttcttcgccaccaaccacatcatgtcaaaaccatcatccantactactagatgcngaccctttctcttgtccatcaccaatgccacaccatcctacaacaccctgtttctgaggctgttaggctcttggttccttcagcaagatttgaac

SEQ ID NO: 34650 - DNA, 255 bp, Glycine max
  unsure (1)..(255): unsure at all n locations; Clone ID: 701108229H1
ctggaaacattncttttcatggcgagacaagataacaagttacaattggttgcntagtttgtggtttgaagtttgaagtttgaaccttgaacgaaccccaaaatcgatcgaggcagatcagaattgagggcttagaaatcaggattcagaatgggtcagactgaaagcgcagaagctgtgacggaaactcaaaccacaaccaacgacacttccaatcccatttccctggaatccgtcctcgcagaagctgcagaa

SEQ ID NO: 34651 - DNA, 256 bp, Glycine max
  Clone ID: 701108230H1
aacagattcaagcacaaaacagttctcgaagcaaggacaaagcatatataaaagcctcttcatcattatattggggttcttcaaagttcaaaccaagttcatttttgaacgaccacaacagattttcttgtatcaaacatatatggccacactagctacagttttcctcccttctaagcttaagccatcgcattcggggaaccaggtctctccattcacgcacaaaacaccactctggaagaaagttaaccaacca

SEQ ID NO: 34652 - DNA, 256 bp, Glycine max
  unsure (1)..(256): unsure at all n locations; Clone ID: 701108231H1
ctaaaccctagtcctccatacatcaacttgggaggttaaagagacggcaacgttgtgctgtccgccttgaccgagccagagcttcgtcttgggccctcgattttgccctgtaaaactaatcccagtcacaacagaaataatcaatggcaccgaaacagaccaaggctgagaagaagatcgcttacgatgcgaantgtgcgacctaatggaggagtacggccaaatcctcgttgtaaactccgacaacgtgggatcg

SEQ ID NO: 34653 - DNA, 261 bp, Glycine max
  unsure (1)..(261): unsure at all n locations; Clone ID: 701108232H1
ttnnttatcctttctttttcntccccnttggaactcgaatattcactatggcagatgaggtggttctgctagatttctggccaagtccatttgggatgagggtcaggattgcacttgctgaaaagggtatcaaatatgagtccaaagaagaggacttgcagaacaagagccctttgctcctcaaaatgaacccggttcacaagaaaatcccggttctcatccacaatggcaaacccatttgtgaatctctcgttgctgttc

SEQ ID NO: 34654 - DNA, 257 bp, Glycine max
  unsure (1)..(257): unsure at all n locations; Clone ID: 701108233H1
tatgaatggatatctctggttgtatgaaaggaatgtgctcagaaccattgtatcctctcctatcaagggattgcaagacattgagtttaatcaagttttgtaagtnttgatctttagacttgcctaatattttaaaatcattggatgaactaatgttgagtgtttcaaatttcagaaacattacttatcttaatcctcgtaaacatagacatattccaaaagctccggatggtgtactaatgccaaaaaagatatta

SEQ ID NO: 34655 - DNA, 257 bp, Glycine max
  Clone ID: 701108234H1
atctctgtctctgcatttccctccctaaaaccctaattctacatttggaaaggaaatctcaaatctaatgactaattaatcaatcaatcgtattaataatccatcgatcaagtatggagtccgaactcaaagacctcaattcgaagccacccaactgcaacggcaacgccaacagcgtttgcgacgaccgtcctctgctgaagccggagcctccggcctcctccgacagcatcgccgagatggagaagaagttcgcc

SEQ ID NO: 34656 - DNA, 257 bp, Glycine max
  Clone ID: 701108235H1
ctgcactcttcatcaagctccgctccaacacaggggtcaaatgagggagatccttcacgtgcagggagggcaatgcgggaaccagatcggttccaagttctgggaagtggtgtgcgacgagcacggcatagatccgacggggaagtacgtcggaaactcagatctgcaactcgagcgcgtgaacgtctactacaatgaagcctcgtgcgggcgcttcgtgccacgcgcggtgctgatggactggagcccggaactat

SEQ ID NO: 34657 - DNA, 256 bp, Glycine max
  unsure (1)..(256): unsure at all n locations; Clone ID: 701108236H1
ccntttggataggntatttagaaaagcaaaatggtgaagatttgctgcattggtgctggatatgtggggggtcctactatggcagtcattgcacttaagtgcccatccattgaagttgctgttgttgatatctctaaatcccgcattgcagcctggaacagtgaccagcttcctatctatgaacctggccttgatggtgttgtgaagcaatgccgtggcaagaacctcttcttcagcactgatgttgaaaagcatg

SEQ ID NO: 34658 - DNA, 256 bp, Glycine max
  unsure (1)..(256): unsure at all n locations; Clone ID: 701108237H1
gaaagcagaggagttaccgaccaatggccaccattgcttcttcctcatccactgtgctcttctctgcatcctcttcccaacctgcctncccattttcacacccttctacttcgcgcctttctttctcttcttcccttcactcctcatccttctctctatcaatttctccttcctttttgtcatactattcttcaagttctacacactttgccactcatgctgccttcagcatcagtgccagtgccgccgagaagaa

SEQ ID NO: 34659 - DNA, 252 bp, Glycine max
  unsure (1)..(252): unsure at all n locations; Clone ID: 701108239H1
cgaangaaacggggttgcctcaacaattcgctgttgttgttctcttctcttctctttgacatgaatactctttcttccacgctccatggcgggnggcttccccgctcagcttcgaaaaccaaaaccgcatctctctccaaatgccatcgcatttgggtcaccaaagcttctgttgccgttgagcaacaaactaaggtcgctctcatcagaattggtaccagaggaagtccactagctctagcacaagcatat

SEQ ID NO: 34660 - DNA, 251 bp, Glycine max
  unsure (1)..(251): unsure at all n locations; Clone ID: 701108240H1
cccataccgaacactcttcttcaatcaagcgaaggtggtctcgattgcaagtnatccacgatacactctacgcttcacaaaaccttcaaacccaattccacagaattcttctgcntcaccatgccaccaaagcctttagactatgggtcaataaatgaaaacgtgaagaagagtcaatatgctgtcagaggtgaattataccttcgngcttctgaattcagaaagggggcaaaggnnttattttataatgt

SEQ ID NO: 34661 - DNA, 251 bp, Glycine max
  Clone ID: 701108241H1
agagagagagatcacatttcctgagctataggctatagccttccataatcttataacaatggaggggaccaccagccaaagcacgtttgccttcatccctagcacaattgagacacctagtccaagcatccctgagatttcatcatcatcaccttcccctggcggctctcttgcaagagttgcacaaagttaccctcctggatttcccagaaaggtatttgcggaggttatagggacatttctgttagtgt

SEQ ID NO: 34662 - DNA, 250 bp, Glycine max
  Clone ID: 701108242H1
attcacaaccttcaaacatatttataagaataacaccaatggatactccaatgaccctcacgggcttgctccgcgacgtcgccgccaaattcccttcccgccgcgccatctccgtcgccggaaaattcgacctcacccactcccgcctccatcaactggttgaatccgccgccgcccgcttagtcgccgccggaatcaaacccggcgacgtcatcgctctcaccttccccaataccgtcgagtttgttgt

SEQ ID NO: 34663 - DNA, 249 bp, Glycine max
  Clone ID: 701108243H1
cagttgcaggaaaaatggtttcgctgaaactgcagaagcggctcgcagccagcgtcctcaagtgtggcagaggaaaggtttggcttgaccccaatgaagtcaacgaaatctccatggctaattctcgccaaaacataaggaagctggttaaggatgggtttattatcaggaagcccaccaagattcactctcgctcacgtgcccgccgaatgaaggaagccaagaggaaaggacgtcactctggatatg

SEQ ID NO: 34664 - DNA, 253 bp, Glycine max
  unsure (1)..(253): unsure at all n locations; Clone ID: 701108244H1
cctgaaacttgggtgcgattccttcactcacaacaacaacacatcactatggctcttctgagtcgagcctcttcacgcttccctcagctggtttcccctcaaagggtagtttcactccacacaacgctcccatnnactgaacgcatccccatccacagccacgcctacaccatatgccccgccaccgcctccgtccgcttcctctcccgccggcgtttcgaaggcggcggagttcgtgatctcgaaggtggac

SEQ ID NO: 34665 - DNA, 252 bp, Glycine max
  Clone ID: 701108245H1
caaattcttattagaacgaaaaaagaaaagaaaagaaaaaagagcgatttttccctcaccaaagaagaaccaaaacaatggcggatcaactcaccgatgaacagatctccgagttcaaggaagccttcagcttgttcgataaggacggcgatggttgcatcacaaccaaggagcttggaactgttatgcgttcattggggcaaaacccaactgaggcagaactccaggacatgatcaatgaagtggatgctg

SEQ ID NO: 34666 - DNA, 252 bp, Glycine max
  unsure (1)..(252): unsure at all n locations; Clone ID: 701108246H1
cttgcttagagatgaggacgatacaactgtgtctacaccatatactgctgctgttttagagtaccgggttgttattcatgatccattggaagcttctgtcgacgaaaagaagtggcataatgtaaatggtcatgccattgtggatgctcaacatccagttagggcaaatgtggctgtgaganaggagcttcatactcctgcatctgatcgatcttgcactcatttggaatttgacatttcaggcacgggagt

SEQ ID NO: 34667 - DNA, 253 bp, Glycine max
  Clone ID: 701108247H1
cccaccattactcagcactgccactcttcaatcacactaatggctgtcaccttctcagatcctcacaccgaagagggcatcaaatccctcgatcaattcctttctgggaaaacctatatctctggggatcaattgacaaaggatgatatcaaagtgtatgcagctgttgtggaaaagccaggagactcttttcctaatgctgctaagtggtacgatgccgtctcttctcaacttgctccaagcttccctgggc

SEQ ID NO: 34668 - DNA, 255 bp, Glycine max
  unsure (1)..(255): unsure at all n locations; Clone ID: 701108248H1
ctatttttcaagtaacttaaggtttcaaacctaggaagttggaagtcatgncagcaacattgatggcagcaacaacaagttctggtactcttaaagcaactcctttccttggccaaggcaagggtgccaatgccaatgctcttagggatgttgtctccatgggaactgggaagtacaccatgggcaatgatttgtggtatggaccagacagagtgaaatacttgggacccttctcagctcagaccccttcatact

SEQ ID NO: 34669 - DNA, 258 bp, Glycine max
  unsure (1)..(258): unsure at all n locations; Clone ID: 701108249H1
ttatttttctttttttncattgcaaattgcaatggcttccaacaaggttattgccaccatcatggtgctttctctccttgcctactcaacatcattcaccaatgcatgtggcacatgccacccaaaacctannnnnnnnnnnnnnnnnnnnnnnnnatcaggaaagtgccctaaggacacattgaagctaggggtgtgtgcagatattctaggtcttgttactgttgttgttggctcccctgtctccagcaagtgttg

SEQ ID NO: 34670 - DNA, 237 bp, Glycine max
  unsure (1)..(237): unsure at all n locations; Clone ID: 701108250H1
cttcaaacacaacacacacacacaacctgtgtttgtgaaancctcacacagacaagtcacaccaacaagtttctgttgttccaatggcatcagcaacaccccttttgaaagatgagctggacatcgtgatcccaacgatcaggaacctggatttcttggagatgtggaggccattctttgagccttaccatctcattattgtgcaagatggagacccttcaaagatcatcaaggtcc

SEQ ID NO: 34671 - DNA, 255 bp, Glycine max
  Clone ID: 701108251H1
tcgtgccagcatctgccatccctgatggctggatgggattggatattggtccagattctgttaaatcattcagtgaagcattggatactacccaaaccatcatatggaatggaccaatgggagtgtttgagtttgacaagtttgctgttggtacagaggtatgtatgcaagaacacccacccacatatgaaattccattcaaattttatgttaaaccaaagttcaccgtcaatataaaaaatgtccactctaagc

SEQ ID NO: 34672 - DNA, 254 bp, Glycine max
  Clone ID: 701108252H1
ctgttcctacaatcattccaaatgtgcccttccggtcgcaccctcctcccttcctccgtctccgatttccgaccggcattcgacgtcctcgatgccgaccgcgacggcaaaatcagccgcgacgacctccgcgccttctacgccggagtcggcggcggaggagatgacgtgatcggggcaatgatgacagtggctgacaccaataaggacgggttcgtggagtacgaggagttcgagcgcgtggtctcggcgga

SEQ ID NO: 34673 - DNA, 257 bp, Glycine max
  unsure (1)..(257): unsure at all n locations; Clone ID: 701108253H1
caaagaaggcgnagaagaaatgggttccaaggcgaagaagaagggtncaccggaggacattnctggaaaccctaggagacttcacgagcaaagagaactgggacaacttcttcaccctccgcggcgattccttcgagtggtacgccgaatggccccatctcagggacccactcctctccctcctcanaaccatccctctccctctcccgcttcagctcctcgtccccggctgcgggcaactcccgcctctccgagca

SEQ ID NO: 34674 - DNA, 256 bp, Glycine max
  unsure (1)..(256): unsure at all n locations; Clone ID: 701108254H1
ctctctcgtgcgccgccgtcgtcgctgccgcttgccgatcgcntcntgtcgccgcctccgtcagtccctcgaagttcctgttaacatcgaggacaatcctggagaaagaaccatacaactaaagggaaaattcggagatgagagtagagacacagtcttgcagaggcaaacgaaacacagtcgtttaggaaggcggttcccctgttcctgtntttgggtcagtggtcaaagcatttgatagtgcaaccaaacctaa

SEQ ID NO: 34675 - DNA, 244 bp, Glycine max
  unsure (1)..(244): unsure at all n locations; Clone ID: 701108256H1
ccaagttgatcaagcgacttcaggattgccttgcatactttggtgtttgaagacctaatctgtctaccaaaatgaagggacgtgtaaggtgggatgaggctaatattggagaaattgaggcaaacaaacctgtgaggcagaaaattactgagcctaagactccatatcatcctatgattgatgatgacagttctctatcccctgtacgaggaagttttgatggcatgtattgatgancaaaanc

SEQ ID NO: 34676 - DNA, 251 bp, Glycine max
  unsure (1)..(251): unsure at all n locations; Clone ID: 701108257H1
ccaaattggaaactggggttcctttcaattcaacgattccaattcacacagcaaacaactncngattctctttacaacctaattagaaacaacggtgccaggtgattaagttagaagcagatagaggatgggggcaatgatatctaggttctggtnnttgttattccctgcaaaggagtataaaattgttgtagttgggttggataatgcgggaaagaccacaaccctttataaattgcacttgggtgagg

SEQ ID NO: 34677 - DNA, 249 bp, Glycine max
  unsure (1)..(249): unsure at all n locations; Clone ID: 701108258H1
caccactcactttctctctcctctccatgtcttcttccttacatcaaacgtagantttttttttccttttcccctttttttaatcttaacccaatttttactctcgcaaagtggtgtatttggggaagtttgatttgaaatgaacaaaggacagtcaccagagcctcttgatttcttcatctggactgttgaggatgttggcttgtggctggagactataaatcttggtagttaccgccaaatttttaa

SEQ ID NO: 34678 - DNA, 250 bp, Glycine max
  Clone ID: 701108259H1
tttcgtttaagagaattaagcactcggttacagaacaaacttctttcactctttccgcttctgaatcttcaacaatggtgctcgaggcgacgattatctgtatcgacaattctgaatggatgcgtaacggtgattactctccttctcgatttcaagctcaagcagacgctgtgaatctcatttgcggtgctaaaacgcagtctaatccagaaaatacagtgggagttctcacaatggcagggaaaggcgt

SEQ ID NO: 34679 - DNA, 252 bp, Glycine max
  Clone ID: 701108261H1
cccttatcagccgccttcgctatcctcaaggctcagctgaagaaatgggcttcaactaccttcaagaggtcactggtgcaggtgctaggaaaaatgcagggaaatttgttgttctacacctccgatttgataaggatatggcagcccattcggcctgcgattttggtggaggaaaagctgaaaaactggcccttgcaaagtatagacaggtgatttggcaagggagggttcttaactctcaattcactgatg

SEQ ID NO: 34680 - DNA, 251 bp, Glycine max
  Clone ID: 701108262H1
ttcataggcccaagagcaaagaaactaagaagattttgagcacaatggcatccacacaatgcttcttgcaccaccatgccctcaccactccaaccagagcttcatcacagcgcttagttgtgagcaccaaaccaaaccacattgtttgcaaggcacaaaagcaggttgtccaagagggtgaggacactactaacattgtctctcgcaggttggccctcactgttctcattggtgctgctgctgttggctct

SEQ ID NO: 34681 - DNA, 254 bp, Glycine max
  unsure (1)..(254): unsure at all n locations; Clone ID: 701108263H1
cncatttcactantcattctcgtttccctttcgactgtgattgtntgttaactgaacttttcgagcaaaatgtctggacgtggaaaggggggcaagggtttgggaaanggaggagcgaaacgacaccgtaaggngttcgcgcgataacattcagggaatcaccaagcctgcgattcggcgnntggctcgcaggggtggtgtnaagcgtatcagtggtctcatctacgaggagacacgtggcgtgctcaagatct

SEQ ID NO: 34682 - DNA, 254 bp, Glycine max
  unsure (1)..(254): unsure at all n locations; Clone ID: 701108264H1
ccctcagagtcacanaaaaagaacatactccagccacgaacacagtgcactatagtctatagcttcaccttttngtngttgttnttgttggatcgatcnncatgtctacnatgtctgaagggtattataattccaagaagagtggtgatatatatggccagggaactcgcgcacattgagcatgtcaaggcttcgttgcattctgcgagggttgaatttcaaganctatnngtttttgttctgttgttccaatg

SEQ ID NO: 34683 - DNA, 236 bp, Glycine max
  unsure (1)..(236): unsure at all n locations; Clone ID: 701108265H1
gtcagggttcgctgaacaagtttcanngtcaacatgccttgacgggagagggcaagaaaatacanatcagggtatcctgattataaggtttgagatgccctttaatatatggtgtggaggatgcaattcaatgattgcaaagggtgtccggttcaatgcagagaaaaaacaagttgggaattattactcaacgaagatatggagtttcgctatgaaatctgcctgctgtaaacatg

SEQ ID NO: 34684 - DNA, 253 bp, Glycine max
  unsure (1)..(253): unsure at all n locations; Clone ID: 701108266H1
cnactcttgttctttattgtgacaatcaaagtgttgtatccattgatcataattctgtgttccacagtcgcatgaaacatatggaaatcgatatctttnttgtnagggaaaaggttccggccangcagctttcagtctgacacatcccagctctggatcagtggtcagatgtgctgaccaagcctcttccttcatcaagatttgaagttctcagtggcaaactcaatntgaagagttttcctctgaaaacttt

SEQ ID NO: 34685 - DNA, 252 bp, Glycine max
  Clone ID: 701108269H1
ctgcacaaattaatatccaacactctcaagctttccactttcaaactctgcccgctcaatttgctttatctttccgagatttatatacacttttattgaaactgttgggattcaagtctgaaacaaaatcttaagaagtttgcggcagctgatgccatcatcttttagtatggattcgcaacagctcttcagtttcgaattaccttacatgtcatctttacccaccgttccatcgcttcttggatccttgaa

SEQ ID NO: 34686 - DNA, 252 bp, Glycine max
  Clone ID: 701108270H1
tcaggtcgaacagcaagacgaggaaaacgcacgtagcgtcaccgccatcttccatctaaaaccccaaaacttaacatgcccaatctgtgtcgaaaaatgtttcaataatggttctgttccgcaagttcctaaaacaaatactcgtcgacaacacccaaaccaaaacaaaagcccgaacctttttcacctcaacctcaaccgcaaccgcattcccatggtgcgcgcctcaccataacaaccgtttcttccggt

SEQ ID NO: 34687 - DNA, 249 bp, Glycine max
  unsure (1)..(249): unsure at all n locations; Clone ID: 701108271H1
aaaaaaactaaggtttctactttctacgatgagagacatgaaagacgcaggtgccttgggaggcaagacagcaagagcctgcgacanctgcgtaagagaagagcaaggtggttctgtgcagntgatgatgctttcctctgccatggctgcganantttggttcattccgcgaaccngttagcaagcaggcacnnaagggttcggcntnaaangcttcntcaaaagttnacctaccacgcagctggcnca

SEQ ID NO: 34688 - DNA, 248 bp, Glycine max
  unsure (1)..(248): unsure at all n locations; Clone ID: 701108272H1
ggacactgggtagatcagacaagagaggttctgcaacagataacaaagtgaatcagggaggacccattttgctctagcatttgaacttcctggtggctggcataagttganggatgctatgattttgactgttcttcagatgctattgggaggtggtggatcattctcagctggtggacctggtaaagggatgtattcacggctatatctcaatgttctgaatgaatatccacaagttcattcaattt

SEQ ID NO: 34689 - DNA, 248 bp, Glycine max
  unsure (1)..(248): unsure at all n locations; Clone ID: 701108273H1
acagttttgtgagtgaagcctttccagtgtgcagctgcatctgcagccggttcaatcattcaaaattgttaagttgtttggcttggagcaatcatcattgtccaaattacaattttntcagaaggatagcaagaanttgggaagttgctgaagcaatagggagtagtggatacggtttaggatcattgttataataggcaaaattgatggtaatcgtacatagtggctaggaagggatataatngcta

SEQ ID NO: 34690 - DNA, 117 bp, Glycine max
  unsure (1)..(117): unsure at all n locations; Clone ID: 701108274H1
cgtatcacntancgtcantcanngcantcntcttgtatttangnacatcaancatatgccancattttgctanctnaaaattctcttcattctcactttcatttnctcaaaattagg

SEQ ID NO: 34691 - DNA, 248 bp, Glycine max
  unsure (1)..(248): unsure at all n locations; Clone ID: 701108275H1
cncgatgggtgcctacaagtatgtttcanagctatggcgcaagangcagtctgatgtcatgcgcttcttgcagcgggtnnngtgctgggagtataggcagcaaccttccattgttcgcttgacaaggtcgacccgccctgacaaggctcgtcgcttgggcntcaaggctnnncagggctatgtgatataccgtgttcgtgttaggaggggtggccgaaagangccagttcccanaggtattgtttatg

SEQ ID NO: 34692 - DNA, 247 bp, Glycine max
  Clone ID: 701108276H1
tattcctcaattatttcccacttttcttctctctcaagcaaaagttttcttctctcattctcagcgttctgaatcgaaactaatggcttcagagacagaggtgttaaatattatttcctctgttttcgtccgcttcgagagaaacatgtctctgtttctgcccttcatcttcggcttctctgacgccacctcaggacgagatagcgacgacccagatcacgaaactgctcacacagaaggttcactg

SEQ ID NO: 34693 - DNA, 248 bp, Glycine max
  Clone ID: 701108277H1
ccaccctctctcctccgatcactctccactccagtgtggaaaatcaaaacaaggtgccatctttgtttgttatacatgaccatggccatgcccctgtttctgatgttccttcttctgcacatagcttgggtggcatcgtcggatctccgacctgggttttactcaaaaacatgtccaaaagcggaactcatagtccgagatgtgatgaagaaggcccttatgagggaacccagaagggtgtgatggtt

SEQ ID NO: 34694 - DNA, 248 bp, Glycine max
  unsure (1)..(248): unsure at all n locations; Clone ID: 701108278H1
gtngctggggaccctatacagctcccctcagatatattggattcttcaagtgggaggggaacaataatagatagtggtacaaccttggcttatcttccagtctcaatttatgaccagctattggagaagattttggctcagaggagtggaatgaaattatatcttgttgaggatcagtttacttgtttccattattctgatgaagaaagtgttgatgatttatttccaactgtaaagtttacctttga

SEQ ID NO: 34695 - DNA, 253 bp, Glycine max
  unsure (1)..(253): unsure at all n locations; Clone ID: 701108279H1
ccaganaaaaaaaaacccntagccaacacaaccatcatggccacctctgctattcagcaatcagnattcactggtcaaactgctctgaagcagctcaatgagttcgtccgcaanaccggtggcgccggnaaaggtcgnactaacatgcgcngcaccgtcaagagtgctcctcagagcatttggtatggccctgaccgtcccaagtacttgggtccattctcggagcagattccatcanacctgaccggagaat

SEQ ID NO: 34696 - DNA, 254 bp, Glycine max
  Clone ID: 701108280H1
ggcgaagaacggaagaagccaccatagtcgtcgtcgtgagcgaagatccataacaatacagttacaaattgcaacaacacactcctcgttcgatcgtagccagaagaatgggaagtttgggagcgattctgaagaatccagatgacttttaccctctgctgaagctgaaaatggcggcgagaaacgccgagaagcagatcccgccggagccacattgggcgttctgctacacaatgctccacaaggtttctcga

SEQ ID NO: 34697 - DNA, 213 bp, Glycine max
  unsure (1)..(213): unsure at all n locations; Clone ID: 701108282H1
tggacttttgaagcttccgaggtgncaaagatgaactgatcccaaaatatataactcaagttttacaattcaagccaacatgaatcctgtaataccatgctctattggcaatgtttcaattattcctgtattcatctattcaacaaggaagaataacactttaacaagattcaacttgtcaaggagcactgtaaaacctggatcntcatcttg

SEQ ID NO: 34698 - DNA, 204 bp, Glycine max
  unsure (1)..(204): unsure at all n locations; Clone ID: 701108283H1
ccgcgacacatactcnctgntgattgtnctcnctttctctcgntcacacatggcttgtntanagcctccatggttctcttcattgcncgtcgtgtccccgnnaaaantngcagcaggcttgtcgtngtcaacaactcagaatcncgctaagcnngctnntgttggcggtgggacagttcaanggnggntttnctnngcgcgcat

SEQ ID NO: 34699 - DNA, 251 bp, Glycine max
  unsure (1)..(251): unsure at all n locations; Clone ID: 701108284H1
agttaccagtttgcgatctcattacaatctccccagtttctaatctcagctaagaaaaaccaaaagatgtctctgattccaggtttcttcggtggccgaaggagcaacgtgttcgatccattctcactcgacatgtgggatcccttcaaggattttcatgttcccacttcttctgtttctgctgaaaattctgcattcgtgagcactcgtgtggattggaaggagaccccagaggcacacgtgttcaangc

SEQ ID NO: 34700 - DNA, 251 bp, Glycine max
  Clone ID: 701108286H1
atttttcttcctcagtagtgtcatttacgctcctcttctctgcagcaactatgcctaaccctaaggtcttcttcgacatgaccatcggcggtcaatctgctggccgcatcgtgatggagctctacgccgacgtcactccccgcaccgccgagaacttccgcgcgctttgcaccggcgagaagggcgtagggcggagggcaagcccctccactacaagggctcgtccttccaccgcgtgatcccgagtttca

SEQ ID NO: 34701 - DNA, 225 bp, Glycine max
  unsure (1)..(225): unsure at all n locations; Clone ID: 701108288H1
cgcagagagaaattgagttnctgagataaccacttacnctctttgacnccatcaatngcaaccgcgagganccgtgaaggatgtttcgcctcacgatttcgtgaaggcttacgcctcccatctcaagcgttccggcaagatggagcttcctgagtggnctgatattgtaaaaacagcnnaattnnaggaattggctccntatgatcctgatggaatnatgtnagg

SEQ ID NO: 34702 - DNA, 246 bp, Glycine max
  Clone ID: 701108290H1
attccattccttggcaagtagatgagattctggcagaactttcttatctaggtgaagaaaaagaagctacctttggagaactgttccaaggaaaatgcttgaaagccctctggattggcgcaggattggtcttgtttcagcagatcacagggcaacctagtgtgctctactatgctggatcaatctttcagagtgcaggatctctggagcatctgatgcaacccgagtctctattctccttggggt

SEQ ID NO: 34703 - DNA, 106 bp, Glycine max
  unsure (1)..(106): unsure at all n locations; Clone ID: 701108291H1
cttgagtggtgcacttcgcatcagcggcanagcgacacntgtcagagttggcnattgnngctgctttaccagcatacctcgtanattntcncngcattcntcncng

SEQ ID NO: 34704 - DNA, 250 bp, Glycine max
  unsure (1)..(250): unsure at all n locations; Clone ID: 701108292H1
cttgtagttgcgaaatcatccaaacacattccatctattaagatttnagagagtgaaaatggattgggcaaagcatgatgggcaacctggacccattccaaagaacaatcttaatcctcgtcccactaacactactcctgctgctgttactatctcgtacccgtccaagaccgccctatccaccaggccctaagggcttcccaatcataggaaacatgtttatgatggaccagctaacccaccgcggtct

SEQ ID NO: 34705 - DNA, 254 bp, Glycine max
  unsure (1)..(254): unsure at all n locations; Clone ID: 701108293H1
gggaagtntcctagaagctcaatcactncaccaattatattcgangtctttctgttagatnataattagtttatccgnactcanattacccttttccttattaccaacaataaggagnnaaaaaatccccctttcccctttgaacttttcantactgtgtcgctttagccaatttcaacgtntgagcnttgcaggcattcattcantagtttcataatctggacattcaacaagggtttgattcgtagtgtgcg

SEQ ID NO: 34706 - DNA, 250 bp, Glycine max
  unsure (1)..(250): unsure at all n locations; Clone ID: 701108294H1
aggaaccgtgttctctaatcttgtaatttntctgtgtcgcttcgtggttcattcttctcgtaagtncctctctttctctgtagggtatttttaggattcatgttgtgtgcgtggtttactaattgattcagatatttttgaagagtttattttgttccttaaggtagaatttggggtgccaattttgtgttggatctgtaaatgtttgaaagtttgaattttggatttgggtctaccccgttgtggaaaa

SEQ ID NO: 34707 - DNA, 250 bp, Glycine max
  unsure (1)..(250): unsure at all n locations; Clone ID: 701108295H1
gggtatatctcgcctcaatttgttacaaaccctgagaagttgattgttgaatttgagaatgcgagagtgttgattacagatcagaagatttcagcaataaaagacattataccactgttggagaaaaccactcagttgagagctcctttgcttatcattgccgaggatgtcactggtgaggctttggccacccttgtcgtgaataanctgcgtggtatccttaacgttgctgccatnaaagcnccnggtt

SEQ ID NO: 34708 - DNA, 262 bp, Glycine max
  Clone ID: 701108296H1
gggactgtaactagccgcagcacgaggagcaagccttcaggagggagaaaggatgtctcacaaggaagttcgagcacccaagggcacggttcactgggatttcttcccaggaagcgtgctgctcgtcacaggggaaaagtgaaggcattccccaaggatgacccatccaaggcacccaagctcactgcattcttgggttacaaggccggtatgactcacattgttagagaggtcgagaagccaggatcaaagcttcacaaga

SEQ ID NO: 34709 - DNA, 278 bp, Glycine max
  Clone ID: 701108301H1
ttgttgtgagctataagctagtttatcgtgaggagaatatgaagttgtttgttttctttgttgctgcagtagttttggtagcatggccatgccatggcgcaggctaccaaaggttccctctccgaatgaaaactggctatggtgagcgttcttcggaggtaaaatgcgcaagttttaggcttgctgtggaagcacacaacatccgagccttaaaaccattcctgaagagtgcgttgaaccaacaaaggactacattaatggcgaacaatttagatcag

SEQ ID NO: 34710 - DNA, 278 bp, Glycine max
  Clone ID: 701108302H1
cggctacagttagcagcgagaagagagaagtagaatactgatgtgagaacaagaaacgtgaaccgtcggatgaaagcattcacaacataaaaaaaaccggttgggttgggttcttatccacgccagtgtcatagtttagttttctcgcagacaaaaacgccaccccacgctcttccattatggaaggtgcatcagtacctaagattttcatcactaatagatttatcttcctctaaaaccaccatcacaaaaaacagaaaagcactccatcctccata

SEQ ID NO: 34711 - DNA, 274 bp, Glycine max
  unsure (1)..(274): unsure at all n locations; Clone ID: 701108303H1
ttgggaagggcttctcccatcgcaaattgtctcccagttatcacattcacaaaaccattgacgaatcctatgcagttatcttcgntgctggtagcacgggaagccgtgtacatgtctatcgttttaaccaacaattagatctccttcgcattggccaagaccttgagttgtttgtcaagactatgccaggtttaagtgcttacgctgagaatccacaagatgctgcagaatctcttattccacttttggaggaagcagaagctgctgttcctca

SEQ ID NO: 34712 - DNA, 275 bp, Glycine max
  Clone ID: 701108304H1
aacactcataacacaaagcacaaagcaaagctcatccttgagttaaaaaatggcagcagcttcttccatggctctctcatccccatccttggctggcaaggccgtgaagctgggcccatcagccccagaagtgggaagggtgagcatgaggaagaccgtcaccaagcaggtctcctcaggaagcccatggtacggcccagaccgagtcaagtacttgggcccattctctgggcgagcccccgtcctacctaaccggtgagttcccaggcgactac

SEQ ID NO: 34713 - DNA, 269 bp, Glycine max
  unsure (1)..(269): unsure at all n locations; Clone ID: 701108305H1
ccagtttcaccgcacgaatatcttgttgtttggagcgatccgagaaaaactctgtaaacatgttggtttaccaggacctccttacaggtaaactaaactaatctctatttctttcgtcgtagcttttgcttgtagatctattgccatcggttttggtttcgcttctgtgtttagatctgtntcgattgcgcctctgattttgattttagagtattgaactttcgtcgatgtttggatctggcattttttcgatgtaatttgattcattg

SEQ ID NO: 34714 - DNA, 215 bp, Glycine max
  unsure (1)..(215): unsure at all n locations; Clone ID: 701108306H1
cgacaacgcagcagcgcttctggctgctggccntgctcgcacctttgacagaatgccttatctgctgtctctgtcttcctttgtggctgacgatgacgccgctgctgttcctgctgctcaagatctgggggagcagtggtcttattaatggatgtgcttcaattcaaatagtctcgcactagtcatcattccctttgtttctgttgcttgcttgg

SEQ ID NO: 34715 - DNA, 237 bp, Glycine max
  unsure (1)..(237): unsure at all n locations; Clone ID: 701108307H1
atgatccntacgccatggaancatttccctcataaaattctctnttcctttttgggttntcctnaatccattccangcttcantcttnngccctcttctgccctctgcacntcncctcananncttcntcattcnnaggaggtncaagatgtcgaccccggcaaggaagagactgatgagggattntaaaagattggaacaagatcctcctgctggcatcagtggggctccccaaga

SEQ ID NO: 34716 - DNA, 271 bp, Glycine max
  Clone ID: 701108308H1
ataactttacctttctatcctcatggagtagtaaagaagtaactaatcaaccacaaacctaaacaaccccttttgcctaaagctccttccttttctccaatggcaacctgggttttatcagaatgtggcttaaggcctcttccaccagtgtttccacggtcaacaagacccatttcgtgccaaaaaccttcaaagtctagatttttaagcacaaacaagggtgtgccagatctgaatctccaagcaagagggttaacatgctgtagtttta

SEQ ID NO: 34717 - DNA, 271 bp, Glycine max
  unsure (1)..(271): unsure at all n locations; Clone ID: 701108309H1
tgagctataagctagtttatcgtgaggagaatatgaagttgtttgttttctttgttgctgcagtagttttggtagcatggccatgccatggcgcaggctaccaaaggttccctctccgaatgaaaactggctatggtgagcgttcttcggaggtaaaatgcgcaagttttaggcttgctgtggaagcacacaacatccgagcctttanaaccattcctgaagagtgcgtcngaaccaacaaaggactacattaatggcgaacaatttagat

SEQ ID NO: 34718 - DNA, 271 bp, Glycine max
  unsure (1)..(271): unsure at all n locations; Clone ID: 701108310H1
aactccaacacagttcngcagtcgacctctggagntggcttctncttcctccaactcagtgtcgagaataagaagttcagaacccatccatcttctatcccttatatatatcactgtatcggcgcgttccatagcttgaactaaantgctgttccgaacctccgtgcgtagattcacacgtgcaatctccgctacacactcttctctccgttcggtaacgattggcatcagaagatgtcgggcggtttctttcgaggcacatcggcggatc

SEQ ID NO: 34719 - DNA, 273 bp, Glycine max
  unsure (1)..(273): unsure at all n locations; Clone ID: 701108312H1
ggnagtagaaatgcactctcactcacacccacataccttgccacgcccacattcactactcccttcttcnnnnnnnnnnnnnnnnnnnnnntcctctctccgcatctccaacactaagaggctgcaatcctcaactttcgccctctcccaaaatgaaaccaaattcccaacgcagccttacaagaattccaacaattcgcctcaatcacttgctcacatctccaattgcaaattccccttggctcggccccttgtttcttcttctcatccccc

SEQ ID NO: 34720 - DNA, 275 bp, Glycine max
  unsure (1)..(275): unsure at all n locations; Clone ID: 701108313H1
caacaagaggcactcagagagcatttgttgatttggatttggaaggttccactttggttatggaanccaacttagctcccttcctctgctctttattttccacattgtacaaatgncnctttcagggtacttgttggtagtggtggttgacaaagatattgaagatgggaattttgagcactatagcaagcttttttggatttggaatgggaacttcaattgggctagtcattggatactatttgttcatatacttccagtcaacagatgttang

SEQ ID NO: 34721 - DNA, 221 bp, Glycine max
  Clone ID: 701108314H1
gagaaagaaaagaatggcaaagttaataaaattctttgagttgaacacaggggccaagattccttctgttgggttaggcacttggcaagctgagcctggtgttgtagccaaagctgtcaccacagccattctggttggatacaggcatattgattgtgctcaagcgtataacaatcaagcagagattggttctgctcttaagaagctttttgatgatggtg

SEQ ID NO: 34722 - DNA, 273 bp, Glycine max
  unsure (1)..(273): unsure at all n locations; Clone ID: 701108315H1
aaagcttctcaactgctaaagctaaactaagaaaataatccaggatgaggcatctccgttatcatgtgccagtataaganccagcactctggctaggtcttgtagccagaatctgattctggcttgaatggtagcttgctgaggctatcagaagcagtcaagaatcaccatagatttctgagaatcagatcaggtctactcatcagtcatggatagcagcaagaagggagccctcatgagtaatgaaagcgcaaaagatttatcagtcatggt

SEQ ID NO: 34723 - DNA, 277 bp, Glycine max
  Clone ID: 701108318H1
acttttttcatttcttcccatcttaatcccacctatgtcagcccgctctcttaattggccttgctctcccaatggttataaactgatctcagctatcggtgaaggcagtctaggaactgtttggaaagcaaaagtcaaggaaggaaaatatgaaggcacatttgttgccatcaagaaaatcaatttggaaaaatgtgctgataacaaaatcgaagacatcagaaagtcgattcttctcgctaatcttttacaacaccccaatatcctcagctcaaaa

SEQ ID NO: 34724 - DNA, 273 bp, Glycine max
  Clone ID: 701108319H1
aagattctcacaaacaactcttgagaaagaaagaatggctgccaacacattgatgagttctgccatctcagccttcccatctctcctttcctcctcaaaatccagatttgccgcagcagttcctctttccagctttgttgtcaccaatgcctcttcttctcgcttttccatgagtgctgactggatgcctggccagcctagacccccctaccttgatggttcagcacctggtgactttggattcgaccctcttcgtcttggtgaagtaccaga

SEQ ID NO: 34725 - DNA, 274 bp, Glycine max
  unsure (1)..(274): unsure at all n locations; Clone ID: 701108320H1
caagggaaagggaggtaagaacaggaagaggggaaagaacgaggcggacgacgagaagcgagagctggtgttcaaggaggacgggcaggagtacgcgcaggtgctccggatgctggggaacgggcggtgcgangcgatgtgcatcgacgggacgaancaggctctgccacatccgcgggaagatgcacaagaaggtgtggatcgccgccggagacatcatcctggttggactcagggactaccaggacgacaaggctgacgtcatcctcaagta

SEQ ID NO: 34726 - DNA, 272 bp, Glycine max
  unsure (1)..(272): unsure at all n locations; Clone ID: 701108321H1
ctcctcgtatcctcctcatccttttatgcgtgtcttcccccaacgaaaccagcgagaccaaacgtggtaacgctttgaatctttgaattcattcaaagatcccccttctgtctccctctctacgcatatcagggcactatggctgccacggtgaaacaaatgtctttgatcgtgtcactgttcggcgtggtgtccttcattttgggtgttgttgctgaaaacaagaagccncgcggcaggaacacccgtgcctggtttggatggtgtctctg

SEQ ID NO: 34727 - DNA, 270 bp, Glycine max
  Clone ID: 701108322H1
tttaaatattcagaaacagctgatgatacatgcttaaatgaaacatgtaaatcattagatgcatcctgtgtgccagaatcaacgtttgttcctgagactgaaattgaaaatggaacggagtcaatttctggagcagtgtcttctggccctcttgttggtcctcaggatcaggaagtttctgtgaataatgagttgaaaccattctgtgttcgaaggcgcttaacaaaattgtcgcaaaatccagatttgttggatactgaaatttcagac

SEQ ID NO: 34728 - DNA, 272 bp, Glycine max
  unsure (1)..(272): unsure at all n locations; Clone ID: 701108323H1
attgttgttgtgtggtggggcacgatgggcggaggctcctccgtctctaatatctctgtgcatcgacgctctcgcacaacaatttctccgtccaagcgatgatcttccttctatctacgaccttcccttctcacttactccacaccttaatcacgnnattgcnccctttngcnctccgcacattccanngnnannacctacnattngangaggaangnttnnnngcnacgactccacgaagaanananaacnagcaangnattggnnttttg

SEQ ID NO: 34729 - DNA, 270 bp, Glycine max
  Clone ID: 701108324H1
cgatcttaaggctgggggtaagagcaaaaagaccaaaagaacagcaccaaaatccaatgacatctacctcaaattacttgtcaagctttatcggttccttgttcgaaggactggcagcaatttcaatgctgttatactcaagcgcttgttcatgagcaaggttaacaagcctccaatttctttgtcaaggttaattaagtatacaaaggggaaggaggataaaattgctgtaatagtggggactgtaactgatgatatcagagtatatga

SEQ ID NO: 34730 - DNA, 271 bp, Glycine max
  unsure (1)..(271): unsure at all n locations; Clone ID: 701108325H1
ctccttctccttcttggatttcaattcatttctgttgatggttcagctgatgaagaattctcggaagcccgaaacgtcttcgtgcggcgaccccgtgaagttggagatcgttgaggacccactggaagaagagcatgggcctcacaacaagcgctgcaaaccctctccctctccctcgcctcagcctcagcaatggagtgcttccgatgatggttctgtcagttctccatcccatctgaacatacttgancagccgagcccgttgggtttg

SEQ ID NO: 34731 - DNA, 270 bp, Glycine max
  Clone ID: 701108326H1
tagagttggaaagtggaaatgcaggagagccagcaaaactgatcaggcagagataccgtgaagctgcagacatgatcaagaagggaaagatgtgcgctctcttcatcaacgatcttgatgcaggagctggtcgtcttggtggaaccacacaatacactgtgaacaaccagatggtgaatgccactctcatgaacattgctgataaccccaccaatgtgcagcttccaggtatgtacaacaaggaagagaacccccgtgttcccatcattg

SEQ ID NO: 34732 - DNA, 271 bp, Glycine max
  Clone ID: 701108327H1
cttttgctcaaagtcatatgaatggatttggagagcagccactggccaagattgccattcacaagaccgttttggcgctacacagttctgcttccattatagcagtcccttttgtgctaggaactaagggtgaggatacccaattggtgactgtagagctagagtccccaataccatctgttgatgactgggtcggagttttttctccagcaaacttcaattcagcaacatgtcctgacactgacggcattggctgggtagaggaaccata

SEQ ID NO: 34733 - DNA, 272 bp, Glycine max
  Clone ID: 701108328H1
cgatcaagctctcgatgctttggacgaaaaaaggggttccacaagggagagagcgatgtcagtgatcattggggcattcactagcaacatgcagcatcattttgttgacaagaaatttgctactttattacatcagtgccttgcttcaataaaaaagggatccaaaaaggcatctgcaaaggagatagctttggcatcacatgccattggtttgttgaccctgactgttgggtgtagtgataatgcacgtgaaatatttgaggaatcggttc

SEQ ID NO: 34734 - DNA, 273 bp, Glycine max
  unsure (1)..(273): unsure at all n locations; Clone ID: 701108329H1
cttgtctctgccaccaaggagggtctcaaacttgacgagagtgaanatgagaagaagaagcaagaggagttgaaggagaagtttgacaacctatgcaaggtgatcaaggatgttttgggtgacaaggttgagaaggttgtagtctctgaccgtgttgttgattcaccatgctgtctggtgactggagaatacggttggactgcaaacatggaaaggatcatngaaagctcaagccctaagggacaacagcatggcaggatacatgtcaagcaa

SEQ ID NO: 34735 - DNA, 274 bp, Glycine max
  Clone ID: 701108330H1
ctttgaacatcgttttgcagccatggaaacaggcatagcatgctacactcgcgggcctttcttgcctagtgtttcttccaagcactctccaccttccatttctccatcttttggcttgaggagtctgaaatcaagctctttatttggagaatcgctaagagtggcctccaaatcaacaataaaggtttcaaagacaaagaatacttcactcgtgaccagatgtgaaattggtgacagtctcgaagaattcctcacaaaagcaacaccagataag

SEQ ID NO: 34736 - DNA, 275 bp, Glycine max
  unsure (1)..(275): unsure at all n locations; Clone ID: 701108331H1
ctcacaccaggcgcacgttagcacaaactatcatggccacggcaacagcagctgccacctcgtcctttatggggacgcgtctcctggaggctcactccggagcggggcgagtgcacgcccgattcggcttcggcaagaaaaaggctcccgccccaaagaaagcctccaggggatcgggccgagacaccgacagacccctttggtatccgggcgccaaagcgcccgaatacctcnatgggagtcttgtcggagactacgggttcgatccgttnngg

SEQ ID NO: 34737 - DNA, 269 bp, Glycine max
  unsure (1)..(269): unsure at all n locations; Clone ID: 701108332H1
cgcgaggcacgtgganactaganagaacgtcgccatcaagattctcgacaaganngaaactacttcaaacacaaaatgattgcgcagataaaacgagaaatatcaacaatgaaactgattagacacccaaatgtcatacgcatgtatgaggtaatggctagcaanacaaagatatacattgtattggaatttgtgactggtggggagctgtttgataaaattgcacgcatgggnaggttgaaagaagatgaagcaagaaaatactttca

SEQ ID NO: 34738 - DNA, 268 bp, Glycine max
  Clone ID: 701108333H1
ttctaagcacaatttctctgagttgttttgtgagataatagcacatagcataaccaagggaaggagtattaacaaccgcaaacctgaagagaaaaagagcagcagaagaagaaacaccaacgatgggtgtggattactacaagatcttgcaggttgataggagcgccaaagacgatgacttgaagaaggcttataggaaacttgctatgaaatggcaccctgataagaaccccaacaacaagaaagaagctgaagctaagtttaagca

SEQ ID NO: 34739 - DNA, 270 bp, Glycine max
  unsure (1)..(270): unsure at all n locations; Clone ID: 701108334H1
tatcttaatatcccaccccgccatggtggtggcaaccaaacaccacttccatttcctctgcacaatgatcatgctgctgcaaccactttagcgtactatgctgnnnnnnnnnnnnnnnnnnnnnnncagttatggaattctcaaggaccatgttctgttcttctccaccgttccctccaagaactcatcacccttggaacactcttcccttgagttcttctattcggttttgatgcttcgcgaacaagttcccctacagttgcctcttgg

SEQ ID NO: 34740 - DNA, 269 bp, Glycine max
  Clone ID: 701108335H1
tccgcagctgcttttattcgcaccgcaaacagtgagccatggccgtcggaaagaacaagcgcatctccaaggggaagaagggtggcaagaagaaggcagctgatccctttgccaagaaggattggtatgacattaaggctccttctgtttttcaagtgaaaaatgttggcaaaaccctcgtctctcgtactcagggtaccaagattgcttctgaaggactcaagcatagagtgtttgaggtctcctggctgatcttcaaggggatgagg

SEQ ID NO: 34741 - DNA, 268 bp, Glycine max
  unsure (1)..(268): unsure at all n locations; Clone ID: 701108336H1
atcgagataactagaaacagtgtgatgaaaatgaaggtccttgttttcttcgttgctacaannttggtagcatggcaatgccatgcgtacgatatgttccctctccgaatgaacactggctatggtgcccgtactccggaggtgaaatgcgcaagttggaggcttgctgtggaagcacacaacaactttggctttgagaccattcctgaagancgcgttgaagcaacaaaggaatacatccatggcgaacaatatagatcagactcca

SEQ ID NO: 34742 - DNA, 268 bp, Glycine max
  Clone ID: 701108337H1
tgacagttctgaagaagacagcgaggatgaaagtgaagagaaaccctccaaaactcctcagaaaagaggcagggacgtggagatggttgatgctgccttgtctgaaaagaaagctcctaagaccccagttacaccaagagaagaatctggcacttcaaagacactatttgttgggaacttgccatttagtgttgagcgggctgacgtggaagggttcttcaaggatgccggagaagttgttgatgttcgttttgctacagatgatact

SEQ ID NO: 34743 - DNA, 269 bp, Glycine max
  Clone ID: 701108338H1
cagttttcctgatccatggtagaggacgacaacatattttaaaaacaatgtcaaaagcctttatatgtaagaatccagaaaatcttgatcgttatgttgaaatgtatagatgcatatgtaataaaggcttcaaataccaaatttcttaatcagatgattgttgaacctatcccctataatggggttacaatcgatcgtaagtggttgtatctgctataaattcaactagcctcctcaattgcatagaatcctgctggatgctgatgtga

SEQ ID NO: 34744 - DNA, 267 bp, Glycine max
  unsure (1)..(267): unsure at all n locations; Clone ID: 701108339H1
ggacatttctctcgttgaagccacaagaaccggcttcaggaggttatttgactatattcaaggtaagaataactacaagcagaagattgagatgacagcacctgtgatcagtgaantattacccagtgatggacccttctgtgagtcctcatttgttgtgagcttctatgtgccaaaagagaaccaagcaaacccgcctcctgcgaagggccttcaagttcaaagatggaagaccgtgtttgtggcagttagacagttcggtggatt

SEQ ID NO: 34745 - DNA, 267 bp, Glycine max
  Clone ID: 701108340H1
ttcactctgtacaattcttcgttcgttctctgcagttatatcctttttgagcttcaatggcggacgctgaaaccttcgctttccaggctgagatcaaccagcttctaagtctcatcatcaacacattctacagcaacaaggagaaccttcttgcgtgaactcatcagcaatgcttctgatgctttggataagattcgattcgagagcttaaccgacaagagcaagctcgatgctcagccagagctcttcattcgtcttgtgcctgac

SEQ ID NO: 34746 - DNA, 265 bp, Glycine max
  unsure (1)..(265): unsure at all n locations; Clone ID: 701108341H1
tcattctcttattctttgcctgtncctaattttctagggtttcctttctaatctcctctttacaatcctattgtattcccccttcgtatttnttcgattttatcttcttcttccatctccaatctccatccgatctctcgcgcgttcttcaattttgaattctcggggattcgttttgttttgggtttagggttctattaaacaaaaaaatacaaaaaaaactgttgcaaagggtggattagggttttcccttgtgattcacgaa

SEQ ID NO: 34747 - DNA, 264 bp, Glycine max
  Clone ID: 701108342H1
gatgaggcgccactcgatgtttccatttgcctgcatgcctttggtattgtggggtgtggttcgtttagtggtgtcaagtcttgcgaacgtgagggtgcatgagtggtaatcgggatgtttttgttgcacggctccatgcttgcgcatgcaacgtgtgacatgcatccttttcattgtcaccttagccttcgtggcttaggtgctgacgattggttcctgtgttgcctacctaccaaacggtattcgtgtggctagtcagaccca

SEQ ID NO: 34748 - DNA, 265 bp, Glycine max
  unsure (1)..(265): unsure at all n locations; Clone ID: 701108343H1
gcattcgtcactctcgtgtcgggtgaaggcgaaaaccaaatcaagatgctgagagtgggcgcaaagaggcttttgggaacgacgtcgttgggcgttagggttccggcgaggctgtaccacgagagggttgtggatcactacgacaacccccggaacgttggatcgttagacaagaacgacccgagcgtggggacgggtttgntgggggcgccggcgtgcggcgacgtgatgaagctccagattaaggtcgacgacaaaaccggaa

SEQ ID NO: 34749 - DNA, 270 bp, Glycine max
  Clone ID: 701108344H1
aaacaagtagttgagaactaagaagaaggaaatggcttcctcaatgatctcctccccagctgttaccaccgtccaaccgtgccggtgccggcatggttgctccattcaccggcctcaaatccatggctggcttccccacgaggaagaccaacaatgacattacctccattgctagcaacggtggaagagtacaatgcatgcaggtgtggccaccaattggcaagaagaacttcgagactctttcctacttgccagacctcgatgatgccc

SEQ ID NO: 34750 - DNA, 268 bp, Glycine max
  unsure (1)..(268): unsure at all n locations; Clone ID: 701108345H1
tctcgatagtgatcaancatantactatcangngtnatagtgttatacataggatgtgcaaacaaatcaatcaaattccaaatccattgatgagtncnaatctatgatcaaacagtttgatttgaatggggatggtgtcctaagctttgaagaattcagaattatgatgcagtgaggcatgtatatataaatgttgattctgtatagtgtgtatttganatttgattgatttgtttgcacatcctatgtataacactataactcctga

SEQ ID NO: 34751 - DNA, 270 bp, Glycine max
  unsure (1)..(270): unsure at all n locations; Clone ID: 701108346H1
ctctcttcttcagtggtggangctactagaacactagtttgttgancactgcgatgaggaagtggacggttgcttccgctctccttcttctctctctcctctttctctttgcagatcaaggtcgaaagtttcaggcgaatgccgagggagattccgacgngcttgtagatccacccaaggtggaggacaagatcggtgctgtgcctcatggcctttcaaccgattcagatgtcgtcaagagggaggcggagtcgatctcgaagagatctc

SEQ ID NO: 34752 - DNA, 269 bp, Glycine max
  Clone ID: 701108347H1
tcaaattggagcactatatttaaagttaccttagtacaactaaggtttcaagattattgcagttgagatcgcattgaggtcaagattgcgttgcagtttgtgatttttgaacaaccttggtggtgcctgatgatcgatagagagtagctgattcttttctgtatatataaatctgactaccttattggaattttttgtacccgcgtaggggagggatattaacaataacatttagtaattatttttttcatagaataatttatgtaata

SEQ ID NO: 34753 - DNA, 269 bp, Glycine max
  unsure (1)..(269): unsure at all n locations; Clone ID: 701108348H1
ggctcganaaggctttgcatttcatttgagagagagagcgtcttacctttccattatcaaaatggctgtttcgggctatcacaggagcgaggctaaccctagggatagggttggcgatacctctttcctctcccacgcgctctcgaaccgtcgcaatggccgtatccgtcgaccccaagaccgacaacaaactcactcttaccaagtccgaggaagtttcgctgctgccaaggagctgatgcctggaggtgtcaatccccagttcgtgc

SEQ ID NO: 34754 - DNA, 275 bp, Glycine max
  unsure (1)..(275): unsure at all n locations; Clone ID: 701108349H1
cactgcttcacggtgaagcacctaagccacttctccaccctagacgtcctctcnganaccctactaccgcaccacacttccccntctcnagttatctctctctcgatttacattccagagatagaagaagaaagagagcaatgacagcnacaacagagagcgngaagaagaagcgagaagaagaagaggaaccagggcaagttgtgaacccatgggangtttcngccaanggtaaantngtttanggcnaatcatggnncgtttcggttgccaga

SEQ ID NO: 34755 - DNA, 251 bp, Glycine max
  unsure (1)..(251): unsure at all n locations; Clone ID: 701108350H1
agtggttnaaagntaanaagtagcaaagatgtttccattcgggcacaagggtcaaaagataaaggggactatggtggttatgcagaagaatgtgttggatatcaacagcatcaccagtgttgacgggatcgtcggcaccggcttagacttcttaggcagtgcactcgatacagttacttttttagcctcctccatctccatccaacttnttagtgcccngcaaggcgatggtgggaaaggaaaagttggaa

SEQ ID NO: 34756 - DNA, 271 bp, Glycine max
  unsure (1)..(271): unsure at all n locations; Clone ID: 701108351H1
tacattttcccttttcagctttcattggtgtggcctagctgttttctcaatgagaaagccttcatctctnncaaagcgcacttttgcgctttggggttcccttgttgcttgttatcaccttctgttatgctacttctactgctgcagcaacaactcaagtttcagggaatgaagagctgccaaagacaaacctaaatgggcatgatgaagaagcaaaataccggattttttnatcataaaccaatattcaagaaacatattccatnccagt

SEQ ID NO: 34757 - DNA, 148 bp, Glycine max
  unsure (1)..(148): unsure at all n locations; Clone ID: 701108352H1
tagaatagagcataactttcactccctacactctcagtctgagaagcagtaaaagaaaatggcttcactttccctgctccacaccaacctctcttnnncttcgcatcatcctccatcttcttctcttcacaccaattccacacaacat

SEQ ID NO: 34758 - DNA, 266 bp, Glycine max
  Clone ID: 701108353H1
tggaaggtcgtggtatgatcaaatatttataaatgtgtccacgttgatactggacgggtttgtttgtcctgctgcaagctctcatataatgtgctgcctgcattaatgtggattcttctgaaggtggagatccagtgagctcgataaatggaaatttgaaggagagggatgtcatgaaaatacatccgtatactgcatttgtgtattcatttagtgcagcaggaaacccaaaatacatttgacggttatgcattcgtctattattt

SEQ ID NO: 34759 - DNA, 268 bp, Glycine max
  unsure (1)..(268): unsure at all n locations; Clone ID: 701108354H1
ttaaaagttattaagagcttttgcttttctttctgcgcgcttttnccaattaagtagttcttccttttctcaaagcaaaaaaaatgttcatcgagagtttcaaggttgagagtcctaacgtgaagtacacagagactgagattcagtccgtgtacaactatgaaaccactgaacttgttcacgagaacaataatggcacttatcagtgggttgtcaagcccaaaactgtcaaatatgaatttaaaaccaacacccatgtccctaaact

SEQ ID NO: 34760 - DNA, 268 bp, Glycine max
  Clone ID: 701108355H1
caacagccatgaaaaccacactcttctcactctctcccttattcctgttcctactcttctccctagtcgaaggactcacccccaaatgtgacacccaagaccatggctcaacccttgaagttttccatgtgttcagcccctgttccccatttaggccaccaaagccactttcatgggcagagagtgtccttcagctgcaggccaaggaccaagccaggctgcagttccttgccagcatggtggctgggaggtcagttgtgcccattgc

SEQ ID NO: 34761 - DNA, 267 bp, Glycine max
  Clone ID: 701108356H1
ttaaacctaattctcatttcttcatcgttcgattcttctcctcctaaagatgcagatcttcgtgaaaactttgaccggtaagaccatcacccttgaggtggagtcctccgacaccatcgataacgtgaaagctaagattcaagacaaggaagggatcccacctgaccagcagagacttatctttgcgggtaaacagcttgaggatggtcgaacccttgccgactacaacatccaaaaggaatccactctccacctcgtgcttcgcct

SEQ ID NO: 34762 - DNA, 265 bp, Glycine max
  Clone ID: 701108357H1
gttattctcctccatcccgatctctttattgtcttctttctctcttcctggttttcgttggagaatcctgaaaaccgcttgattttaatcaaagggtcatcaggattcgggcacccatatctcgtatcactccttctctcctctgttgtcttagaaagaagaccaagaaaagcatcaatttttgcaagcaatcttcttcttttgccctttctcttgtcttaaacacacacacacaacaacccagtgctgaagctgaagcatcaca

SEQ ID NO: 34763 - DNA, 266 bp, Glycine max
  unsure (1)..(266): unsure at all n locations; Clone ID: 701108358H1
aatacaacaaaagagaacacgaataaaacgcaccgtaccgcacgcgaatcgcaattattagggtttacgcaccctcacaattggtttganatttgcgaattcggcgacgatgatgggggaaggagcgagcaatggagggatgctgtaccacgaggtgcaggagtcgaagctctgcgcggtgcattgcgtgaacacggtgctgcanggcccgttcttctcggagttcgatttggccgcgctcgcctccgatctcgaccgcaaggagc

SEQ ID NO: 34764 - DNA, 259 bp, Glycine max
  unsure (1)..(259): unsure at all n locations; Clone ID: 701108359H1
ccaaaatttcccatttttttcacctccatcgtttcacccactgaatcacagttactcttttcttttctttctaacaaaaatcgcttctgnacacacaaggattcagggaatggtgaattacgatattttaattattgattggtagcatgttttggctagaatttggataattgcttttgattatcagaggcagaaggaaacaataccttgaaagtagatagatgtcgtcggcttcttctttgatggctgcttccagtga

SEQ ID NO: 34765 - DNA, 268 bp, Glycine max
  Clone ID: 701108360H1
ttaattactaaggaactctcccagaaaagaggcatcagttgcaatggctcgttacggtgagggcgacaagcggtggatcgtggaggaccgccccgacggcaccaatgtccacaactggcattggtccgagaccaactgcctcgactggtccaagaccttcttcaccagcctcctcactaacctcccaatcctcgacggcgagggtaacctcttcctcaaaacgacgtcgcttcgctccctcgacggcgaggcctacatcaatgtccga

SEQ ID NO: 34766 - DNA, 121 bp, Glycine max
  unsure (1)..(121): unsure at all n locations; Clone ID: 701108361H1
aagatcttaaaatatctcttccatacaagtttgtntntgnaagtgtttttgtctcccaaatcctantcttgtgaccacaagccttccacttcantctctctctctntntntntntntntnt

SEQ ID NO: 34767 - DNA, 270 bp, Glycine max
  unsure (1)..(270): unsure at all n locations; Clone ID: 701108362H1
agaaaaacaagtagtcgagaactaagaagaaggaaatggcttcctcaatgatctcctccccagctgttaccaccgtcaaccgtgccggtgccggcatggttgctccattcaccggcctcaaatccatggctggcttccccacgaggaagaccaacaatgacattacctccattgctagcaacggtggaagagtacaatgcatgcaggtgtggccaccanttggcaagaagaagttcgagactctttcctacttgccagacctcgatgatg

SEQ ID NO: 34768 - DNA, 271 bp, Glycine max
  Clone ID: 701108363H1
ctcacactcacagtaaaatccaaaccaaaatggcggaaaataaagccattgaagaagctcagagcaagttccgttcagagttccttcaagttctgcgtagtaggcgacccgctcaagttccattaacagtcgaattcgcgaaccagtggtgaatcctttgcatcagaactctcctccatcgatcgaagagatcaagataatggagtcgtgtccgagaactgatatagagaaccttgaagacttgctcgaggaggagaatctctatttgaat

SEQ ID NO: 34769 - DNA, 272 bp, Glycine max
  unsure (1)..(272): unsure at all n locations; Clone ID: 701108364H1
gtgaatgttgatgccaacngggaactcatgtatgtcnaggncatgaccgntgnacanttggaaactctgaggaagcaaatagcagtttatggcaccatttgtgagcaacttattgagatgcacagaacactctcagctcaacaggatcttgcaggggttagattgggaaacatatactgtgacccattgatgacatctggtgggcacaaaataacatcaagacaaaggtggacacctacacctgtgcagcttcaaattcttgaacgtatatt

SEQ ID NO: 34770 - DNA, 228 bp, Glycine max
  unsure (1)..(228): unsure at all n locations; Clone ID: 701108365H1
ctacaacacacttttntaantcgattcgttcgcagaaacatggcttcttcgtttctatccgcagcttcgcacgctgtctcaccctcttgttctctgtccaccacgcacaaggganagcccatgcttggaggcaacactttgagatttcacaaaggacccaattccttctctagttcaaggtctagaggtcggatctctatggctgttgcagttaatgtatctcggttt

SEQ ID NO: 34771 - DNA, 269 bp, Glycine max
  unsure (1)..(269): unsure at all n locations; Clone ID: 701108366H1
acacattaacctttctcattccccatctcctcaccttattcagccactgctaatttctagggttccgaaatggacgctggcggaaagatcaagaagggcgccggtggaagaaagggcggcggccctaagaagaagccggtttcaaggtccgtcaaggccggtctccaattccccgtcgggaagaattggccgttatttgaagaaaggaaggtacgcccagngtgctcggtaccggtgctcccgtttacttggccgtagttctcgagtac

SEQ ID NO: 34772 - DNA, 257 bp, Glycine max
  Clone ID: 701108367H1
caacgaccaagctcgctgatttggagatagaggtgaagataattggttgggatgcgatgataagaatccaatgcagcaagaagaaccaccctgcagcaaggttgatggcagcattgaaggacctggacttggaagtgcatcacgcaagcgtgtccgtggtgaatgatttaatgatccaacaagccacggtgaacatgggaaacaagttttacacgcaggagcagcttctgtcggcactctcgtccaaagttggcgat

SEQ ID NO: 34773 - DNA, 264 bp, Glycine max
  Clone ID: 701108368H1
gaggtggagagatatttagagaggctcttaatgcacctggatgtgaagctgcccatattacagaaattgaagcaagcattgagtgtgacacttttatgcctcgagttaatacctctgtatttcagacatggtattcatcattccctttggtggaagacaacctccgctattctttcaccacttatgtgcgtgtaaggagttttccaccagagtccccggatcagaatgctgatccattttttgataataattcagacgctttga

SEQ ID NO: 34774 - DNA, 266 bp, Glycine max
  unsure (1)..(266): unsure at all n locations; Clone ID: 701108369H1
gcaccagcgcgtgtggcttggaacgttcaacgaggaagacgaggcggcgcgtgcgtacgacatcgccgcgcaggttttccgcggcaacgacgccgtcacgaacttcaagccgctnnnnnnnnnnnnnnnnnnnnnnnnnnnatcggagtttctcaactcgcattccaaacccgagatcgtcgacatgctgcgaaagcacacgtacaatgacgagctggagcagagcaagcgcaccggcggcgtcgtccggcggcgaggctccgccg

SEQ ID NO: 34775 - DNA, 264 bp, Glycine max
  unsure (1)..(264): unsure at all n locations; Clone ID: 701108370H1
tgcaaccaatatctgtgaaaacattatatggaaggcatttagtccaaccaccatgcaacagtggacgtggagctgaatttgaaggtgctgttattgctctgttccatttgttgataactagaacagacaaggtccgtgctcttcgtgaggcattttaccggcagaatcttcccaatgtgacaaatttgcttgctactgtctngatcttcctaattgtgatatacttccaaggtttccgcgtggtcttgcctgtaagatcaaaga

SEQ ID NO: 34776 - DNA, 218 bp, Glycine max
  Clone ID: 701108371H1
ggggaataatagaaataagaaaagattagtgaggttgaaatgtcgcaacgatcggtgccggcgccgttcttgacgaagacgtatcagttggtggaggatcaggggacggaccaggtgatatcgtggggtgaaagtgggaacacttttgtggtgtggaagcatgcggattttgcaaaggatttgctccaaaatatttcaagcacaacaacttctccagc

SEQ ID NO: 34777 - DNA, 263 bp, Glycine max
  Clone ID: 701108372H1
cagaccaacaaaggcttatctttgcaggaaagcagctagaagatggcagaaccttggctgattacaatatccagaaggaatctaccctccacttggtgctccgtcttcgtggtgggatgcaaatctttgtcaagaccttgactggaaagacaattacccttgaggtggagagttctgacaccattgacaatgtcaaggctaagattcaagacaaagagggtatcccaccagaccaacagaggctgatctttgctggaaagcag

SEQ ID NO: 34778 - DNA, 264 bp, Glycine max
  Clone ID: 701108373H1
cgacaagaaccctgatgatgagatccagtctgggcaggtcccagacgatgtgatccaggcggcaacacaatccggcaaatactgggccccacatccacagactggggtatttgggccccccggaggaggtgaccaaactgcttctgccattcactctgatgcgctggaggagaaggcctggtttcgccccaccagtctcgaggatttcgagaagcctcacacccttccttaacaaccattggaggacatcatattataatacta

SEQ ID NO: 34779 - DNA, 263 bp, Glycine max
  unsure (1)..(263): unsure at all n locations; Clone ID: 701108374H1
tacacacaacacaacaccaacatgaagagcatggtgacgccattgacgagggtcttaccctttncgtcacccaaatggctataatacccttcccttctctcttacacgctacccttcctcaccgaacttctccttctccttctcccctctcactctcactctttccatggccgcttcaccacaatcctccgctccgactgtgtcgcctggtgatgctaacatcaacaaagatggtgtatttcaattgattcaagcacatcagg

SEQ ID NO: 34780 - DNA, 234 bp, Glycine max
  unsure (1)..(234): unsure at all n locations; Clone ID: 701108375H1
caaaactcaagcattgacntccctcttgatttgaagtttgttttgtgctttagacaaaagttctgccaaatcaagaggggttttaagatcatagtgtgtgtnttgcaacaatggctaagttctttgctgctatgatcttggcactctttgccatttccatacttcaancagtgntaatggctgctaatgaacanggaggccacttgtatgacaacaagagcaaatatggaagtg

SEQ ID NO: 34781 - DNA, 266 bp, Glycine max
  Clone ID: 701108376H1
cttctcagcagcttcggctagggttcagaaacgaaaaagggttcggcgttctgttcgcgatgagagccaagtggaagaagaagcgtatgaggaggttgaagaggaagcgccgaaagatgagacagagatccaagtagtgcgttaaacctagtttgtttctgttgcttttacaattgcttatgttgtcgaatgggacacccagttgttagtggcactggtttctcctttttgatgtttgatacattttgttgcgattcaagtagttt

SEQ ID NO: 34782 - DNA, 263 bp, Glycine max
  Clone ID: 701108377H1
ttggaagtaactgagaattgatttgtagttcctccttttcactctttagctggagagtgtgtcgttttgcctgtcattgtagggaaccaggaatggaatggcttagaagaaatgtatgtgaaaacggcttgtggtttcacccatagcctgcggaaaatgctttattgtgtttcggatatcaatttaaagttcacagttatgcaaataaccagtgcattagtgaatggcagcgctcttcgtttccacttacctagatttctatg

SEQ ID NO: 34783 - DNA, 265 bp, Glycine max
  unsure (1)..(265): unsure at all n locations; Clone ID: 701108378H1
ttgggtcttcttcctccaacccggtctctctctctctgcatttttncctgctttgagtgtgtgttgttctgtgctttttgtggaccgaattgcccctactcaggtaaagagaatgattctcacaaagcagtatcgatgcgtacattcagctagctgtcaatgcaccaagggtcatttaagtgaagatgtgatattcttggtgtttcagcatttgaattggaacccgaagctaattgctgctnntgtcatgtgtgtgcaaatggtt

SEQ ID NO: 34784 - DNA, 258 bp, Glycine max
  unsure (1)..(258): unsure at all n locations; Clone ID: 701108379H1
ctctctcttgagagttgagagcatggagattggtcctctcttccccaacttagacnggnggcagcaagtcaacgcctctacttgctgccaggacgctgttttctacttcctatgcgctgcttatgctcttgtctcttccaccgctttgattcaattggttagaattcaagttagagtacctgagtatggttggactactcagaagatttttcatcncatgaacttcattgtcaacggagtgcgtgcagtggtgtttgg

SEQ ID NO: 34785 - DNA, 269 bp, Glycine max
  Clone ID: 701108381H1
aggacacaagacgataacaaatggcatcatctcagtcgaggaagagagttgacgccgtcgattctcgcgctgcttccgttctcgttcgcgccaaagatggcagtgcttttgctcgttgcgacgattgcaagaagaatgtgccggttgcactcatcgacatgcacagttgcagccttgaagctaaaattaaaatgaacctagacgctcaagttgtggaacaggctgctgaagctaagaagccagagaggaagaagcccaaatctaaagag

SEQ ID NO: 34786 - DNA, 266 bp, Glycine max
  unsure (1)..(266): unsure at all n locations; Clone ID: 701108382H1
ctcaatgtactgatcaaagtcttttctctctcttcaaactcaatcttttcattcctcttcatgtggatctgtacttggttttnttccttccatttttattaatcaaatacattcaatttcagtttcatgtcatttctgaaacctctttctgggttttcttcccttctcttgtttttttcctttctgggatgacaattttcgttttgagattcctggttgtggattttttctcagaaatgcgtaaagttttcttctttatgactgtg

SEQ ID NO: 34787 - DNA, 265 bp, Glycine max
  unsure (1)..(265): unsure at all n locations; Clone ID: 701108383H1
ctgttaagccctctccgtgtaggtttcgacccagcagaatcacatcgtggaatcgccccacaaaaacgtgggagccctgaatcgtgcgtgttttgcgattctgacttgtttttcatttttactttttgggcctttgaaagcttaaaaacctaaacgcccaagactcaaaacaaggcagaaccgctcaactgcgccgtgaaactcttcttctcattcacattcagttgcgcgaanaccatcaggctctgcaaatgccaatggtgga

SEQ ID NO: 34788 - DNA, 266 bp, Glycine max
  unsure (1)..(266): unsure at all n locations; Clone ID: 701108384H1
atctctcattatccctctctgtttcttttcttcaactcttccaagggaantgagaganactagagagagtcatggacgctgttcttcaaacnagaggccttctttctcttcccacaaaccccattanntgaatctcactcttgcanncttaacatggtttaaggcacagacttttctctccaaagccaaaaaaacctttctgggtcttctctttcctctaatgggttccccaaactctnaccaaaagccaatgtctttgcccaaag

SEQ ID NO: 34789 - DNA, 264 bp, Glycine max
  unsure (1)..(264): unsure at all n locations; Clone ID: 701108385H1
tataactagaaacagtgtgatgaaaatgaaggtccttgttttcttcgttgctacaattttggtagcatggcaatgccatgcgtacgatatgttccctctccgaatgaacactggctatggtgcccgtactccggaggtgaaatgcgcaagttggaggcttgctgtggaagcacacaacatctttggctttgagaccattcctgaanagtgcgttgaagcaacaaaggaatacatccatggcgaacaatatagatcagactccaa

SEQ ID NO: 34790 - DNA, 262 bp, Glycine max
  unsure (1)..(262): unsure at all n locations; Clone ID: 701108386H1
ctcctgacatgggtggtgctggtgctggggcagccgaggatgattatgctgctccttctggtggaagtggtgctggccccaagattgaggaagtggactaaatgtgtagttgctttcatccatttatctgtttaaaacttatttgatgcttttttattggattttaacttttatgattttngtnggatgggatactaattgttttgcccgtgtgatatgaacgttgctttacgcattatgtcatttgctttatttcattaaa

SEQ ID NO: 34791 - DNA, 258 bp, Glycine max
  unsure (1)..(258): unsure at all n locations; Clone ID: 701108387H1
atntgngggtnccaggggaaaatgcagcaagatcacaggaaaaagagttcagctngagatggnctttttctgccgaatatggtgatgccaaccggtacaaaattcaagaagtcattgggaanggaagttatggtgttgtctgttcagccattgacactcacacaggtgnaaaagtggcaattaagaagattcatgacatncttcgagcatatatccgatgctgcttcgtattctccgtgagataaagctgcttagact

SEQ ID NO: 34792 - DNA, 262 bp, Glycine max
  Clone ID: 701108388H1
tccaggatcgcacattgttgtccttgcgttcgtgttgctcatttcatcaaaacttgcagaatgtcacaacatagttcgcttccttcctggcttccagggaccccttccttttctacttgaaactggttacgtggaagtgggtgaaactgaagcagaggagcacgcagaactcttctattattttatcgagtcagagaacgatcctaaagggaaccctctcctactttggctaaccgggggtcccggttgctctgctttctct

SEQ ID NO: 34793 - DNA, 261 bp, Glycine max
  unsure (1)..(261): unsure at all n locations; Clone ID: 701108390H1
agttaataaacaaagaatatagtaaaaaatgaaaaggtccaattttttatctcatgtttatctttgattgcaaaataactttccttttgctcattgnnatatttcttcctcttagcaacaaaaaaaaaaatcttaaacaatctcttccatcttcaatgtctacctctacctttctcatttctctgcttgttttcatcacaaaccttacccttcttcttcttctaacctcagnnacatgcacagngttcatctacaacacca

SEQ ID NO: 34794 - DNA, 50 bp, Glycine max
  unsure (1)..(50): unsure at all n locations; Clone ID: 701108391H1
aaagaactttgcagnataccagnatgagcatgaagntcttccagntnntt

SEQ ID NO: 34795 - DNA, 263 bp, Glycine max
  unsure (1)..(263): unsure at all n locations; Clone ID: 701108392H1
tcattcttcacctgcaactatttggattgctgatttttgttaataccatatttactgatattggcgcatttctttgagaaagttactaattcctagatagaggcanaaatgttgggaattttcaaggagaagttggttaaagcacccaaagagctgaacagtccagcttcgttgaattcatgcactaagcctaagctaagtcatgaaatccttcaggatttcatgtcctgcaattcctccaatgctttctcaatgtgctttgg

SEQ ID NO: 34796 - DNA, 257 bp, Glycine max
  unsure (1)..(257): unsure at all n locations; Clone ID: 701108393H1
aaaaaaacaaaaaaaaaactccctanaaaaccaactcattaaaatatccaattcaatatccgaaaacagaggaaacatgtctctgtttgcacccctgttgttgaaccagagcgaccccttcgaccatttccgagccttactcggtggaaattcagaatcattggatctcggagcgtacacccaaatggattggaaggaaacccttgacgcccatgtgttcgaaatcnatcttcccgggttcgccaaagaggatgtga

SEQ ID NO: 34797 - DNA, 267 bp, Glycine max
  unsure (1)..(267): unsure at all n locations; Clone ID: 701108394H1
ataattcccgacaccatcttcaantctcacaaaaaaaacatcattaggccttttgagttttgtcacaaaagccgcattcgttgtcgagaaacaccttcttcatctaacttgaacactcgagaatggtgtactcctactacacccccacgtactactcaaccctccatgactcactcacctctctgtgcaagaccattcttcctttcagcttcaagaaacgaccgttacctgcggcggaacacaaattgtcgaaactgcaatccgaca

SEQ ID NO: 34798 - DNA, 238 bp, Glycine max
  unsure (1)..(238): unsure at all n locations; Clone ID: 701108395H1
aggcgttctactgtggaaaaaaggtgattttgaagatgaactgttatggtcttcagcagaacgcctttgcagcctgtgaagagatgagaggctctgtgaatttcgttgatcagaaggagcctgtcatttgccctaagccgcgccgagttggggttgcatcnaacatgcctacgaggcatttcagatggcatttcaatccacaggctgagggttctgacacaaaagctggggcagaact

SEQ ID NO: 34799 - DNA, 272 bp, Glycine max
  unsure (1)..(272): unsure at all n locations; Clone ID: 701108396H1
gacgaggttccagtnggagtcacaacnacagagcgtaattctactcacgaaaatccaaaggttacgaaaccattcaaattaaacaaatcattcttcgcgttcccctccaatctcgatcgaagaatcgttttctctgcattttcagaattcactcgagctttgctcgcagacctcaccaacggacgctcaccgctcattctcatcgatcgcttcagaagctactgcaccctttccaactccaactgcttttgtgcctccgatttgccgtgcgg

SEQ ID NO: 34800 - DNA, 292 bp, Glycine max
  Clone ID: 701108401H1
cagatttaaggagaggagacaagggccctggaactggtcagagtttccaacaaaggttgctgtacagttgaatgatacacacccaacacttgcaataccagagttgatgcgattactaatggatgatgaagggcttggatgggatgaagcatgggatgtgacatcaaagactattgcgtacactaatcatactgtcctccctgaagcactgggagaaatggtctcaacctgtaatgtggaaatacttccacgccatatggaaatcatacaagaaatagacaagagattcatg

SEQ ID NO: 34801 - DNA, 270 bp, Glycine max
  unsure (1)..(270): unsure at all n locations; Clone ID: 701108402H1
accannacaaaagtgggcatccttgttgttcgcttcaaattcaatgttctacagaggtaaatttgccgatggtggtgatgggcgtgaaatggctgcaaaacgccagcgcactgttgatccaggatcttcattctatggtgcttccacgggttccaattttatgtacaatccatctcctacggatatgtcagccaannnnnnnnnnnnnnnnnnnnnnnngttgttcgactgcgtggccttccttttgatgtactgaaatgatgnggctga

SEQ ID NO: 34802 - DNA, 290 bp, Glycine max
  unsure (1)..(290): unsure at all n locations; Clone ID: 701108403H1
cttcctctnctccgncaaaccanccccaaacgccgtatctccttctaccaaactcccctcctcaccttactccgtttcccgccacgtcacctccaacgtctctctccgcacctcgcgaatccgcgcaactagagaagnatccgcgttggccgagcgactcaacgacgtcgaatggaccggaaacggcgccgccgccggctgctgctgacggaaatggcgcctccgttggtggatacgttaacggcgctactaacggaagcttggtgaagtacggctacganaacggaaac

SEQ ID NO: 34803 - DNA, 284 bp, Glycine max
  Clone ID: 701108404H1
gccactctcttcaaaatgggccgttaccttctcaaatctccacacagaatcaggtctcaagtccctcgacgacttcctctctgggaaggtctacgtttctggggatcagttcacaaaggacgacatcaaagtgtatggtgctgttttggagaagccaggtgactcttttcccaatgctgccaagtggtacgaggttgtctcatctcagcttgctgcaagcttccccggcaatgctcaaggggtgagattcagtggcaaagcttctgctccagcggaggctgctc

SEQ ID NO: 34804 - DNA, 279 bp, Glycine max
  unsure (1)..(279): unsure at all n locations; Clone ID: 701108405H1
gcaggttagagatgatgggaactggatgaaacacactgtggggtaagtcatgtttaaatatacagttatttagtttgcnatttacaaaagcaggcacttgagtagtagagttgaagttgagctttttatttctattttctagtaggaaccttgatcctttgggtaatttggtttgatggaaaggaatgggggtgggtatgaaaatggaaatggaatacttattcctatgctttgtttgtataggaatgagatgatgactcttttccagtttcatatcng

SEQ ID NO: 34805 - DNA, 280 bp, Glycine max
  unsure (1)..(280): unsure at all n locations; Clone ID: 701108406H1
ctttcacccgaacagaattccccgcattgcagtttcgccggatgactcgagctttcgaggaagccctcgtgattcgccggccggtgacgatttttccgccgaatactccggcnnnnnnnnnnnnnnnnnnnnnnnnnnnnnnnnnnnnnnnnnnnnnnnnnacccgaaggcttcggcgatcgacgaggggctcgcnagatttgcgaagaagatgccgatgtttgagccagagagggtggagtccaaagagaggccactcgcaattaatttggattggcgt

SEQ ID NO: 34806 - DNA, 277 bp, Glycine max
  unsure (1)..(277): unsure at all n locations; Clone ID: 701108407H1
gaagaactgaagaaaatgattggtgcagtcacttatattgagtgcagctccaaaacacagcaggtaaataccttaacttcattggattcaactattttgagccatattttgaagtgaatccaagctgtatattgagatgaagttaaagaaaacattgtctctaaagtttaatttatatgtatnagtgtaaaattgtttattcaataagaatctaccatgttgtcacatcatattgcaaaagtatgatgtggtaatatggtgaagaacaanaatatac

SEQ ID NO: 34807 - DNA, 281 bp, Glycine max
  unsure (1)..(281): unsure at all n locations; Clone ID: 701108408H1
atccctttgtgactccaaacaaagcccacacaccaacttcatttccattcacaatgtcaatttcctccacttccaactccctcattncccccaaatctttaatcccccaatcccaccncctcattcccaacatcaggnccgggctccggnccaagcctggnccatccccttccatcctcgctgtccacnctggccgagcccgccaaaaacnccgtngtcaccgacaagcccaagccccaagcccaacaatctncatccccggctgcggcccgggcaaccaa

SEQ ID NO: 34808 - DNA, 273 bp, Glycine max
  unsure (1)..(273): unsure at all n locations; Clone ID: 701108409H1
gttctcaaggcgtcgtaacatcctcgtcactctcacacatcacacaacaatggcttctcttcattcttctttcctccttacatcaaattttctttccctcagaancccatcaagttcttccactcacgttctctttcccatgagaatcttcaagacncantgngnacccttcttctcaacacacgacacggtttcgggagaacaaccttgccgcggttgcggnaaaagngggcaacggaccgaggcgttcgcgaagaggttctaagttggnaa

SEQ ID NO: 34809 - DNA, 258 bp, Glycine max
  unsure (1)..(258): unsure at all n locations; Clone ID: 701108410H1
gaactacaatggctgttctcnaaaaacttcctctcttggtcactggggcgttacaacgctcaacagtcacaccctgttcaaccnncccaaaacctcgtcacggtcttcagcggttgccgtcacagcatcagcatcagcatctgcgcgtgcaattggaatcgataacgatgtttcagttaagagtatattataccctgcactctccctttccaacattcttcacttcaagtcaacctacaacgtgcagatcgtggtggg

SEQ ID NO: 34810 - DNA, 269 bp, Glycine max
  unsure (1)..(269): unsure at all n locations; Clone ID: 701108411H1
ctggttgattcggatctagagtcttcagtttctcctcgttgttcttcgctttcctgttttcaatttcnattctttcgttaatttnataagatgtttgggagggcaccgaagaagagcgataatacgaggtactacgaaatcctcggcgtctccaagaacgcttcgcaggatgatctgaagaaggcttacaagaaagccgccattaagaatcaccccgacaagggcggtgatcccgagaagtttaaagagctggcgcaanttatgaggtt

SEQ ID NO: 34811 - DNA, 270 bp, Glycine max
  unsure (1)..(270): unsure at all n locations; Clone ID: 701108412H1
gcaaagcaaagcagagccaacaacaagaagaacaaaaccaacatcaacaaccacaagaagaagaagcttgcaaattagaagaatcttcngttgaaagggaagaacacacaagaacaaagagaggaagaaacgcgaatgaagggagaattagagttgccaccagggttcagatttcaccccactgatgaagaattggtgaatcactacttgtgtaggaagtgcgcgggtcaaccaatcgcggttcccatcatcaaagaggtcgatttgtac

SEQ ID NO: 34812 - DNA, 247 bp, Glycine max
  unsure (1)..(247): unsure at all n locations; Clone ID: 701108413H1
cttactctctctgtctagaatncctgtattctccctctgtacggntcacanagcgatngaaagatnatagagaataganagcatttctagggcgccaatannnnnnnnnnnnnnnnnnnnnnnnnnnnnnnnnnnnnnntacacanagcagagagacaagtttgtgtttttctagtnntaccattttttgggggaganagntctgattctcaccataagtgncattgctttgnttgcttctcactcc

SEQ ID NO: 34813 - DNA, 260 bp, Glycine max
  unsure (1)..(260): unsure at all n locations; Clone ID: 701108414H1
cnntctgctctaccancaacgtctctactcttttcgggatacattcctgggatctncctggntttgtttttcaagggcaaaatgncagatncaaagccagatanacccttaacggcatcttcatggcgaanncttcctgatnncaagaagtctgtgaagttgnagtatgtccaagcttgagttatnattgacctcatccacccatggaatgtantttgnnctntccccncttggncgtnttgattgcngcccagctttcc

SEQ ID NO: 34814 - DNA, 285 bp, Glycine max
  Clone ID: 701108417H1
tttgattgctaccgttacaaaaactttgtcttttagtccctactactcttgaaatatcttttaatctttgtgcaataccatttttattctcttttagtttttacacgtatcatattagtgcatgcttggattaaagtttacagacttgagtttgcaaaagcaacccaagccttgcctttgcaaaacatagtttccaggcaaaattctattgtgcaaacgtacttttgaaggtaatcaaacatgtctgtcaccgaggtactctccaaaattacgtttactggttat

SEQ ID NO: 34815 - DNA, 281 bp, Glycine max
  Clone ID: 701108418H1
gaaaaaacatggaccatgcgtactacctttcctgaatatgtcgttgctcttgccactattgttggatctgtgctttttgctatatttggtggtgttggtattgcttgtcttccattgggacttatattttcattcattcggcgtccaaaggctgttatcactcgttcacagtatatcaaggaagcaaccgaactgggtaaaaaagcaaaagaactgaagaaagcagctgagtcacttcatcaggaagaaagaagtggttcgaagggaaggaaatttcgtaa

SEQ ID NO: 34816 - DNA, 282 bp, Glycine max
  Clone ID: 701108419H1
cttcaaggccatatcaacccattgttcaaattagcaaagctgcttcatctgagaggctttctcataaccttcatctgagatgagtaactctacagagagaaagccacatgcactgttgacaccatatccacttcaaggccatatcaacccattgttcagattagcaaagctgcttcatctgagaggcttcacataacctttgtccacactgaatacaacatctaaacgcttgctcaactcaaggggtcctaaagcccttgatggccttcaagactttcattt

SEQ ID NO: 34817 - DNA, 281 bp, Glycine max
  unsure (1)..(281): unsure at all n locations; Clone ID: 701108420H1
agttgttccagattggcatcaaaagtaagaaggtgcacaattcgaccttctccactataatttgcaatgacatatatcaaacagtgataccaactaggagtgacatgcagcaaattcacactgcaaaattcacaattaagagtttcattgttgaaggtggaagagaatttccatgaagaaaaaccaacaacaacaatgaaaganatactacaatgatcaacagcacgaaaganactgattttccactaaaacaagaagggctttcttcaagtgatcatgag

SEQ ID NO: 34818 - DNA, 274 bp, Glycine max
  Clone ID: 701108421H1
atcttctagtatttttcaagtaacttaaggtttcaaacctaggaagttggaagtcatggcagcaacattgatggcagcaacaagttctggcactcttaaagcaactcctttcctaggccaaggcaagggtgccaatgccaatgctcttagggatgttgtttccatgggaactgggaagtacaccatgggcaatgatttgtggtatggaccagacagagtgaaatacttgggacccttttcagctcagacccctcatacttgaaaggagaatccc

SEQ ID NO: 34819 - DNA, 275 bp, Glycine max
  unsure (1)..(275): unsure at all n locations; Clone ID: 701108422H1
tggaagaatcactcccttatccatttccacaccacancatagtggnaaccaacgctctctcttcagcctccattctacgctctcccaacngccagtctctganccgaagagcgaaccataatggaagagtaaattaccggaaaccgaataaccgtttctccgtgaaagcctccgccaaagagattgcctttgaccagcattcccgctctgctatgcaggccggcattgacaagctcgccgacgctgttgggtcactcttgggcccagagggagga

SEQ ID NO: 34820 - DNA, 275 bp, Glycine max
  unsure (1)..(275): unsure at all n locations; Clone ID: 701108423H1
ctagaaacagtgtgatgaaaatgaaggtccttgttttcttcgttgctacaattttngtagcatggcaatgccatgcgtaacgatatgttccctctccgaatgaacactggctatggtgcccgtactccggaggtgaaatgcgcaagttggaggcttgctgtggaagcacacaacatctttggctttgagaccattcctgaagagtgcgttgaagcaacaaaggaatacatccatggcgaacaatatagatcagactccaaaacagttaaccaaca

SEQ ID NO: 34821 - DNA, 266 bp, Glycine max
  unsure (1)..(266): unsure at all n locations; Clone ID: 701108424H1
gatagccagccatgtcgatcttttctattccctcaccaacgtaccgttgttcaatttcaatttcaatttctcggcagccattgccatgttctttcacggctcaagtgagaagaagagggaaagggaaagtggtaatgagcatggaggcangcattggagtgatgggcaccaagttgggtatgatgagctatttcgaatccgacggagaggttgttcctgtcactgtcgtgggtttcaaagaaggcaacatcgtcacccagatcaaa

SEQ ID NO: 34822 - DNA, 270 bp, Glycine max
  Clone ID: 701108425H1
agaaggcgtcttcataaacgcctttcttctccgtttccgtttcctcgttcaaattcgctttttgatctgcgaaaatgagagagtgcatctcgatccacattggtcaggctggtatccaggtcggaaatgcttgctgggagctctactgcctcgagcacggcatcgggcccgatgggcaaatgccaagtgacaagacagttggcggtggtgatgatgctttcaatactttcttcagcgagactggtgctggaaagcacgtgccacgtgcag

SEQ ID NO: 34823 - DNA, 265 bp, Glycine max
  unsure (1)..(265): unsure at all n locations; Clone ID: 701108426H1
gaaaaaatgaccaagatcttctttgtattgctgntatgtctgatcatagcagcttcttctgggtttgtgaattgctttgatgttgaaaagaaggaaaagattggaatttttgagctcaataaaggtgacctttctttgaaggtcaccaactggggtgcttcaattttgtccctggtgattcctgataagaatggaaagttgagtgatgtngttctggatatgattctgttaaggattacactaatgatacaacatattttggagc

SEQ ID NO: 34824 - DNA, 235 bp, Glycine max
  unsure (1)..(235): unsure at all n locations; Clone ID: 701108427H1
gctcacagttcgtttacgggcattcttgtgcnctcagttactctctctctanctgnaccntcgtcgtttcgttagggcacaaaaccccttttcggatcggtggagcaaggcctcgccggcgagattcccgaggctgttcaatcagcgatcgagcaccggcgaaaagcggcgaagatgaaggttttcgtgaagactctcaagggcacgcacttcgaaattgaagtgaaccntcgga

SEQ ID NO: 34825 - DNA, 267 bp, Glycine max
  Clone ID: 701108428H1
ttcccgaatcaaagatctgcaactctctctcatgatttttcctctcggtgttgccatgacggaaccgacagagccatccacgtgcatcttcattggcgagggacccaaccaccgtggttcacccaaggcgcgagccattcgagcacggcctcttgccaatcccgcgcctcatcttctccgacccgacgcaaacctaatctcgttgaagcagaagcttctcgagttatcctctaaccagcgagtcgactcggcggcaatctccgagtc

SEQ ID NO: 34826 - DNA, 270 bp, Glycine max
  Clone ID: 701108431H1
tgcagggtaacacatggctctgttattcaaggatccgtcgaagatttcggcgtatcgagatagaaggttccccgggacgcaagaggagtttgagcacgcgcttctgacctcaaccaccgtttacgtggggaacatgtcgttttacacgacggaggagcaagtttacgagctcttctcgcgtgctggggaaatcaaaaagatcatcatgggctggacaagaacacaaaaacgccttgcgcttctgtttcgttttatattattctcgtgaag

SEQ ID NO: 34827 - DNA, 272 bp, Glycine max
  unsure (1)..(272): unsure at all n locations; Clone ID: 701108432H1
tatccacgtangnnaccatgtncgnnagggganacacntagaagcgccacagaagagactatggctaccgtctcgatcacttcgagcgtaagncaagaaagaggcacgtcaagttcacaagcgctctgcaattncccagaaggctctgggtattaagggcaaaatgattgccaagaaaaattatgctgaaaaggcgcagatgaagaagactttggctatgcatgaagaatcatcgtctaggcgcaagactgatgataatgttcaggatggag

SEQ ID NO: 34828 - DNA, 286 bp, Glycine max
  unsure (1)..(286): unsure at all n locations; Clone ID: 701108433H1
gcttacaaagaattggaaatgaagaggaaaggttacaagaaaagactagatgatttgcaaactgcccttcgcaagcatctcgaacaaattcaggcagatttagtggatcaagaaaagctacaggctacgttggatgatgaacatcttaatgctgcttgtnacctgaaaaaagcctgtgaaatggttgctctgcttgaagcacaactaaaggagatgaatccaaatcttgattcaatttccagaatatcgaaagaaggtntcttccatacatgagcgagttgaagnc

SEQ ID NO: 34829 - DNA, 279 bp, Glycine max
  Clone ID: 701108434H1
gtttttgggtcatgtgtaccgaatatctcatggacactaacatcaggggaagaaatatctgcccatgctgtgttttcaaatgcatttattcttcttttaaagctatggagatttaaccggcctccacttgaatatggaattggagatgtacccacagttggttctcaattaactcctgaatacttactattagtacgtaattcccacttaatgtcagctggtaacatccacaaagatcgcaacaggaggagactctcagaaatagcaagtttatcatcg

SEQ ID NO: 34830 - DNA, 200 bp, Glycine max
  unsure (1)..(200): unsure at all n locations; Clone ID: 701108435H1
aaaacataaaaaccttgtgggaagctgccctccatagactttcaataagggnntagatcttgttcttatcagaagtgcaagtgttacttcatatagttgtagctaatttcattgtaattgtgatgtaatataagtggttgggtccgcaactatgtaattttcttgtctggtatacaccagtattttgtgcaagtgttact

SEQ ID NO: 34831 - DNA, 275 bp, Glycine max
  unsure (1)..(275): unsure at all n locations; Clone ID: 701108436H1
ctcacatatcctccttcgtatccgtgtcttccccaaccattccttaacccaccgcaaattcaaattcaattcgagctgaacctagggttagtcctattgccttcaccgatctcgaatttcggaaacggtaaaagaaaatgcacgtcaaatcggcgcagtcatcgttccgggatcggacacaggaattccacagcatcacagagangttgaagaagtccggatcagggcccaatgggccagtagtagcagcattcttccagatcggaggaacagcg

SEQ ID NO: 34832 - DNA, 213 bp, Glycine max
  unsure (1)..(213): unsure at all n locations; Clone ID: 701108437H1
ctccgcgtgggtttggcgaaaccttctagaattttcttccatggaggttatcagagttctaacggcggcgatcacggtggcggttctcgcggcggcgcttccggcggacgccgcgacgacaaccgagtattcgcgccgtgttcggacacgcgagtgcagagatccgacggattcacgttcggaatcgcgttcgctnccgaaggacaagttctt

SEQ ID NO: 34833 - DNA, 272 bp, Glycine max
  unsure (1)..(272): unsure at all n locations; Clone ID: 701108438H1
acacatccctagctctgtcgttccgtcgttgacgatggcgtttcgggtgcgaancctgacctccgctctctctttcttctctctctcttgtccatcgcttccgccaatgtcttcttcgaagagcgtttcgatgacgggtgggaaaatcgatgggttaaatcagattggaaaaaagatgagaacgtggctggggagtggaaccacacctctggtcaatggaatggagacgctaatgacaaaggtattcaaaccagtgaggattacagattctt

SEQ ID NO: 34834 - DNA, 272 bp, Glycine max
  unsure (1)..(272): unsure at all n locations; Clone ID: 701108439H1
tcaccacccaaatgctcttcacagattccctatttctctcttcttcaactttctcanaacaggtattcgaagaaagaattctgggtgtattgaaagtttgaatcttttaagcctctaaatttcctccatacatttacctgcatttccaaattttgaagtttggatacggtaataatcaaaatggcctcttgcgtgtcaacaatttttgcacctnctaatactagaaatacaccaagggtgtttactgttggaggaagaaatctgacttgtaa

SEQ ID NO: 34835 - DNA, 272 bp, Glycine max
  Clone ID: 701108440H1
cttccttcaaagtgaggtctctaagtttcactttctttgcatagggcaacctgcctttctctgtgactctgagtatcgtatcgttttattattatttctaattctctcttatcaggtccattgaatatgtctccgtcgttggatcttcctcccaagggtggcttcagttttgatctatgccgaagaaacgcaatgcttcaaaacaaggccctcaaagccccaacctttctcaaaactggcaccactattgtcggtttagttttccaggatgg

SEQ ID NO: 34836 - DNA, 269 bp, Glycine max
  Clone ID: 701108441H1
gcttaatctctctcattccccatttcctcacctccttcaaccgctgctaaattctagggttccgaaatggacgctggcggaaagatcaagaagggcgccggaggtagaaagggcggcggcccaaagaagaagccggtttcaaggtccgtcaaagccggtctccaattccccgtcggaagaattggccgttatttgaagaaaggaaggtacgctcagcgtgtcggtaccggtgctcccgtatacttggctgcagttctcgaatacctagc

SEQ ID NO: 34837 - DNA, 268 bp, Glycine max
  unsure (1)..(268): unsure at all n locations; Clone ID: 701108442H1
ataaaccctacttctacttcccccctttgctctcaaaccttatcacctaatccttatcctcccaaaccagaaaaccatgtctacctccgcagcttccctcgcactcncaaccctcactctccgaacccgacaacctctatgttctccccaatgcttctcctcgtccctctccctcacacccaacaacaaacccatttccatttctgctgtttttctcaaaccaacaactctgtcgtcgtctcgcttcgttccccacgtcgtggtgtcg

SEQ ID NO: 34838 - DNA, 262 bp, Glycine max
  unsure (1)..(262): unsure at all n locations; Clone ID: 701108444H1
cagatgggtagctcaggtttctcatggaaattggcggatcatccaaagcttccaaagggtaagactgtggctgttgtggnattggatggttggggagaggccacacccaatgagtacaactgcatccacaaggccgaaacaccctgcatggattcacttaaaaagggtgctcctgaacggtggagattggtcagggctcatggtactgctgtaggacttccaacagaagatgacatgggcaatagtgaagttggtcacaatg

SEQ ID NO: 34839 - DNA, 262 bp, Glycine max
  Clone ID: 701108445H1
cgcccaatacctactctccgctcccaagagcacgcaccaccactattgcattcttcctcgttctccctctttttctcttcttcgctaaacccttttttctatctcactaacacaacaatgggagacgagaagaagggcaagcctgctgcttccggcgtgtggtccaccatcaagcctttcgtcaatggtggagcctccggcatgctcgccacctgcgtcattcaacccatcgatatgatcaaggtgaggattcaacttgggc

SEQ ID NO: 34840 - DNA, 266 bp, Glycine max
  unsure (1)..(266): unsure at all n locations; Clone ID: 701108446H1
ctggaatttacctgcctgaanccctctgttttggatcgaattgnaactgaggnccactntctatcgagaaagaggtgtntccaaagattgcttccgnganaaagctatatgcaatggtcctgccangattttggatggacnttggacaaccgagggattatattgcnggnccgaggnttacngggactcattgaggaagnagtcatcttctaagttggccagtgggctctcaaatgtagggaatgtcattgtggatgagacagcca

SEQ ID NO: 34841 - DNA, 266 bp, Glycine max
  unsure (1)..(266): unsure at all n locations; Clone ID: 701108447H1
attccacaacagtgggagcggagatccanaaagagagagtgnaaaagatggcgcggttgnatcacagtggtgnggtgcncngtggcggtgctattatgcgccngcggccggtgcgtcgtgggtggaggaggcggcgaacccgatacgaatggtntctggcgtggaggcggaggtggttcgggtgatcggggantgccgcgtgcgtngaagtttgctaggttcgtgagcnggttcgggaagattaccaaagcgaggaacagatgaag

SEQ ID NO: 34842 - DNA, 265 bp, Glycine max
  unsure (1)..(265): unsure at all n locations; Clone ID: 701108448H1
acattnatggccagcnacaanaagttctngtactcttaaagcacactccttnccttggccaaggcnanggtnccantnncaatgctcctnanggnnntngnctccatgggaactgggaagtacaccatgggcaatgatttgtggtatggaccagacagagtgaaatacttgggacccttctcagctcagaccccttcatacttgaaaggagaattccctggggattatggatgggacactgctggcttatctgctgacccagaag

SEQ ID NO: 34843 - DNA, 278 bp, Glycine max
  unsure (1)..(278): unsure at all n locations; Clone ID: 701108449H1
ctgactctgagcatgcaattggccttggtctcattgcattctctgggaaaatgacgaacaagggcaaaggaaaaggcaaggaggtcgccggaaaaggttctgccggcaagcgcaagggcgtcttccaggatgacaagaccggtagtggctgcaagagaaacaaccgaagtgtccttcagttcttcgaagacgccgctgacgttgaagagagcgatttcagtgatttcagcgacgaccgacgacagcgatttcgattttccgtgacganttaatggccg

SEQ ID NO: 34844 - DNA, 275 bp, Glycine max
  Clone ID: 701108450H1
cagtgtgatgaaaatgaaggtccttgttttcttcgttgctacaattttggtagcatggcaatgccatgcgtacgatatgttccctctccgaatgaacactggctatggtgcccgtactccggaggtgaaatgcgcaagttggaggcttgctgtggaagcacacaacatctttggctttgagaccattcctgaagagtgcgttgaagcaacaaaggaatacatccatggcgaacaatatagatcagactccaaaacagttaaccaacaagcttact

SEQ ID NO: 34845 - DNA, 274 bp, Glycine max
  unsure (1)..(274): unsure at all n locations; Clone ID: 701108451H1
gtgagtttgttgatcgagataactagaaacagtgtgatgaaaatgaaggtccttgttttcttcgttgctacaattttggtagcatggcaatgccatgcgtacgatatgttccctctccgaatgaacactggctatggtgcccgtactccggaggtgaaatgcgcaagttggaggcttgctgtggaagcacacaacatctttggcnttgagaccattcctgaagagtgcgttgaagcaacaaaggaatacatccatggcgaacaatatagatcag

SEQ ID NO: 34846 - DNA, 256 bp, Glycine max
  unsure (1)..(256): unsure at all n locations; Clone ID: 701108452H1
tctaaaagagatctttttctgctctttgaagaaagaagggtctttgcttgattttggagatgtctctgctctcagatctcatcaaccttaacctctccgataccaccgagaaggtgatcgcagagtacatatggatcggtggatcaggaatggacctgaggagcaaagcaaggactctcccaggaccagttagcgacccttcagagntcccaagtggaactatgatggttccancacaggtcaagctcctggtgaa

SEQ ID NO: 34847 - DNA, 253 bp, Glycine max
  unsure (1)..(253): unsure at all n locations; Clone ID: 701108453H1
ctcaacttacccctttcttagctacattcctctccacttcgttttatgccctcttctcannnnnnnnnnnnnnnnnnnnnnnnnnnnnnnnnnnnnnnnnnnnnnnnnnnnnnnnnnnnnnnnnnnnnnnnnnnnnnnnnnnnnnnnnnnnnnnacttctcacactcattcattcttattattactatccacaccctttcgttcgnnttgtttggttctcatgggttgaacttgacccccttgccactgcgag

SEQ ID NO: 34848 - DNA, 272 bp, Glycine max
  unsure (1)..(272): unsure at all n locations; Clone ID: 701108454H1
caagtagttgagaactaagaagaaggaaatggcttccctcaatgatctcctccccagctgttaccaccgtccaaccgtgccggtgccggcatggttgctccattcaccggcctcaaatccatggctggcttccccacgaggaagaccaacaatgacattacctccattgctagcaacggtggaagagtacaatgcatgcaggtgcggccaccaattggcaanaagaagttcgagactctttcctacttgccagacctcgatgatgcccaatt

SEQ ID NO: 34849 - DNA, 270 bp, Glycine max
  unsure (1)..(270): unsure at all n locations; Clone ID: 701108455H1
attcgctctgtgcagtttcctcgctctcttttctgcaattttcttttttgttccttctctgcggttatctttttgagcttcaatggggacgctgaaaccttcgctttccaggctgagatcaaccagcttctcagcctcatcatcaacaccttctacagcaacaaggagancttcttgcgtgaactcatcagcaacgcttctgatgctttggataagattcgatttgagagtttaaccgacaagagcaagctcgatgctcagccagagctc

SEQ ID NO: 34850 - DNA, 213 bp, Glycine max
  unsure (1)..(213): unsure at all n locations; Clone ID: 701108456H1
cactaagaaagaaagaggttttagtttttnagtttaagcacaccaactaactncacctaacttcttttctctctggggttctttctccatttccattggctttcaaaagtcaccaacacaattctcccctcagagtttcaatggctgtttcaacaagtttccctggtgcaaagttggaggctttgttgctgaaatgtggctcctccaatgctg

SEQ ID NO: 34851 - DNA, 265 bp, Glycine max
  unsure (1)..(265): unsure at all n locations; Clone ID: 701108457H1
atttccttcgtctcttttgtntcgtcctttccttcaccacttttcccttttcattttcaggataacaaaacaacactccttgcaggattanacttcacttcaattgaactaacctatctgtgggttttttgtagattgattcaattcaatggcttcagtaatgctcagtggaactgaaaagctcactctcagaaccctaaccggaaacggcttaggtttcactggttcagatttgcacggtaagaattttccaagagtgagtttt

SEQ ID NO: 34852 - DNA, 259 bp, Glycine max
  unsure (1)..(259): unsure at all n locations; Clone ID: 701108458H1
tctgtctccattggacagatagcattttccccttcccagacagatccaagaaccacagtgctcttttttganccaacggtgctgattctttcccgcggaatcttgctcggcgttggggtgtaagtcatttgtcaattcccttggacaagatggctttggggaaatatgctagggtagatggtagaagatcgtcgagctggtgtncgacggtgactgttgtcgtgtttgtggctctatgcttggttggggtttggatgat

SEQ ID NO: 34853 - DNA, 260 bp, Glycine max
  unsure (1)..(260): unsure at all n locations; Clone ID: 701108459H1
ctccttgcaacatactactncagctagaaagacataaacaaagtgggntgatttagatttgaccaacagcttttgctagctctttgaattttattggaagacatggattgttcatcatggattaacacttccttggatctcagcattaatcctcgcagagttcatgaagaagctgttcctaaggtggtagaaagcaagcttttctctttgggaatgcccaagtttaacgtcgaagaagagtctactagtgacttggagga

SEQ ID NO: 34854 - DNA, 260 bp, Glycine max
  Clone ID: 701108460H1
agataactagaaacagtgtgatgaaaatgaaggtccttgttttcttcgttgctacaattttggtagcatggcaatgccatgcgtacgatatgttccctctccgaatgaacactggctatggtgcccgtactccggaggtgaaatgcgcaagttggaggcttgctgtggaagcacacaacatctttggctttgagaccattcctgaagagtgcgttgaagcaacaaaggaatacatccatggcgaacaatatagatcagac

SEQ ID NO: 34855 - DNA, 260 bp, Glycine max
  Clone ID: 701108461H1
tcgatgcattccctttcagaccctctgatgatgatgtcctcacccagaaatggaattggttctgggcagaaatgaagaaagtcaatcccaagctacaagacctcatcaaagcggacagtttcatctcatctatggaggcagtgacaagaagtggctgcaagatttcactcagacagtggaaaaaatcaaaaggcatgagataatcaagagggcagacgcggtgatagagcactatccattcggaagggaagatcacagga

SEQ ID NO: 34856 - DNA, 214 bp, Glycine max
  Clone ID: 701108462H1
tcgtacctgttgcctcacttgcactctggatgggcggttgatcaagcaatcctggcagaagaggagcgtctggtcgtgatccgtttcgggcacgactgggacgaaacctgcatgcagatggacgaggtgttggcgtcggtggcggagacgataaagaactttgcggtgatatacctggtggacataacggaggtgccggatttcaacaccatgt

SEQ ID NO: 34857 - DNA, 268 bp, Glycine max
  unsure (1)..(268): unsure at all n locations; Clone ID: 701108463H1
gaaagnaagattatttagnaacaagnaggngtgcgcgcgcgaaccatccataacagaaacaacaatggcttccatgagtatattcaccaccatttccctcgccgccgacgcccggaatccggccatctattttccccggcggcggcagcccaacacggtcattttcgccgccgcctcatcgccggaatctcctccagaaatagagctcgagttcatcgggccaaaaccgggaagtgatggatcgtacccggtggagagagtgaaagca

SEQ ID NO: 34858 - DNA, 269 bp, Glycine max
  unsure (1)..(269): unsure at all n locations; Clone ID: 701108464H1
tctcncgcacgaccacnatcncgcaatgngacagtngtncaagnngctcaagggtgttcntggcngnnnacgcnaantnaanntnattaacgcgtgttcatangntcgtaattaaacggagttgttcattcaaaacacaagagtctagagtgtgttgtgttgtgtcatttttgttaaatttgtctgttttggttttgtactgttttggatttagcagcatgcatgtaatntgtaaaagtatgaaggtatcggtttctcttcgatcttag

SEQ ID NO: 34859 - DNA, 277 bp, Glycine max
  unsure (1)..(277): unsure at all n locations; Clone ID: 701108465H1
ggcggggataagattaaagattcaacaatggcctctgcttctgctactcttctcaagtccatgctcctgttcttgacaagtgcgagtgggtcaaaggccagacccttcgccaacctctcgtgagatgtaacccttcctcagcatcagctctcacnatcaaagctgcttcctatgctgacgagctcgtcaaaaccgccaaaacagtggcctcaccggggcgtggtattttggcgatggatgagtcaaatgcaacctgcgggaancgtttggctctant

SEQ ID NO: 34860 - DNA, 273 bp, Glycine max
  unsure (1)..(273): unsure at all n locations; Clone ID: 701108466H1
gaaggaccaatgtgtgatctcttgtggtctgaccctgatgatccgctgtggatggggaatatctccacgtggtgcaggatacacatttggacaggatatagctgctcagtttaatcataccaatggtctctccctgatatcgagagctcatcagcttgttatggaaggattcaattggtgccaggacaaaaatgtggtgactgtatttagtgcaccaaattactgttaccgatgtgggaatatggctgctatactaganataggagngaatat

SEQ ID NO: 34861 - DNA, 272 bp, Glycine max
  Clone ID: 701108467H1
cactcactcacactctcttctgtcatagctgtaccacgtttttcttgctccatctcagcctctgtcccaacaccattctcatggctgctctagctctagcactgcttcttctggctttcactggcacttcaagtgctacatggtgcgtttgcaaggatggaagcgacgcgatcctgcagaaaaccttggactatgcttgtggagctggtgctgactgtaatcctctccaccaaaacgggccttgtttccagcccaacaccgttagggcccat

SEQ ID NO: 34862 - DNA, 271 bp, Glycine max
  Clone ID: 701108468H1
gcaagaatggccagaatagcttcacttgagagcatgctgaacatatcatctaattcacttgtagcaatggcttctcaactttctgaggcagaagaacgagaacgggccttcactaatcgtggacgctggaaccagttgcgctcaatgggagaagccaagaatttgcttcaatatttgttcaattctgttggagatgctaggtgccaactgtgggaaaaggacactgagatcaaggaaataaaagatcagatcaaagaacttgtaggtctat

SEQ ID NO: 34863 - DNA, 268 bp, Glycine max
  unsure (1)..(268): unsure at all n locations; Clone ID: 701108469H1
gcgcatagtgtggtaccagcagcagagcttgtatacgtcgccgcttcagcgtanaacatgatcattcccgagaagaaccgtaaagagatctgcaaatacctcttccaagagggagtttgctttgcgaagaaggacttcaatctggcgaanacccggagattgatgtgccgaatctgcaggtgataaagctgatgcagagcttcaaatccagagagtacgtgagggaaacatttgcgtggatgcactattactggttcctcaccaacga

SEQ ID NO: 34864 - DNA, 267 bp, Glycine max
  unsure (1)..(267): unsure at all n locations; Clone ID: 701108470H1
catcgataacatatcacacttgagacagttatctntatctacgcaagagaagaatagaaaatggatatcaggttgatggatttggactctccattgttcaacactctgcaccgaatcatggatctgacagaggacgcagagaagaacttgaacgctccgacgcggacatacgtgcgcgacgcgaaggcaatggctgcgactcctgcggacgtgaaggagtaccctaactactacgtgttcgtgatcgacatgccaggcctgaaatcc

SEQ ID NO: 34865 - DNA, 265 bp, Glycine max
  Clone ID: 701108472H1
gtggtggcaaagatggggttattcttctgtgggatttggctgagggtaagcgtctttactccctcgatgctggttctatcatacatgcgctctgcttcagccccaacaggtactggctttgcgccgccactgaacagagcatcaagatctgggatttggagagcaagagtatcgttgaagatttgaaggttgacctaaagactgaggctgatgccaccaccggtggtggtaaccccaacaagaagaaggttatctactgcacaag

SEQ ID NO: 34866 - DNA, 262 bp, Glycine max
  unsure (1)..(262): unsure at all n locations; Clone ID: 701108473H1
ggattagcatcaaagcaagttaacaaaatttgggtgcgtcctggattgacccttttgccccctctccctcaccctccactaactcctcctttttggtntttataaagcacattcccnntnnnnnagggtccctacacaacacaaccctncaatgacgtccatggccactttcttcgcccaaacctccttcccctcccactctctctccaaaaccttcgatacccatttcgcgcctgccccgaaagtcaacgtctttgtgaat

SEQ ID NO: 34867 - DNA, 262 bp, Glycine max
  unsure (1)..(262): unsure at all n locations; Clone ID: 701108474H1
cgaactccgacggcaccaccaacggcgcaatcactgaggcgcagagacagcagcaacngcaaggggggaaggcgttagccgtctanagaagccgccgtcaaaggaccgtcacagcaaggtggacggtcgcgggcgccgcataaggatgccaatcatatgcgccgcacgtgtgttccagctcacgcgcgagttggccacaagtccgacggtcaaaccatncgagtggctctccgtcangccgagccctccgtcatcgccgcca

SEQ ID NO: 34868 - DNA, 153 bp, Glycine max
  unsure (1)..(153): unsure at all n locations; Clone ID: 701108475H1
attcttannagagtagcgtgtaggaactgttggncatttcttttctgctntatcttcttncacntttgtactggantcnnaggaagaccgtntnagttgcataatattgtactgntccctttcactctctcccttggatctctttgtggcntg

SEQ ID NO: 34869 - DNA, 258 bp, Glycine max
  unsure (1)..(258): unsure at all n locations; Clone ID: 701108476H1
gtgtgtcataacaaaagaggaagaacataggagaganatctattcatatcatcatatcatangacaaaagcgagcaaatncagaggatgaatggggtcacacaccttgaaccagatgagtctgagtttgttgaagttgatccaactggaagatatggcagatacaatgaaatccttggcaaaggagcttcanagacagtatatagagcattcgatgagtatcaagggattgangttgcttggaaccaggtcaagttgt

SEQ ID NO: 34870 - DNA, 258 bp, Glycine max
  unsure (1)..(258): unsure at all n locations; Clone ID: 701108477H1
acaagacatggcatcactgtgtctaaactcattaccagtnncaccatcttctcttcctcgcaaaccaactgaacacttctctttnctcttatccttctttgcttcttcataacaacaacaacaattcttagtgacttgaaacccattgttgtcagtggagaccccccaacttttgtttctgctccgggtcgcagaattctgctggtttgcttttcttattccaatttgtttttgtggcatctgtttggttttgaatat

SEQ ID NO: 34871 - DNA, 258 bp, Glycine max
  Clone ID: 701108478H1
gtgagatacactaagttatcctcataaatacactctaattaggtggcaagataagtgtctaaccttagtaacattgccacatattgtgttcattttggaattgtgccactaaaattctattcaattcatctatggctgcctcttcttatgctatgcaatcaatcctggcaaaccctttgatccgcatttccagcgggtctagggtgaaccaatttggcgttcctgctttgcacatgagaaggaatgttggccgagagt

SEQ ID NO: 34872 - DNA, 265 bp, Glycine max
  unsure (1)..(265): unsure at all n locations; Clone ID: 701108479H1
cgagttgacaccgattccactcactcaaccatgngccgattcaggcgttttgagctcatagaacaaccacctttcttccactcctgctactcttnccccttccttcgtcctccaagactcacttctctctcgacctcgacctcttgccacttcccagccacttcgacgctttcgcagatctggtgcacgcgccgtcgttcgcttaccggcgcgtggagaggcatctcgagaatgagttgcgtttgcagagcctctctgaccgtgt

SEQ ID NO: 34873 - DNA, 264 bp, Glycine max
  Clone ID: 701108480H1
ggcatcgttagcagttttgtagattcaacctcaatttgcagagttacgttctaatatatttacacaagactgataagagaaaatgtctctgattccaagtttcttcggtggccgaaggagcagtgttttcgaccctttctccctcgatgtgtgggaccccttcaaggattttccatttcccagttctctttctgctgaaaattcagcgtttgtgagcacacgagtggattggaaggagacaccagaagcacacgtgttcaaggc

SEQ ID NO: 34874 - DNA, 271 bp, Glycine max
  unsure (1)..(271): unsure at all n locations; Clone ID: 701108481H1
ggcgagtgagtgagtgagtgagtaagcaagcatatggcgagtaccttctgcttactccactctcccctctatcaattccnnnnnnnnnnnnnnnnnnnnnnngggcccataaaattgcgagcttccacaacatcttgcttgnngcagcaagacaaagagccactccgcaacagaagaaccgttcttttgaccagcatcgctcttcttccgtttcgccgtttgaagcgggccccagctctcgaatccccacctcnacctccacccctacaga

SEQ ID NO: 34875 - DNA, 249 bp, Glycine max
  unsure (1)..(249): unsure at all n locations; Clone ID: 701108482H1
cccagatgggaggtggcaataatgacnaggcaagagttatcnaaaccctgctttttgtagacggtattaacacattgttgcaaacaatgtttggaactcgactgcctgcagtaattggagggtcttacacctttgttccaaccacaatctcaattatccttgctggccgattcagtgatgaaccagatcctatagagnattcaagaggatnatgagatcantccaaggtgctcttattgttgcttcaat

SEQ ID NO: 34876 - DNA, 267 bp, Glycine max
  unsure (1)..(267): unsure at all n locations; Clone ID: 701108483H1
aatctaaatatacaataataagttaaacgcacgcaaacccaaattggcttttgcgagtnatgaaaaacacagaatcgcgtttgcnactgaggaatgagtttcctgcagggtatcgttgattccttcaactccatcttcatacccgataacaacaattatcacgacaccaannnnnnnnnnnnnnnnnnnnnaacgaatcgaatggaagcttctcctcctcctntcctacttcctccttcggtttcgaacgagcgcgttgcctacaag

SEQ ID NO: 34877 - DNA, 266 bp, Glycine max
  unsure (1)..(266): unsure at all n locations; Clone ID: 701108484H1
tgagtctatgctacgagtttatagataaattctattcttgattataaattattttatgtattcttagttatatgacttttcaatagtagaaatatcttttaaaaaagtgttttatattgtgatttattaattatttttcttatttgtcatcttaaattcatacatataaataatcatgttatgtntgatttatcttatccatttnnntattatgtnttaacttaatctttatggttcatcatatccctgtntttcttccttggatt

SEQ ID NO: 34878 - DNA, 252 bp, Glycine max
  unsure (1)..(252): unsure at all n locations; Clone ID: 701108485H1
ctcagggaattgccctcagtcttggggataagataactttgaaacagaaggganccgcttaataggagtaaatgcccgttttctctgatgtttcttcgcttatatcaactttgtgtagcttcttgtggcggctaacttcaagcttggttattgcttcaaattctgcggcttttggtggcagcccgcttgttagtattaatttttttttccctttgaattccaattttgtctgtattctttcctggatattgc

SEQ ID NO: 34879 - DNA, 266 bp, Glycine max
  unsure (1)..(266): unsure at all n locations; Clone ID: 701108486H1
tttttacattactcaatacactacactaacacaatccccttccctcttctctttctatccaaattctccaccagccatggcagtntcttcagcaacagcttcctccaaactcatactattcgnncatgcatcatcatcntcttcccttaattccacanncttcngnngnttgagcaccaacacccacaaactaacccctctctcctcctccttcctccaccccaccaccgtcctccgcngcaccccttcttccaccancaccccgg

SEQ ID NO: 34880 - DNA, 265 bp, Glycine max
  Clone ID: 701108487H1
attcaaacaacatccaatccttgttcctgtcctggctaacgttaccgactactttcatatttcgtgtaacgagataaccaccaaaactcgattttttttagtttttaatcaacgaacacatagcctattgttggttgcttctgtttttaattttcatttcagaataggaaccaatggctcatttgctgacaccaactcctaccactgctgcaacagctctctccgccagagcccggaagagccccctctattcgttgaaaaatgt

SEQ ID NO: 34881 - DNA, 263 bp, Glycine max
  unsure (1)..(263): unsure at all n locations; Clone ID: 701108488H1
ataagattcaacacaaggggcacttnacaactccaaaccccttccaacgctatctctatctataataatcagctcggagttagagcactgagcaaccgccatggccaccgctccttcgcttctacactcatctgggtcctctttcttctctcaatttcgtgcctttcaattctcttcttctttgctgttccctcatagtaacaagcatgggaatgcactggtctctgtgaaggcctctgtttctggggttgtgttggtggaga

SEQ ID NO: 34882 - DNA, 263 bp, Glycine max
  unsure (1)..(263): unsure at all n locations; Clone ID: 701108489H1
aaaaanaacaaaaacagaaacaaaagatggntcatcagaggcaaaacaacatccatgttcttgttcttccataccctgcccaaggnnacatcaacccccttntccaattcgcaaaaagattagcttcaaagggtgtcaaagccacagtngccaccacccactacactgccaactccatcaatgcacccaacatcacggtccgatnccatctncgatggnttcgaccaagccggcttcgcccagaccancaacaacgtgcaact

SEQ ID NO: 34883 - DNA, 255 bp, Glycine max
  unsure (1)..(255): unsure at all n locations; Clone ID: 701108491H1
gttaaaaatacagaacaaacatctcantcaacatcaacanancagatctacgtttccactcncacaacaangannanggaaagaaaaaccgatnctacagngacaacaaggnacgaaagaacgatcgatttctcgaagcgccctcaaaatggcgcgtgcacccttcacttctttccccttcgtcctcattatccttctgtcaatcgtccanntttngcatgcaagancctnaaacgtgacgttaaggctttnaac

SEQ ID NO: 34884 - DNA, 256 bp, Glycine max
  Clone ID: 701108492H1
aaacagtgtgatgaaaatgaaggtccttgttttcttcgttgctacaattttggtagcatggcaatgccatgcgtaacgatatgttccctctccgaatgaacactggctatggtgcccgtactccggaggtgaaatgcgcaagttggaggcttgctgtggaagcacacaacatctttggctttgagaccattcctgaagagtgcgttgaagcaacaaaggaatacatccatggcgaacaatatagatcagactccaa

SEQ ID NO: 34885 - DNA, 254 bp, Glycine max
  Clone ID: 701108493H1
ctcgttgtggttttccaatgctgcgagcgcagtcgaagatctagctagaggcagagaacgttctcttctccctgatcctctggaaagttctagccgatggcgatcttctacgctttggtggccagaggcacggtggtgctggcggagttcagcgccgtcaccggcaacaccggcgccgtcgcccgccgcattcttgagaagcttccggcggagtccgactccaggctctgcttctctcaggatcgctacatctt

SEQ ID NO: 34886 - DNA, 256 bp, Glycine max
  unsure (1)..(256): unsure at all n locations; Clone ID: 701108494H1
gataactagaaacagtgtgatgaaaatgaaggtccttgttttcttcgttgctacaattttngtagcatggcaatgccatgcgtacgatatgttccctctccgaatgaacactggctatggtgcccgtactccggaggtgaaatgcgcaagttggaggcttgctgtggaagcacacaacatctttggctttgagaccattcctgaagagtgcgttgaagcaacaaaggaatacatccatggcgaacaatatagatca

SEQ ID NO: 34887 - DNA, 262 bp, Glycine max
  unsure (1)..(262): unsure at all n locations; Clone ID: 701108495H1
gttcactgcgagagtgtgggagccagaaaactgctgcttctcgacccacttttgaagttcaaaacttaaaccctagnnnnnnnnnnnnnnnnnnnnnctgcatcttcaaccatgtcagcgatgctgcaacctcagatcattctgctcaaggaaggcacggacacttcgcaagggaagccacagctggtgagcaacatcaatgcctgcaccgccgtcgccgacgtcgtccgcaccaccctcggccctcgcggcatggacaagc

SEQ ID NO: 34888 - DNA, 279 bp, Glycine max
  Clone ID: 701108501H1
atctaagtgagatacacagtagttaggtagcaagcataagtgtctaaccttagaaacatatctgctacatatcgtgtgcattttggaattgtgccactaaaattctattcatctatggctgcctcatcttatgctatgcaatcaatcctgcaaaccctatgatccgcatttccagcgggtctagggagaaccattttggtgttcctgcttatcacatgagaaggaatgttggcctgagagttaggtccatggctgaggaagagcaaccaagtcagcctg

SEQ ID NO: 34889 - DNA, 274 bp, Glycine max
  Clone ID: 701108504H1
aaaggctatcactaaatctcattcttcatctgcagctatttggattgctgattattgttaactgatattggtgcttttctttgagaaagtgtgtacactttttggataagagaaaacaagagaggtgacattggaagctaactcagagagaggcaaagatgttgggaattttcaagcagaagttggttaatgcacccaaggagctgaacagtccagcttctttgaattcatgcattaagcctaagctaagtcatgaaatcctgaaggatttcag

SEQ ID NO: 34890 - DNA, 224 bp, Glycine max
  unsure (1)..(224): unsure at all n locations; Clone ID: 701108505H1
gtctccnaaaaccctaattccgcagtgaaaatgagagaaatcttgcacatccagggagggcnatgcggtaaccagatcggagcgaagttctgggaggtgatatgcgacgagcacggcatcgaccacaccgganagtacagcggcgactccgagctccaattggagcgcatcaatgtttattacaatgaagccagcggcggaaggtacgttccacacaacatacg

SEQ ID NO: 34891 - DNA, 275 bp, Glycine max
  Clone ID: 701108506H1
atttcttctcatcttctttttcttccctttaaaattattattccgtgcaaactcaacaacaacttcatcaccaacacgaagaacaagattagcgttatgggtctcttcctttctaggaatttggcttgcaaattcatatacccttttcttttttccaataaggtttcaaaggatttgttccccaagcagttggagaacatgatatctctggtctctcctcgtactggcaggcatttgcagcgctatgacaaaggctgtcgccaagttgtgggatg

SEQ ID NO: 34892 - DNA, 266 bp, Glycine max
  unsure (1)..(266): unsure at all n locations; Clone ID: 701108508H1
gaacacagaagccacgctgttctttcaaatcgtaaccgaagaatgaagatggtgcgctgctgtcggtgcttcgcctgagtctcattccgtttgcgcccactatcagttgtgctgaggcttaactggttntgaagcatatttcagagttttatcagagaacaaatgggttatattgggactcacggtgttgcagctctgcacagatataaatatagtggagtagatcattcctatgtggccaaatatgtactacaacccttttggag

SEQ ID NO: 34893 - DNA, 277 bp, Glycine max
  Clone ID: 701108509H1
gctgttttgaacattcacccaatttgcagagttccaagttatatacatacactgcataattaagagaaaatgtctctgattccaagcttcttcggtggccgaaggagcagtgttttcgaccctttctccctcgatgtgtgggacccctttaaggattttccatttcccagttctctttctgctgaaaattcagcctttgtgagcacacgagtggattggaaggagacaccagaagcacacgtgttcaaggctgatattccagggctgaagaaggagg

SEQ ID NO: 34894 - DNA, 276 bp, Glycine max
  Clone ID: 701108510H1
ttgactatggctgccctgagtctctcagatggcctaacgttggcaagtataaagtcgatgttgcttccttcgagtcactagcactgctcgagttacaggttagagaagacaccgatctcttcatcattgacgaagttggtaagatggagttattcagttcctcattcttccctgcagttctaagagtttttggagtcaaatatcccagttttggcttccattccagttccaaagtttggcagagacataccagaagtagcaaggttgcggaatcat

SEQ ID NO: 34895 - DNA, 273 bp, Glycine max
  unsure (1)..(273): unsure at all n locations; Clone ID: 701108511H1
ctcgtctttggttctggtntatagatctctgtgaagtcgctttataacactcaacctaagatgcagaacgaggaaggacagatcaccgagctttacattcctaggaagtgctctgccacaaaccgattgattaccgctaaggaccatgcttcggttcaggttaacattgggcatgtggatganaatggcgtctacaatggccatttctccattttgctctctgcggcttcatccgtgctcagggtgagctgacagtgccctagatcgcttgtg

SEQ ID NO: 34896 - DNA, 277 bp, Glycine max
  unsure (1)..(277): unsure at all n locations; Clone ID: 701108512H1
ctcctctcttgtctgtgtaatcaaaacaacaacattcattcatactcacttccttgcctactacacattncttcatcacttcattcaacatttctccccttagcttgtttcaccaatggctgctgcggttagtgctgcagtctcttttccatccaccaagtctacctctcttccaagnaggacctccctcattggcccagagagagttgtgttcaagnaggtttcattggcaaaacagagatgtttcnagcagtggacgggtagttccatcagagnc

SEQ ID NO: 34897 - DNA, 276 bp, Glycine max
  Clone ID: 701108513H1
cttgcattgtatctacccacttctcaaccaacaatggcaatggcaacccaagcctctctcttcaccccacccctctccggtctcaaacccagcgaccgagccaccgcgccatggaaacaatcctccaccctctccttctccacctcgaagcccctcaagttctcgcgaacaatcagagcagcagccaccgaccagaccacagaggcaccggttgggttcaccccaccggaactggacccaaacacccttccccgatcttcggaggcagcaccggcg

SEQ ID NO: 34898 - DNA, 278 bp, Glycine max
  unsure (1)..(278): unsure at all n locations; Clone ID: 701108514H1
gttgagaactaagaagaaggaaatggcttcctcaatgatctcctccccagctgttaccaccgtccaaccgtgccggtgccggcatggttgctccattcaccggcctcaaatccatggctggcttccccacgaggaagaccaacaatgacattacctccattgctagcaacggtggaagagtacaatgactgcaggtgtggccancaattggcaagaagaagttcgagactctttcctacttgccagacctcgatgatgcccaattggcaaaggaagtt

SEQ ID NO: 34899 - DNA, 278 bp, Glycine max
  unsure (1)..(278): unsure at all n locations; Clone ID: 701108515H1
caaaaacgtgaaatcggacctggttctcattctcgattacggttcccaatacacccaccttcatcactcgccgcatccgcagcctctcggtgttctccctatgcatctccggcacctcctctctttcaaccatcaccgacctcaacccctccgtcgtcattctctccgggggcccccactccgtccacaccccggactcccntccttccccgacggcttcctccagtgggcccattccaatggcgtcaccgtcctcggcatctgctacggcctccagt

SEQ ID NO: 34900 - DNA, 278 bp, Glycine max
  Clone ID: 701108516H1
gaaataataaggtgtggttggggttgggagttagggtagaatcaattgagaatggggatccgattcgtactgatggtgaacaagcaaggccaaactcgtcttgctcaatattacgaatacctcactctcgaagagcgacgtgccctcgaaggcgaaatcgttcgcaaatgcctcgcccgcaacgaacagcagtgttccttgttgagcatcgcaactacaaaattgtttatcggcgctacgcctctttgttttttcctcgttggagtcgacgatgatga

SEQ ID NO: 34901 - DNA, 274 bp, Glycine max
  unsure (1)..(274): unsure at all n locations; Clone ID: 701108517H1
caaactcttattcccactcagtggtgaatttgccaaaccgggataaccgtatccctattcaggaatacaatgttctcgttaagactccctattcctctcgttaaaacaccaccttctccctcttgttattattctcactattatcactatcgttatcgttatcgttgttatcatcctttccatcaccgttcccaaacacagagtcttntcgtctcgaagcgcggttccgccattgcnaatgtcacgctgatagcgtgacacttcgtgatgacgg

SEQ ID NO: 34902 - DNA, 251 bp, Glycine max
  unsure (1)..(251): unsure at all n locations; Clone ID: 701108518H1
gaatgaagtaactaacccaaaccacagtccccttacttgnctcgctggttggatttgatncgactcgattctcgctgatgaagaagcatttgatgcacagctatggcgttgccgtgattgtggtgttggctttgagtttgagtttgggtgcatcagcggaacaactcagttcacgagaatgcgagaatctcggtttcaccggactcgccttgtgctccgactgcaacactctctccgagtacgtcaaggac

SEQ ID NO: 34903 - DNA, 272 bp, Glycine max
  unsure (1)..(272): unsure at all n locations; Clone ID: 701108519H1
ctcctctataaagaattcctcttcctatcaagtgtctattcaaagtctccaatattcctaaacacttttcctaaacataaaagccttatttccaacactcactctattntcagggtttaatgctactatggacatctatatcagcttcaacagatatagtggtctatgcagggatattcctccttgcattagggaaaagtggtcaaaagctttcagaaaatttttacaaatatcagttgcaagagaaaattaaagagaaaaaggaacacgac

SEQ ID NO: 34904 - DNA, 274 bp, Glycine max
  Clone ID: 701108520H1
cagccgcagacagagatggaagctgtgtgtggaagtgtttgggtcacatcctctcttccacgctcacccaagtccactctctctctattccgctctactcatcaacacctaacagcatttccttcacaatcccatcttttcttatatcaccctcctccctatgctaatgctaaaaccctccgcgccagaacctcctccaaacccgccattttccttccccacttaattgcttctctggaacaagttgaccagacttacataatggtcaagcccg

SEQ ID NO: 34905 - DNA, 215 bp, Glycine max
  Clone ID: 701108521H1
tagtgcctccttgccagaagttaaaatggcccaagaaactttcctattcacatctgaatcagtgaacgaggggcaccctgacaagctctgtgaccagatctccgatgctgtgctcgatgcatgcttggagcaggaccctgacagcaaggttgcctgtgaaacctgcaccaagaccaacatggtgatggttttcggagagatcacaaccaaggccc

SEQ ID NO: 34906 - DNA, 272 bp, Glycine max
  Clone ID: 701108522H1
gaaggagaagaatcatacataaagactcttgtacttaatggaaaaacttatgacctctatgttcacagttacttgcactttggtaaagaagcatctcgtgcggagatgttgaaggtcactggtgattcagctaacccttgcattttagccggttataatgggacctacacatattcgggagttaaatataaggcctggcctccacttctgggtccaatttcgataaatgtcgagaggtagctcttaaagctctgaaagtgaatgaaccatgc

SEQ ID NO: 34907 - DNA, 274 bp, Glycine max
  unsure (1)..(274): unsure at all n locations; Clone ID: 701108523H1
aagcactggcgcantaccctgaggcttctcttctcttctcttctctgtcgtgagtcaccatggtgagggttagtgtgctgaacgatgctctgaagagcatgtacaatgctgagaaaaggggaaagcgccaagtcatgattaggccatcctccaaagtcattatcaaattccttttggtgatgcaaaagcacggatacatcggagagtttgagtatgttgatgaccacagggctggtaaaatcgtggttgaattgaacggtagactgaacaagtg

SEQ ID NO: 34908 - DNA, 274 bp, Glycine max
  Clone ID: 701108525H1
aaaaagaaaatgatgctcggagagaccatcgcgcgaatccaacggttcacgtgccaccgtggccaacccacgacgatccaacggccgagatgtactccgcgtttttaacaaacgacgtcaatgctggtgagtactctccgtactatcttcaagaagcactaacggctctgcagcgttttctgccgtctaacgaaacggacgctgactcggacaggaggctcaacccgacgcggcggtggacgcgtactcgtgcgaccattttccgcatgtacga

SEQ ID NO: 34909 - DNA, 218 bp, Glycine max
  unsure (1)..(218): unsure at all n locations; Clone ID: 701108526H1
gcgtaggggaatggttcctccctcagtngcttccttcctcttgtgtccacccagttcnccctttcattttccattcaataattcaaanaccagttaatggctacccttctattccaccacaattngnatntantannnnnnnnnnnnnnnnnnnnnnnacatcattaaacgccgtcgttttcatgactccataattcaccggaagcagaacaacaaca

SEQ ID NO: 34910 - DNA, 283 bp, Glycine max
  unsure (1)..(283): unsure at all n locations; Clone ID: 701108527H1
gcagaggcttcactttctgaagcagncgttaaacatggagcaanttagcatcccgcaattnaanccctgcgcaaatgngcgcgaggcagcatcatcatcagaatcagttcgacggtgggaacagtaanaagcgggctggtataccaccctcccanncgcatccgataccnctccnatttgnccncnactctgcagatcccggtgttctgtgcagcacaanaanatttctccctnacacccagncanacncgatnatcctnctnagccctctttttntcgcngg

SEQ ID NO: 34911 - DNA, 269 bp, Glycine max
  Clone ID: 701108528H1
ggaatttatgatcattgatgagaatcaagcggatgataccttgatcttgagtttgaggtctatccaatatgacattgcgtgggaacgctgtagacaacttaaggctgaagatgctgttgtcaagggtaaggttgttaatgcaaacaaaggaggtctggtggctcaagtggaaggcctaaggggtttgttccattttcacagatatcatcgaaaatcagctggagaagaactctgagcagtgattcttttaagtttgtagaggtggatgc

SEQ ID NO: 34912 - DNA, 243 bp, Glycine max
  unsure (1)..(243): unsure at all n locations; Clone ID: 701108529H1
gtgtagtctcanttccaagtcacactgancnacctgcgncaacaactccctactgcaaccacctcgcactggcaatggaattgcgagggtgaggatgagtgggagaatggaggtggtgtgtcggggaatgttgaaacccagaaagttcatgcagaggaggaggaaattcgaggttttcaaggattctgcagatgaagctgaccagaagaattggaggagaatcatgactganatcgaagaatc

SEQ ID NO: 34913 - DNA, 275 bp, Glycine max
  unsure (1)..(275): unsure at all n locations; Clone ID: 701108530H1
caaagaaaganaganaganaaccctagcttaccttttcaactttcaagatgcaaatcttcgttaagacactcactggtaagacaatcacccttgaggtggagagttcagataccatagataatgtaaagtccaagattcaagacaaggaagggatcccaccagaccagcaacgtctcatttttgctggcaagcagcttgaggatggacgtacacttgctgattacaacatccaaaaggagtccactcttcacttggtgctccggctccgtggtgg

SEQ ID NO: 34914 - DNA, 243 bp, Glycine max
  unsure (1)..(243): unsure at all n locations; Clone ID: 701108531H1
gcattgggtgttcctgctcttcccctgacatacgtggctccacgttctggcacttgttgccagcatcttggtcgtgctctgggtcctcaattttaggggtggcttggcttgggattctgataacaagggccctcatcttcaatcttcatccagttcttattgtcattggcttactagtncctgggggtgangctattataagctacaaagcatacccctgaagaaggaagtgaagaaattgnt

SEQ ID NO: 34915 - DNA, 276 bp, Glycine max
  unsure (1)..(276): unsure at all n locations; Clone ID: 701108532H1
atcgtgccaatactatgatagatcatcttcttgctcaacagcaatcacaacctgaatattacaccgatcaaatcatcaaaggacttgccctggtaatgctacttgcaggaacagatacatcagcagtaactttagaatgggcaatgtctaatttattaaaccatccagaaatattaaagaaggcaaaanatgaattagacactcatataggacaagatcgtctagtagatgagcctgacattccaaaactccctacttcaaaggcatgtttatgag

SEQ ID NO: 34916 - DNA, 271 bp, Glycine max
  unsure (1)..(271): unsure at all n locations; Clone ID: 701108534H1
cacctttgtnctaaaanatctccagtgggttcttcttcttctattacaacaacgtcncnanaagaccatgaccatggccatggccacgatcctgctcctgttcacggtcttcgcggtttcatcggccctagacatgtcgataatctcgtacgacaacgcccacgccgccacgtcgcgcagaaanngaagctgatgtccatgtacgagcagtggctggtgaagcacggcaaggtgtacaacgcgctcggggagaaggagaagaggttccaga

SEQ ID NO: 34917 - DNA, 268 bp, Glycine max
  unsure (1)..(268): unsure at all n locations; Clone ID: 701108535H1
gatcganataactagaaacagtgtgatgaaaatnnnnggtccttgttttcttcgttgctacaattttggtagcatggcaatgccatgcgtacgatatgttccctctccgaatgaacactggctatggtgcccgtactccggaggtgaaatncgcaagttggaggcttgctgtggaagcacacnacatctttggctttgagaccattcctgaagagtgcgttgaagcaacaaaggaatacatccatggcgaacaatatagatcagactc

SEQ ID NO: 34918 - DNA, 270 bp, Glycine max
  unsure (1)..(270): unsure at all n locations; Clone ID: 701108536H1
gttntcnttttcacccgccatgtgcggcatcctccgcagtnttgggntgcctcgacaactctacaggccangcncgctcgcatcatcgaattgtctcgcaggttgcggcatagaggtcctgattggagtggcatagattgctatgaggattgtnacctagntcatcaacgccttgctattgttgaccctacttcaggggaccaacctttgtacaacgaagataagactattgttgtcatcctgacgacaaccatggttttanatttcgtc

SEQ ID NO: 34919 - DNA, 110 bp, Glycine max
  unsure (1)..(110): unsure at all n locations; Clone ID: 701108537H1
aaagaaggcgtcttcataaacgcctttcttctccgtttcngtttcctcgttcganttcgcttttnnatctgcgaaaatnagagantgcatctcgatccacatnagntagg

SEQ ID NO: 34920 - DNA, 272 bp, Glycine max
  unsure (1)..(272): unsure at all n locations; Clone ID: 701108538H1
gaaagatgttggtggtggcggcttgactcgagacatctgttggtatgtcaatggcaaagaaacccgtganatactatgtggtggacgcgtttactgagtcagcattcaaggggaaccctggcatctgtgtgtttcttagaggaagagagagatgaggagtggctgcaagcagtagccgctgaattcaatatctctgagacttgttacttatcacgcatcacccactcgctccatggaatctctaatccccgttttcgnnctcagatggttta

SEQ ID NO: 34921 - DNA, 271 bp, Glycine max
  unsure (1)..(271): unsure at all n locations; Clone ID: 701108539H1
tntgcttatcaattactatcactattaatggcagttcttagttctggagaattccttggggcatttcttgttttcgttgtaatccactactggaggctcaacagacacaccccaattgctaagtggcccattcttggcatgttacctggtgtattcctcaacatgcccaccatctttgattatataacttctgttttgaaacgtgaaggaggcactttcatgtttgaaggaccatgcctatcaaacatgaacataatgtttaccagcgacc

SEQ ID NO: 34922 - DNA, 270 bp, Glycine max
  unsure (1)..(270): unsure at all n locations; Clone ID: 701108542H1
agccgtcgcactttgcgttttctgcgtcatctccgattccccgacaatggccacccaaatgagcaagaagagaaagttcgtagctgatggagtgttcttcgctgaactgaacgaggttctgacaagggagttagccgaggacggatactccggcgtggaagttagggttacgccgatgcgcaccgaaatcatcatcagagccaccagaacccaagccgttctcggtgagaagggnaggagaatcagggaattacctcggtggttcagaag

SEQ ID NO: 34923 - DNA, 268 bp, Glycine max
  unsure (1)..(268): unsure at all n locations; Clone ID: 701108543H1
cccatacctactttcagctcctaagagcacgcatcactgttgcacttcttactcgttnnnnnnnnnnnnnnnnnnnnnnnnnnnnnnngctaaaccccccctttatttttcctatctcantaacatcgatgggagacgagaataagaccaagtcccctgcttccggcgtgtggtccaccatcaagcctttcgtcaatggcggagctccggcatgctcgccactgcgtcattcaacccatcgatatgatcaaggtgaggattcaattgg

SEQ ID NO: 34924 - DNA, 266 bp, Glycine max
  Clone ID: 701108544H1
ggcggtatcatcttccaggtgagacagaggaagaattttcaaccagattagccaataatttggagcagttgattctgaaagagggaccagagactattgctgcatttattgctgaacctgtaatgggggcaggaggtgtaatacctccaccatcaacttattttgagaaggtccaagccgttgtcaagaagtatgacattcttttattgcagatgaggtaatatgtgccttggaaggctgggacatgtttggatgtgacaagtaca

SEQ ID NO: 34925 - DNA, 273 bp, Glycine max
  unsure (1)..(273): unsure at all n locations; Clone ID: 701108545H1
gagaatacaaaggggagcatcatggtgaacacagtactgaatttgnaaggagagcatcatgttggtgagcacaagccggagcaccatggaggagaagagcacaaagaggggttcctagacaagatcaaggacaagatccacggcgaggagggtggcaccgctganggcgnnnnnnnnnnnnnnnnnnnnnnnnnnnnnnnnnntgancatggccatgacagcagcnncagcagtgaccatgattagatnatctcccactgctagcatncancg

SEQ ID NO: 34926 - DNA, 268 bp, Glycine max
  unsure (1)..(268): unsure at all n locations; Clone ID: 701108546H1
gtttaaacctaattctcatttcttcatcgttcgattcttctcctcctaaagatgcagatcttcgtgaaaactttgaccggtaagaccatcacccttgaggtggagtcctccgacaccatcgataacntgaaagctaagattcaagacaaggaagggatcccacctgaccagcagagactanctttgcgggtaaacagcttgaggatggtcgaaccctgccgactacaacatccaaaaggatccactctccacctcgtgcttcggctcc

SEQ ID NO: 34927 - DNA, 273 bp, Glycine max
  unsure (1)..(273): unsure at all n locations; Clone ID: 701108547H1
gtcttgaaccaacccattttgtatccttttccatagactacagtggtcagtgtctgtntctgctggcggtgctttctttccgtctctgggcttcacaacaatgaaaggcttccaatccgatttatcctccgccgttcgcctcaacattggaggcaagaaattttgcaccaccaccgatactctcactcagcgcgaacccgattcaatgcttgccgctatgttcagtggccggccacacgctgtgccaagatcctgacaaggggtatgtgtttg

SEQ ID NO: 34928 - DNA, 276 bp, Glycine max
  unsure (1)..(276): unsure at all n locations; Clone ID: 701108548H1
anaacctagtctgaaaccatagcacaaaatcaaccatgtctccattgattgtngccttggctacaatcgcagcagcaatcctcatatatcgtataataaagttcataacacgcccatccctccccctcccaccgggncctaaaccatggcccatagtgggaaacttgccacacatgggcccggtgccgcaccactccctcgcggcgttgggcncgcanttcacggcccgttgatgcaccttccgctcggcttcgtcgatgtcgtggttgncgcgtc

SEQ ID NO: 34929 - DNA, 265 bp, Glycine max
  Clone ID: 701108550H1
actgaatctaattgcaattcctgtgagccgtggcaaagcttttgaatttagtgcctctcctctctgtttacccttccagatattgcagatacagcaagatcatgagtgggacttcggaaaagaaacttgtaagaatcgatgttagttctgatactgtatgcccatggtgctttgttggcaaaaaaaatctagacaaggccatagctgcctccaaggataaatacaactttgagataatatggcatccctttcaacttagccctga

SEQ ID NO: 34930 - DNA, 266 bp, Glycine max
  Clone ID: 701108552H1
gacactactactggccttgtctctcgcaggttggccctcactgtgctcattggtgctgctgctgttggctctaaggtggcacctgctgatgcagcctatggagaagctgccaatgtgtttggaaaaccaaagacaaacacagacttcctttcatacaatgggaatggattcaaactctcaattccctcaaagtggaacccaagcaaagaggttgagtacccaggtcaggttctagatatgaggacaattttgattcaaccagcaat

SEQ ID NO: 34931 - DNA, 266 bp, Glycine max
  Clone ID: 701108554H1
ggttgggatgatcactggatcttctgggtgggacctttcattggtgctgcacttgcagcactctaccaccaggtcgtaatcagggccattcccttcaagtccaagtgattcaatcaaaccgttcatgcttaatcaagttgggaacaacaaaaaaaatcaaaacaatgtttctgggtttcggtttcatttcatcaagatgatctgtttatcttttttttttaattttaatttaaagtctttgtattttgtatgtaaagatgtaaaat

SEQ ID NO: 34932 - DNA, 270 bp, Glycine max
  Clone ID: 701108555H1
aaagaaccatgaagtctctgaggtccatcttagcaacttttgtggttctattatcaatttcactcactatctcacttccaattgaagaagctttcaaccattgtctaacacaacactctcagactccaaaccaatttccctcatcaatctacacttacaccaatggttccttcacttcaatccttgagtccacagctcaaaatctaaggtacttgttgccctcagtgccaaaacctgatttcatattcaccccactggatgactctcaag

SEQ ID NO: 34933 - DNA, 249 bp, Glycine max
  unsure (1)..(249): unsure at all n locations; Clone ID: 701108557H1
cgannatatggcttcaactcatctacttcccctagcaacctaccttccttacttctctccgctncttatctccagattgctggggcggaagcacaaccgttgactagtctcaaacttaactctcatattcttcaggagtctactgctaaagagattaatgaaaatcccgaggcaggatgggaggctgctataaatcctcgtttctccaattatacagttgaacaatttaagcgcttcttggagtcaaac

SEQ ID NO: 34934 - DNA, 266 bp, Glycine max
  unsure (1)..(266): unsure at all n locations; Clone ID: 701108558H1
aaataataaggtgtggttggggttgggagttagggtagaatcaattgagaatggggatccgattcgtactgatggtgaacaagcaaggccaaactcgtcttgctcaatattacgaatacctcnctctcgaagagcgacgtgccctcgaaggcgaaatcgttcgcaaatgcctcgcccgcaacgaacagcagtgttcctttgttgagcatcgcaactacaaaattgtttatcggcgctacgcctctttgttttttcctcgttggagt

SEQ ID NO: 34935 - DNA, 267 bp, Glycine max
  Clone ID: 701108562H1
gcttgggttctggatgcaacccctggaaaagttcgagcaggtggagatggagaagatcatccagcagaactcatatcctttctaagtacactgccaaatgaggttccttcaaaatgggatgttctcagagctcttattcaacaaggattttccaatgatgtggcacagtgggttgtgactaacctgcgaccttccagctctcctggttcacaatcatcaagcttctcatgggtgtttgacctaagggggattgcagaaatgtatcaa

SEQ ID NO: 34936 - DNA, 271 bp, Glycine max
  unsure (1)..(271): unsure at all n locations; Clone ID: 701108563H1
cttccattaacgggtggtgcctctcttccatctccccagccaaancctctctcaagaaggccacattaggcccttctgtcttcgcaaccgttagcannnnnnnnnnnnnnnnnnnnnnnnnnnnnnnnnnnnnnnnnnnnctcattcaagacaggcctgtctttgctgcccctgcccccatcatcaccccaactgtgagagaggatatgggcaaaggaatacgagcaagctattgaagaactccagaaattgttgagggagaagagtgant

SEQ ID NO: 34937 - DNA, 272 bp, Glycine max
  unsure (1)..(272): unsure at all n locations; Clone ID: 701108564H1
cgcaaaactcgaactaccctaaacgacgccgcattcaaatttccgccaccgacgcattanccccttccaagccccgacggttcccgagtggtgatggcggaaacgcacgaagacacaccgaaagaaaccgttcacannnnnnnnnnnnnnnnnnnnnnnagcttcgaagagctcggcgtggacgctcgtctcttcgcgccctaatcaagaaaagaatcgagaaactactccaattcagcggtcncgattccactcattcctggnagncaagg

SEQ ID NO: 34938 - DNA, 266 bp, Glycine max
  unsure (1)..(266): unsure at all n locations; Clone ID: 701108565H1
cgcattcaacctttctcttcctcctcactcaaacttcccntctctacgccgttcctcccaaatggatgcaccaatggagttttggggtgttgaggttaaggttggtcagaccgtgacagttgacccaatggatcctgtggattcatacatacacatatctcaggttgcgctcggagaggngaaaaaggagaaacctaatgagtctgtggttttgtatttgaaagttggtgaacagaagattgtcttgggaaccctttctagggatg

SEQ ID NO: 34939 - DNA, 263 bp, Glycine max
  unsure (1)..(263): unsure at all n locations; Clone ID: 701108567H1
caactcctcaagggtgcttcccattcccaaagagccataccacccattttcccatttcccctcaagcatgccaancntttgcatctttgagaatcccttcttcttctgtgtcttgctctctcacaagagactcttcctctgttgtgccattggaggaacatgacaaaatgggtaatgggtcggttctgcttcagagacccgattcgtttgggaggtttggcaagtttggagggaagtatgtccctgagactctgatgcatgct

SEQ ID NO: 34940 - DNA, 265 bp, Glycine max
  unsure (1)..(265): unsure at all n locations; Clone ID: 701108568H1
gttgagaactaagaaggagaagcaaatggcttcctcaatgatctcttccccagctgttaccactgtcaaccgtgccggtgccggcatggttgctccattcactggcctcaagtccatggctggcttccccaccagaaagaccaacaatgacattacctccattgctagcaacggtggaagagtgcaatgcatgcaggtgtggccaccagttggcnagaagaagtttgagactctttcctacctgccagaccttgatgatgcacaa

SEQ ID NO: 34941 - DNA, 263 bp, Glycine max
  unsure (1)..(263): unsure at all n locations; Clone ID: 701108569H1
ctanagtcttcagtttctcctcgttgttcttcgctttcctgtttncaatttcgattctttcgttaatttaataagatgtttgggagggcaccgaagaagagcgataatacgaggtactacgaaatcctcggcgtctccaagaacgcttcgcaggatgatctgaagaaggcttacaagaaagccgccattaagaatcaccccgacaagggcggtgatcccgagaagtttaaagagctggcgcaagttatgaggttctgagtgac

SEQ ID NO: 34942 - DNA, 266 bp, Glycine max
  unsure (1)..(266): unsure at all n locations; Clone ID: 701108571H1
gccggaggtagggtccagcggctggaagagcaccgcacgtcgcgtggtgtccggtgcgcccccggcggcccttgaaaatccggaggaccgagtgcctcccacgcccggtcgtactcataaccgcatcaggtctccaaggtgaacancctctggtcgatggaacaatgtaggcaagggaagtcggcaaaatggatccgtaacctcgggaaaaggattggctctgagggctgggcacgggggtcccagtcccgaacccgtcgggtgtc

SEQ ID NO: 34943 - DNA, 249 bp, Glycine max
  unsure (1)..(249): unsure at all n locations; Clone ID: 701108572H1
tctagatccgtcgaaactatttctacgttgtcctcaaggctgancatgtctgtggctcgttttanacttttcatggcatgaccctgagtaccaccaggagactttggagaatttgaaggctgctatcaagagtactaagaagctttgtgctgttatgctggacacggtgggcgcagagatgcaggttgttaacaaaagtgagaaagcaatctcacttgaggcaaatggtcaggttgttctaactcccga

SEQ ID NO: 34944 - DNA, 263 bp, Glycine max
  unsure (1)..(263): unsure at all n locations; Clone ID: 701108573H1
cgcagacgaggagcagcctcaggaggagaaggatgtctcacaggaagttcgagcacccaaggcacggttcactgggatttcttcccaggaagcgtgctgctcgtcacaggggaanagtgaaggcattccccaaggatgacccatccaaggcacccaagctcactgcattcttgggttacaaggccggtatgactcacattgttagagaggtcganaagccaggatcaaagttcacaagaaggaacttgtgagctgttacaatt

SEQ ID NO: 34945 - DNA, 264 bp, Glycine max
  Clone ID: 701108576H1
ggagctgctgcagtcattgttggttctgacccaattccacaagttgagaagcctttgtatgagcttgtttggactgcacaaacaattgctccagacagtgaaggtgctattgatggacaccttcgtgaagttggactcacatttcacctcctcaaggatgttcccgggattgtctcaaagaacattgataaggcactttttgaggcttcaacccattgaacatctctgattacaactccatcttttggattgcacaccctggtg

SEQ ID NO: 34946 - DNA, 267 bp, Glycine max
  Clone ID: 701108579H1
atactatgaaaaacatggatatggggtggaggaatttaatgaaaccttatatgatgaatgggttaacaagggcgacgcaccggcattgccagagactcttaaaaattacaacaagctgttgtctcttggcttcaagattgtattcttgtcaggaagatatcttgacaaaatgggccgtaacagaagcaaacctaaagaaggctggcttccacacatgggagcagtcattctcaaggatccacatcttatcactcccaaatgcatttc

SEQ ID NO: 34947 - DNA, 268 bp, Glycine max
  Clone ID: 701108580H1
gctgattttgcattgtggaaggctgctaaaccaggtgagcctagctgggacagcccttggggtcctggaagacctgggtggcacattgagtgcagtgcaatgagtgcttgttatttaactcataaatttgatatccatggtggtggaattgatttaatctttcctcatcatgaaaatgagattgcacagagctgggctgcagaccatgatagccatgtcagttattggatgcataatggggcatgtcactaataacatgaaaagatgt

SEQ ID NO: 34948 - DNA, 263 bp, Glycine max
  unsure (1)..(263): unsure at all n locations; Clone ID: 701108581H1
gtttggttcagcattcgtgggggaagataagagaactcacaccatatccgttctcgctcctctacgaattttcatatccattcatatttttctcatcatggacttggccgcgaactttcaccgtttagacctcaccggcgtggtcattttggacgcacgaaagccctccgtactccgccaccttccgccacgcatcctcacnaaaacaaacaccaatttaatctacacgaaccggttctngggcccaccgaggcccaattccg

SEQ ID NO: 34949 - DNA, 259 bp, Glycine max
  unsure (1)..(259): unsure at all n locations; Clone ID: 701108582H1
cttgtttgcaggtcttttgtgaattngcnttgggaattagatgaacttgaggtaatgaattaactctgtgctgattgtagtttagaacatgtcagattaagtcagctantcgttgcaattttaaaatcattgtcatccttttnaaattattgatgatgctgacgttattttgcaggaaatttaagggaccatttggtatgagaaaatatatatatatatcttnttcnacttttaattacaaaatgctacctgttttcat

SEQ ID NO: 34950 - DNA, 262 bp, Glycine max
  Clone ID: 701108583H1
aaaaaaaacccttagccaacacaaccatcatggccacctctgctattcagcaatcagcattcactggtcaaactgctctgaagcagctcaatgagttcgtccgcaagaccggtggcgccggcaaaggtcgcactaacatgcgccgcaccgtcaagagtgctcctcagagcatttggtatggccctgaccgtcccaagtacttgggtccattctcggagcagattccatcatacctgaccggagaattccctggtgactacgg

SEQ ID NO: 34951 - DNA, 260 bp, Glycine max
  unsure (1)..(260): unsure at all n locations; Clone ID: 701108585H1
actaaactggtaaacatttgtngtagtggttgaaaagcattttctcttactttccnatatcccangctgaccaantacaagcttcaccntgttcagttgttcacatagatagcttcagttgttttagtagagtaactagtttttacttaatttgacttttgtcatgtgctgaatttcacttaaatgaagttaatggatttcagattgtttgtatgctaggtatgaagttgacacagatgcatttcttctgttttagccct

SEQ ID NO: 34952 - DNA, 263 bp, Glycine max
  Clone ID: 701108586H1
acttcccttctccaacatgccaaacgacagcgttctgagtcttttcttcttcgttaccctcttcacatgccttctctctgctacttcccacgatgaccatattttcctaccgagtcaactccatgacgatgactcagtgagttgcactgcaaccgacccaagccttaactacaagccggtgatcggaatcctgacccaccccggcgacggtgcctctggccggctcagcaacgccaccggggtttcttacatcgccgcctcct

SEQ ID NO: 34953 - DNA, 264 bp, Glycine max
  Clone ID: 701108587H1
gacaattcttattcttttctctctctcttgcgccgcttcacaagccaaacctaacttgtctctagattctctctgcattctctctgcattgtccgatcaatggccggaaaaggagatggtcctgctattggaatcgatctcggcaccacatactcctgcgtcggagtgtggcagcacgaccgtgtcgaaatcatcgccaatgaccagggtaacagaaccacgccctcttatgttggtttcaccgattcagagcgtttgatcggt

SEQ ID NO: 34954 - DNA, 246 bp, Glycine max
  unsure (1)..(246): unsure at all n locations; Clone ID: 701108588H1
ttcattctctcttttacaccacttcacacttctagtgaaatancctgatncaattaatggctcactatttctttttgtttgttttggtgtttgccagccaactgatggctggattcaatgcaccgctaccgctaccatctccgtcatatggaaatcatacaaccattctcagcatagacggtggtggtatcaggggcattattcctgcgactgttcttgaatacttagacaaggctcttaaggcta

SEQ ID NO: 34955 - DNA, 263 bp, Glycine max
  unsure (1)..(263): unsure at all n locations; Clone ID: 701108589H1
aaaatgaaggtccttgttttcttcgttgctacaattttngtagcatggcaatgccatgcgtacgatatgttccctctccgaatgaacactggctatggtgcccgtactccggaggtgaaatgcgcaagttggaggcttgctgtggaagcacacaacatcttnggctttgagaccattcctgaagagtgcgttgaagcaacaaaggaatacatccatgggcgaacaatatagatcagactccaaaacagttaaccaacaagctt

SEQ ID NO: 34956 - DNA, 265 bp, Glycine max
  Clone ID: 701108590H1
ctcaggcgctgctgcccttcagtccttcagcaatggtttacgtgaagtcacagaaatcaaaagcctacttcaagaggtatcaagtcaagttcaagagaagaagagagggaaaaaccgattaccgtgccaggattcggttgattaatcaggacaagaacaaatataacaccccgaaatatcgctttgttgttcgtttcagcaacaaagacattgttggcacaaataatatctgctagcattgctgggcgatattgttcttgctggc

SEQ ID NO: 34957 - DNA, 262 bp, Glycine max
  unsure (1)..(262): unsure at all n locations; Clone ID: 701108591H1
cttcgttatccttctttttttctccttgaactcgaatattcactatngcagatgaggtggttctgctagatttctggccaagtccatttgggatgagggtcaggattgcacttgctgaaaagggtatcaaatatgagtccaaagaagaggacttgcagaacaagagcccttgctcctcaaaatgaacccggttcacaagaaaatcccggttctcatccacaatgggcaaacccatttgtgaatctctcgttgctgttcagta

SEQ ID NO: 34958 - DNA, 262 bp, Glycine max
  Clone ID: 701108592H1
aaaaccagaagaaaaagaagaagcgccaatggccaagggtcgcaaattccccaccacgacccgaaccgaccgcttcttgggaatgggaacctactcctcccaagcctccgccgccacagacctgtcggagttccgggaagaggacgtgtggtccacgtcggaagaccgtgacagagatgtgaatgcctaccccggcgagtgggaggcactcgcgccgccgcgtcgtcggagcagcagggagctgcaggggcacgccacgtgg

SEQ ID NO: 34959 - DNA, 262 bp, Glycine max
  Clone ID: 701108594H1
ctcgaacctttgtgaccaaggttgagaaacgctcactggtgggctatgagtttgagatatggcagtgtggtcttggttgctttagtgcttctgccacacatggcttctgctgcttcaattgtgaagaacctaccgggttacaagggtgatcttccattcaaacttgaaactgggtacataggagtgggagaagaagaagaggtgcaaatatttcacttatttgtggagtctcagagaaatccattcattgatccactgttaa

SEQ ID NO: 34960 - DNA, 264 bp, Glycine max
  Clone ID: 701108595H1
ctcagagatgtttgttgcatcccttgcttgctcttgcacttatccctcccttttgttgcgatctttgtgtcccacatttacttcgtggtcttatcagctcaagcaactcaacagaaagaagaatcgcattttggcatccatcaatggtaacagtgcctacgatgtgggcggaggatatccggaattggagcagaatcagaatggaaagttgcattcagacatgtcttctcaacgcgaaccctccttaaaggaggggaccaagtc

SEQ ID NO: 34961 - DNA, 263 bp, Glycine max
  unsure (1)..(263): unsure at all n locations; Clone ID: 701108601H1
gtggtactattcccgaatagcngcaagcaaggcaaggcgtgtgtccgagcagagcaggagtgaagganaaaaggacccttgtccgtccagtccttattctcttttctcctccctccctcacgcaaccgccaattcctgaaccctaagctagcgccatggctgtcgtttcgcgaagtgcgacgacctatacgcgccactacttaatacgacacgagtttgataggaaaacgaaaacctgcgttgccaataatagtttgtgttat

SEQ ID NO: 34962 - DNA, 255 bp, Glycine max
  unsure (1)..(255): unsure at all n locations; Clone ID: 701108603H1
gctgctatagcggctggcgctagagaagtagctgtttttgcatcagcttctgaatctttctcaaaatcaaacattaattgtagcatagaagaaagccttgtccgctatcgagctgttactcgggctgctaaacagctctctattcctgttcgagggaactgtagttccaatgcttttggctgtaatggctgttgtgccagcagagaagctgctgtccacttccatgacacttatgggtnatcccttccaaatatt

SEQ ID NO: 34963 - DNA, 136 bp, Glycine max
  unsure (1)..(136): unsure at all n locations; Clone ID: 701108604H1
aattcactctgtacaattcttcgttcgttctctgcagttatatcctttttgagcttcaatggcggacgctgaaaccttcgctttccaggctgagatcaaccngcttctaagtctcatcatcaacacattctacagc

SEQ ID NO: 34964 - DNA, 238 bp, Glycine max
  unsure (1)..(238): unsure at all n locations; Clone ID: 701108607H1
caggagtccttccttgtctgttaacactgtgtaagcagtnattcgattctgcgaactgagattcgcatcgccaattcaaaagcgttcgttcgtcggagatggagacgctaccgacgacgacgacaaagcgaggaggagcgagatcgaagcccgttcagacctcgaaatcgtctctcgttatggccttcttctcctgcgtcgcgtggctctacgtcgccggaagttatggcaagacgca

SEQ ID NO: 34965 - DNA, 259 bp, Glycine max
  Clone ID: 701108608H1
caaaattacaaaaaaaaagtcctcgattgtggtggctactctctctttagtatttcactcaatttggagtgcttcttagtccaatagctcttaagccggttggccccttgcttcttgactcaaattcttcaagatatggcaccattcctcctttccaattccctatatggcaactcacaagcaaggaaacaaagagacaagcaataaccaaagaaaaaaaatgaaatgaaagctaaaccaatagagttttaacaagaca

SEQ ID NO: 34966 - DNA, 260 bp, Glycine max
  unsure (1)..(260): unsure at all n locations; Clone ID: 701108609H1
ggttcatcgtcccactttcttctccttttagggtttcctttttgtttcttcctttccagatctgcatgcttccnnntttttaggattaagcggtgagattcgtgaatctgagaaatgtcggattcttctcgggaggagaatgtttacatggcgaaattggcggacaggccgagcgttacgaggagatggttgagttcatggagaaggtagcaaagactgtggaggttgaggagttgacggtggaggagagaaatcttctc

SEQ ID NO: 34967 - DNA, 262 bp, Glycine max
  unsure (1)..(262): unsure at all n locations; Clone ID: 701108610H1
ctcaaagaaaagccaccttaacatctcttctctgaaaattctctttagagagatagagagaggaagaaagaatggcagcttgcactgtctactcaacacaatctctgagcnccaaattgctccatctcaaccccatcaaagacgcaactcagttttttccaccaaaagcaggtagtctttctggaggaacagcaagaagggcagctgcagcagcagaagaagctatgtgataacatgtgcagcaggtgactcacagacagtg

SEQ ID NO: 34968 - DNA, 261 bp, Glycine max
  unsure (1)..(261): unsure at all n locations; Clone ID: 701108611H1
gttganaganaagggggaaatctcttttgttctatgtctctntgaagacagctncaaagcgttaaactgcttcttcttcttcaatgggcggcagaatcatctcgcagtagcgctaaacgcccctttatggaagaagacgacgacgaattctccaaaaagccaccagcaaaaagggttnggtttccaaagggaaagaaagtgaagccaggagatgaagtggtggtggacaaagcaatgttgaggagggtgaagaagttgact

SEQ ID NO: 34969 - DNA, 257 bp, Glycine max
  unsure (1)..(257): unsure at all n locations; Clone ID: 701108612H1
cggcattgcgcttcacaaattctcagnctacgacttgggtgttggatttcattaagttgtgataaacatgggaaaagactcaaagccaaaggagtccggaggcaagggaaaggggaaacaggctgcaagtggaagtgatgagaatgcttctaagggaaaaggaaaaggtgggaaaggtggagatgggcttggtacttgcacctatgtcaaagctaggcatatcctatgtgaganacaaggtaagatcaatgaagcct

SEQ ID NO: 34970 - DNA, 248 bp, Glycine max
  unsure (1)..(248): unsure at all n locations; Clone ID: 701108613H1
ctcaacttcattttcctttcaaatagtaacactagagacnccaagctctgggctagaacttgtaatgtatatgcaagccatcatcattcagaacaattagtgcatcatcctccttcaactgaagaactttatttaatttgctcctaaaatattttgtcagaggatgtggtgcagtaatccttgccattccttctttatttttaagcttacagcatctgcaatcatctcttattattacttcaaagtgg

SEQ ID NO: 34971 - DNA, 258 bp, Glycine max
  Clone ID: 701108614H1
agttaatctatctgcaacagcaacattgtgacagtgacagtgtcgtaggatggagaaggtggtatgtgtgaccggcggcagggctgcattggttcatggctcgtccatctcctcttggatcgcggctacaccgttcacgccaccgtccaaaacctcaacgatgaagccgagacgaagcatcttcaatccctcgacggagcgtccacgcgcctccgcctcttccagatggatctcctccgccacgacaccgtcctcgcc

SEQ ID NO: 34972 - DNA, 246 bp, Glycine max
  unsure (1)..(246): unsure at all n locations; Clone ID: 701108616H1
cttggcagcagaaagaactcaaagacagagatcatcatggncgaggggaaagactcagatacaagcgtatagagaacgccacaagcaggcaagtaactttctcaaagcggcgaaatgggttgctgaagaaggcctttgagctatcagttctgtgtgatgctgaggttgctcttatcatcttctcttcaagtgggaagctctatgaatttgctagctccagcatacagtgttcaattgaacgatacc

SEQ ID NO: 34973 - DNA, 258 bp, Glycine max
  unsure (1)..(258): unsure at all n locations; Clone ID: 701108617H1
cgcncgacnnaggcacagagagannatggtttcggggtcagggatctgtgccaagagggtaattgtggacgcacgacaccacatgctggggaggctggcatcgatcgtggcgaaagaacttctgaatgggcagaaggtggtggtggtacgctgcgaggagatttgcatctccggtgggctcgtcaggcagaagatgaagtacttgcgtttcctccgcaagcgcatgaacaccaagccctctcacggccccatccattt

SEQ ID NO: 34974 - DNA, 255 bp, Glycine max
  unsure (1)..(255): unsure at all n locations; Clone ID: 701108618H1
ctttctctctctctgactcgaaattttgcagatctggaaatggcgncggcaacgtaccctccaccgccaccttattacagactttacaaagattacttgcaaaaccctaagtctgctcccgaccctccaccgcctattgaaggcacttatctttgttttggagccaattacaccactagtgatgttctaccaaccttggaagaacaaggggtgcgccagtctattctaagggccctaatgttgatttcaagaagg

SEQ ID NO: 34975 - DNA, 244 bp, Glycine max
  unsure (1)..(244): unsure at all n locations; Clone ID: 701108619H1
catcactagaagtgttgggatgcatttctatttctaactaattattgtgcntattattattgttgagaaagaaaagaatggcaaagttaataaaattctttgagttgaacacaggggccaagattccttctgttgggttaggcacttggcaagctgagcctggtgttgtagccaaagctgtcaccatngccattctggttggatacaggcatattgattgtgctcaagcgtataacaatcaagc

SEQ ID NO: 34976 - DNA, 255 bp, Glycine max
  Clone ID: 701108621H1
tctcaagtccaacctacccctttttcttctcccaccaacttcaccgtcttcttcctcgatcatgtctcacttcaagggcaagtaccatgatgagcttattgccaatgctgcttacattggcactcctggaaagggtattcttgctgctgatgagtcaacagggacaattggcaagcgtttggccagcatcagtgtagagaatgttgaatccaacaggcgtgctcttagggagctgcttttcaccgctcccggtgc

SEQ ID NO: 34977 - DNA, 255 bp, Glycine max
  unsure (1)..(255): unsure at all n locations; Clone ID: 701108622H1
ctcgatcaaacacaaaatggaaaagaatgtggggattctcgccattgacatctacttccctcccgcttgcnttcagcaggaagcattggagactcatgatggtgccagtaaagggaagtataccattggacttggccaagactgcatgtcattctgtaccgaagtagaagatgtcatctcaatgagtttgacagtggttacttctcttcttgagaagtatgggattgatcctaaacanatcggtcgtctggnatt

SEQ ID NO: 34978 - DNA, 257 bp, Glycine max
  unsure (1)..(257): unsure at all n locations; Clone ID: 701108623H1
taagcggtggacnaggcctacctgagccactgcttcgcccccgccggcgangtggtctccatcaaaatcatccgcnacgagctcacgggccagcccgagggctacggcttcgtcgagttcgtctcccacgccacagcggaaanggttctccagacctacaacgccancgaccagaccttcaggctcaattgggcctccttcggcatcggcgagcgcaggcccgatgccgccctggaacactccatcttcgtcggcga

SEQ ID NO: 34979 - DNA, 257 bp, Glycine max
  unsure (1)..(257): unsure at all n locations; Clone ID: 701108627H1
attganttctccagagagaagaagaaacttaatcgatcatcacttcacttcactaatacatcatggcagacgagnncccagaacaagtatgagagctctgaggttgaggtccaggatcgtggtgtttttgactttctcggtaagaaaaaggatgaagaagacaagcctcatcctcaggaggaggtcatcgccaccgagtttcaaaaagtcactgtctcagaccaaggagagaacaagcacagcctcttagaaaagct

SEQ ID NO: 34980 - DNA, 255 bp, Glycine max
  Clone ID: 701108628H1
caagatgccgggtcaagcaagaatccatttatagatcatgatgattcttctggtagcaacctttctactaccaaacctcaaataggtagccctaatcctagtcctccttcgaatggggaatctgttccttcaaacaggtcgccaactaaagattcgattgatgggggtgttgatttgaatcaaagagcagtagcagtaccatcactctttgaagaagatgttgaatttgtaggtgtagaattagaaggtactgag

SEQ ID NO: 34981 - DNA, 254 bp, Glycine max
  unsure (1)..(254): unsure at all n locations; Clone ID: 701108629H1
cttctcttgcggctagggttttagcgcanttctttctagatttaaggaagatgggtaaggaaaaggttcacatcagtattgtggtcattggccatgtcgactctgggaaatccactaccactggtcacctgatttacaagcttggaggcattgacaagcgtgttattgagaggtttgagaaggaagctgctgagatgaacaagaggtctttcaagtatgcctgggtgctggacaaacttaaggctgagcgtgaa

SEQ ID NO: 34982 - DNA, 255 bp, Glycine max
  Clone ID: 701108630H1
ccagtagtcatatgcttgtctcaaagattaagccatgcatgtgtaagtatgaactaattcagactgtgaaactgcgaatggctcattaaatcagttatagtttgtttgatggtatctactactcggataaccgtagtaattctagagctaatacgtgcaacaaaccccgacttctggaagggatgcatttattagataaaaggtcaacacaggctctgccgttgctttgatgatcatgataactcgtcggatcgc

SEQ ID NO: 34983 - DNA, 261 bp, Glycine max
  Clone ID: 701108631H1
tgctgtctctcgtgttgatgattactgggcatcattgggcaagatgtgtttgctggagcttcttatagggatgataattgcttcattttgttacttacaattctttccacctccatatgacgtagatggttggggacctcatgcatatttccagatgttggctgaatctcgtaatggtgctcagccctctactgtcaataatgagattcatcatgtgcaatctgctgagctcaggctgtatctttgtatatcccacctcaa

SEQ ID NO: 34984 - DNA, 236 bp, Glycine max
  unsure (1)..(236): unsure at all n locations; Clone ID: 701108633H1
gtaatctaacaaagtaagcacaannagggagatattgcccgtgcaaggtgggcaatgcgggaaccaaatcggttccaagttctgggaagtgatatgcgacgagcatggcatcgnccccaccggaaagtacaccggcgacgaggcctccgatctccaactggagaggatcaacgtctactacaatgaagcctccggcggaaggtacttccccgggccgtcctcatggatctcgagcc

SEQ ID NO: 34985 - DNA, 255 bp, Glycine max
  unsure (1)..(255): unsure at all n locations; Clone ID: 701108634H1
gggccatacattcccaaagaagaacgtggcctctctgctaaaccccttatcgtgctccaaaaatggcttcttctatcataggcntttcctccatttaccaaacaccccctctcgaactataccagaggccaagcactgcttccanttcctccgttaggttgcaatctttagactccaagtctcacttcaacaanctcctccnnnnncncngnnactncactngtncggncctcangcctacaccgtctttngncc

SEQ ID NO: 34986 - DNA, 252 bp, Glycine max
  Clone ID: 701108635H1
agcgaaacgcatagaatcgaaagaggggaaaagaaaaagaaaagttagggttagggattttgagagatggcatcgactaagaagatcaccctgaagagttcggacggtgaggccttcgaggtggaggaggcggtggcgctggagtcgcagacattcaagcacatgatcgaggacgactgcgccgacagtggaatccctctccccaatgtcaccagcaagattctggcgaaggttatcgagtactgcaagaag

SEQ ID NO: 34987 - DNA, 254 bp, Glycine max
  unsure (1)..(254): unsure at all n locations; Clone ID: 701108636H1
ccnagcggaatcaagcaatggcncttccatctccaccggncctcgnagcngagttaaccactctctcttcctcatattcccttatcatccgttggtagctcatacctgcaaacagggcaagaatttcgagaactcaaccaaggaacaatgcaatctccatgatacccatgcccgcacggcaacctcttcgccaagtctccaacaccgagcaaatccttacatatagcgcacgccacggcttcgctttcggacgg

SEQ ID NO: 34988 - DNA, 244 bp, Glycine max
  unsure (1)..(244): unsure at all n locations; Clone ID: 701108637H1
tgaanctcagaattctctagaagagatctttttctgctcctttgaagaaagaagggtcttgcttgattttggagatgtctctgctctcagatctcatcaaccttnacctctccgatancaccgngaagntgatcgcagagtacatatggatcggtggatcaggantngacctgaggagcaaagcaaggactctcccaggaccagttagcgacccttcagagnttcccaagtggaactatgatgg

SEQ ID NO: 34989 - DNA, 252 bp, Glycine max
  Clone ID: 701108638H1
attaaaccaaccatactacaccagacactcctcctaaccttcaataattctcttctcacccttataaaaagaaactcattttaactcagactttgcatttcaccttatctatctatcttttctaacatggctgctgggactggactctttgcagagattttggatggagatgtgtacaagtactatgctgatggagaatggaagaaatctgcttctgggaaaagtgttgccatcatcaaccccactaccaga

SEQ ID NO: 34990 - DNA, 256 bp, Glycine max
  Clone ID: 701108639H1
cttctccgcctccttcaaaatcgtcatcaatttcgcgtctttctttctcaattctccttagattctccaattgggtcttcaaaaatgcggatgagttgcaatggatgtcgagttctgagaaaaggttgcagtgaaaattgcagcatcagaccctgtttacaatggatcaaaagcccagaatcccaagccaatgctactgtgtttctcgctaagttttatggtcgtgctggtctcatgaacctcgttaacgcaggcc

SEQ ID NO: 34991 - DNA, 256 bp, Glycine max
  unsure (1)..(256): unsure at all n locations; Clone ID: 701108640H1
gcnttccaatcgctcccaaaatcttttctaatttgttcatnactcaataattnctcatcatgggctccttgattgttccaggtgaacatgatcacaaactaaagcttgtttctcttccctttgtatcaaccagtncacctcattcccgtagtagacatagctaggctctttgccattcatggtgttgatgtcaccataatcaccaccacagccactgccgccattttccaaagctctatcgatcgcgaccgtgacc

SEQ ID NO: 34992 - DNA, 255 bp, Glycine max
  unsure (1)..(255): unsure at all n locations; Clone ID: 701108641H1
gcagcatcagcagaagcagaagaagcagatgttagagccatggacataaccccaacaacaacgatcanncacaccagnaccactcncagtgcaanaaaatccccggaacatgaaacnaaacaccgaccaggatcaccacccccatcactcccacaacgacaaaaacnntatctttctcgaatggtgtcctcaaacgccaccaccancctatgcctgcggtggttacctacaaagaatgcctcaaaaaccacgccg

SEQ ID NO: 34993 - DNA, 251 bp, Glycine max
  unsure (1)..(251): unsure at all n locations; Clone ID: 701108642H1
agcagcatgtcttcctccggctatagttgttgcagatctcggatgttgtaaanttagtgtatgatgtgaagctatgggctggaaaatgtggatgtaggagatttcgggacgaaaggcctcaaaacgcttcgtcgtttgtggttactgagtcctgagtgatcttgtcatccgacctttgccatgacaggtgcgcttgcttggcaggtcaaaatatgttaataaaaaaagttttattggtttagggagagatc

SEQ ID NO: 34994 - DNA, 253 bp, Glycine max
  unsure (1)..(253): unsure at all n locations; Clone ID: 701108643H1
ctaatttctctcttctctgaagctatcagaggctagagttctcctattcagtatctcatgtgcttcaaagaatggctgttagctttactgggcttgacatagaaggcagagaccagacagaagagancatgacaatatgacatctatctagtggagtaataatttatttgtgatggatganactgaagtggaaaatcccatattcatggaaattaattctgaagataagagaaatgaaaatcaagagtttgcc

SEQ ID NO: 34995 - DNA, 251 bp, Glycine max
  Clone ID: 701108645H1
gggaatcctctctgtgtgtgatgagccacttgtgtccgttgacttcaggtgcactgatgtgtcctcaaccgttgactcctcgttgaccatggtcatgggagatgacatggtgaaggtcattgcttggtatgacaatgaatggggctactcccaaagggttgtggatttggctgacattgttgccaacaaatggaagtgagagccaaacaaattctcattggtaattaaattatgtatgtaccatgccattg

SEQ ID NO: 34996 - DNA, 254 bp, Glycine max
  Clone ID: 701108646H1
tttccttccatccacttccctcattggttctcttggtccattatagtttgcagtgttcctccaaggttttgatctcaatccattacaaactagacaacctaatatccgttgctttcagtggaatgaagatgtaactcatcagggaacggaaatgccttcatgatgggctttgggcccaaacacagccgacttaataaagatcaacaaagcaccaagtatctcaatgatgagattgaggaccctgcccctcacaa

SEQ ID NO: 34997 - DNA, 253 bp, Glycine max
  unsure (1)..(253): unsure at all n locations; Clone ID: 701108648H1
caaagctgaagtgtctgcntcttccgattccggcacgcccccatcaccatggtncnacgttccgaaaacaaagaagacatactgcaagagtaaggngtgcaggaagcacaccctgcacaaggttacccaatacaagaagggtaaagatagcattgctgcccaaggaaaacgccgttacgatcgcaaacaatctggttatggcggacnaactaagcccgtcttccacaagaaggtaacctctcgttaacctaag

SEQ ID NO: 34998 - DNA, 252 bp, Glycine max
  Clone ID: 701108649H1
cagccatgtcgatcttttctattccctcaccaacgtaccgttgttcaatttcaatttcaatttctcggcagccattgccatgttctttcacggctcaagtgagaagaagagggaaagggaaagtggtaatgagcatggaggcaggcattggagtgatgggcaccaagttgggtatgatgagctatttcgaatccgacggagaggttgttcctgtcactgtcgtgggtttcaaagaaggcaacatcgtcaccc

SEQ ID NO: 34999 - DNA, 250 bp, Glycine max
  Clone ID: 701108650H1
cctctctgtatctttggttcagcagccattagcgatttcccttatctctctccatcttaactccaagcacaagaatcatcttcccatttcgtttctgaccaatggcttccctcactgtcccaaaccattgtgttcccactttgcttcgcactcactctctcaactacccatcttcccaaaacctcccacttccttccgcgccatcaaattctcaattttttggcctcaagctatctcattcttccttttc

SEQ ID NO: 35000 - DNA, 248 bp, Glycine max
  unsure (1)..(248): unsure at all n locations; Clone ID: 701108651H1
ggccttttttgtgctcttcacctttcactccacggnatcaaaagcangtgctaagaagttccgtgttcctattctcaaacctgtagcaccaaacccaagttgtcatccaagttttataatactacatatattattattatacgatacataacaatagtattaatattgttgtgattgtgtgtgatttttggtgtagtccttttttcttatattaaggtggtacggagcttatatgtgttgattcaatt

SEQ ID NO: 35001 - DNA, 249 bp, Glycine max
  unsure (1)..(249): unsure at all n locations; Clone ID: 701108653H1
gttgatttctcagctccgtgcagagcatcagaaggagggctgtactgctggaattgatgttatttctggctctgttggagacatggctgaacgggggatatgcgaanattcaaagtcaagcaagctgtattgctatcttcaacagaggcagctgagatgatccttagagttgatgaaatcatcacgtgtgctccgaggaggagagaagaccgaatgtaaaatatcctgagggtccaactttggatgatt

SEQ ID NO: 35002 - DNA, 249 bp, Glycine max
  Clone ID: 701108654H1
atgaatctgatcagggcaaagagcattgagaaaggttgggacttgaagttgggggaacttgcaaggatttggaaagggggttgcatcataagagcaatatttttggacagaatcaagaaagcatacgacagaaatcctaaccttgcaaaccttcttgtggatccagaatttgcaaaggaaatagtggatagacaatctgcatggagaagagttgtgtgtctgctatcaactatggcactagcacaccag

SEQ ID NO: 35003 - DNA, 250 bp, Glycine max
  Clone ID: 701108655H1
aaagcttatgccacaaggacaatcctgttcttgaaagacgatggatctttaaagccacttgctatcgaattaagcaagcctgcaacagtgagtaaagtggtgttgcctgcaacagaaggtgttgagagtacaatttggttgttggccaaggctcatgtcattgtgaatgactctggttatcatcagctcataagccattggttaaatactcatgcagtgatggagccatttgccatagcaacaaacaggc

SEQ ID NO: 35004 - DNA, 235 bp, Glycine max
  unsure (1)..(235): unsure at all n locations; Clone ID: 701108656H1
ggcagtcgcaatntccttgcttagtacctcatgtggcgccatccccacccgtcaaagtcnaagcacaggaaattcgggtatgcaccaaccgcacctgccgcagacagggctcatttcaaaccctagaaactctatctggcctcgctcctccaaacgtcgccgtgaagtcctgcgggtgcttggggcggtgcggtggcggtcccaatctggtggtcctgcctgatggcctcatcgt

SEQ ID NO: 35005 - DNA, 250 bp, Glycine max
  unsure (1)..(250): unsure at all n locations; Clone ID: 701108657H1
cgacttttgatcgaggactatccttatgcttctgatgggctagagatannggatgctatcaagtcttgggtggaagaatatgtctcattctactacaagtcagatgaggaacttcaaaaagaccccgagctccaagcttggtggaaagaacttgtagaggtgggtcatggggatttgaaggntaagcgctggtggcaaaagatgcaaactcgtgaagagttggttgaagcttccgctaccctcatatgga

SEQ ID NO: 35006 - DNA, 248 bp, Glycine max
  Clone ID: 701108658H1
gaaggtgctgcttattggagggggagatggtggaattcttagggaaatatcacgccattcttctgttgagcatattgatatatgcgaactagaccaaatggtcattgatgtttattcggagtttttcccggatatagctgttggttacgaggatccccgagtgcatgttcatatcagcgatggagttgcgtttatcaattctgttcctgagggcacttacgatgtcatatatcggatgcttttccagc

SEQ ID NO: 35007 - DNA, 250 bp, Glycine max
  unsure (1)..(250): unsure at all n locations; Clone ID: 701108660H1
gttaccttcgattttcctttctctcttgcaaatttcatanctctctttctttctcagccnagcatttctccctttttcgtttccaatttccccttctcttaactcacctatttcgcctccttcgtgtccctttctcttcaaattaaggctcggtagggttaggttaggataggttttcggtgaggcgagagaaagagagagagtatgaggttgagggaggaggtagcgtgtaaaaacgacgacgtttgtg

SEQ ID NO: 35008 - DNA, 235 bp, Glycine max
  unsure (1)..(235): unsure at all n locations; Clone ID: 701108662H1
gggtgcatcagcccttgacaatggcaatggtggcggaatacaccggaatctgacagtgaanacaactcctcaaaaaccaacaatcctcaaaccctcaatgaaacggcgccgtttcttgactacgctcttgcgcaggcccagctttaccacaaggccttcaacgacgccgtcgattcgacaatcgatactgcaaaatcccgtttctcccaaatccgctcaacttcttccgcccact

SEQ ID NO: 35009 - DNA, 257 bp, Glycine max
  unsure (1)..(257): unsure at all n locations; Clone ID: 701108664H1
gnttntatncttgtcaggnagatatcttgacaaaatggccgtaacagaagcaaacctaaagaaggctggcttccacacatgggagcagtnaattctcaaggatccacatcttatcactccaaatgcactttcatacaaatcagcaatgagagagaatctgttgaggcagggatacagaattgttggaatcattggagaccaatggagcgatctgcttggagaccacagaggcgaaagcaggacctttaagcttccta

SEQ ID NO: 35010 - DNA, 248 bp, Glycine max
  unsure (1)..(248): unsure at all n locations; Clone ID: 701108666H1
cggatctcttcttcagtggtggaagctactagaacanctagtttgttgancactgcgatgaggaagtggacggttgcttccgctctccttcttctctctctcctctttctctttgcagatcaaggtcgaaagtttcaggcgaatgccgagggagattccgacgagcttgtagatcctccgaagtggaggacaagatcggtgctgtgcctcatggcctttccanngattcagatgtnnntccagagggg

SEQ ID NO: 35011 - DNA, 247 bp, Glycine max
  unsure (1)..(247): unsure at all n locations; Clone ID: 701108667H1
ctacttcagactctctctctctgagtgcctcaccacacagattcngtgatataccaatggaggccctcaatgctgctggcttgacccctctatctgtgctctctgatagaacaaaaacaagaactaaacacccttctgtttctgcatgcaaagtctcaaacttttccacctccaccaacaagncacaatcattgctgcaaagttgcatatcaaaaactttgcatggggggctgattcttgcagcttc

SEQ ID NO: 35012 - DNA, 243 bp, Glycine max
  Clone ID: 701108669H1
gctgggacttagcatcgatgaggatgacaatggcggagatgatgttgatatgcccccgttggaagaggacggtgctgaggagagcaagatggaggaagtggactaaatgccaaaggtgttgtgttaatgaattgtggatcgtacgatttagtctgttaaatggtacaggatgcataagtcttttagtctttatcttcctgttttgttttttgaaatatattgggttttctttttacttttgtg

SEQ ID NO: 35013 - DNA, 250 bp, Glycine max
  unsure (1)..(250): unsure at all n locations; Clone ID: 701108670H1
gagtttccctccttcatccccttccatggcagcaccttcactctcctccgctctcaactctctctcnnnnnnnnnnnnnnnnnnnnnnnnnnncacctcctcccgccgcttctctctcctccctccaccctcacaccaaccctccaaacccctcttcctcaccctcaaatccaaaccctccgacgacattgacacatcgttcttcgacaacatcaacccgcaagacgacatcacattcaatcccccggag

SEQ ID NO: 35014 - DNA, 248 bp, Glycine max
  Clone ID: 701108671H1
gaaatccttttctctcctctctctccttcccaaggttcttgctgtctacaaggaagttattgctgaccttaaggcagctggtgcttcatggattcaatttgatgagcctacccttgtcttggaccttgaatctcacaagttgcaagctttcactgacgcatatgcagaacttgcacctgctttgtctgatctgaatgttcttgttgagacctactttgctgacatccctgctgaggcgtacaagaccc

SEQ ID NO: 35015 - DNA, 248 bp, Glycine max
  Clone ID: 701108672H1
accagctatacttgttccttttgaaggttagaagtgctacaatacaaacaatggcagctactcaggaagatgtgaagcttttgggtattgtgggaagcccatttgtgtgcagggtccagattgcccttaagttgaagggagttgaatacaaatttttggaagaaaatttgggcaacaagagtgatttgcttctcaaatacaaccctgttcacaagaaggttccagtgtttgttcacaatgagcagccc

SEQ ID NO: 35016 - DNA, 247 bp, Glycine max
  unsure (1)..(247): unsure at all n locations; Clone ID: 701108673H1
tgggcagttgttggcantctatgaacacagaattgctgtagagggtttcatttggggaatcaattcttttgatcagtggggagtagagctggggaagtcgctggctactcaagtcagaaagcaacttaatgcantctcgtactaaaggagaaccagttcagggctttaatttcagtactacaacaatgttgacaagatatctcaggcaagttcagatgtcccagcggatctgccaactgttttaccg

SEQ ID NO: 35017 - DNA, 249 bp, Glycine max
  Clone ID: 701108674H1
ttcagaggcaatcacatccccatcctggactgaaaatggcagaacaacttctaattcctttgccttgcctgagtcagatgacaggccaccaagaaagaaatttaatacatctacttcttcaactaaggaatgtatagattcagaaaactttccttccttcattggtgatccaatacctgatgatgaagctcagaaaagatggggatggcgttatgaattaaaggttgttgacctgattctttcagtatg

SEQ ID NO: 35018 - DNA, 248 bp, Glycine max
  unsure (1)..(248): unsure at all n locations; Clone ID: 701108675H1
gaggaaccgtgttctctaatcttgtaattntctgtgtcgcttcgtggttcattcttctcgtaagttcctctctttactctgtagggtatttttaggattcatgttgtgtgcgtggtttactaattgattcagatatttttgaagagtttattttgttccttaaggtagaatttggggtgccaattttgtgttggatctgtaaatgtttganagtntgaattttggatttgggtctaccccgttgtgga

SEQ ID NO: 35019 - DNA, 249 bp, Glycine max
  Clone ID: 701108676H1
ggctgccaaactcactctatcttctcccctttccttcaaaacttcatttcttccaaaatcaccatcattttctccaggtttatgctcccccagaactaatgttactggtgtcaaagtccatgctaaattaggtggtggagatgaacaagccaagaacggaggcaagaagaaattcataacaagagaggaagaaccacaacagtaacaattcataagttttattttcccattcccataattttctggtga

SEQ ID NO: 35020 - DNA, 247 bp, Glycine max
  unsure (1)..(247): unsure at all n locations; Clone ID: 701108677H1
aaggntctactctactncttcaccttctgctctagaaaattcngtggtgatacatggcttcggctactctctctgtagccaaaccagcccttnaggcaaatgggaaaggcttctctgaattctctggcctccgcagctcatcaggcttccttgccctttctagaaaatcttcagaggatttccattctgtcattgcctccagacctatgcagttggaagcagtggaggatacaagaagggtgtgacc

SEQ ID NO: 35021 - DNA, 252 bp, Glycine max
  unsure (1)..(252): unsure at all n locations; Clone ID: 701108678H1
cgcaacatcatcaacatcacagaggtagagagtaagacgccggcnatgtccgctgtgagagttcaagtttcggcgtgtgcggtttccgccaccgtcaaccaccttcgcctccgccaaaacgccgtccgtttccttcaggaagaagaagcctctcactctcagagtggtctcaatgtcttccgttccctcttncccaaccntcgaaatcgccgttaaagntccgtcaccacacccaacaggctcggcgactgc

SEQ ID NO: 35022 - DNA, 254 bp, Glycine max
  unsure (1)..(254): unsure at all n locations; Clone ID: 701108679H1
gtgccggacagccacgaaaagccgaggctcttctgacttctatgancaaatatggcgtacaaccaaacgtggtgatcttcactaccatcatcagtggatggtgtgccgcaggaaaaatggatcgtgcatttagactttgtgagaaaatgcatganatgggaacttccccaaatttgaaaacttatganactttaatatggggatatggagaagcaaaacaaccatggaaagcagaagagttacttactactatg

SEQ ID NO: 35023 - DNA, 245 bp, Glycine max
  Clone ID: 701108682H1
gttgctgctcatcctccgtaacctccgagctctgcaccgaagaacgaagccatggggaagacacatggaatgggatctgctcgcaagctcaagtcccaccgcaggaggcaaaggtgggctgacaagtcatacaagaaatcacatcttggaaatgaatggaagaaaccttttgctggttcatcccatgccaagggaattgtccttgaaaagataggtattgaggctaagcagcccaactctgccat

SEQ ID NO: 35024 - DNA, 245 bp, Glycine max
  Clone ID: 701108683H1
gtcagacaaactagctgatgttgtccctgaggctttggttctcttctttagccactcacaacaccctttcatgttcttcgcgaagatccttgtttttggttcctcatcaaatactcaacaacaacaccctaataagcaacacctccaaaattcttagttgctgctatgagaaacccattaagcaaaatgggattttttcagttgccagtgacctccaatcttcttctttttcttcttccttcccc

SEQ ID NO: 35025 - DNA, 215 bp, Glycine max
  unsure (1)..(215): unsure at all n locations; Clone ID: 701108684H1
tcttagatctctctctntctctacggcggcacgccgaaaccatgggccggaaaaggaganggtcctgctatcggaaatcgattctcggaaccacctactgcttgcgtcggtgtgtggcaacatgaccgcgttgaaatcatcgccaacgaccaagggaacagaaccacgccgtcttacgtcggattcactgacaccgagcgtctcatcggtgatgc

SEQ ID NO: 35026 - DNA, 243 bp, Glycine max
  Clone ID: 701108685H1
ttcattgaggtggcaaaagagagagccctaccagttggaccagaggaaggtggttttggaatgtcatatgatcttctgtatggacgagctggattcttatggggtgcattgttcgtgaacaagcacctaggagaagatgcagtgcccaaagacattttgatgctattattgatgcggtgttggctggtggtagagcaggagcatctgatattaaagactgcccattgatgtatagatggcatg

SEQ ID NO: 35027 - DNA, 229 bp, Glycine max
  unsure (1)..(229): unsure at all n locations; Clone ID: 701108686H1
cagngaattggattcgcaatattgacgcaacatgcttcagaacnatgttaacaaaatactggnggggaacaaagctgatatggatgaaagcaaaagggtaagcaaactttgtttgcgtttcatgaaaactcacttttatatttttcctcacatctttcaaacacaaatttgacttgaacaacagagttgcagagataagatcaaaggggcttaaaaaaccaaccattac

SEQ ID NO: 35028 - DNA, 72 bp, Glycine max
  unsure (1)..(72): unsure at all n locations; Clone ID: 701108687H1
ggggcatttcctataattcacacttcacacacatacacacatnaacaataatacngtgtcgtttcatccact

SEQ ID NO: 35029 - DNA, 250 bp, Glycine max
  unsure (1)..(250): unsure at all n locations; Clone ID: 701108688H1
cttcattgcantnttgcagatangaatanacncnngctnncananagattngggccnagatggcatnacntcatgcanatgtgacatcagttgtttgcaagagtggcaaccatgcttntcaatcgaanttcacaagctcttcattcttgcctgggtttgntgttgttggncgtgcttcaaatggcttggaagaaagaacntgtccnatcttccatttcctggtgcctagagccacactancanttgatgc

SEQ ID NO: 35030 - DNA, 248 bp, Glycine max
  unsure (1)..(248): unsure at all n locations; Clone ID: 701108689H1
ctttctctcttctctctccccgcccaaaccctaactccctaccctcttccgctttctctcatccatcatgaaaggaggaaagtccaagaccgaatctaagagagccgatgccaaacttgctgtgaataagaagggcgccgccaccaagactaggaaacccgccggaaaggggaaggcagcgaaanatcctaacaagccaaagaggcctccaagtgctttcttcgttttcatggaggaattcaggaagg

SEQ ID NO: 35031 - DNA, 247 bp, Glycine max
  unsure (1)..(247): unsure at all n locations; Clone ID: 701108691H1
tgagatgtgggaagaggcggcgaaggagtatagggngctttnncatggacatgtgtgagcataagctggcacccaatttgccatacatgaagtcgctctttctcggctggttantagcctctgagggatgccattgtcaaggaacaggagatgtatagtgaagggaagaataggatggcctatgcgccatactttgttcagttgccggctgacaagatggctgttatcgcaatgcataagttgatgg

SEQ ID NO: 35032 - DNA, 152 bp, Glycine max
  unsure (1)..(152): unsure at all n locations; Clone ID: 701108694H1
ttcaaattanacttaangngtttactttgaatacaaccaatgcagttcagtgaatacaaactaggcacttcatgcaaagtctaatagtaatnncnagcattggttgtattcaaagtaaactccttaagtttaattttgagatgactcttaat

SEQ ID NO: 35033 - DNA, 251 bp, Glycine max
  unsure (1)..(251): unsure at all n locations; Clone ID: 701108695H1
ctttaacaaacaaagctcgaattataatggtgggaaggtcttggncgagtttcaatagtgatgggagtcgagggttgntccctgataatggattcttcactgcgtgtagtatgctcaagactcagcaaaaacttcatggtatctttgtgtggtgtgctgatgactccaaggcaaatggtttcagctatgagaagcaatcacaggaccttttggtgactgccaattaggttttgaagtagaccaattttaat

SEQ ID NO: 35034 - DNA, 230 bp, Glycine max
  unsure (1)..(230): unsure at all n locations; Clone ID: 701108696H1
gggtagaggaaggtgcttcttggacattagcatagggcaanagctcgaagggagaatagtcgtggagctttatgatgatgttgttcccaaaactgctgagaatttcagagctctatgcactggtgagaaaggcattggtccaaatactggggtgccccttcatttcaagggatcttgctttcatcgtgttattaaaggcttcatgattcaaggaggtgatatatctgctg

SEQ ID NO: 35035 - DNA, 258 bp, Glycine max
  unsure (1)..(258): unsure at all n locations; Clone ID: 701108701H1
atttttcagagttcagattattcttctcttttgaattttgattttgggggtnnaagtttctgagagaaaaaaaaaaatgataaaggtcgttctttttttgttctgctttgcctctgcactgaccctttcagtatcggagtccaaatctgcttctgtgcaacctcatgcagctgaatctttctctgttggatatattcagatgaagactgcagcgaactgttcttacctggtagttatatcnacgagttgttcatcgcc

SEQ ID NO: 35036 - DNA, 246 bp, Glycine max
  unsure (1)..(246): unsure at all n locations; Clone ID: 701108704H1
cccttagccaacacaaccatcatggccacctctgctattcagcaatcagcattcactggtcaaantgctctgaagcagctcaatgagttcgtccgcaagaccggtggcgccggcaaaggtcgcactaanatgngccgcaccgtcaagantgctcctcanagcatttggtatggccctgaccgtcccaagtacttgggtccattctcggagcagattccatcatacctgaccggagaattccctggt

SEQ ID NO: 35037 - DNA, 260 bp, Glycine max
  Clone ID: 701108705H1
gaagtttttagctttagctttgcagagatgtcaggtggtggatgcagcagcatagtgtggttcagaagagatctgaggatagaagacaatccagcactgacagcaggagtgagagctggtgctgttgttgcagttttcatatgggcacctgaagaagaaggacaatactaccctggcagggtctctagatggtggctcaagaacagtttggctcacctgattcctctctcaggaatcttggcactcctctcatcactaag

SEQ ID NO: 35038 - DNA, 260 bp, Glycine max
  unsure (1)..(260): unsure at all n locations; Clone ID: 701108707H1
gaaatgtttgagggatgctaaaatggacaaaagaagtnttgatgatgttgttcttgttggtggttctaccagaattcccaaggttcaacaactgctgcaggacttctttaatggaaaggagctgtgcaagagcatcaatcctgatgaagctgttgcatatggtgctgctgttcaggctgcaattttaagtggtgagggcaatgagaaggttcaggatcttctcctccttgatgtcacccctctatctcttggtttggaga

SEQ ID NO: 35039 - DNA, 243 bp, Glycine max
  unsure (1)..(243): unsure at all n locations; Clone ID: 701108708H1
ggccacgaccacctgggaatgtcaacgaacgaatggaatgncataaaaccaaccaatagcnncacaatctttcttgcacgccattggtgatcacttccgatagctctcacaatcctatggcggagaacaacaacaaccaccaccttgaaaccgccaccagaaggcttgcctctgtgaccaaccacctcactccttcttcttatcacaacgcacccggcnaactcgccccgtgcctcacttccg

SEQ ID NO: 35040 - DNA, 250 bp, Glycine max
  unsure (1)..(250): unsure at all n locations; Clone ID: 701108709H1
ctgttagtgagatgtatgggagagaactggtggacctgcgaaaggagagtnnatgggagtttctcaatacactgttttctgtgtctgaagctgtggcctacatgcagatggttgacagattggatgatgaaactataccagcagatcttgctcttgattataaagggctatataaggctgttggaaaagctctcttctgggcacatgttgaaggtcgtcttaagagtgagatcatgtctaagcctgaact

SEQ ID NO: 35041 - DNA, 152 bp, Glycine max
  Clone ID: 701108710H1
tgtaatataattcttcccgaattccaatcttgttcaaccatggattcagcatctttatgcctttagctgtattatcaatagcaatatttatgtacaaagtttatgtctttttgtgcaaattctgctttagtctcgtgaaattaataaacttt

SEQ ID NO: 35042 - DNA, 260 bp, Glycine max
  unsure (1)..(260): unsure at all n locations; Clone ID: 701108711H1
caacaacaatgatgtccctgctggcagaattccccaacgcttcacaactcctcttttncctcagaagcatgtcactcgttcatctagaagagatgctatttccttcattgtcaaagcagtccaagaaccctctgcttctttaacttctcaagatagacaaagaaggcgccaagtgattgccgttggaaccactgccccattagtttttttgttcaaccaacactcgaactcttttgctgcagaaaataagaaaggatttt

SEQ ID NO: 35043 - DNA, 263 bp, Glycine max
  unsure (1)..(263): unsure at all n locations; Clone ID: 701108712H1
tncanccttatccggagncncccctcactctcngantcattctcgccgttaaacncagccctagccatgggatagtcttcaagccacttacaaagacgaagaagatgaagaagacgagccgcagccttcaaccancaccaaccaccgccgattcacctgaagcccctcccgccancancagnanancctcngnnacnncaaccgaacccccgaacgacgcccgatcggagcccgagccctccgaagatctctccgaggacgag

SEQ ID NO: 35044 - DNA, 260 bp, Glycine max
  unsure (1)..(260): unsure at all n locations; Clone ID: 701108714H1
accatgggctacgctgattgctccttccaaccactctcctgtggaagatgccgaatctctccggaaggctgtcaaaggttggggagctgatggaaaagccatcatagcaatactaggccatagaaatgccacccaaaggaccctaatcagagaagcataccagaatctcttccaagaggatctcatcaaacgccttgagtctgagctctctggtgactttgagagggcaatgtaccgttggatattggaacctgnagacc

SEQ ID NO: 35045 - DNA, 262 bp, Glycine max
  Clone ID: 701108715H1
aaacctaacgcagcatcgctattctcttcattccatgggctttgcccaaccagcaaaccgtggattaccctagtttcaaactcgttatcgtcggcgatggtggcacaggaaagacaacctttgtgaaaaggcatctcaccggagaattcgagaagaaatatgagccaaccatcggtgtggaggttcacccattggattttttcacaaactgtggaaagattcgattttactgctgggatactgctggacaggagaaatttgg

SEQ ID NO: 35046 - DNA, 262 bp, Glycine max
  Clone ID: 701108716H1
acagtatattgcagggagaattgccatgtgatctagagaaatctaatcccacctacaatattttggcacttcctgcgtgtgctggagggtttcaaccaacttgcgcctcgtttgagggtcctaatggtttctgatagctttgccaagggaaaaatcttggatttagatgagctatgtgttacaactggtgctagggtgcttctagaggaatttgtaagtggtaagcttactccaaaattggctaggcaaatacaagatgccc

SEQ ID NO: 35047 - DNA, 265 bp, Glycine max
  unsure (1)..(265): unsure at all n locations; Clone ID: 701108717H1
gagataactagaaacagtgtgatgaaaatgaaggtccttgttttcttcgttgctacaattttngtagcatggcaatgccatgcgtancgatatgttccctctccgaatgaacactggctatggtgcccgtactccggaggtgaaatgcgcaagttggaggcttgctgtggaagcacacaacatctttggctttgagaccattcctgaagagtgcgttgaagcaacaaaggaatacatccatggcgaacaatatagatcagactcc

SEQ ID NO: 35048 - DNA, 157 bp, Glycine max
  unsure (1)..(157): unsure at all n locations; Clone ID: 701108718H1
tntgtaatataattcttcccgaattccaatcttgtncaaccatggattcagcatctttatgcctttagctgtattatcaatagcaatatttatgtacaaagtntatgtctttttggncaantctgcttgagtctcgtgganattaataaacttcttg

SEQ ID NO: 35049 - DNA, 261 bp, Glycine max
  unsure (1)..(261): unsure at all n locations; Clone ID: 701108719H1
ctttgacacaaatgatgatattgattcagtttggggattcaatgctagtancttcactaaggaggagagagatcttgatagagctgggaacaactatttctttgattctggggaactgggcttaaaccccatcaaaacaggttcaccacaggctggtgatttcttccagaggagcagtggattcggttttgatgattctgttccaagcacaccactttacagctcaagtagctctccgcaaaggccaaaagagtggttgga

SEQ ID NO: 35050 - DNA, 260 bp, Glycine max
  unsure (1)..(260): unsure at all n locations; Clone ID: 701108720H1
aaacaactctttctcttcttccttcgctcgttgttctccctcgcgnagatcgacaatggcggagacagagacgtttgctttccaggctgagatcaaccagctcctcagtctcatcatcaacaccttctactccaacaaggagattttccttcgtgaactcatcagcaacgcctccgatgctttggacaagattcgattngagagtttgacagataagagcaagctcgatgctcagccagagttgttcattcatattattc

SEQ ID NO: 35051 - DNA, 258 bp, Glycine max
  Clone ID: 701108722H1
gcgagaagtgctccctcagtgactgccggagaatgatcagcaacgtcgacggcgacggcgacggcaacgtcaacttcgaggaattcaaaaagatgatgactcgctcttaattaggtttaaatcaatagtccaataataagttcattgttcaaaggtacgttcgattacgcatcttcatgttttgttagaaagagctaagaactgcacataaagtagttattaacatgttctctgtacattctctaccgtgacatgtgg

SEQ ID NO: 35052 - DNA, 258 bp, Glycine max
  Clone ID: 701108723H1
cattcacccaatttgcagagttccaagttatatacatacactgcataattaagagaaaatgtctctgattccaagtttcttcggtggccgaaggagcagtgttttcgaccctttctccctcgatgtgtgggagccctttaaggattttccatttcccagttctctttctgctgaaaattcagcctttgtgagcacacgagtggattggaaggagacaccagaagcacacgtgttcaaggctgatattccagggctgaa

SEQ ID NO: 35053 - DNA, 259 bp, Glycine max
  Clone ID: 701108724H1
aatcaacattttttttctatcaattcacacgacaaaatttagcagagttcaaaacaccaaccaagtaaagtaaagaagggaagatgtcactgataccaagtttcttcggtggtcgaaggagcaatgttttcgaccctttctcgctcgacgtatgggaccccttcaaggatttgtctttcccttctgctgaagattcagctttcttgaaaacacgagtggattggaaggagaccccagaagcgcacgtgttcaaggctga

SEQ ID NO: 35054 - DNA, 255 bp, Glycine max
  unsure (1)..(255): unsure at all n locations; Clone ID: 701108725H1
ttagattggtggtaatggcagcgtnactacaagcagcagctactttcatgcaacccaccaagttgagcaggagcaacactttgcagcaaaagtctactcagtccatttccaaggcttttggtttggaacctgttggagctaaaaaggtcacatgctcccttcaggctgatcttaaggacttggctcacaagtgtgttgatgctaccaaaattgcaggattcgcccttgccacctctgccctcgttgtctctgggg

SEQ ID NO: 35055 - DNA, 256 bp, Glycine max
  Clone ID: 701108727H1
aaggaagtctccaaactcaagcgtgctggggaggatgcttctaagttcattactgaatcagaggagaccaaaaaatcgatagcggagaaagaggttgaagtgcgggaaactctgaatctcttgaattccaagttggaaactattggaaacctcgtccacgattccgttccaattagcaacgatgaggccaacaatgttgttgttagatcgtggggagagaaaagagtggagcctaagctgaagaatcatgtggatc

SEQ ID NO: 35056 - DNA, 256 bp, Glycine max
  Clone ID: 701108728H1
caaaagccattgcattgtggtgaatgtttgagtgcagaaggtaaaaaagaaaatggtggtgaagattcgattggcaaggctcgggtgccggaaccacccattctatcgtgtggttgttacggatagcaaaacaacaagagatggcaagcaacttgaagttttaggtttctacaatcccgtcgcaggcaaggatgatgacaaaagaatgagcctcaaactggagagaatcaagtattggctttccgttggagctaag

SEQ ID NO: 35057 - DNA, 256 bp, Glycine max
  Clone ID: 701108729H1
ttgcaaccatgcttcttagaacagcgtcctctttctctctcttcaacgccaacgggaaccatatactactcccttcctctgttcgctactctcagggcaaacacttggttccatgcgctaccaagaactccaataaccggcccttaaccggcgtcgtatttgaaccctttgaagaggtcaagaaggagctcgaccttgttcccactgtcccacaagcttcccttgctcgccagaagtacaccgatgagtctgaggc

SEQ ID NO: 35058 - DNA, 257 bp, Glycine max
  unsure (1)..(257): unsure at all n locations; Clone ID: 701108730H1
accatgttcacngctagtaaactagccttcacattaacaccacctcgtccatgcactgcacccttgacaccaatctcttcagcttctggtgttcacctcattcagttcaatggcaggcacttatgcctccgccaaaggctgtttctactttctcctatggccactgcagatcaacaagggaaagttgaagaatttgaagatgattcaaatactgttgatagtaaaattctcccatattgtagcatagacaaaaaaga

SEQ ID NO: 35059 - DNA, 259 bp, Glycine max
  Clone ID: 701108731H1
ttcttcctttctctgctctttgtcttctctgacacatttggggccttgttgagtgtgtttttgcaagagggtatggcgaaggacgttgaggttgctgagcgtggctccttctctgggaaggactaccaggaccctccaccagcaccactcattgatgctgaggagctcacaaagtggtccttttacagggctcttattgctgagttcattgccactttgctcttcctctacattactgtgctcacagttatagggtaca

SEQ ID NO: 35060 - DNA, 263 bp, Glycine max
  unsure (1)..(263): unsure at all n locations; Clone ID: 701108733H1
ctcaaatttctcagtctccggaactcgtttctaccttcacttcgcncatctcgaaccctcnctttccggcaactaggttaaagttcatcaatggcaggtcgtggcaaaaccctaggatccagcgccgccaagaaggccacctcaaggagcagcaaagccggcctccaattccccgtcggccgtatcgcccgtttcctcaaggccggaaaatacgccgagcgcgtcggcgccggtgctcccgtttacctcgccgctgtcctcga

SEQ ID NO: 35061 - DNA, 261 bp, Glycine max
  Clone ID: 701108734H1
agatcacagaaagagaattcatctttctttgcgaacagctaaaaacctcaaagggaaagaaggcatgaatagaggtgttcttcagagctcaccagtgcaacaaatgatgactggaaaccctaactggtggaacatcaatatcaatagcatggctccacaagctcctcctttcttgtccactcctaacaactttcctatcccttgtgctcccacttctcttccctttcctcttggcatgagaatcaagatcttccagagtca

SEQ ID NO: 35062 - DNA, 260 bp, Glycine max
  Clone ID: 701108735H1
cacagttaacagggatggctatggaccagttgcacagatgtttgctcggaactcgtgcaaaattatattacctggcatggacctttcggacgcgaaccaaccaaaggaaaaccattctagccctgagttgctacttgcacaaattatggaagcttgcaaaaagcatgaggttcaggtttcaggtcaaaattcgtctgaatctggtgttccaggggggtttgaacaaattaagaagaatttatctggagataatgtattgg

SEQ ID NO: 35063 - DNA, 258 bp, Glycine max
  Clone ID: 701108736H1
accaagttcccatccaagggcttcacactctttcccaacccaatgcgcctcaaagagacttgaggtgacagaattctctgggctaagatccacttcatgtgtgacatatgctaacgatgctagagaatcttccttttttgatcttgtagcttcccaactcactcccaagaccaatggatcatcaactcctgtgaggggagagacagtggccaagttgaaggtggcaatcaatggtttcggacgcattggtagaaactt

SEQ ID NO: 35064 - DNA, 257 bp, Glycine max
  Clone ID: 701108739H1
tctcaatacccttttgatttgtgaaaggaaagcaaacatggttgatcaggtccaacaccctacaatcatggacaaggttgctggtcagctccatctccgttctggtctttcatctggtattagaagttatgatggagcctaccgccacccagctatgtaccaaagaccctcttttgggaattactcgaatgctgcattgcagtttcctgtgatgcccacatgcaaagctaccatggatttgtgctgctactgcaaca

SEQ ID NO: 35065 - DNA, 256 bp, Glycine max
  Clone ID: 701108740H1
cagagatcaagggaatattcagaaatcctggtgcagtaaccaagatcaaagagtccaagctttctctactttcttatggaaaattaaacaatgttccagaggcagtttacatgcaacatctaatgggaatcgatggggtaattgtggatttggttcaagaaataactgaggcagttgcggatatgataaagccaacaaagggtggtgaaggagagggtttggttgagggttgtgggaaggtgcagggaaactcaaa

SEQ ID NO: 35066 - DNA, 249 bp, Glycine max
  unsure (1)..(249): unsure at all n locations; Clone ID: 701108741H1
atgcggtaacgaaataggttnaagtnntgggaggngatatgcgacgagnacggcatcgatcctancggaaagtacaaagacgaaggcaacagcggcatanaantcgagaggatcaatgtctattacaatgaggnntctggcggaaggtacgttccgngagangtgttntggatctcgncacctggaaggatggacagcatcagatctggccctaggcaagatttccgcntgacacttcgtnttcggccc

SEQ ID NO: 35067 - DNA, 252 bp, Glycine max
  unsure (1)..(252): unsure at all n locations; Clone ID: 701108742H1
caacaacgtcgtccaagaccatgaccatggccatggccacgatcctgctcctgttcacggtcttcgcggtttcatcggccctagacatgtcgataatctcgtacgacaacgcccacgccgccacgtcgcgcaggnaggggagctgatgtccatgtacgagcagtggctggtgaagcacggcaaggtgtacaacgcgctcggggagaaggagaagaggttccagatcttcaaggacaacctgcgattcatcga

SEQ ID NO: 35068 - DNA, 253 bp, Glycine max
  Clone ID: 701108743H1
tttaggtggatattactatggaaaaatcaagtttcctcctgaatatccatataaacctcctggaatcagcatgactacacctaatggacggttcatgacacagaaaaagatctgtttgtctatgagtgactttcatccagaaagttggaatcccatgtggtctgtatcaagcatattaacagggcttctttcattcatgatggacaacagtccaaccactggcagtgtaaacaccaccactgctgagaagcag

SEQ ID NO: 35069 - DNA, 253 bp, Glycine max
  unsure (1)..(253): unsure at all n locations; Clone ID: 701108744H1
gccgtttcgaatctgcacaagaacaccaagaaatccttctccgagacgatcaagatcatgtactatcattttagtgagagatctgggctganggctcctctgatcgccgatgatgtttatgaaataattatgaagaatgctgctcgtctagacagtgagataatctatgacagagactttgactatgattattttggattcaaaacccttgagaggtcttacctcttgaaggttcaagggaaggttgtggaaa

SEQ ID NO: 35070 - DNA, 252 bp, Glycine max
  Clone ID: 701108745H1
ctttccctttgttgtttcttgtggttttggagtctgcagcaatgtggggttggatggtcggggaagcgcgtagggcagcgtgcaactggaactgggtttcgctccgaagcatgggtggcggtcccagaacctttcccggcggtgtgaacaagtggaagtggaagcgcatgcacgagaagctcgccagagacaaacagaacagactcatccaacaagagaagcagctctacccagctcgcattcgctcccaca

SEQ ID NO: 35071 - DNA, 254 bp, Glycine max
  unsure (1)..(254): unsure at all n locations; Clone ID: 701108746H1
gcttgctcatcaagtccaagaaccaacctaccttttgcaatctcaattcaatggcgtcctctctcattgcgaangcttcctctcctcttccctcctctccaggtccctccttcgccccgccgcttccgcttcccaccgctctttcaacaccaacgccatgcgccagtatgacaaccgcgccgacgaccacagcaccgacatcgatcgtcactccgaacgctctttccctagcactgcgcgccgcgacgatatct

SEQ ID NO: 35072 - DNA, 257 bp, Glycine max
  Clone ID: 701108747H1
ggaactagaaaatccatacaatcttcaccaccaaaaagaaaataatggcaatggccagtgcaacaactctagccacaatcactgttgtggcggctagccccagtgttggcagcagaaggagtgggaagaggaatgtgaacttcatcagagggttgaattcttttggagggttgaaggctcagaacaatgtgacattactaggccttcctgtgtgcactgagcagtgctttgcaaaggtggtgagctcattgaaatat

SEQ ID NO: 35073 - DNA, 256 bp, Glycine max
  unsure (1)..(256): unsure at all n locations; Clone ID: 701108748H1
ctagcatttttagcctgggctgtgatgggaagatttttgagtggagtttgcaaaatcaaggtcnaatcctgtggtcaagagactgtagtaggttctgttaccccctcaatgattcaaaatattgcagacatgagatggcattagatgcaaatgggaggagactcttggtaacatccagttcatttagagcacccatataccaggttcatggtcatttgagtggatggagaacacttccgcatggtgctcctattac

SEQ ID NO: 35074 - DNA, 256 bp, Glycine max
  Clone ID: 701108751H1
ctcagactcatgtctcagcctttgaccaccaactctgctgatggtgattcctccgtcgccgcacctcccatcctcttcgattatcatcttatcgaccaaaaacttctccaaaacatagtctacgatgctcttgtctggagcaccctcaactgcctccttgttggtgacaaatcagttcagagatcaggaacagttcctggtgttggcctggtgcatctcccgctttctttattacctgggccatttcctgaaaatc

SEQ ID NO: 35075 - DNA, 256 bp, Glycine max
  Clone ID: 701108752H1
caaggcagaaagcaagctcatcctagagttttaaaaatggcagcagcctccttccatggctctctcttccccatccttggctggcaaggccgtgaagctgggcccatcagcccccgaagtcgggagggtcagcatgaggaagaccgtcaccaagcaggcctcctccggaagcccatggtacggcccagaccgcgtcaagtacttgggcccattctctggcgagcccccgtcctaccttcactggcgagttcccagg

SEQ ID NO: 35076 - DNA, 250 bp, Glycine max
  unsure (1)..(250): unsure at all n locations; Clone ID: 701108753H1
tggaatccaaacgggctaaggtgaaacaccagcgctgttaagtgtgaacaaagtgggctctgttttgtgggagtgctcacctattcagggattctnnaaaaaaaaaatttggggtttattggtctgaagcttgttggagttgggagtagttgaagatgagaaacgtgcttcgttctttgcgacaattgcgaccagcctttcagaggcaagattgtgttttgatcattgttaatgttgcagaagaacctcc

SEQ ID NO: 35077 - DNA, 254 bp, Glycine max
  unsure (1)..(254): unsure at all n locations; Clone ID: 701108755H1
acaaaattgagatattgcaagtgaaatgaaggccaggcatatctcattcttctcttgatatttctgatggcactcgctgcaaacaaagtttctagcagtcctattgtgactaaaagaacagctctttgcagatcacatgaaaaacactatttttcctcgtcaacaaggatcaatagaatacagttgtcaagacatagactggaacatgaacatctgaactatagatgttcccacacacagagatcaancttatt

SEQ ID NO: 35078 - DNA, 251 bp, Glycine max
  unsure (1)..(251): unsure at all n locations; Clone ID: 701108756H1
ctgttccnccttgttttgagtanctgcagtctgcgatgttcttaaaatttatgtntaggtcatnttttcttgtacataatccaataaatgtgcatagggatgangataccgagtcagatgatgatntgctggaaaaccagaatgaanngnagatttcaagtgataccttnancangaaacctnctgatattgtaactgttacatctgatgtggttgaaatcaatgatgttntatnctgcattcntctgtca

SEQ ID NO: 35079 - DNA, 248 bp, Glycine max
  unsure (1)..(248): unsure at all n locations; Clone ID: 701108759H1
gagctataagctagtttatcgtgaggagaatatgaagttgtttgttttctttgttgctgcagtagttttggtagcatggccatgccatggcgcaggctaccaaaggttccctctccgaatgaaaactggctatggtgagcgttcttcggaggtaaaatgcgcaagttttaggctgctgtggaagcacacaacatccgagcctttaaaaccattcctgaagagtgcntgaaccaacaaaggactacatt

SEQ ID NO: 35080 - DNA, 254 bp, Glycine max
  unsure (1)..(254): unsure at all n locations; Clone ID: 701108761H1
ttntctcttaatccaaatatcatcatctgaaacgatggctgccatggcaaccanaaccctcnccttacanacccgaaactctcatttttccanggaaagcccgttanataaccttcccgngtcgcacccaccaccaagttattctcatccaaacaaggcacaatctccatgtccctaaccnaacccccatacgacctccaatccttgcaaattccaacccatnaaagantcnatcgtctcacgcgaaatgacac

SEQ ID NO: 35081 - DNA, 252 bp, Glycine max
  Clone ID: 701108762H1
gaacggcacgtgtagcggagtactaggccgccgttacacgctactgctgtccgtcgtcaccgtttgaattacccaccgctactttgtcgtcattattcttcttcttcccttttcattgaccttttccttccttcgtcctccaatggcgactgttccgcacccattatcccttcgcaagtgtaggttttgctaaccgaacctcctccatctccagatccactctcaaatgctgcgctcaatctccttctcctt

SEQ ID NO: 35082 - DNA, 256 bp, Glycine max
  unsure (1)..(256): unsure at all n locations; Clone ID: 701108763H1
cttcgctcgcacgtgccagtncctccgctcaagcctcacgancgtcctcgttcgngcgcncncccgtcttccgtcaaccccttggacacccgantgcntgctggctacgggcgttccatcttcgagccgctgntgcctctcattttggggcgcgacgtcagcggcgaggtttcggcggtcggagataaggtgaggtcggtgagtgtgggagaacaggttttccggggcantgaatccaattgccgtaaaaggcatt

SEQ ID NO: 35083 - DNA, 168 bp, Glycine max
  unsure (1)..(168): unsure at all n locations; Clone ID: 701108765H1
agacanaaagncacttgaatntagggtctatnggtcattcntgatgctggtaagtctacaantggaggccagatacntntcctnagtggncaagttgatgaacggactatccnnaaatacgaganagnggctaaggacaaaagtcnagaaagctngtatatggcttat

SEQ ID NO: 35084 - DNA, 256 bp, Glycine max
  unsure (1)..(256): unsure at all n locations; Clone ID: 701108767H1
gttgcattnttgcatcaccgcaagtcccacaacatggctgccatangncgctgcaggcatagcttccttgntttcttcttctattaacagngtcaaatgtctncgttcctccaagaactgctccngtatagacccccttataaccacagtgccctcaaaccgtggcatgtttgtgtcacacttggtggaacctttgtccattgggggtgccattaattcgcacaagttgtgggggcctagaatttctgctgctgtt

SEQ ID NO: 35085 - DNA, 251 bp, Glycine max
  Clone ID: 701108768H1
tttttttgtgtgaaccaaaccgaaagcagatgaagcagagtagcagaagcagggttcagtcgaattttccaaatcttaatccacttcttatcctagtaacaaacaactacacgtttttgtttatcattccgaaaattttaatttgttaatatattcttataaatagaggaatcgtttgccattgccctttccaaaccgtttcatcttgttgcacttgcaaccgttgccatattaattatcttccaaaattg

SEQ ID NO: 35086 - DNA, 252 bp, Glycine max
  unsure (1)..(252): unsure at all n locations; Clone ID: 701108769H1
cacctaactctcactccttcttcttcgctttcttcacactcccaatttgctccatcatgatctccaattctcttccctcgtaaccagatcatncaaaatgatgaatcacgattccgacgaccaacagcatcacattctccacgcctcccaggacgacgagataatggactcgctgatcctccaccacgacgacgacgnctcctccgttcaccatcaccaccgtcctacgtcgccgcaaagccctaattcccc

SEQ ID NO: 35087 - DNA, 249 bp, Glycine max
  unsure (1)..(249): unsure at all n locations; Clone ID: 701108770H1
tctctctcactccctctcccttccttccatcccaaccacaaggntgctgagaagacataaaaaatggtaaagatttgctgcattggagctggctatgttggtggcccaaccatggctgtgattgccttgaagtgtcctgagatcgaggtggtcgtggtggacattgctgctccacgaatcaacgcgtggaacagtgaccacctcccgatatacgagcccggccttgatgatgtggtgaagcagtgtagg

SEQ ID NO: 35088 - DNA, 250 bp, Glycine max
  Clone ID: 701108771H1
gttggtttcagagatgggaagcatgcacatagaaaccccagaaacttttgctgatggtagcaaaaacttcgatgatgatggacgagctaaaagaactgggacttggattactgcaagtgctcatatcataacggctgtgattggttctggagtgctatctcttgcatgggcaattgcacagatgggttgggtagctggtcctgcagtgctctttgtcttctctttgataacatacttcacctccactctt

SEQ ID NO: 35089 - DNA, 251 bp, Glycine max
  unsure (1)..(251): unsure at all n locations; Clone ID: 701108772H1
tngagncnnganagtcactgncagtctantttntctacaaaatatntggactgacggagtagnaacaactgnaccacaaggggattggggataatttcaagtcagtcttcttctctatcttccgtttttnctgagaaagtaacaaatgtgagtcgctaagcgtatcaaactcgtgaacacagtnagttaattagttttctcattctcattcaaagtacgtctagtgtttgcaaaaatggaagaagaaagtg

SEQ ID NO: 35090 - DNA, 248 bp, Glycine max
  Clone ID: 701108773H1
tttttagtttaggtgaggaaacaagagaaatccaaatcctattgacacgtgttttacgtgaggagatgctaggagaaaaaacgaagcactgagagaactaagagattggattgtaagatgaatagtaagagatttaccaatcttcttcctcttcttctgtttcctatgctctcccacccattgttcttcttgccttttgcattttcttttactatctctcagttacttcatcaccagaaaatcacctt

SEQ ID NO: 35091 - DNA, 248 bp, Glycine max
  Clone ID: 701108774H1
ggttctctctctcaatctaacgatttcgccattcaacagcgatctttccgtctccatcatcgtcatcaacgctcccatttcctaaacctcagagagggatccagctaacagttgtttcccgctgaaaagttgcttccccacagaactgtaaagcaaacggttagatgcaccaacacaagcaccactaacgaaccattggttcagttcaatatataacgaatccgatactcttttcatctcacacctac

SEQ ID NO: 35092 - DNA, 197 bp, Glycine max
  Clone ID: 701108775H1
accctcttggtaattctgatgctactgagcctagagtgttctcttgcaactactgccacagaaagttctacagttcacaagcactaggtggccaccaaaatgcacacaagagagagaggtcaattgcaaagagaggacacaggtttggatctcagattatggcctttggccttccccttttgcatcataacaacaac

SEQ ID NO: 35093 - DNA, 240 bp, Glycine max
  unsure (1)..(240): unsure at all n locations; Clone ID: 701108777H1
caacctttcacaacacggccaacanaaagacacagcaacnaaggtggtggatccaacantgccaaacgttgaacccacagtctggttctttctctctcatcaaccgatcaaccacccaatacccatcatgtaaaccttttttttctcttctgatcaaaaccaacaccaccctctcaacccattcaaagccttttccatctttctctctctattctgttttctcgcgtgagaagggttgtt

SEQ ID NO: 35094 - DNA, 249 bp, Glycine max
  Clone ID: 701108778H1
ctcttccattctctccctctcaataacttgcttgtagtctaaaacctcatagtcacatacctgcgcttcttttctcacccctcacaaaacagaacactctgttttccacttctttattcttctttttatccacctttgaacatctcaacaagtcaccacatggctgcaattgtgcaccacggattgcagtcacaccttgagtcccaacacactgagtcaatagcactcaaactgaggctcccttcctca

SEQ ID NO: 35095 - DNA, 198 bp, Glycine max
  Clone ID: 701108781H1
tctcttgctctgtatctttgatttgatcattccaatcttcaatttttctatatatccatcaatccgctgagtgcaaagttctaatctttcgcctattgggttctactcctttctctcttcgtttccgatcgatccaattttgctcccatggctacgatcggacacaacaatctcaatgccaaattggttcttctcggg

SEQ ID NO: 35096 - DNA, 252 bp, Glycine max
  unsure (1)..(252): unsure at all n locations; Clone ID: 701108782H1
accaaaactattgaagaatttggtcaagtaatgaagttgtgacgtctcctcatatattgaatgtnggattgttgaagtggactatgacttttactgtctgaatgtacccttatttgtttctttcaagtaggaaaagattttcactttgttttgaatttgtattacatgatgtttcaagggtttaatatgtaatgcttagtcactctaataatctttttctactactatctactctcaattcctgaatgctaa

SEQ ID NO: 35097 - DNA, 249 bp, Glycine max
  Clone ID: 701108783H1
gtatttttgatgcaaaggctggaattgcattgaataagaactttgtgaagcttgtttcttggtacgacaacgagtggggatacagctcacgtgtcattgatcttcttgtattcgttgccaagaagtctctttaaggtgttacttcaaagtagcttgtcttcacattattaccgtatgtttatgtttagctgcgatttagtgtcttgctcgagcaaaaaatgagaggtctgaataaatcggtttctgaaa

SEQ ID NO: 35098 - DNA, 247 bp, Glycine max
  Clone ID: 701108784H1
tggaaatggaaagaaaattgtcgattcaattgaacagctacctgctgtggaagtggttcttggtcagcatgtctttttcactgtgggggactattcccttgctggaaaatctgactgatcatattttccaagtgttcctttttgatcttttatccagtttgcatgctatctgtttgcaagattaggaatacagaatatacccaggcatgcctaattgtaacttttgagcaattgactattctttttt

SEQ ID NO: 35099 - DNA, 248 bp, Glycine max
  unsure (1)..(248): unsure at all n locations; Clone ID: 701108786H1
agggcagatattttnaccaatcttccagctcttcgcaaacttgacaacatgcttctcggaattttagacagtttcactgctacagagttttggtatgtagaccaaggaattgtagccccagatgcagatggttcggcctcttttcggaaaacaattcagcggcaagaagagaagtggtggcttcccgtacctcgtgttccccctgcaggactcggtgaagactcaagaaaacagttgaatcactctcg

SEQ ID NO: 35100 - DNA, 250 bp, Glycine max
  unsure (1)..(250): unsure at all n locations; Clone ID: 701108787H1
gagagagatctatcnatnctatcaagatggcgttgttggtngagaaaacaagcagtggaagggagtacaaggtgaaggacatgacgcaagccganttcggaagattggaaatcgagctggcggaggttgaaatgcccggcctcatgtcctcccgcaccgagttcggcccctctcaacccttcaagggcgctaggatcaccggctccctccacatgaccatccatggcgtcgtcctcatcgagancctcac

SEQ ID NO: 35101 - DNA, 248 bp, Glycine max
  unsure (1)..(248): unsure at all n locations; Clone ID: 701108789H1
ccaaaccacaacgctcaaattgttttcttttgctatcantgttaccgaatccctgcantttcttcttcatctncttctcctttgtcacttctcagnagnantcaatctcttcaatttctttcttctactggcaataagcatcagcacactgccacatccagttcccttctgtgtgttcctttcttctactctctccagtccagcnaaaacgaagctccttccatcattttcagttttttctgtcaagt

SEQ ID NO: 35102 - DNA, 246 bp, Glycine max
  Clone ID: 701108791H1
ggacaacttggataagttagtcgccaaagctataacagatagttttggcaaaggaatatggaacaaggccattgtaacactcacacatgcccagttctctccaccagatggattgccctatgatgaattcttttcacaaagatctgagtctctcttgaaggttcttaggtcaggtgccaggataaagaaagaagcctttcaggctgcttcaattcctgttgttttggtcgagaacagtgggagatg

SEQ ID NO: 35103 - DNA, 246 bp, Glycine max
  unsure (1)..(246): unsure at all n locations; Clone ID: 701108792H1
aatggtcaagggatctgtgaaactgttgagaaggnagaagagaacacctaaagcaaaccaattttatcgtaactcagagttcttgcttgcgaaggacaaatttccgtcagnagagagtaacaagaagtcgaaattaaattggaagaagcaaggtgggggagaaatgggacatggttttgggatgggatctaaatttttcaaaagctgtagttcactgcttgaaaaattgatgagacacaagcatgg

SEQ ID NO: 35104 - DNA, 237 bp, Glycine max
  unsure (1)..(237): unsure at all n locations; Clone ID: 701108793H1
cgttcatgcttaatcaagttgggaacaacaaaaaaaatccaaaacaatgtttctgggtttcggtttcatttcatcaagatgatcnnnnnnnnnnnnnnnnnnnnnnnnnnnnnnaaagtctttgtattttgtatgtaaagatgtaaaattatgattattaggtggtgcatgtgttgcgtcatgggccaatgttatcctctgcttttaagttggaagaggcccagctcacgtgtgatg

SEQ ID NO: 35105 - DNA, 247 bp, Glycine max
  unsure (1)..(247): unsure at all n locations; Clone ID: 701108794H1
gtgaganatgatgatgaagcgtcggttccttttggttctcttggttctctatgtcanagtggagcagagtaagctactccaccacgnagaagtcgatggtgggtttgtaaaaacaagaggagtgnagcttatgctgaatgggagtcccnactatgcnaatggctttaatgcctattggctnatgtaccttgcctctgatccttcccagagaaacaaaatctcatcggnatttcaacaggcttcanat

SEQ ID NO: 35106 - DNA, 249 bp, Glycine max
  unsure (1)..(249): unsure at all n locations; Clone ID: 701108795H1
tntcattttccctcantttctcgctcgccaaacgcccntctctctcctcnaatggncgancagctcancgacgannagatcgccgagttcaaggaggccttcagnctcttcgacaagganggcgatggttgtantactactaagggaacttggggactgtgatgcgtcactagggnaaaacccaantgaggnagaactgcagganatgattaatgaggttgatgnganggcaatggaancatngagttc

SEQ ID NO: 35107 - DNA, 230 bp, Glycine max
  unsure (1)..(230): unsure at all n locations; Clone ID: 701108796H1
cttcaactttgcatctcaaggcgttacaaaaatggagaaggcacatatgcaagtcccaagagnctaaactgggtaaccaaggcttagaggtttctaggttgggctttggatgtggaggactatctggaatttataatgcccccctctcgcatgaagaaggatgttcaatcattaaggaagtgttcaataagggtgttaccttctttcatacatcacatctttnccgacaa

SEQ ID NO: 35108 - DNA, 287 bp, Glycine max
  unsure (1)..(287): unsure at all n locations; Clone ID: 701108801H1
cttgtgaggcagttcaagaacaagccagcttccaagaagttcatgcttggccntcagttcttncttccccattttcnaatgggntcccaaatacacctttcagttcttgaaagctgaccctcatagctggcatcaccatcgctagcttggccattcctcagggnatncagttatgccagctcgccagcctccctncaattcttggactatattcgngctttatancaccattgatttatgcgatgatgggtcagctcnanggattggcagtggggatgtngcggttc

SEQ ID NO: 35109 - DNA, 283 bp, Glycine max
  unsure (1)..(283): unsure at all n locations; Clone ID: 701108802H1
gacgataacaaatggcatcatctcagtcgaggaagagagttgacgccgtcgattctgcgcgctgcttccgttctcgttcgcgccaaagatggcagtgcttttgctcgttgcgacgattgcaagaagaatgtgccggttgcactcatcgacatgcacagttgcagccttgaagctanaattaaaatgaacctagacgctcaagttgtggaacaggctgctgaagctaagaagccagagaggaagnagccccaaatctaaagagcctatggcaaaaaaggctaaa

SEQ ID NO: 35110 - DNA, 276 bp, Glycine max
  unsure (1)..(276): unsure at all n locations; Clone ID: 701108803H1
cttggttgacagtgatgaaaggaagctagtttctggattgataaccagatgcgggtaccatcggtgcacatggagagcagactgtcaaaattcctgtcactttgatttatgatgacatcaagcaaacatatgctgatattaaacctggaagcatcattcctatagggtgaaggttagtctcatttttgatgttncccatcttgggaaggctaactctacctttggagaaaactggagaaatccccataccatcaagcctgatattgatctgagaag

SEQ ID NO: 35111 - DNA, 103 bp, Glycine max
  unsure (1)..(103): unsure at all n locations; Clone ID: 701108805H1
cttgtattgcagtgtttaacagaaccagcatncattgncagggataattccaatgggatcttcccaatgaaggatcttcttcttcccaccacaaccatacgac

SEQ ID NO: 35112 - DNA, 273 bp, Glycine max
  Clone ID: 701108806H1
gttggatatagctctcagggttctggatccacacttattatgccatttcttgataaccatctgaagtctcctagcccactcctgttacctgcccaggatgctgttactccattgtctgaagcagaagcagttgatctggtcaaaactgtttttgcatctgcaactgagagagatatatacaccggagataaggttgaaatcgtcatcctaaatgccagtggtattcatcgtgaatacatggacctaacgaaagactaatgcttacaggaaatt

SEQ ID NO: 35113 - DNA, 272 bp, Glycine max
  unsure (1)..(272): unsure at all n locations; Clone ID: 701108807H1
gcaggaggcaattcataagcgaaccaagaagtacccatcaaggcagcgcttgacacttccagtccaacctggatcaaaggaaaggcctgttgtccttaattacaaaaagagtctgaaagactatacaagtggaaattcagaaaccttaactgttgtattcaaggatttgggcccacaagtttcttaccggacacttttctctgcgagtatttgggacctttgcttctctatccagtcttctatcntcccctgtctaccaatattttggttac

SEQ ID NO: 35114 - DNA, 275 bp, Glycine max
  Clone ID: 701108808H1
gttctctcacacactcattcggtgctccgaatctcagattctagggttagggttcccaatttctccaccgatacagaaaatgagttcaactggtggttctaccaagggcggaaggggcaagcccaaagcctccaaatccgtttcaagatcgcagaaagctggtctccaattccccgttggaagaatcgctcgattccttaaggctgggaaatacgccgagcgtgttggtgctggtgctcctgtgtacctctctgcagtgctcgaatatctcgctg

SEQ ID NO: 35115 - DNA, 275 bp, Glycine max
  unsure (1)..(275): unsure at all n locations; Clone ID: 701108809H1
cttctcacacctccttccttnccaaagccaccattctcncttcttccattttttgtttctccttttctcactgcccaattctctctttcccaatatatctgcagcctttgtattcaagttctgaggcnttgtttccatgtttttccttcatggggtgctgatatttctccgtcnttttgcatcatgggtttttccctcaaaatggattcttttgagatgatgagttggtgagtactgtggtatttattttgggttttggcttcaatttggactgc

SEQ ID NO: 35116 - DNA, 270 bp, Glycine max
  unsure (1)..(270): unsure at all n locations; Clone ID: 701108811H1
agagtgcaataactcgttgtacattcctagtgtgtgggagagacatggctaagatgtgtgttttggtgttggttcttgctctggctgtggccacaagtgccagaaacgttcccaaccccaaggatgctggtcttaaggaccagaagaacttcatcagctatggtggagttggtggttattccgggattgggaacaatggactgcctttggaggagctggtgccggaatnggtggtggttttggcggnggtggtggacttggtggtggccc

SEQ ID NO: 35117 - DNA, 178 bp, Glycine max
  unsure (1)..(178): unsure at all n locations; Clone ID: 701108812H1
cgtttttctgcctatgcaagtttgctacgttcagcaacattagctcacgaaccttctctttcgttcttaccctnccaaaacttctatctaccacagcttgtcctcttcttctgcaacattctcattcacatgggacgatgcctttcgcatatctcaacctcaaactgccacacaacat

SEQ ID NO: 35118 - DNA, 271 bp, Glycine max
  unsure (1)..(271): unsure at all n locations; Clone ID: 701108813H1
agtcctcaaggaaatcttccgcactnatggtgaaactanccttcaatttccaccacctcatgtaatacngagttagtaaatctggatggatgactgatgatgagtttgcaagagagatgattgctggtgtaaatccaaatgtaattcgtcgtnttcaagagttcccaccaaaaagcactcttgatnccgnaacctatggtgatcaaactagtaccataacaaaacaacagttggagattaacttgggtggggtcacagtagaagaggnaat

SEQ ID NO: 35119 - DNA, 270 bp, Glycine max
  unsure (1)..(270): unsure at all n locations; Clone ID: 701108814H1
taagactaaagaaaagatagagtcttccacagatgtcctgaagggagtactaaaacctgtgnttgatgatgaaggagagattccatggcctcccagagatcgtcaggcactaacattgatgaaaaaggaaataagtcaaagggagcaagaaggacagctagatgaagggttccttgctgaagttaatgcacagctacgacaagcaagggaagatggtgataaaccggggcttgaggctatgctgcaaaggtgttgcagcttatgcttcca

SEQ ID NO: 35120 - DNA, 269 bp, Glycine max
  unsure (1)..(269): unsure at all n locations; Clone ID: 701108816H1
gttgatcgagataactagaaacagtgtgatgaaaatgaaggtccttgttttcttcgttgctacanttttngtagcatggcaatgccatgcgtacgatatgttccctctccgaatgaacactggctatggtgcccgtactccggaggtgaaatgcgcaagttggaggcttgctgtggaagcacacaacntctttggctttgagaccattcctgaagagtgcgttgaagcaacaaaggaatacatccatggcgaacaatatagatcagact

SEQ ID NO: 35121 - DNA, 284 bp, Glycine max
  unsure (1)..(284): unsure at all n locations; Clone ID: 701108818H1
atcacggtgaactccgcngccgtgctgcggccggcgcgtngtggcgananaagaggccgcgtctggtcgcacggcttcgtcaacagcgncaagaagctttcagcgccggcgaaatcagcttccaaccgcgaccgcgcttttctccatgacggacgcgcaaganaggtttcgcaacattcgcttgcaggaagaatatgntagacatgattccanaaggtctttcgtctggctgtatgccatttctgagaaagaggtcacnataatgagatcgtngcagcacgtgc

SEQ ID NO: 35122 - DNA, 271 bp, Glycine max
  unsure (1)..(271): unsure at all n locations; Clone ID: 701108820H1
ctccaggctgcttctcttgttcctgcttctttctcggttcttaaagagggaaagagtggtgtgtctctcaaggactccancttgttcggtctttcattttcagaacctatcaaagctaacttcagctcttctgcattgaggtgcaagagggaattcgaacaaaagctctgtgctgtgagggccgaaacagtggctacagcctnctccagcagttaccaagtctacaccagaaggcaagaaaacatgngaagggcagtgttgtgataatggg

SEQ ID NO: 35123 - DNA, 277 bp, Glycine max
  unsure (1)..(277): unsure at all n locations; Clone ID: 701108821H1
cacaacganccactctgaagccgctcacgttatccacaacactctcaancctccttaaaccctaaccaatccaaccatggcttcttcttccaccttcactgcaatgtcccgcctgcaagctctcctcctccgccgccatctcctccttcccctcccgccgccgctccaactgccgtcgttctgttcgaggcgcagcncgccgccanggtctccgccatggccaaggagttgcacttncaacaaagacggccccgcaattaagaagctccagagcggt

SEQ ID NO: 35124 - DNA, 274 bp, Glycine max
  unsure (1)..(274): unsure at all n locations; Clone ID: 701108822H1
ctagttctagatcgcgagcngacgcnctttttgtgtcatgtactgcaagctcttttatnaccctaggacgtngggtttcgattcgtagccacaaccaacgnagtttctgtacaattcagcttgaccgacgattagcttcttccaccttttctccctatactgcgccancagaaccgtttgtgttaaatggccaataattctcaaccctgccagcatgncagtttcggccagtcatcaagctcagcaangcaaccatttgttccaatgaattcac

SEQ ID NO: 35125 - DNA, 273 bp, Glycine max
  unsure (1)..(273): unsure at all n locations; Clone ID: 701108823H1
cgttggagaaactaaatccgattaattataacgacncgacgcaacgccggcgatgggagcgtcctcttcgtcggagccgagtttcggnggaacagaaggagnnggaggccgtcgcagcctccaccggagctcttccactgcttcaganagnacanctctaagctcgccaatcccgagaccaacgccgtttccttagaaaatatncagcaatgnttcagtttcggtcgcgaaggtcgtactttttccggaagnaacgtgccggattcgtttccg

SEQ ID NO: 35126 - DNA, 269 bp, Glycine max
  Clone ID: 701108824H1
actcaccccagaaaagcaccgtcacttgttcgtttcaacgttcttctattgatacgttaatgcttttgattcctttcagatttttctaactaactaactatctgtgaatcaaagaaatttcagtgtacgtttcgtctgattctttgggatactgcttgagctcgatgggagatgtggctaaggaccttgcagctgggactgttggaggggcagcacagttgatatgtggacacccctttgacacatcaaggtcaagctccaaagccagc

SEQ ID NO: 35127 - DNA, 270 bp, Glycine max
  unsure (1)..(270): unsure at all n locations; Clone ID: 701108825H1
cgagattttcntggtcttcattcacagtgcagcctcttcttaggagtagctccttctcttccagttttgtgggaatttgtaacagaaagacgagcaagcggttaaagtatgaattctccaattcatgcccnnnnnnnnnnnnnnnnnnnnnnnnnnnnnnnnnnnaaccgtcctcctccatgtctcgctcatgcttctcgtaatttcaagtttcctctgctgttgccacaggcaatccgtacctctcaaaagatgtatcgctgctctgga

SEQ ID NO: 35128 - DNA, 268 bp, Glycine max
  Clone ID: 701108826H1
ggcgaagaacggaagaagccaccatagtcgtcgtcgtgagcgaagatccataacaatacagttacaaattgcaacaacacactcctcgttcgatcgtagccagaagaatgggaagtttgggagcgattctgaagaatccagatgacttttaccctctgctgaagctgaaaatggcggcgagaaacgccgagaagcagatcccgccggagccacattgggcgttctgctacacaatgctccacaagtttctcgaagtttcgccctcgtc

SEQ ID NO: 35129 - DNA, 270 bp, Glycine max
  unsure (1)..(270): unsure at all n locations; Clone ID: 701108827H1
gggatcagnancactnataacaatggntgcntcactnacaagctgnagctaccntcangcnacccancaagggtcgcatagcctctcgnaanctcaaatctacacaatgcatttctanggcntttngnttggaacctgctgcagctanactcacttgctcccttcagcctgatntcaaagaatttgctganaaatgtgtcgacgctaccaanattgcaggatcgnccttgccactctgctctcgtgtttctggngcaagtgnagaaggtg

SEQ ID NO: 35130 - DNA, 200 bp, Glycine max
  unsure (1)..(200): unsure at all n locations; Clone ID: 701108828H1
ggntntcgcggtgcatagtggcgctggtgtcgaccctaatctcccactgcgagcnccaagaagaagngaaacaacttctcacgcgctgtctcaatcttggaatctctgctctaaattctaatcttcccgncatanatgtcgtcgaacttgtggtgagggnatnngaaacggatcgctgttcaattcgggncgtagntcnc

SEQ ID NO: 35131 - DNA, 269 bp, Glycine max
  unsure (1)..(269): unsure at all n locations; Clone ID: 701108829H1
tcttgacatccccttcaacttctattctcttttgaaacacttagaaaagaaaanaaaaatgtctgcgttccttttgcttttcctagttttttcttctcagttgatcggtggactcaatacacctctaccatctccaatctatggaaacctcgtaaccattctcagcatagatggaggtggtataaggggtctcattccagctgtagttcttgaccacttcgaaaaggctcttcaggcatgggaaaaagtgcatcactagcaagttattt

SEQ ID NO: 35132 - DNA, 104 bp, Glycine max
  Clone ID: 701108831H1
gatgattggcccgcccccggctccggccgatcgcgtcggagtccgaagacgattcggatcaagatgaggtaggaacccgcttgccggattcccctcagcaacga

SEQ ID NO: 35133 - DNA, 257 bp, Glycine max
  unsure (1)..(257): unsure at all n locations; Clone ID: 701108832H1
cacgggttngngattgacttgtaggatatctaggncgaattcacgtaccaanatgtctaagtnatttcaaacactaataatgtgcagcaagggangactaattngcttcaaaacccanttgaattcagtgacgaacagattctngataatgtttaccgaacccattntcattntgttgagaagtgcgnngtaacatctcttcacaccgttgcctcgtgcgttatcaaccactccttgaaatcacgagnaaaagggtt

SEQ ID NO: 35134 - DNA, 269 bp, Glycine max
  unsure (1)..(269): unsure at all n locations; Clone ID: 701108834H1
cgaaagttngtnttttctgcgatcattttccattgggtggaagaaagtctcaacctttagtcgaaagagcaaggatctgagtnagtgagcgatcatgtgtggtggtgcgattatctccgacttcattccagcgggtcccgccggcggggcgcacgcgtganccgccgacatctgtggncgaatttnaggaagcggttctcgaatcgctgcggacgatgattncgaggcngggtcagagaattccaggatgatcggaaatcgangatgtc

SEQ ID NO: 35135 - DNA, 271 bp, Glycine max
  unsure (1)..(271): unsure at all n locations; Clone ID: 701108836H1
gttttattcttctctccctccttcattttcatttacttctctggaggtatataactattattctnttttnntnttnaaacataaaaattgtttaaatcttttgccangggaacccagattttgnggcctcagnantgtttcgtagaacgaatcatgtcccctcccgcnganttttcccggnggaggagtnccggnaactacngtaattattnttaccacagcaaccangtngcnacttcnaggtcgtgccggaanccggttgcccgacccc

SEQ ID NO: 35136 - DNA, 267 bp, Glycine max
  unsure (1)..(267): unsure at all n locations; Clone ID: 701108837H1
ctataagctagtttatcgtgaggagaatatgaagttgtttgtttnctttgttgctgcagtagttttggtagcatggccatgccatggcgcaggctaccaaaggttccctctccgaatgaaaactggctatggtgagcgttcttcggaggtaaaatgcgcaagttttaggcttgctgtggaagcacacaacatccgagnacntaaaaccattcctgaagagtgcgttgaaccaacaaaggactaattaatggcgaacaatttagatca

SEQ ID NO: 35137 - DNA, 269 bp, Glycine max
  unsure (1)..(269): unsure at all n locations; Clone ID: 701108839H1
ctctgccactttctgagtacaatacaacactgccatggctgcctcagtctccactattggagctgtcaacagagctccactgagcttgaacagctctgaagctggagattcggttcccagttcagccttctttggcacaagcttgaagaaggttactgcctcaagggtccctaacgtcaagatttcttctggaagtttcaaaatcgttgcggcggagaaanagattgatgagcaacaacagaccacaaggacagatggaaaggtcttgc

SEQ ID NO: 35138 - DNA, 271 bp, Glycine max
  Clone ID: 701108840H1
attcctaattgtttaaacctaattctcatttcttcatccgttcgattcttctcctcctaaagatgcagatcttcgtgaaaactttgaccggtaagaccatcacccttgaggtggagtcctccgacaccatcgataacgtgaaagctaagattcaagacaaggaagggatcccacctgaccagcagagacttatctttgcgggtaaacagcttgaggatggtcgaacccttgccgactacaacatccaaaaggaatccactctccacctcgt

SEQ ID NO: 35139 - DNA, 266 bp, Glycine max
  Clone ID: 701108843H1
gaaggtcggcggcgtggtgttatacggcggagctccacgtggcagcgtcgtgcctcttcttctcagccgccgcagagtttctctttgcgcctcttcttcttcttactcctccatttctgaccacgtttctttcgtgaaggatgtagctgcgactcagcctcctcagcatctttcacaactcctcagtattctgaagaccagaggtgaatctattatctccccgggtgccaggcaaggattattcctcttgctataccactgtcaaa

SEQ ID NO: 35140 - DNA, 230 bp, Glycine max
  unsure (1)..(230): unsure at all n locations; Clone ID: 701108844H1
gaaagcagcgnaaccaagagaagagtggcatcgttggttttcgcttcaatttatcttcgctcaaccttctacaatgttctaccgaggtaaatttggctgatggtggtgatgggcgtgaaatggntgcaaaacgccagcgcactgttgattcaggatcttcattctatggtgcttccactggttccnttttatgtacnaccnatcgcctatggatatgtcagccaacctcc

SEQ ID NO: 35141 - DNA, 268 bp, Glycine max
  unsure (1)..(268): unsure at all n locations; Clone ID: 701108845H1
tcaaagcgatgaacctgccaaaggaggctgctaanttcacagcccaagtcatcctcatgaaccaccctggtcagattggaaatggctatgcccctgtcctcgactgccacacttctcacattgctgtcaagtttgctgaactcatgaccaagattgacaggcgatccggcaaagagcttgagaaggagcccaagtttttgaagaacggtgatgctggttttgttaagatgattccaaccaaacccatggttgttgaaatttctccgag

SEQ ID NO: 35142 - DNA, 269 bp, Glycine max
  unsure (1)..(269): unsure at all n locations; Clone ID: 701108846H1
attcattcaagaattattattgatggccttcattctcataattgcttctcttgtttttctgtggatcgtttctctttggcaaagttcttcttctcccccgcatccctttcggcaaccattttacgcataacaacggcagancatttcggaagagaaatgccttgttggttattgctcatcctgatgacgaatccatgttctttactccaactataaattttctgacttcaaaggggcataatgttcaaatactttgcttatctattggt

SEQ ID NO: 35143 - DNA, 269 bp, Glycine max
  unsure (1)..(269): unsure at all n locations; Clone ID: 701108847H1
agacgnttngcaaatctcaatcgaatctcagaacanatgagacaaatcatncagcattcacataggtcagggccgggatccaggtcggaaactcctgntgggaactctantgcctcgaacatggcatccagcccgacggncatgatgccttctgactccaccttcggtgtagcgcacgacgccttcaacaccttcttcagcgaaaccggatatggcaagcacgtcccccgtgctgtcttcgtcggnctcgaaccaccgtcatngaagag

SEQ ID NO: 35144 - DNA, 270 bp, Glycine max
  unsure (1)..(270): unsure at all n locations; Clone ID: 701108850H1
atctctctctctccaatggccaaagacctcgaaacggagattcaaagtgggttgcctcacaaggactaccacgncccaccccccgccccattctacgaccccgccgagctccgaaagtggtccttcttccgagccctcatcgccgagttcntcgccaccctcctcttcctctacgtcaccatcntcaccgtcatcggctacaaccaccagacagccaccgccgacgagccntgcagcggcgtccgcatcctcggcatcgttgggctttgg

SEQ ID NO: 35145 - DNA, 267 bp, Glycine max
  Clone ID: 701108851H1
cagccacctaccgttgttcctggaggcgaacttgccaaggtgcagagggcagtttgcatgatttcaaactccaccagtgtggctgaagtgtttggccgcattgatcacaagtttgatctcatgtatgccaagcgtgcttttgtccactggtacgtgggtgagggtatggaagaaggtgaattttctgaagcccgtgaggaccttgcagcccttgagaaggatatgaagaagtgggtgctgactctggtgagggccaggaagaggatg

SEQ ID NO: 35146 - DNA, 265 bp, Glycine max
  unsure (1)..(265): unsure at all n locations; Clone ID: 701108852H1
tgctaccaagtaggnngntcannttcatacttgttctcctctggtttgagganangatcattcttgacgaagatgangtttgcggcggcgatggcgacgactacgccgccgagaatggcgaccgggccggtaaggagactccanttnctatagatcatnttnttcctctgattctctcctcaaaccagaggagaggnagtatgaaaatgaactgctaccaagtaggaganaagagacaacagagtttgcgtttgatgtcttttaa

SEQ ID NO: 35147 - DNA, 264 bp, Glycine max
  unsure (1)..(264): unsure at all n locations; Clone ID: 701108853H1
agacacttnaaataatgnccagtatactaaatgtcttagtcttaagaggggggaaaaactggaattccaatgattcttaatttcnnanaatccaatctgcaaactgagtgagatatataacttgtntttgatttctcctcatcattttgcatatacanagattaaaatggaagggttttttggagattgcttcaatatgattttgctgatgttgtgcttcaccaacttgagcatagctcgctcaaagtcntatgaatggatttg

SEQ ID NO: 35148 - DNA, 264 bp, Glycine max
  unsure (1)..(264): unsure at all n locations; Clone ID: 701108856H1
cataacgaaaactaaatcacaccaaaacatacctcaaaacctcaanacattcatacaatncancataaagcacaccaacaacaaattacaacttcaaataaaacagagcatctctctgctcttctctgttctgttctgttctgttctgtttctctctcctccccatatattcctcttcttcttcagaactcagaactcagaagggccacttcacttttagaaacccagtttgcatctgggtttgcctgttgaagtgccaatttg

SEQ ID NO: 35149 - DNA, 263 bp, Glycine max
  unsure (1)..(263): unsure at all n locations; Clone ID: 701108857H1
ctcgagtggcaaccctgaccttctctcaccggttcaccctctaagtttctcactctctttctccctagtcctccctgttcttgttcagtcttgagactccattancaaaactcatattcaagaactttaaaaaatggagctaggttaatagaggtccaaggccaaacttaccttaaggtttgaactgacagactacaatacactcttcacttatacaatccatgattgtgttacaccctgtgcactccttccttcttgcacta

SEQ ID NO: 35150 - DNA, 266 bp, Glycine max
  Clone ID: 701108858H1
agcaccgattggctcttcaagacttgcttccttaccatttcattcctaaaaccctattcttcttcgctcattcatcagcactgccatcagccccaacctccccacaaggtcacagggactaaagaggtgtaccaccatgtcggacgatgaaagggaggagaaggagttggatctctcttctgcagaagttgtaaccaaatacaaaaccgcggctgagatcgttaacaaggccttgaagctagttatttcagaatgtaaaccaaagg

SEQ ID NO: 35151 - DNA, 264 bp, Glycine max
  unsure (1)..(264): unsure at all n locations; Clone ID: 701108859H1
gccaaattttaggtacacttacaagttggggcatatgctgtctaacggttcttatgtatggagtaagaagtattcattcaaggcatccccatatcctggacagaactctttgcaacgtgttatcatatttggtgacatgggaaaggctgagcgtgatggttcaaatgaatatgctgattatcaaccgggttctctaaacaccacagaccaactcgtcaaggntttagaaaattatgacatgttttccacataggagacatgcct

SEQ ID NO: 35152 - DNA, 262 bp, Glycine max
  unsure (1)..(262): unsure at all n locations; Clone ID: 701108860H1
cttttggtttggggcgaaagttcagccttttcagatttgcatcaatttcaacagagaacaacgtgntttggtcagtcttctatgcttctgcatccaatctagggtttccttttcctgaattgttattctcttcaatagatgcggttcgatttgaaaggattgaggggggttgtttgcgggaattggactcaaaattagggtttgtgtttttggatcgtctcgtgtgaatcgattcgttaggcggagttgttggcttttttat

SEQ ID NO: 35153 - DNA, 263 bp, Glycine max
  Clone ID: 701108861H1
gtttctttctctctcatgttgtagtatctcactagtgtttttcattcgtttctgaaccacacaaacatcaccaccgaacaatgccgacggggttaccggcggcgaattccttagtggcgccggacgaagaggggtgggtgtgggggcagatcaaggcggaggcgcgccgcgacgccgagtcggagcctgctttggcgagctacctctactcgacgatcctctcgcactcgtcgctcgacgttctctgtcttttcacctcggaa

SEQ ID NO: 35154 - DNA, 84 bp, Glycine max
  unsure (1)..(84): unsure at all n locations; Clone ID: 701108862H1
gtcagtagtcanatgcttgtgntnaaagattaagccatgcanntgtaagtatgaactaattcagantnntgaaantgcgaatgg

SEQ ID NO: 35155 - DNA, 246 bp, Glycine max
  unsure (1)..(246): unsure at all n locations; Clone ID: 701108864H1
attgacttgtaggatatctagggcgaattcacgtaccaanatgtctaagtnatttnaaacactaataatgtgcagcaagggangactaattngcttcaaaacccanttgaattcagtgacgaacagattctggataatgtttaccgaacccattntcattgtgttgagaagtgcgnngtaacatctcttcacaccgttgcctcgtgcgttatcaaccactcattgaaatcacggacaccgtgatta

SEQ ID NO: 35156 - DNA, 272 bp, Glycine max
  unsure (1)..(272): unsure at all n locations; Clone ID: 701108865H1
caaggatgaagttganaaatcttngttttcactgcnagctgctaaggattcttctgacataggactggagaatccttagctgctggcagtganaacaaggatgacnttgaaaaatctttgcatttatcaaaccaaattgataatgtaatacacatcctcattgagaggggggaatttgnnnctggtattcnnnnancaanagcttcagtgaaaagagtttcacagggaaaaaggaagttantagtcnatggntcagaagatctcttatatag

SEQ ID NO: 35157 - DNA, 264 bp, Glycine max
  unsure (1)..(264): unsure at all n locations; Clone ID: 701108870H1
gaaaactatcataagtgaccaaaaaagacaacctttggggaatcataaaanccttcagaatggctcgcacaattacaattgcagcaatgtgtcttcttctntcaatagtgtccctctgtgtcaccaccaacgcattaatgccatacacacgtagcacnctctgggacatgatgctccaatccgaggacccatttggaatcttggaacagaacccattcaacaacatacccaacatnagagaggagncgagactctcgccctggc

SEQ ID NO: 35158 - DNA, 267 bp, Glycine max
  unsure (1)..(267): unsure at all n locations; Clone ID: 701108872H1
aacttgctccctcagaagcgaagaagaagccacanagaactagtctcctactgctcacccgcnagaaaaaaatggcatctncacatncgttggatanccccgnatgngngcccaaganagagctcaagttcgctctcgagtctttctgggatggcagnagcagcgccgaggatttgcagaaggtgtcttcnganctcagggcatccatctngaagcagatngctgatgctgggatcaagnacatctccaggaacactttctctnact

SEQ ID NO: 35159 - DNA, 263 bp, Glycine max
  unsure (1)..(263): unsure at all n locations; Clone ID: 701108873H1
ctttgcaacacaacaaaaaaagnnaacacagagagnagcgtcttaanaaacgctcttctctgaaaaacctgatttcttctcttcttctcttctctttcgtttcgatcttcgatctctgaaaatgagagagtgcatttcaatccacatcggtcaggccgttattcaggtcggaaacgcctgctgggagctctactgcctcgaacacggcattcagcctgatgggcagatgccaagtgataagactgttggtggaggtgatgatg

SEQ ID NO: 35160 - DNA, 264 bp, Glycine max
  Clone ID: 701108875H1
aaagatactgcgccaagaggttggtggtcatgcagctgtcttgggttttgtgggagcaccttgggacaatagcaacatatatagtggaagggggtacaacacgcacatatacaaccattaagagcatgtgccacactgccccacatgtattgaggactttgctttctcatttgacgcaggcaatagctgattacgttattttccaagtggagtctggggctcattgcatacaaatatttaatcatggggtggacaactaccacc

SEQ ID NO: 35161 - DNA, 213 bp, Glycine max
  unsure (1)..(213): unsure at all n locations; Clone ID: 701108876H1
ttctccttcgattcaattcaattctccttcttccccgttttcttgttcttcttgttccagttcttgaactcacccagctagctgaattccgaaaaagcccttttcttgtcccgaaatgccgaaccccttttcttccgcttagccaccancaacccgccgccgatccccgtttaagatgatcgtccgcactacggccgccgcaaaggaaccctc

SEQ ID NO: 35162 - DNA, 243 bp, Glycine max
  unsure (1)..(243): unsure at all n locations; Clone ID: 701108877H1
attaaataactaattattttaatactgcatgataagtcgaacagctggctccaaagtacatntaaaataacttaaaaatcgaaataaggatactcaggtcaaataaaattattatatacgataaaatctgtatttaatgcaattatatatagagaattagaactcaagttaatttacttgaacacttaatagcattccaaatttgatttgctctatgacaatcacgtgacatctaaagaatgt

SEQ ID NO: 35163 - DNA, 263 bp, Glycine max
  Clone ID: 701108878H1
gaaacaatgtcttgctccaatctcacaatgttggtgtcctcaaaaccttccctttccgatccctccaatctctccttccgctctgtcctcaacccttttcagctcccttcacaaaacccaacttcatgcactccttcacgctcctcaaccacccaaattcagtgtggtctgagagaactcagaacccgcattgattccgtgaagaacactcagaaaatcaccgaggctatgaagctgtggctgcagccaaagtgagaagagct

SEQ ID NO: 35164 - DNA, 186 bp, Glycine max
  unsure (1)..(186): unsure at all n locations; Clone ID: 701108880H1
cacggggtttgtttgaggttttctgttcgtttcanttcatttggtcgcacantgctgtcggccactgtctcncttnctctttcgcgcttcaactttcgnttatgcaccgattggtcnaaatggttggatgatttcctggtacagtacagtccatgttaggtcttggttacttccaccaataacaag

SEQ ID NO: 35165 - DNA, 263 bp, Glycine max
  unsure (1)..(263): unsure at all n locations; Clone ID: 701108881H1
gagaaaagtctaaacaattgggcaactccgagaattaaggagttgcttatctcattaggctccatacagttctcctttggcagagcagaagtagaagatgtaacaaaatgtgttggcgatgcattcatggtgatagttcggaacaagaaacgtgttggttacacatatgagttgagcttaaaagtcaaaggggnatggatcatacaaggagagaagaagttcgttgggggtcatatagattcccagattctcattggtgaata

SEQ ID NO: 35166 - DNA, 265 bp, Glycine max
  unsure (1)..(265): unsure at all n locations; Clone ID: 701108882H1
cttttcgctctctcattcaaaccattcgatctcatcatcgccatcatctcctcaaactgtaagtatacctacaaatcactgtaaatctccattaccactctcttagttattaacttagaatcttccctttctagttctaaattataatcattctnnnnnnnnnnnnnnnnnnnnnnatatggntatatatattattgggttgatatgaagaagnttaatgaaatttaccggtacaacacagagagtatctactgatgctgtaaac

SEQ ID NO: 35167 - DNA, 265 bp, Glycine max
  unsure (1)..(265): unsure at all n locations; Clone ID: 701108883H1
ttcgtcccactcgnaacacaacaatgctgtnactccacgcgccancantanttntntctgagaacattgcttcatttccctcttaatagtattcatcatncttctngcgctttctcctcactatctccacttcacaaaacccttttctgtttccaatcgtttctcctcacattctggccggngctcactccaaatgaacggagaaggcctcgccgccgcgangactcctcgccggnganctcaccaaagactggtactccgtgcc

SEQ ID NO: 35168 - DNA, 261 bp, Glycine max
  unsure (1)..(261): unsure at all n locations; Clone ID: 701108885H1
cgctctgtgtctctcactctctctatatttgcatcattcatcggaaatngctctcgaggttgctgttaaggctgctgttggggctccaaatgttctcggagattgtccattttcccaaagggtcctcttaactttggaggagaagaaaattccttacaaactccacctcatcgatctcagtaacaaacccgaatggtttttgggtgtgaatcctgaagggaaggtgccagtgnntcatttgatggcaaatgggtggctgat

SEQ ID NO: 35169 - DNA, 260 bp, Glycine max
  Clone ID: 701108886H1
cttacggctaaattctcaaagatttaaactttgtctcagagtttcacaattcacccaaccccagagagaaaatgtctctaatcccaaatttcttcggtggcagaaggagcaacgttttcgatcctttttccctcgacgtctgggaccccttcaaggattttcctttcccaaacactctttcttcagcttcctttcctgaattttctcgggaaaatctgcattcgtgagcactagtcggattggaaggagaccccagaagc

SEQ ID NO: 35170 - DNA, 260 bp, Glycine max
  unsure (1)..(260): unsure at all n locations; Clone ID: 701108887H1
ttcttataacagtggtgcagttgancgggccgtgaggatgttagagaaagtgggggagtttaacanggataaagttatacaagagtttgaatnattgacacgggatgcagaaagggttcagagggaaacactgaagaggattttggaggataacgcatcagcagagtacttgcagagtttgggtctcaatggaagaactgaccctgagagtttcaaggcctgtgttccactggtcaccacaangaatggaancttatatc

SEQ ID NO: 35171 - DNA, 260 bp, Glycine max
  unsure (1)..(260): unsure at all n locations; Clone ID: 701108888H1
ttccctcgcctcgcctcgcctcccttctcaagagtggagctctcgtcctgtgtatctcantggagctctgtggcccctctcacggtcttcgctatccaaatctctgaacgattcaacgacgccgtctttgagaatcgcgatttgacgctttattacgtgattctccctcctttctgccattaacttcattatcgggnttcttcaaagcgcaagttctttcagctaaacgattgaagccgttagccattaaaaaagaccga

SEQ ID NO: 35172 - DNA, 261 bp, Glycine max
  unsure (1)..(261): unsure at all n locations; Clone ID: 701108891H1
ctgaagttgcgagagtgaagaaatggcgcaagacttggcattggatttggaggagcttcgccgcctccacagcatcgccaaaagacctcgaaccctctctcttctctcctccgaaattcgtaacctcgaaaagttatcgtcagaggaagcttctgcgcagattccggcgccgatttcgacacgaactaaagtggcgccttcacctgcgctgaagtatncggcactcgcgtcgttcattgggaccaggatagtgacaaagtt

SEQ ID NO: 35173 - DNA, 260 bp, Glycine max
  unsure (1)..(260): unsure at all n locations; Clone ID: 701108892H1
ctcgtctctttttgaaaacactttannttcgcaaagttgattctntctctnnnnatctttntttccccaatttgtgagtgtnactgttgaatcgattggattggcattaggctgatctgaaatacgcaattgacatggcgagcgcgatggtagaggacgcgaacttcgaagatgaccaactagncaatatgaccaccgacgacatcgtcagagcttctcgtcttctcgacaacgagattcgcatcctcaaggaagagttg

SEQ ID NO: 35174 - DNA, 200 bp, Glycine max
  unsure (1)..(200): unsure at all n locations; Clone ID: 701108893H1
ctttggggtttgggttgtgtgaggggagaagagctatggcactgctttctctttgaccattgctctcattccttcaaccacccttcaatttccaatttttaacaaaagggtcattgtcaaactatataatatataattttctnattatatattggtatggcacaacaacaggaactgaaggaaagcctgagtcttctttc

SEQ ID NO: 35175 - DNA, 260 bp, Glycine max
  unsure (1)..(260): unsure at all n locations; Clone ID: 701108894H1
cttctgggtattgtggtcaacggtcaatgtcatcgccgtgaagaggcccgcggagaaggcacacggttgttcaagcattaaaagtaagaccattcaaattggctgttatacgcgatagttgctctatgatctagactagaggcttagttagggttttctgttaccgccatggatttcgagagtaggaggcttcatttgctcatctccgtggttgccatcattgctcttagcttcanagctgaaaaatgcagggaattgtt

SEQ ID NO: 35176 - DNA, 244 bp, Glycine max
  unsure (1)..(244): unsure at all n locations; Clone ID: 701108896H1
attgacttgtaggatatctaggangaatcacgtaccaaactgtcttaagtcatttcaaanactaataatgtgcagcaagggaagactaatttgcttcaaaacccatttgaattcagtgacgaacagattctggatantgtttaccgaacccattttcattgtgttgagaagtgcgntgtaacatctcttcacaccgttgcctcgtgcgttatcaaccatcattgaaatcacggacaccgtgatt

SEQ ID NO: 35177 - DNA, 302 bp, Glycine max
  Clone ID: 701108901H1
ctgggtagttgaaccaccaaagtctcaagaagggtatcagcatttaatagccgaaagataaaatatcttttgctcgacgttgctattagtcagaagccagaaattcgtgtaggtgagtgaggaagagagaaaagaaaaccggtgctgttgaggcagagattcaagagaatggaaggtgtgagccctgagcccttgagatcagaattggattccaaatccaaacaagacacagcgaaagaagaagatgacgacacattcaaagaaagcactgacgccgagtcctaaattcgtctcatgagagc

SEQ ID NO: 35178 - DNA, 224 bp, Glycine max
  unsure (1)..(224): unsure at all n locations; Clone ID: 701108902H1
ctcttcttcaattcatatcatataccnttagatttagagcnanacataaaattgttttcacataccatggacaacaacaatgacttttggaaattcagtgaccagttgaggcttgaatctggtttggccaatctgtctctgaatgattattccatttggagcaacagctacagctccaagaggcctgatcagnggaggaactttgatgtcaagggcagtgattt

SEQ ID NO: 35179 - DNA, 298 bp, Glycine max
  unsure (1)..(298): unsure at all n locations; Clone ID: 701108903H1
cctctttctctctctttctaaaaaccagaaacaacaaacacaaaccgaaaaggcgaaaggggttttccgagtgagatctagggtttccatcgattcggagagaggatattgatagaacgacctcaacgagcaaggtcaggaggtggagtactagaacatggattcggtgccttcgaattcgcatggaaacctcgatgagcagatttctcagctcatgcagtgcnaacccttgtccgagcaagangtaanggtctgtgtgataaggcanaagaattttgatggangagagcaatgncca

SEQ ID NO: 35180 - DNA, 294 bp, Glycine max
  unsure (1)..(294): unsure at all n locations; Clone ID: 701108904H1
tcaaaagaggagaaaaaaagaaganaagaatggtaacaatagctggtggtgtgantctttcaagccctagcagggtatttgctaatgctaagggantagactcatcacaaaaggcccaggccgtgaggttnccagctctgncgaggcccattcaanagtngcctggtttggtgaagaccnggcccgttcggncgnacgccggngaanatatcggngaaggtagatgagagcatnangatngctgannatgcgtgctcgtgacgngtggngnncagtatgcggnnggccggnacg

SEQ ID NO: 35181 - DNA, 297 bp, Glycine max
  Clone ID: 701108905H1
gataactagaaacagtgtgatgaaaatgaaggtccttgttttcttcgttgctacaattttggtagcatggcaatgccatgcgtacgatatgttccctctccgaatgaacactggctatggtgcccgtactccggaggtgaaatgcgcaagttggaggcttgctgtggaagcacacaacatctttggctttgagaccattcctgaagagtgcgttgaagcaacaaaggaatacatccatggcgaacaatatagatcagactccaaaacagttaaccaacaagcttacttttatgccag

SEQ ID NO: 35182 - DNA, 295 bp, Glycine max
  unsure (1)..(295): unsure at all n locations; Clone ID: 701108907H1
cagaaaatgagaaactctctcatgagttctgtctgattgcatagcattggttggtagttgtctcaaaaatctcttgccctttggccataatcaaaaaccaagacactgttcatcaagctgctcaattatcaagccaactttgcttggttccactgcagaatttcagnttattcttatctcggtagattggattgaaattccttataagtgggcataagttcaagtgtagagaatgagtcagcctaagattaagcgccgagttggtaagtatgaggtggggaggaccatggtgaag

SEQ ID NO: 35183 - DNA, 294 bp, Glycine max
  unsure (1)..(294): unsure at all n locations; Clone ID: 701108908H1
ctaacactacgcagattcagattcgccatgctttgttaagtacttgagaatctgaagcataggacaaggcagcaacttgcttagcttcttcactgtgaatgtatcttggcctgtttnttaagctctgtgctgttccatgaatccttgtgctcctctttgcttcccttcaggaaagtatgaaggatgacagaggttactttgaattcaagtgtcaatatcttataccatacagccaaaaaaatctccatgaagtnctactcctgcaagcgcatcgtttccttttcatcatgttat

SEQ ID NO: 35184 - DNA, 267 bp, Glycine max
  unsure (1)..(267): unsure at all n locations; Clone ID: 701108909H1
gaatgttagagtattatgaaattggtcctgtnaacaaatgagaacttccgcctgctctatgacactaaaggccgattccgtcttcattccatcagggatgatgaggcaaagttcaagctctgcaaggttaggtcagtacagtttggccagaaaggtatcccatacctgaacacctatgatggtcgcaccatccgttacccagaccctctcatcagggccaatgacactgttaagctggatctggaggaaaacaagattgtcgtttta

SEQ ID NO: 35185 - DNA, 294 bp, Glycine max
  unsure (1)..(294): unsure at all n locations; Clone ID: 701108910H1
cacaagttccaataacatacactattccatctgataaatggacaatttgtggatgctgcttcaggganaacttttccaacatatgacccacgcacaggagaagtgattgctcaagttgctgaaggtgatgcagaagatatcnnccgtgcagtatcggcagctcgcaaggcctttgatgaaggaccttggccaaaattgactgcttanganagatgcaagataatactgcgctttgctgatttggttgagaaacacggngatgancttgcagcnctggagacatggaacaatgga

SEQ ID NO: 35186 - DNA, 286 bp, Glycine max
  Clone ID: 701108911H1
attagtgtggcctagttgttgttttctcgatgagaaaggcttcttccactatgcattgcgcacttctgcgcttttgggttcccttgttgctgcttgctagcttcagctatgctccttctgtttcggccacaactgaaatttcagggaatgaagtgaacacagatgggaaggtgataaatgaagagttagcaaaaccaagtctaaaaggacatgatgaagaagcaaagttcaaaggatttttccaaaaccattcctatagttaaaccattccaaagccattcctatt

SEQ ID NO: 35187 - DNA, 287 bp, Glycine max
  Clone ID: 701108912H1
caatatctggcggaggagctgtcggaggattaccgcaatctgtcggagctggcttttagaggggaatatgaaacgtgtctggtgtacacggaggagatgaaggagcgatgcgtggaacagttcaagcaggggacggtgtgtatggaacagctggcagcggtggaaggattgtgcgagttggcgaggaaggcggttggggcgggggaatcggttcggagatatcacgtgaacctgtctgttttcacgtccgttccagacgcgtggggattgaacaggtgtttcccata

SEQ ID NO: 35188 - DNA, 290 bp, Glycine max
  Clone ID: 701108913H1
ctcattcttcacctggcaactatttggattgctgatttttgttaataccatatttactgatattggcgcatttctttgagaaagttactaattcctagatagaggcaaaaatgttgggaattttcaaggagaagttggttaaagcacccaaagagctgaacagtccagcttcgttgaattcatgcactaagcctaagctaagtcatgaaatccttcaggatttcatgtcctgcaattcctccaatgctttctcaatgtgcttgggaatgaagcttgctagcctattcccc

SEQ ID NO: 35189 - DNA, 296 bp, Glycine max
  unsure (1)..(296): unsure at all n locations; Clone ID: 701108914H1
cnncgctgatctncncanacnggnatactttgagnnactctctagtcaaggnacgtgtaaagccncgaagcccctcaaggtgttcatctncaggaggangatcttggtcanagactggaagcaanactgcaggctgctgaacagncagaggttgagcatcttgactaaggcccaaatgcgtttagcaagactggatgaattgcgtcaagcagctaaaagtggagtagaaatgcgctatgagaatgaacgtgtgaggcttggaacaaaagttgaatcacgggttcagcacaccgagg

SEQ ID NO: 35190 - DNA, 294 bp, Glycine max
  unsure (1)..(294): unsure at all n locations; Clone ID: 701108915H1
aacttctgcattccaaaaatgaactcggacacgacgtcgtattggtgctacagttgcacgcgcttcgttcacatccacgaccagaacgacgtcgtgtgcccccgctgccatggcggcttcgtcgaaaaggtcaccgccgggcaatcggcaaggcaggggttnnnnnnnnnnnnnnnnaacgccgggagccatcgccgttcaacccggtgatcgtgctccgtggaccgggggaggacgaggagagcagctttgagttatactacgacggattcgacggcgaggggctccgccgct

SEQ ID NO: 35191 - DNA, 296 bp, Glycine max
  unsure (1)..(296): unsure at all n locations; Clone ID: 701108916H1
ccaaaacaaatactaccatgttgttaatctactctttttatcactcttcctctntcggggngcaagttcaattcttcactctttttttttttncncttagttcggngaatcatggcgaacccaatcgacggtggcganttcgantgccttnccgggttcggnaacnacttctcctccgaggccctcgccggagctctgccggnggcgnagaanagccccctcgtctgcccgtacggactatacgcngagcaaatctccggnacctccttcattctcctngnaacgcaacctcttca

SEQ ID NO: 35192 - DNA, 299 bp, Glycine max
  unsure (1)..(299): unsure at all n locations; Clone ID: 701108917H1
actagccacaaacaaaaccaattccattttatccattccaacttcccaacccaaccaacaacaaccataacacaagacagtgtcagcgcgcacgcatacatggccatcacaggcaacctcaacctcaacctagtactccccgtngcacgccccatggcgtgccccccacgcgccccaacgtccctcctcgctcgtggccgtggcgcgtcgtcgtcaccttcgctcctggtcacgcgcgccatcgacgtgaacgagttcctgggggattcggggcgcgggaccctttccccgcgganttg

SEQ ID NO: 35193 - DNA, 296 bp, Glycine max
  unsure (1)..(296): unsure at all n locations; Clone ID: 701108918H1
ggaaaagctccatgcttctgtgctcgcccttgtattccttcttgtcatactatttcaggaaggattggtaacatgtatgaagaatgaagacggatcagaagaatggggatatgtgcaagttagaccaaaagcccacttgttctggtggctttacagaagtccatacagagtggagaatccctccaagccttggccaatcattctctggcttcagggnggaccaggctcttcaggagttgggtttggaaattttggagaggttggtcctttggatgctaatttgaagccacgaaatt

SEQ ID NO: 35194 - DNA, 293 bp, Glycine max
  Clone ID: 701108919H1
cttatatttggactgataagtttgttcatctccataacaagcatgatggttgcatttggttgttccttcttcataacttattactatggcatgaagtgggttcctagtttcatctcagtacttgcatgtctacctatacttctctttataggtctgcaattttcgctgtggtcagttattatctactcgacctactactgcaaagctctctttaagccaggtaaaaagatgctctacgtggtagagagaaaaggatacaatgtttaagataaatgaaggatcatataagtttc

SEQ ID NO: 35195 - DNA, 62 bp, Glycine max
  unsure (1)..(62): unsure at all n locations; Clone ID: 701108920H1
caatgatgagcttgncaagtggtaggtncgacagaaggatctcttgcnganggtctcnggac

SEQ ID NO: 35196 - DNA, 292 bp, Glycine max
  unsure (1)..(292): unsure at all n locations; Clone ID: 701108921H1
ggcttttcaaaccctctttctccgttccacccaagctcttgccnncgctctgcgtcttgtgaatctactcaaatgtcaggttgaagctcttgaaccgcttcttcagcactaacttgtgcaccttcctgttctcgttcaaacctttagggctaagagaactcagaatcttgctccacgtttcaacctggtagttcttgtgcttcgcttttccttcaagatttgtgtccagaagctccattaccctcataactgcgccgcaaaaggtgacacatttctttttgtttgttgttgt

SEQ ID NO: 35197 - DNA, 292 bp, Glycine max
  Clone ID: 701108922H1
caacatctatctcacttcttagttctttgtggctctttccatgatggcctctcctacatctccaagagttctcttcttgagtctctttgtaactctttccatgattttacatttgagttcagccaggaagttgtctgagtcagacccccaattgcagttccaataccacagaggccctctcctcacaggcaaaatctccgtaaacctaatttggtacggtaagttcaaaccttctcagaaagccattgttgctgattcatcacctctctctcctcttccaaacccctcaccg

SEQ ID NO: 35198 - DNA, 296 bp, Glycine max
  unsure (1)..(296): unsure at all n locations; Clone ID: 701108923H1
gaagangttagcncgctaacgacacaacaatcctaacataaaccctaaaccctccacaaggtgctgcatttctcggtgcaaaatcatggcgaaatcatcaaaacgtagcgtcggaaccagcaccnaccgnnnnnnnnnnnnnnnnnnnnnnnnnnttcggtccagaaggcgtggccatgaaagtgaaagccaacaacaacgccactgcctccaaccccttcgagtcaatttggtcgcggaggaaattcgaggtgctagggcagangcggaagggcgaggcgcggcgcatggggctt

SEQ ID NO: 35199 - DNA, 293 bp, Glycine max
  unsure (1)..(293): unsure at all n locations; Clone ID: 701108924H1
gtgtggttgaaagttaagaagtagcaaagatgtttccattcgggcacaagggtccaaaagataaaggggactatngtggttatgcagaagaangtgttggatatcaacagcatcaccagtgttgacgggatcgtcggcaccggcttagacntcttaggcagtgcactcgatacagttacttttttagcctcctccatctccatccaacttattagtnctaccaaggctgatggtgggaaaggaaaagttggaaaggctacaaatttgagaggaaagataacattaccaaccat

SEQ ID NO: 35200 - DNA, 282 bp, Glycine max
  unsure (1)..(282): unsure at all n locations; Clone ID: 701108925H1
ccagtcctttgtaaggataggattagagccagcactagntggtgttgcctcagctccccctcattcatgttcccatctttcataagcttcaaccaacatgctccatncnaactcacttnngagagccatgtccatttcatttttagctcacattcccaacactgattcacgccttctcttgaccaacaacatgatggattgcacttgcacttgtccattttaccctccaacaatctggccaangctacaacccgcaagttaacctttgtttnttcctcccaa

SEQ ID NO: 35201 - DNA, 288 bp, Glycine max
  Clone ID: 701108926H1
gatgaattggagactgtttccaaggagtggggaattgaggctatgccaaccttcctgttcttgaaagaaggcaagctggtggacaaggttgtgggtgccaagaaagaggagctgcaattgacaatagccaaacatgccgcaattgctgctgcttgaagtgccatatgaatatgttaagaataatagactattgtcttcgagtcagtttgcttttattactattaatctgttattgggtctgtttgcatgatttcagaacggatttagagttagtaaaacatggatggg

SEQ ID NO: 35202 - DNA, 286 bp, Glycine max
  Clone ID: 701108927H1
tggagctactgctgctctgatagggccaaaggatttaccaatcatatgcagaacagcaggaaggctagctggtcgagctattggatatgtacaattggctcgtggtcagtttgacactgttatgcagcaatctcaagctcgccaggttcataaggaactgcaagacacaatggctcagctagatgccattcgccatgaaattcgaagtatatcaatcataaatcctggcccttgacgcggaggcttgtggatgatcctgaccagacatctatctcaaatgaaagta

SEQ ID NO: 35203 - DNA, 96 bp, Glycine max
  unsure (1)..(96): unsure at all n locations; Clone ID: 701108928H1
gaatgttcttatcctttccgtctctgttaatncatggcgtgtctgtctcccactatcattcagtgcaacgtaaccttgtgattcttccaacaacaa

SEQ ID NO: 35204 - DNA, 291 bp, Glycine max
  Clone ID: 701108930H1
ccaagttcatcgttactcatggcttgtaacgtaacattcgtgtttcaagattaatcaggactataataatagtttgcccactattaaattcttgaatgaaaacaaggcgattgtaacgtctatataaagcaaattacaagtacaagtgagaagtgtcctttagtctgtgaaagagacaactacaacaatggccacttcactaaccctattcaaaacaatctttgttttcttaattatctcactctcctcacaccccaagccacggctgattgtgaagccgaatccagaaac

SEQ ID NO: 35205 - DNA, 213 bp, Glycine max
  unsure (1)..(213): unsure at all n locations; Clone ID: 701108931H1
gttgcagtgtacngtattgtttcttagtgcacttttttttggcatcaaagaggttaaatccatggattctgattatggtattcccagggaactctcagatcttcaaaagattcggtcgttgtaccagccagagcttcctccttgtctccagggaaccactgtgagggttgaattggtgatgcaaccaccactgctgaccccactgatgcactc

SEQ ID NO: 35206 - DNA, 295 bp, Glycine max
  Clone ID: 701108933H1
gtcaacgagtgacttggaagcaagtaagcaacaaaaacagcggtagttacaacttacaattctcgaactcacacgcagagagagtagttcagtgtggagagatgagtgcatatttgataacagccattcatctgttacttgtgttcctgtcatcatccacttccctttcgaccgtgttcggctccgaggaggaacaattctatgccaaagaaattctcggagcagcacagaaggagaaggaatggttagtttcagtaaggagaaagattcacgaacacccagaattgctttccaa

SEQ ID NO: 35207 - DNA, 292 bp, Glycine max
  Clone ID: 701108934H1
ggcaattatttgtggctatatatatcagtgtccaccatttcggttaagctaccaggggctaggagagcccttgtgctttgcagcatttggtccttttgccacttgtgctttttatttattacatgccagtgcaagggtgaagaaccatttcccattaagtggaacagttctttcagcatcaattcttgttggcttcacaacatcacttatcttgttttgcagtcatttccatcaggtggaaggagacaaggaggttgggaaaatgtcacctttggttagacttggcaataaa

SEQ ID NO: 35208 - DNA, 270 bp, Glycine max
  unsure (1)..(270): unsure at all n locations; Clone ID: 701108935H1
agtgcctggcgtcgcggacacagacacagagcttgcagaancgatttctcatttctcattctaacaacacacttcancaatggccaaaaccttcaaatacatcatcctcggaggaggagtttccgctggttatgcggcgagggagtttgccaaacagggcgttaagccaggggagttggctatcatttccaaagaagcggtagcaccttatgaacgtcctgctctgagcaaggcttacctttttccagagtcccctgctagattcctggg

SEQ ID NO: 35209 - DNA, 291 bp, Glycine max
  Clone ID: 701108936H1
cacagtggtgacacccatcttgggaggtgaggattttgataacagaatggtgaaccactttgttcaagagtttaagagaaagaacaagaaggacataagtgggaaccccagagcacttagaaggttgaggactgcttgtgagagggccaagagaacattgtcatccactgcccagaccaccattgaaattgattctctctatgagggaattgatttctactccactgttactcgtgccagattcgaggaactgaacatggatctctttaggaagtgtatggagccggtgga

SEQ ID NO: 35210 - DNA, 290 bp, Glycine max
  Clone ID: 701108938H1
gaagaaatagccagagacatccagagggcggagacagaatggaggatcattctgcttcgatacttcaatccggttggtgcccacgagagtggacagattggggaagatccaaggggaatccccaataacctcatgccttacattcaccaagtcgccgttggcagattgcctcagctcaatgtttatggtcatgactatcccactaaagatggcaccccgatccgggactatatccatgtaatggacttggcagatggccacattgctgccctccgaaagtttttgcaaca

SEQ ID NO: 35211 - DNA, 287 bp, Glycine max
  Clone ID: 701108939H1
caaaacactctttatttcctctctctcaatttttagattctttcactttctcttcgatggattcaaagcaattcgatcgcgcgagtcgcaaggttcgggtcgtcgccaggattcgcgggttttcggtgggtcccgaggctaattccgaaccttccgcttcgagagcggtggagtgggtttcggtgaaccgcgaaaatttggatgatgtcaccatttccttcggagatcaatcttccagtcggtatttggtggactattgctataaggaagatgaagataatgaatga

SEQ ID NO: 35212 - DNA, 279 bp, Glycine max
  Clone ID: 701108940H1
gtacggcaccggcagattggagaaccggtcgtcgttggaggcggacatagcggctgtgaagcccagccacgtgttcaacgccgcgggtgtcacgggtagacccaatgtggactggtgcgaatctcacaaagttgaaaccatccgaaccaacgtcgtcggcactctcaccctcgccgacgtctgccatcataaaggcctcatcctcatcaactacgccaccggctgcatcttcgagtacgattcttcccacactctcggatccggcatcgcttcaaggaa

SEQ ID NO: 35213 - DNA, 257 bp, Glycine max
  Clone ID: 701108942H1
gcgtgttctgagctgctagaagcaatggagaggaaaagaagccatgcttctttcaccatgtttgcaatgcttgttggattgctctctcagagccttgtcattcctgcaatatccaccactgttgcagatcagaagaactactacaccccagatccacatgctggaagtccccccacaggtttctccgattctctgtgctcacacaatagtagtcctccatctcatggccatgggagctctccaccctcacatcacaa

SEQ ID NO: 35214 - DNA, 286 bp, Glycine max
  Clone ID: 701108943H1
caaaatttccctcaattatttctcaccatcatcaccccctttccttctctcaagaaaaaaaaaagttaatttcttgaacccaatggcttcagagacagaggtgccggatattatttcctctgttttcgaaaggtttcaacaaaacagagacatgtctctgtttctgcccttcctcttcggcttctctgacgccaccccaggacgaaatagcgacgacccagatcacgaaactgctcccacagaagccccacaacgtcaaagaataatcttggtgaaccccttgact

SEQ ID NO: 35215 - DNA, 285 bp, Glycine max
  unsure (1)..(285): unsure at all n locations; Clone ID: 701108945H1
canatccgaagcatgatgcattgtgcgagcattgtctcggctccgtcctacgcgttcccttttctctctggctccgcttccactantccaactgcgntctcgctcactaagcgcagttggaagccacctccgagcatggcaaaaggcccagtcagagccaccgtttctatagagaaagagaccccggaggccaatcgtcccgaaacgtttctcagaggagtggacgaggcccagtcttccacttcggttcgggcccgcttcganaagatgataagggaggcccag

SEQ ID NO: 35216 - DNA, 287 bp, Glycine max
  unsure (1)..(287): unsure at all n locations; Clone ID: 701108946H1
gcagacagaagcgaangcanacggggttgcctcaacaattcgctgttgttgttctcttctcttctctttgacatgaatactctttcttccacgctccatggcggnnnggctccccgctcagcttcgaaaaccaaaaccgcatctctctccaaatgccatcgcatttgggtcaccaaagcttctgttgccgttgagcaacaaactaaggtcgctctcatcagaattggtaccagaggaagtccactagctctagcacaagcatatgagaccagagacaaactcatggc

SEQ ID NO: 35217 - DNA, 290 bp, Glycine max
  Clone ID: 701108947H1
tttcttcttctttctttcttccaaagccatttctaaagttccaagaactttctccatcacccacatccaccattagccaccacaaactatcattgttctccattgaaaacccacaccgagaggaacccttcaacctaagcggaatcttccaacttggcttgcggttccggtagagaaaaaaaaccctaatctgacctttcattttctttcgagaggcttgtgtggaattgacgagcaaggacaaaaaggaatcttcaagtgacatgacgaggaatccgcggggtagcaca

SEQ ID NO: 35218 - DNA, 291 bp, Glycine max
  unsure (1)..(291): unsure at all n locations; Clone ID: 701108948H1
tgttatttcacgcgttctctctccaatttggacctccctttccttcgttcctcactcactgcaacgncgccggagatccgtcgctctcctcctccaccaccaccgcgatgggcgccaattccatgctcgccgagttctctcacgatctcgacgaccagatctcccagctcatgcagtgcaagccactctccgagcaacaggtccgaggtttatgtgagaaggctaaggagattttaacggatgaaagtaatgttcagcctgttaaaagccctgtgacaatttgtggcgata

SEQ ID NO: 35219 - DNA, 289 bp, Glycine max
  unsure (1)..(289): unsure at all n locations; Clone ID: 701108949H1
gttaattttcagttttggttttttgggcggctccaatggcaacctctcaaatcactgcatcattgaggaacttgcctgcatttgaaaggtttcaaccttcagcgcttcgattttcttctgctgggcacgtcagaattggaacactcacgcaaccctcgtttccctctttcgttgtcaaagccgccactgttgttgcccccaancacaccactgttaagcctctgggtgatagagtactggtgaaaattaaggatgcagaggagaagactgcaggtgggatttactgcca

SEQ ID NO: 35220 - DNA, 287 bp, Glycine max
  unsure (1)..(287): unsure at all n locations; Clone ID: 701108951H1
ganacaggttccatgtcggccaggacttgggggagcaattgttcctcgatcttgtgatcatgttcctcagcctggtgaagaaccttgtccaattgatccctggctcgtggttcctgacaagagcagatatgttgatcaacaaactttgaagatgcaaganaatccagaggatgttccaactggagaacttcctagaaacctgcttctctctcttgatcgacatctggttcagacagtggtgcctggctcaagattgacaatcatgggaatttttagtatctaccagg

SEQ ID NO: 35221 - DNA, 284 bp, Glycine max
  unsure (1)..(284): unsure at all n locations; Clone ID: 701108952H1
ctctgcctcaaccagcgatggtggaattttgagcctttcccttganatcaatgcatgtaaagactaaagctttgatgatgcatattggtttttcgttagcacattcatgtgggtcattgcgtgcttctattagtttcagcaaagtggcaaaagggtctgtgtttgtttgacttgaggagggttcttctttttattaagtgcaaaggtagctgcgttgtgcgtgtgagtgtgtgtctttnttttttttccattttgnggcatgaacnaccttggggggnanattt

SEQ ID NO: 35222 - DNA, 282 bp, Glycine max
  Clone ID: 701108953H1
ggagtttctgcagtttgacacatcaagagtccctgtcatagttacactgactaaggttgggaggcactatattgtagatgcaacatcaaaagaggaatcacaaatgagctctgctgtttctatttctgttaataggcaagggcacatctgcggcataaccaaacgtggaggtgtagggctggatccaagcatcattcttgatatgatatctgtggctaagcatgtaagcgagcaattaataaacaattggatcagaatagcttctgctgaagctgaagagga

SEQ ID NO: 35223 - DNA, 286 bp, Glycine max
  Clone ID: 701108954H1
gataggatgagcaaggagattacagcattggcaccgggtagcatgaaaattaaggttgtagcaccaccagagaggaagtacagtgtctggattggaggctctatcttggcctccctcagcaccttccaacagatgtggattgcgaaggcagagtatgatgaatctggaccatcaatcgtacacaggaaatgcttctaagttataacaatggagtatgaaagatggaccagggaaattactatttatacgaacactacaaaaataccatcaagtggttgaggaactt

SEQ ID NO: 35224 - DNA, 285 bp, Glycine max
  unsure (1)..(285): unsure at all n locations; Clone ID: 701108955H1
acatgaggcactcagagagcatttgttgatttggatttggaaggtttttccactttggttacgggntccaacttaannnnnnnnnnnnnnnnnnnnnnntccacattgtacaaatgantccttcagggtacttggtagtagtggtgcttgacaaagatattgaagatgggaattttgagtactattgcaagcttttttggatttggagtgggaattcaattgggctagtcattggctactatttgttcatatacttccagccaacagatgttnnggatccagtaa

SEQ ID NO: 35225 - DNA, 284 bp, Glycine max
  unsure (1)..(284): unsure at all n locations; Clone ID: 701108956H1
cacgtcttctctttcttaaagcactaaaacagcttttaattccttcatttcacactttcgtgcactnncntcccccctattttgttaccctcttgagtttcttcctcattcactgaactttttatgaatatttttgcatttttatcgtattatgtttgccaagtttttgtttttgtnttgttttaacgtgtttgtgagttttctaacatttttcccttcctaatggtgttttattttgtctgcagaacaagatgcagggtatcaggcgcaggatgctgccctgg

SEQ ID NO: 35226 - DNA, 282 bp, Glycine max
  unsure (1)..(282): unsure at all n locations; Clone ID: 701108957H1
gcagttccattaacgctggcttcnacactagagcagacnctnncanntataaggaaggtggggtgggatacaaagctagtgaatgnctcatatcctngngttgagaagnagattgttcaccggccaaagttttcagattggcagagagcagttaggncacgggcttctagcagctggtgtgtctcctttcaatggcttcacctatgatcacaagtacggaaccaaagttggtggaaccatttttgacagattggccgtcgccacacagctgctgaattgctg

SEQ ID NO: 35227 - DNA, 280 bp, Glycine max
  unsure (1)..(280): unsure at all n locations; Clone ID: 701108958H1
aagagcatcactgaactaacaaagcaaccctatgtcgaaggtggtttgtgtcaccggagccagcggcgccntcggatcatgggtggtcctactcctcctccagcgtggttacaccgtccatgccaccgtccaagatatcaaggatgaaaatgagacgaaacatttggaggaaatggaaggagcaaagagtcatctccatttttttgaaatggatcttcttgacatcgactccattgccgctgccataaagggttgttccggcgtatccaccttgcatgtc

SEQ ID NO: 35228 - DNA, 282 bp, Glycine max
  unsure (1)..(282): unsure at all n locations; Clone ID: 701108959H1
caaaaatttactactaaagagatgagttttgcaggttttctttctcttcaatcaatgtctgctacnnnnnnnnnnnnnnnnnnnnnnnnnacccttctcttctcccttcttctccttcctcgtcttcatctccaggatgaagccctggtgtaactgcgatctttgcaagagctacttgacggtgagttggctgaaaaagttccccaatctctgcgactggtacactcatctcttgcgtaaatccccaaccggcaccatccacgttcacgtgctggggaacac

SEQ ID NO: 35229 - DNA, 285 bp, Glycine max
  unsure (1)..(285): unsure at all n locations; Clone ID: 701108960H1
ggctgcgnntcnncanaatgngtgcnnacnaagtatgnntcggagntatggcgcaagaangcagtactgatgtnatncagattcntgncagcggncgaggtgctgggagtatcgacagcaacctncntattgtccgtttgacaaggtctactcgcccagatanggctcgtcgcttgggtttcaaggctaagcagggttatgtgatttacagcnttcgcgtacgaaggggtggccgtaagagaccagttcnaaagggtatgtttatggtaagcccaccaaccaang

SEQ ID NO: 35230 - DNA, 102 bp, Glycine max
  Clone ID: 701108961H1
cggagggtgtctctgttgtcccaggtaacatcatcttgaatggcagtaataatggctttgaatggttattattacaacaatataaagttgggaaatcaacga

SEQ ID NO: 35231 - DNA, 284 bp, Glycine max
  unsure (1)..(284): unsure at all n locations; Clone ID: 701108963H1
gagtagaaaagatggcgcggttgatcacagtggtgtggtgcgcggtggcngtgctactgtgcgccgcggcgggcgcgtcgtgggtggaggaggcggcgaacccgatacgaatggtggcgggggtggaggcggaggtggttcgggtacnagggcagtgccggcgcgcgctgaagtttgctaggttcatgagcaggttcgggaagagttaccgaagcgaggaagagatgagggagaggtacgagatattctcgcaaaacctcaggttcatccgctcccacaacaag

SEQ ID NO: 35232 - DNA, 287 bp, Glycine max
  Clone ID: 701108964H1
cgccgcagagtcagagagagagattcactgaaacagagcgcagaagaaaatacataaactaatccagaaaatgagcagcggcgctggaaaggtggtgtgtgtcaccggcgcttccggttacattgcttcctggatagtcaaattcctcctcaatcgcggctacaccgttaaggccaccgttcgcgacacaagtgatccgaaaaaaataaaccacttggttggcctcgacggtgctaaggagaggctgcacctctacaaggcgaatctcttgaagaaggttcctttaa

SEQ ID NO: 35233 - DNA, 287 bp, Glycine max
  Clone ID: 701108965H1
tagagattctggagcctaacacgtgcattaggggttgctgcaccagcccctctattccccttcatctccctccctcttcttatacccttctctctcctattgcccgagggtctgagagtgttgtttatgaagggactttggatggcacgagggttgctgtgaagaaacccatcttgtcaacttcagaagacattaataagtttcataaagaatgcaattgttgtgcaagttagatcatccaggaatagcaacaccgattgcggcccagcaaaaccgcccaattacat

SEQ ID NO: 35234 - DNA, 150 bp, Glycine max
  unsure (1)..(150): unsure at all n locations; Clone ID: 701108966H1
tgcaactctctaccttccctctttttccgaatctgaatagaaatggcttcggagactgagacgttcgcttttcaggccgagatcaaccagctcctcagtctaataatcaacaccttccacacaanatacgannnnnncnnnngggnnnng

SEQ ID NO: 35235 - DNA, 122 bp, Glycine max
  unsure (1)..(122): unsure at all n locations; Clone ID: 701108968H1
ctaagctcactctttctaagtttcttctatcatctctccaccatggttctctccnaaacngcctccgaatccgacgtctctgtccacacaacatacgantttnnnnnagggngangtgcngt

SEQ ID NO: 35236 - DNA, 284 bp, Glycine max
  Clone ID: 701108971H1
agagtggtcaatcggaagcattttccgtttccatttccattttgtttgggcatcaaccggcataggcaatataaaaccccatttcgtgtgctaccgctactgacgcaactcacaagtgaagaagaacgagagattgagaagagaaagcgttccaaaatgttcacgctatctcgcgtgttccctctcacttccccttccaggcataggctcttggaagtgctgtcctctaggaaagttgaagtcggagaccgtctgcgccaagaggggcgcgattttacctattt

SEQ ID NO: 35237 - DNA, 286 bp, Glycine max
  unsure (1)..(286): unsure at all n locations; Clone ID: 701108972H1
gcacaacacaacaattcactaagctaaaatcacttcatcatgggcttcctccgtgtgcttcctctgccattgcagctgttgccatctccacaccaagttcccagnagaatggatcactcttgggaagcacaaaagcttcttttcttagtgggaggaaactgaaggtgaacaactttacagcaccagttggagcacgatccagcactacagtttgcgcagttgctgagcctgataggcctctgtggttcccaggcagcacccctcctccatggctagatggcagttt

SEQ ID NO: 35238 - DNA, 271 bp, Glycine max
  unsure (1)..(271): unsure at all n locations; Clone ID: 701108973H1
caaaaccctcttttttctctctcttgcaaaacctaattttcatttcttccctcaaatttcaaaatgcgtganatccttcacatccagggtggccaatncggcaaccagatcggcgccaagttctgggaggtggtttgcgcggagacgggatcgaccctaccggaaggtacggtggggactcggagttgcagctcgagaggatcaatgtctactacaacgaggccagttgcggtcggttcgtgccgcgcgcggttctcatggacctcgaacc

SEQ ID NO: 35239 - DNA, 278 bp, Glycine max
  unsure (1)..(278): unsure at all n locations; Clone ID: 701108974H1
gtggaggcactacttccagaacactcagggtcttatttttgttgtagacagcaatgatagggacagagttgttgaggccaganatgagttacataggatgttgaatgaggatgaactgagagatgccgtattgcttgtgtttgcaaacaaacaagatcttcctaatgcaatgaatgctgctgagattactgacaagttgggtctccactctctgagacagcgtcactggtacattcagagcacctgtgcaacctctggggagggccttacgaagtctg

SEQ ID NO: 35240 - DNA, 277 bp, Glycine max
  Clone ID: 701108975H1
actcataacacaaagcacaaagcaaagctcatccttgagttaaaaaatggcagcagcttcttccatggctctctcatccccatccttggctggcaaggccgtgaagctgggcccatcagccccagaagtgggaagggtgagcatgaggaagaccgtcaccaagcaggtctcctcaggaagcccatggtacggcccagaccgagtcaagtacttgggcccattctctggcgagcccccgtcctacctaaccggtgagttcccaggcgactaggtggga

SEQ ID NO: 35241 - DNA, 274 bp, Glycine max
  unsure (1)..(274): unsure at all n locations; Clone ID: 701108976H1
ttgggaagagggttgaagaaaaccatggactggtatatcaacaatcctgattggtggggtgatgtcagtggtgcattgcttccccntccaaggatgctgatgatgcccggtggactggagagacattttgatggatctgacgaagaaaaacctccatcgtatgtctcaactaatactcgaatggtggttccgacatccaanantgttanctcctcacagaaacctgctctcaagttcttgctctatggcagaacaggttggatgggggttgctg

SEQ ID NO: 35242 - DNA, 279 bp, Glycine max
  unsure (1)..(279): unsure at all n locations; Clone ID: 701108977H1
ttcaggatgaggataagccttttcctgagtttccctccttcatccccttccatggcagcaccttcactctcctccgctctcaactctctctcnnnnnnnnnnnnnnnnnnnnnnnnnnncacctcctcccgccgcttctctctcctccctccaccctcacaccaaccctccaaacccctcttcctcaccctcaaatccaaaccctccgacgacattgacacatcgttcttcgacaacatcaacccgcaagacgacatcacattcaatccccggagnccc

SEQ ID NO: 35243 - DNA, 282 bp, Glycine max
  Clone ID: 701108978H1
gacacgggatgtgattatgggatctgtagtcctgtgactccgaacaccctcctccctctatatatctatatccaaatctcccttcaattctcaatctctgaaaccacaattcacaaccgaaacagtttccatctctctcacaaaatgacaacaatatcaaattgctcccttctcttcctcttcctcttcctctccaccctccacatagcttccaccctctcaacccccaccaacttcatcaagtcctcctgcagcaccacccagtacccagccctctgcatc

SEQ ID NO: 35244 - DNA, 283 bp, Glycine max
  Clone ID: 701108979H1
aacacattaacctttctcattccccatctcctcaccttattcagccactgctaatttctagggttccgaaatggacgctggcggaaagatcaagaagggcgccggaggaagaaagggcggcggccctaagaagaagccggtttcaaggtccgtcaaggccggtctccaattccccgtcggaagaattggccgttatttgaagaaaggaaggtacgcccagcgtgtcggtaccggtgctcccgtttacttggccgcagttctcgagtacctagctgctgaggtg

SEQ ID NO: 35245 - DNA, 283 bp, Glycine max
  unsure (1)..(283): unsure at all n locations; Clone ID: 701108980H1
cgcccccaccactgtttcaaccctcaaattgtgtcttcttcgctttctggttttgattaggttttgttccatttgaancaatattcatcgatccatcgccaaacatgccttctagtcacttgcttcttgaggaacctattaggatggtctccatccttgaaccatccaagcctagttttttctctgcaatgacaaagattgttggtaccctggggcctaaatctagatccgtcgaaactatttctggttgtctcaaggctggcatgtctgtggctcgttttga

SEQ ID NO: 35246 - DNA, 280 bp, Glycine max
  unsure (1)..(280): unsure at all n locations; Clone ID: 701108982H1
gttcntngggcanaaactntgcggnggttataccctgtagagactanttccactgttggaaaaatttgtgctnnngcanananagtctataatcaagatttgtngttcaagaaggctgtcaagatttnctgganagncgatgactcatntggantcaatagcttcctctgcngtacgggcngcaatcaangttgaggcatctgttanatncgcttcacntcatctggcagggctgcaggtngantgctnagtaccgtncanncatgcctgtnaatccgtt

SEQ ID NO: 35247 - DNA, 283 bp, Glycine max
  unsure (1)..(283): unsure at all n locations; Clone ID: 701108983H1
ggatgaggataagccttttcctgagtttccctccttcatccccttccatggcagcaccttcactctcctccgctctcaactctctctcnnnnnnnnnnnnnnnnnnnnnnnnnnncacctcctcccgccgcttctctctcctccctccaccctcacaccaaccctccaaacccctcttcctcaccctcaaatccaaaccctccgacgacattgacacatcgttcttcgacaacatcaacccgcaagacgacatcacattcaatcccccggagcccccggaagg

SEQ ID NO: 35248 - DNA, 281 bp, Glycine max
  Clone ID: 701108984H1
acgtgatcaataactaaattgatattccgtagagctttcattctgtgtgaacactctagttgctaacagatgcattaagttgtaggtatttaattgtccccagttgagagaggtttccttggagttttcttgccaagagaatgatagtacggatctcaaaactatgattgaaggtttgggaagaagttgtctgagattgcaaaacatacatatagcttcaatatggctttcacactctgccgtgcttgctcttacagctgctcagttgagggggctgcgaa

SEQ ID NO: 35249 - DNA, 280 bp, Glycine max
  unsure (1)..(280): unsure at all n locations; Clone ID: 701108985H1
ctcaagaatgttgctgccgtaacatcaacctcaactcgcacacnaatttataaagcctttgctaaaggagaaaacataggggatgtcactgctaaaggagaatgtgttggcaatattgcagacctgttaggaactggtttgagcatattgattgccaaaaggaatccatcgcttgtcaccacattttccctcctttcatgtggatatatccttagctcttatagagaggtaaaatctgtggttttgcacacacttaactgtggaagattcagtgtggcag

SEQ ID NO: 35250 - DNA, 282 bp, Glycine max
  Clone ID: 701108986H1
ggcggtgagcaatcgcgtgaattttcaacgggattttgcagagcttccgcgttgaaaccatccaaccctcttagcctcatattcgttgtctatacttccctccttccttcgtgtaattacatttttttcatcagcagttccaggaccaaattgatacacaagatcactgtttttttagagagagattgagagaggatgtttggttcaaagaaaactcctctgagagatgctaaacctagttctgttggccatgcccataacccctttgattctgatgaagag

SEQ ID NO: 35251 - DNA, 279 bp, Glycine max
  unsure (1)..(279): unsure at all n locations; Clone ID: 701108987H1
aattaaactacatagaaaaataaaaccaaacctttcttcctactactcccattcccacatttcgacaacatggacgaggacttcgacatgccgacggcggaggcaatgggcgnggacttcgacttcgccggcgccaccggggcgacctcgacggcagcagcagcaaccccatcttgaaggtcggcgaggagaaggagattggaaaagagggtttgaagaagaaactacttaaagaaggtgaaggatgggacactcctgaagttggtgacgaattcaagt

SEQ ID NO: 35252 - DNA, 279 bp, Glycine max
  unsure (1)..(279): unsure at all n locations; Clone ID: 701108988H1
agactgtacactgagactggttttaaagcaacgccacttgttccagccatgcctcctcangngacccaacaacctctgttatcggaggagcaagaagagacagcctacgattcctcggagaaggttgtggtggtcggaatcgacgagcacgacggcgacttggaggcgccgccgttctcatggcggaagctgtggctcttcaccgggcccgggtttctgatgagcatcgcttttctggatcccgggaactcgagggggatcttcagtccggtgccattg

SEQ ID NO: 35253 - DNA, 276 bp, Glycine max
  Clone ID: 701108989H1
gtttagatggcataattatgaaagttgaagatgttgaacctgttctcgagctaaaggaatatttcgacagaagaatggaagaaagcaatctactgagcttgaccaaagccactgtaacacatattcaagcagctggaatgggtgatcgcgtttgtgtagatctctgcagtctcatgagacctggtgaaggacttcttgttggatctttgccagaggattatttcttgttcactcggaatgctggagtcaaattacattgcaagcaggccgtttcgg

SEQ ID NO: 35254 - DNA, 241 bp, Glycine max
  unsure (1)..(241): unsure at all n locations; Clone ID: 701108990H1
tgttaggcaatacaacatttattacgcatactcaaagtagcttcgaagttcgtatttntattggcatatcatggagaataataatcagtcgttttggcaattcagtgaccagctgaggttacaggcatctaatttggcgaacctttctctaaacgattcgatttggagcaacagttacatctccaagaggcgtgatgaaaggattaattttgacatcaaagttgggggtgagatcaactct

SEQ ID NO: 35255 - DNA, 274 bp, Glycine max
  unsure (1)..(274): unsure at all n locations; Clone ID: 701108991H1
catagctgcagcattagggtttttcatctgcttcaatggggaagggaacagggagttttggtaagagaaggaacaagactcacactctctgtntgangtgtggccgccgaagttccatctccagaagagtcgttgcgccgcttgtggcnttccccgccgcaacgcactaggaaatataatggagcgtcaaaggaatccggcagaaaagaccaccggaatggcangatgaggtacttgcgtaacgtgcctcgccgatcaagatggctcagagaag

SEQ ID NO: 35256 - DNA, 255 bp, Glycine max
  unsure (1)..(255): unsure at all n locations; Clone ID: 701108992H1
ctctaatcattcgaatggccaaaganngacctaactgggacnggttgctnaaatggagcatngctcactccgatgggactagccctactcgcaatttaagtgaggaggatcgaaaatggtttatggaagcgatgcaagcacagaccattgatgttgtaaaacgtatganagagatcacacttgtgatgcaaactccagaacaagtattganagaccaaggagttacccctgcagacattgaagatatgttggaag

SEQ ID NO: 35257 - DNA, 284 bp, Glycine max
  unsure (1)..(284): unsure at all n locations; Clone ID: 701108994H1
gtggcgccttatcgctgnggttatcattcttgcttcttcctctttcttagatctcttcttgnctctnngccgcacgccgaancncanngncngaanaggagagggtcctgctatcggaatcgatctcggaancacctactcntgcgtcggtgtgtggcaacatgaccgcgttgaaatcatcgccaacgancaagggaacannaccacgccgtcttacgtcggattcactgacaccgngcgtctcatcggtgatgcggccaatnatcaagtcgccatgaacccca

SEQ ID NO: 35258 - DNA, 283 bp, Glycine max
  unsure (1)..(283): unsure at all n locations; Clone ID: 701109001H1
atttcttttaataaaaaaaacttagaatcgaaacgaaaaatcgccatgaatcccaaaatcctcttcgtgtttgctctgcttctgaatctcgtatccaattcgttccaaaaccctaaccctaaaacccccaaatcaacgtcatcgcaggctcacgtggagctcatcaaccacggcttacccgccggtcttctccccgccaccacgtcttgggctacgccgtgaaccgtacctccggtgatttacgtcaagctcggggcgcgtgnaanatcaggctcccggggaa

SEQ ID NO: 35259 - DNA, 254 bp, Glycine max
  unsure (1)..(254): unsure at all n locations; Clone ID: 701109002H1
cggcgcggcacccacacacacagttcgtcggaannggaanggtgattcgcgctcagcgtaagggtgctgggtcggtgttcaagtctcacactcaccaccgcaagggtccggcgaggttccgcagcctcgacttcggcgagcgcaacggctacctcaagggcgtcgtcaccgacatcatccacgaccccggtcgcggcgcccctctcgccaaggtggcattccgccaccccttccgctacaagaagcaaacggag

SEQ ID NO: 35260 - DNA, 211 bp, Glycine max
  Clone ID: 701109003H1
acatcatcatcaaaaaaacttccgagagtttaatggcaacacgcgtgatccctccaagaatcctcaagaagctccgttacaacacaacaaccaagccactcaacgctgcccacccctcaatctctccagtcatcgccccaccgtcactcttcgagaggtcgccgtcccctgtcgcggatgctgtttcaacaacatccacgactatggagag

SEQ ID NO: 35261 - DNA, 280 bp, Glycine max
  unsure (1)..(280): unsure at all n locations; Clone ID: 701109004H1
ctccttcaacgcatcccaaccctgtggcgctataccctcctagatctactctctaactgctatacaggctggtactaagagtgtggttagtcatagatggcgctctcagcttcacgggcaatgtcaaagggtgtggtggtatctgtgcctgttctggttctatctgctttagtggctactgttttcctgtncttccttttgtcctctctttcatcctgctcctgccctactccttcagaaatctctgcctccaatgttaggagtgttggtgttggnatgg

SEQ ID NO: 35262 - DNA, 264 bp, Glycine max
  unsure (1)..(264): unsure at all n locations; Clone ID: 701109006H1
cancaccaggcgcacgttagcacaacctatcatggccacggcaacagcagctgccacctcgtcctttatggggacgcgtctcctggaggctcactccggagcggggcgagtgcacgcccgattcggcttcggcaagaaaaaggctcccgccccaaagaaagcctccaggggatcgggccgagacaccgacagacccctttggtatccgggcgccaaagcgccgaatacctcgatgggagtcttgtcggagatacgggttcgatc

SEQ ID NO: 35263 - DNA, 277 bp, Glycine max
  unsure (1)..(277): unsure at all n locations; Clone ID: 701109007H1
tttcagcttcagtttctcttgtgtttctcaaagtcangttactcatctcannaatcatttgcctccttctgagagacacacacatagatagatatgataacgttgtaatcgagatggctgccacgtgttgcaacttcactcaagcttcttctagtttcaagaaactgcatgagaacattcagctgcagagctacttcacaaggtgccatcaaagatcagcgtgtagtgttgaaaaagacttccataggagatatggaggnaggntgcaagttgaaag

SEQ ID NO: 35264 - DNA, 287 bp, Glycine max
  unsure (1)..(287): unsure at all n locations; Clone ID: 701109008H1
caaattctcaaatccaaatccaattccaattccaattcccaatcttctcaaaccctaattnctcatcttgaaaatgagagaaatcttgcacatccagggagggcaatgcgggaaccagatcggagcgaagttctgggaggtgatatgcgacgagcacggcatcgaccacaccggaaagtacagtggcgactctgaactccnttggaacgcatcaatgtttattacaacgaagcgagtggcggaaggtacgttccacgcgccgtcctcatggatctagagcccggcac

SEQ ID NO: 35265 - DNA, 288 bp, Glycine max
  unsure (1)..(288): unsure at all n locations; Clone ID: 701109009H1
gaaagtcctccctgctttgaatggaaaattgactggtatggcattccgtgttcccaccgtngatgtctctgttgttgacctcacagtgaggctggagaaagaagcttcctacgatgaaattaaaaatgctatcaaggaggaatcagagggcaagttgaagggaattcttggttacactgaagatgatgtggtctccactgactttatcggcgatagcagatcaagtatttttgatgcaaaggctggaattgcattgaataagaactttgtgaagcttgtttcttggta

SEQ ID NO: 35266 - DNA, 286 bp, Glycine max
  unsure (1)..(286): unsure at all n locations; Clone ID: 701109010H1
gcaagaatggngaaccggttaagaggaagtggtcacggaattgcagctgcaaggatggatgcaaaactaaatgcagcaggttggatgtcagaaaagatgggaggtctcagttaccttgaattcctccgaacacttgaagagagagttgatcaagattgggccgatatctcatcatctcttgaggagatccgcaaatctatattttccaagcaaggctgcttgataaatgtcactgctgataggaaaaaccttgcaaagacagaaaaagttctgagcaaatttgttg

SEQ ID NO: 35267 - DNA, 286 bp, Glycine max
  Clone ID: 701109011H1
gtcaattccaacaacaccacaatgggaagaagaccggcgaggtgttaccggcagataaagaacaaaccgtacccgaaatcccgtttctgccgcggcgtgccggagccgaagatccgaatctacgacgtgggaatgaagaagaaaggcgtggacgagttcccgttctgcgtgcacctggtctcgtgggagaaggagaacgtctccagcgaggctttggaggcggcgcgcatcgcatgcaacaagtacatggccaagttcgccggaaaagatgccttccacctgcgcg

SEQ ID NO: 35268 - DNA, 286 bp, Glycine max
  Clone ID: 701109013H1
gcctcgtaaatatcaccatcaacaggcaacaccttttcctgaatcaattgatgtcttgtccttctcctccctcagttcctcttcactccctttcattctccctcgcctcacacgcacacgcacacttgtcattctcaaaacacgcccaaattcgaatcaaattagggttagggtttccaactcccctcgaattatccctgtaatgcagtttaattcccgggtcctactaccatggagccatcagcaatgtacggacactcccagcccctgagcatgccctcgcaga

SEQ ID NO: 35269 - DNA, 286 bp, Glycine max
  unsure (1)..(286): unsure at all n locations; Clone ID: 701109014H1
ccaaagtgcttctctcctctgtctttttctctctcttgctatccttttggctagtngcagtgctgcaagtgcaactccaagaagcgcagtgccaagccaccatgtttcaacattcaacagaagcctttttccttccacttttctctttgganttggttcttctgcttaccaggcagaaggagcagcaagtgtagatgggagaggaccaagcatatgggacacctacactagacagcatactgaaaagatttgggatcatagcaccggtgacatgggagctgatttt

SEQ ID NO: 35270 - DNA, 283 bp, Glycine max
  unsure (1)..(283): unsure at all n locations; Clone ID: 701109015H1
gctctgtgtcgccgtaacacaaaaagggaagagagagaaagaaccaccccacccaacaanagcttttgttcttcacaagacatagcttcgtgtgtgtgtttcttttcttccttccagcttggaaagactgaagtctctgtctttttcaggttttgggggtgttgttgaagatgttggtagcaaatagctttgatctatggcgaaaggncggttttttctctgcggcggaagaggtgcaggaatcagctgatataatggaatctgcatacagggctggttgaga

SEQ ID NO: 35271 - DNA, 287 bp, Glycine max
  unsure (1)..(287): unsure at all n locations; Clone ID: 701109016H1
aaaacccaaacccttggacggctgcgagacccgttgtgttctctcttctctactctcttcttnttttnttctctttccctctcttcttcgctccttttagggttttctcaactcttcgatttggggcttaaaccctctccgattcagattcggatttagggcttccctttcnctattccgcctccaaagaaaaacagatctcgtggttggttcgtcatggccaccgttgctaatcccgcggatcaagcaactgatttgctacagaagctatcgttagaaactcagcc

SEQ ID NO: 35272 - DNA, 260 bp, Glycine max
  unsure (1)..(260): unsure at all n locations; Clone ID: 701109017H1
gagttttaccatgcctcgtgttcnnaacgttcagaatcaanacctttttgccttctctancttcttctctnccncctcccaacccttttttattataaactatagacaaaagggtatgctgtngtngcagctgcactgattcattccacacannacaaaaanttaanaatnncncnggtttgtnttgngtgtgtgtgttttngngnatgagtccatgataccaacttatcgttactcagtgtcttcacctagcnnaatag

SEQ ID NO: 35273 - DNA, 279 bp, Glycine max
  Clone ID: 701109018H1
tgctttttgtaaaattgtaaacaggaagcgatgatgaaagacacattggaacgagctacagatcccaactttaacttaaaagcttaccttcagaatgcttatgttcatccagttttcaaagctagcctttttgatgaggacgaggacgaagaggtaatgagtctaaagttggaaactgagagtttgactgtacccacaaaacggcaatcaagaaggaacacaccattgcctagcagaattagtggtgcatcatctccttctctgcctgatcatggcttc

SEQ ID NO: 35274 - DNA, 261 bp, Glycine max
  unsure (1)..(261): unsure at all n locations; Clone ID: 701109019H1
tgaacatccaacaaagaagatgaacngcaatgcctaggatngcacagcgagggatttatgngtggggctaacttcaatgttgactctcagacaaagatccaagtgatgcctcgtgttggaagtgaagctaattgggccacatggagctaacaaacttgactgatttaatcatagcccaacttttttttaaaacccttttctaagtggttaagagtacacaacttaatatgatggtgctgactctgcttttaggcttcagct

SEQ ID NO: 35275 - DNA, 279 bp, Glycine max
  unsure (1)..(279): unsure at all n locations; Clone ID: 701109020H1
ctcttatacaaaaaatctngggtgggaatttcctggtattggagaatttcagtgctacgacaaatatcttaaagctgatttcaaaggagctgcattaagggcagaccatcctgaatgggagctacctgataatgctggggaatcaaatgatgtacctgaatctacagaatttttcaaatcaggaggaacttatcaaacagagaaagggaaattttttctaacctggtattccaacaagttgctgacccatggtgatgaaatcctagatgaagccaacaa

SEQ ID NO: 35276 - DNA, 281 bp, Glycine max
  unsure (1)..(281): unsure at all n locations; Clone ID: 701109021H1
gccgaattgagagacaagggttatgcacttctttgtgtgggcttcccaacctctgangttgaagtggaaactcaagatgaagatgaggtatattggcttcaatttggacgttattttgctcgaggaccagtggaaagagatgactatgccttggagttggccatggctgacgagtaagcaatgtagaaaatctgacaattattggagcaaagaatgtgaatattttgtttccccttcttttcttcttctcatatatctaccatgttatcttcttgtcttgg

SEQ ID NO: 35277 - DNA, 284 bp, Glycine max
  Clone ID: 701109022H1
tagtgtctctagcagttattccgtggatttgaagaaagaccttttcctccaattgcagagtcaaagtttaaggcctaagttctctcagctctcattcaacccacttccatcatcaacttcttccttttcttcaccccgtacattcacaactctggccctcttcaaatctaagaccaaagccgctcctgctaagactaaggttacaaagccaaagcaaaaggttgaagatggtatctttggcacttctggaggatttggttttactaagcagaacgagctctttg

SEQ ID NO: 35278 - DNA, 284 bp, Glycine max
  unsure (1)..(284): unsure at all n locations; Clone ID: 701109023H1
cctttgttcactcttcttctcttgcggctagggttttagcgcanttncttctagatttaaggaagatgggtaaggaaaaggttcacatcagtattgtggtcattggccatgtcgactctgggaaatccactaccactggtcacctgatttacaagcttggaggcattgacaagcgtgttattgagaggtttgagaaggaagctgctgagatgaacaagaggtctttcaagtatgcctgggtgctggacaaacttaaggctgagcgtgaaagaggaatcaccatt

SEQ ID NO: 35279 - DNA, 286 bp, Glycine max
  unsure (1)..(286): unsure at all n locations; Clone ID: 701109024H1
ctctttttcttagacaggctctgctcctccgcgtttgcttccacaactaccaacgcttccaccgccggangtncgccgcacgtcaccggatgtggtgcagcgccgccgccaacctaccgtcggacgaagcggagaagaaaacaaactccggcggcatcngntacagctcctttgcacggaaagctcagtatcctccgtcaagtgaagcgcggtgggaggacgaccccgattaccgcaaatggaaggacaaagaaaaggagattctcagcgacattgaacctatcgt

SEQ ID NO: 35280 - DNA, 283 bp, Glycine max
  Clone ID: 701109025H1
agcaggtattcgtgctgagtcagattctagagataattattctcctggatggaagtattccaactgggaaatgaaaggggttcctctaagaattgaaattgggccaaaggatttagcaaataagcaggtcatcaactttgccagtgttttatcaattctcatatttgtcattttgcttccacactgttagtttttcagtgaacaccaaataaatctctttgaattttgcataggttcgcactgttcgacgtgataatggtgcaaagatagacattgctagtgc

SEQ ID NO: 35281 - DNA, 281 bp, Glycine max
  Clone ID: 701109026H1
aacgattgctggtgttaatccaaatgtcattaagattcttgaggagttcccaccacgtagcaagctagattctcaagcctacggtgatcatacctctataataacaaaacaacacttggagcctaacttgggtgggctcaccgttgagcaggctatccagagcaagaagttgttcatcttagatcaccatgactatctcattccatatttgaggaaaataaatgcaactaccacaaagacttacgctacaagaaccatatttttcttgaaaagtgatggaa

SEQ ID NO: 35282 - DNA, 230 bp, Glycine max
  unsure (1)..(230): unsure at all n locations; Clone ID: 701109027H1
agagagagaagcagcgattcatncacaatgggtaaggttcacggatctctcgcacgtgcgggtaaagtgagaggacaaactcccaaagtggcgaacaagacaagaagaaaaagccacgcggacgcgctcacaagagaatgcaatacaaccgccgattcgtcaccgccgtggtgggattcggaaagaagcgtggaccaaactcctcggagaagtgagggaggcgtgttgaa

SEQ ID NO: 35283 - DNA, 280 bp, Glycine max
  Clone ID: 701109029H1
tgggtgcccttggaggcaacactcaaagttatagcagcatccttgctttgcaggacgacttagtacaccttcgtgtttcaatcagtaatggcttgtatatcaattcaacattcgctcctctcctgatctatcatcgtcattgtgatatcggggtccgagtttgagtactttgtcctattcaactaatcgtagttaagcaaaaaactcaagaaaccaacaatttggatgggagctgagctgacatctccatttatcatagggaatccagtccaccacagtt

SEQ ID NO: 35284 - DNA, 273 bp, Glycine max
  Clone ID: 701109031H1
tccgggttcacgtttcacaatcactttttgcgcttactctcactcactcactacttcttcttcctcttcgtgtggttttctttctcgaactcgaacgaagatgcgtgagattcttcacatccagggagggcaatgcgggaaccagatcggagccaagttctgggaggtggtgtgcgcggagcacgggatcgattcaacggggaggtaccaaggggacaacgagttgcaactcgagcgagtcaacgtctactacaatgaagcgagttgcggaag

SEQ ID NO: 35285 - DNA, 280 bp, Glycine max
  unsure (1)..(280): unsure at all n locations; Clone ID: 701109032H1
tttgntggattagcaagagcatgtgctaaggctggtgggttcccagagccagagatcattcactacaaccctaaagattttgattttgggaaaaagaaatcatttccattccgtgaccagcatttctttgcatcagttgagaaagcaaagagcgtgcttggattggaacctgaatttggacttgtagagggtctagcagactcgtacaacctggactttggtagaggaacatatcggaaagaggctgatttctcaacagatgacataattcttggcaaga

SEQ ID NO: 35286 - DNA, 279 bp, Glycine max
  Clone ID: 701109033H1
caaagaaaaaaaaaacccttagccaacacaaccatcatggccacctctgctattcagcaattcagcattcactggtcaaactgctctgaagcagctcaatgagttcgtccgcaagaccggtggcgccggcaaaggtcgcactaacatgcgccgcaccgtcaagagtgctcctcagagcatttggtatggccctgaccgtcccaagtacttgggtccattctcggagcagattccatcatacttgaccggagaattcctggtgactacggatgggacatg

SEQ ID NO: 35287 - DNA, 257 bp, Glycine max
  unsure (1)..(257): unsure at all n locations; Clone ID: 701109035H1
attcacctgagctttttgtgaggactccaaagcatggctancccttgcagcatccactgatgctgcttcccttggcatgtcagaaatgcttggaaaccccatcaacctcagtggtgccacaaggccagctccatctgcctctagccctgcctccttcaagactgtggctcttttctccaaaaagaaggctgcacctccaaaaaaagctgcagctgctgctcctgccaatgatgagcttgccaagtggtatggtcctg

SEQ ID NO: 35288 - DNA, 278 bp, Glycine max
  unsure (1)..(278): unsure at all n locations; Clone ID: 701109036H1
cgcaagcaanaaagaaagaatcccaggcgaggagaaagatggaggggaaggagcaggatgtgtcgttgggagcgaacaagttccccgagagacagccgattgggacggcggcgcagagccaagacgacggcaaggactaccaggagccggcgccggcgccgctggttgacccgacggagtttacgtcatggtcgttttacagagcagggatagcagagtttgtggccacttttctgtttctctacatcaccgtcttaaccgttatgggagtcgccggg

SEQ ID NO: 35289 - DNA, 278 bp, Glycine max
  unsure (1)..(278): unsure at all n locations; Clone ID: 701109037H1
ctactaacaagggaagaaaaacttagctactaaggaaggatcaaagngaatggctcaagcaatggcatcaatggctggcttgcgtggttcctctcaggctgtgttggaaggtagccttcaggtgagtggctccacacgcttgaatgtggggagtggaagcagggtggcctcagtcacacgtgcagggttcacagttagagcacaacaacaacaagtgagtggtgaggtacaaagcagccgtagggcagtgctttcacttgttgctgctggtttggcca

SEQ ID NO: 35290 - DNA, 278 bp, Glycine max
  Clone ID: 701109038H1
gagtttgctacaagcaaggggtgttaattggacatctataaggccagtctacatctatggacccttgaactacaaccctgttgaagagtggttcttccatagattgaaagcgggacgcccaattcctatccccggctcaggaatacagataacccaacttggtcatgttaaggatttggcaaaagcttttatccaggttcttggtaatgagaaggccagcaaggaagtattcaacatctcgggagataagtatgtcacatttgatggattagcaagag

SEQ ID NO: 35291 - DNA, 280 bp, Glycine max
  Clone ID: 701109039H1
gtgaatttgacaagtttaattttggacaagtgtggtagtttaacagagataccagctgtatcctgtctctcaaaattggaaaaattgtcatttaaagattgtaggaatttatttacaattcacccttcagttggtttattggaaaagcttaaaatcttggatgctaaaggttgccgaaagcttgagagttttccaccgttgaagttgacctctcttgaaaggcttaaactttcgtattgtgtcaatctcgagagtattcccgaatgcatcgaagaatgcc

SEQ ID NO: 35292 - DNA, 273 bp, Glycine max
  unsure (1)..(273): unsure at all n locations; Clone ID: 701109040H1
ttaagctgaatggtgatagctgtagatcaataagaatcccaagcagagttcangcactcaaatctgatggtggtaaatggaagaagagagggcaagaagcatctagtgacactgatgacgacgatgacgatgcacctcagcggtttaataaaaatgacccttaccttatgagtcctgaggagagactggaatggaggaggaacataagacaggtgttggataggaaacctgatgttgaagaggagttagaccctctggaaaagaagaaaaaac

SEQ ID NO: 35293 - DNA, 282 bp, Glycine max
  Clone ID: 701109041H1
attctctgcacttttcagttacaaagcatttcattgttttacaatatacaatactacaatgggctgcttcaacaatggctctctcttcatcatcattggctggccaagctatcaagcttgccccctccacccctcagcttggtgttggaagggttagcatgagaaaaacagcctccaagactgtttcctcaggaagcccatggtacggcccagaccgtgtcaagtacttgggcccattctcaggtgagcccccatcctacctcactggtgaattcccaggtg

SEQ ID NO: 35294 - DNA, 278 bp, Glycine max
  unsure (1)..(278): unsure at all n locations; Clone ID: 701109042H1
gangatgattatccatcttcaagcacttttagggaacagatgggctgcaatagctgcttacctaccacaaagaacagataatgacataaaaaactattggaacacatatttgaaaaagaagctgaacaaaaaattggaagcaggttctgatcaaggaagcttgttgggaggaggacataataatattgggttttcatcagtttctcaaccaatgtctagaggccagtgggaaagaaggcttcaaacagatattcacatggccaaaaaagcacttagtg

SEQ ID NO: 35295 - DNA, 280 bp, Glycine max
  unsure (1)..(280): unsure at all n locations; Clone ID: 701109043H1
ttactccctatattaacccaacaatgcaaaacaacacactgaantctcttcactgaaacgacacacacaaaaaaaagctttagtttaggatgacccaagtgaggaacaagcaagtggttctaagagactatgtcaccggattccctaaagaatccgacatgaacattgttgaaggcaccataatattgaaggttccagaaggttccaatgatgtccttctaaaaaatctctacttgtcatgtgatccatncatgcgactcctccatggccaaggaccgtt

SEQ ID NO: 35296 - DNA, 277 bp, Glycine max
  Clone ID: 701109044H1
ggcaaacgtttaattctctttccacccttgagcattatatacaaagtggagcgcagactgtcttatttgttggagatctttcttatgctgataggtaccagtacaatgatgttggtttacggtgggatacatggggacgatttgttgaaaggagtacagcatatcatccatggttatggtctgctggaaatcacgaaatagactatatgccttacatgggagaagttgttcctttcaaaaactatctttaccgatatactactccctacttggcctc

SEQ ID NO: 35297 - DNA, 280 bp, Glycine max
  unsure (1)..(280): unsure at all n locations; Clone ID: 701109045H1
anaaaccctaggtagagagctcttcctccctttctcacagcaatggccgccgcagcacgccctctacgtcaccgtgcaggccctcnatggtgacatggcaaccnatgcntccnctaccgttnccatccctgangtcatgaaggcctctatccgccccgacatcgtcaatttcgtacactcgaacatctccaagaacagccgccagccatacgnnntcagtcgtcgcgctggtcaccagacctccgccgaatcctggggtaccggccgagccgtctcccgt

SEQ ID NO: 35298 - DNA, 277 bp, Glycine max
  unsure (1)..(277): unsure at all n locations; Clone ID: 701109046H1
tgattcttcagattcctcaatgacagaggctncatctcttggttatttacaatatcctccgcctgctgtttttgtcacaaatattcatcctacagaacatattaatntgtccagcgaactaccttatgtgtcattacctttctatgtaatgcctgcatataatgttgatgagtcaagagcagaactacagcatgctagtcatgatgttgtctcaggtagcatgcaaattgagtcttctgccaggtacagttgcaagcagacccaagtgcagcanagc

SEQ ID NO: 35299 - DNA, 278 bp, Glycine max
  Clone ID: 701109047H1
ctttgccaaaaatctctcgggaagactttgaattaatatttgatgagctcgatgatagtcatgatataaagattaacaaggatgaatttgcagatatttgcaatgccattgctttaaaatttcagaaggaagatgttatgtcttactttgagtatttagcattctaccattcacccagctcaaagagattaaaagaatttgtgaggagtcctatgtttggatacctagtgtcctttgttctcgtaataaatctggttgctgttattattgagacaacg

SEQ ID NO: 35300 - DNA, 278 bp, Glycine max
  Clone ID: 701109048H1
ctgctcctgctcgtttttctgttctgcacgttggaacattctcttcagaaaaagggtgaatttgtgtttctgttataccctattaagtgaggaatcattttttggctttttgcccctaaaaaaatggtgcaagttgtgtcattgagcactctggcaacctgtggaaatagcaggttatgtggatcctcaccatcttggatggcaccctttgagccatacaagagatcccaaattacctcttccaatggcagacacttggtttggaacaattctgtgca

SEQ ID NO: 35301 - DNA, 275 bp, Glycine max
  Clone ID: 701109049H1
caatacccttttgatttgtgaaaggaaagcaaacatggttgatcaggtccaacaccctacaatcatggacaaggttgctggtcagctccatctccgttctggtctttcatctggtattagaagttatgatggagcctaccgccacccagctatgtaccaaagaccctcttttgggaattactcgaatgctgcattgcagtttcctgtgatgcccacatgcaaagctaccatggatttgtctgctactgcaacatctgcctcacccgtctttgttg

SEQ ID NO: 35302 - DNA, 276 bp, Glycine max
  unsure (1)..(276): unsure at all n locations; Clone ID: 701109050H1
gcgggctcaagtgctccccactctcatcttcttctctcttctccaaaccttctctttggacccaacaatcccaaaagcgcgtttcaattaccattgcgaactcaatagcaatagccaatgcgcagaacaaagagagagcgaggcttaagaaactcttcgaagaagcctacgagagatgccgcaatgctccaatggaaggtgtttccttcnnccatcgaagacttcactgctgctcttgacaagtacgacttcgattctgaagttggcggcaagtta

SEQ ID NO: 35303 - DNA, 276 bp, Glycine max
  unsure (1)..(276): unsure at all n locations; Clone ID: 701109051H1
catcatcaacacattctacagcaacaaggagnnccttcttgcgtgaactcatcagcaatgcttctgatgctttggataagattcgattcgagagcttaaccgacaagagcaagctcgatgctcagccagagctcttcattcgtcttgtgcctgacaaggataacaagactctttccattattgacagcggcattggaatgaccaaagcagatttggtgaacaacttgggtaccattgcgaggtccgggaccaaggagttcatggaggcgttgcagg

SEQ ID NO: 35304 - DNA, 273 bp, Glycine max
  Clone ID: 701109052H1
cccaattcctaattgtttaaacctaattctcatttcttcatcgttcgattcttctcctcctaaaggtacgtctctggtttcctctctctcttgttcattcttttcgtaatagcaaccttattagccttcgtttattgatttttctcctaattacacttcaattttttcgatttgtgtttgttacgtcaatctgtatatcttttttgttgtcgtcgaatccgaaacttttcattcgcctttctgattccgtaaatcgtttgttaagtgcaacat

SEQ ID NO: 35305 - DNA, 278 bp, Glycine max
  Clone ID: 701109054H1
tgaacattcacccaatttgcagagttccaagttatatacatacactgcataattaagagaaaatgtctctgattccaagtttcttcggtggccgaaggagcagtgttttcgaccctttctccctcgatgtgtgggagccctttaaggattttccatttcccagttctctttctgctgaaaattcagcctttgtgagcacacgagtggattggaaggagacaccagaagcacacgtgttcaaggctgatattccagggctgaagaaggaggaagtgaag

SEQ ID NO: 35306 - DNA, 279 bp, Glycine max
  unsure (1)..(279): unsure at all n locations; Clone ID: 701109055H1
gaaaaagtaaagtttccagttttgttaagcagntctacttattcagccttatggtataagccagatacattgttttctacacccaaggcttatgtaaagattgatttcaattgcccatattctggaaactctcctgaggctgaagttttgacgcatattttcacagagttattgatggattacttgaatgaatatgcttattatgctcaggttgctggtttatattacagcataaatcaaacagatggtggtttccagatgactctccgtggttacaat

SEQ ID NO: 35307 - DNA, 277 bp, Glycine max
  Clone ID: 701109057H1
aagtgttgtcccaaagaaagagcatctttctcctttctttcatcaccgttggaagagactgagatgggttcaaaaaccaagacttttacctttgaggaggtggctaagcacaatcacaggaaggattgctggattatagtcaaagggaaggtgtatgatgtcaccccatttttggatgatcatccaggaggtgatgaagttttagtgactgcaacagagaaggatgccaccactgattttgaagatattgggcacagtgattcagcaacagagatga

SEQ ID NO: 35308 - DNA, 276 bp, Glycine max
  unsure (1)..(276): unsure at all n locations; Clone ID: 701109058H1
aaaaagaaaacataatgcagagagaggtagaagaatccagaacccgttggttgtctcccattcccgttcctatataaagctccttctttcacaaccttcaccnacttcaactctactacaattcgctctgtgcagtttcctcgctctcttttctgcaattttcttttttgttccttctctgcggttatctttttgagcttcaatggcggacgctgaaaccttcgctttccaggctgagatcaaccagcttctcagcctcatcatcaacaccttcna

SEQ ID NO: 35309 - DNA, 276 bp, Glycine max
  unsure (1)..(276): unsure at all n locations; Clone ID: 701109061H1
aacaaacaaataaagcaaaaggcctttttattccaaagcaaggaaggaanaaataaaccgaatgagagcattaacctcttcttcttccactttcattccaaagcgttatnnnnnnnnnnnnnnnnnnnnnnntctcttcgctcttcgatcctcgtccgggggctgctccgaataccaccaccaccacgcgccgatggccacgataggaggcttacgcgactcccaaggctctcagaacagcgtccaaaccgaggccctcgctcgattcgccgtcga

SEQ ID NO: 35310 - DNA, 261 bp, Glycine max
  unsure (1)..(261): unsure at all n locations; Clone ID: 701109062H1
ttnttctanatnacatnccatccggattggtccctcctgaanctgtctgcatccattcccanttcttcttccgtatgcatgttcccanccgtctaaaaaacctagcaaagcaacaaaacggcgtcatgcttgggaagtagcatgcaatggtaaccctagaaataggagggacattctgatcggccttggaggatcctatggtgctacaacaagtntcnacaagtaaaaaacactggttctgcntttggtgcttcatgtcgc

SEQ ID NO: 35311 - DNA, 276 bp, Glycine max
  Clone ID: 701109063H1
tcaatttgtgtggcaaagaatttagatagtctagctctcaaatcctcttcttctcttccatccaatcctctcagactgatcttagacgcaaacacatcctaatcacaaaagcggtgaccatggcaaacatgattatggcttccacaaaacctctggttccagtctgcaccagttcccgttcccccacaccaaaactccccattctccaaatttcactccccaaagccccaaccttgaaactgaaactcccaatttcaaagccccagatgctgtccc

SEQ ID NO: 35312 - DNA, 258 bp, Glycine max
  unsure (1)..(258): unsure at all n locations; Clone ID: 701109064H1
tatttgcaagcgttgtttggggaccggtgattagaccccgacttcaattacaccacgcntntnaatnctgagaangnnttcgtnagatcgaagcnatagcctttttctctgccgccactggtttcgatcccacacccacaaacgcaaacccttccatcctttgaatgttcttgcgttttcctttcactacntcattcctaactcacacacacacaacgggtgatatcaatgtcgactcctgctaggaagaggctcatg

SEQ ID NO: 35313 - DNA, 273 bp, Glycine max
  Clone ID: 701109066H1
taacaagagattcaagaccggcatggctaatgaagaggaacagaaaaaccacctcttcggcatcaaagatctcggtcacaagactctccttcagagtgatgcactctatcagtatatacttgaaaccagtgtcttccaagagagcacgagtgcttgaaagagatacgcaagatgactgcaaaacacccactgaacatcatggcaacaccagcagacgaaggacaacttctgagcatgcttgttaagctcacgaattcaaagaacgccttggaa

SEQ ID NO: 35314 - DNA, 272 bp, Glycine max
  unsure (1)..(272): unsure at all n locations; Clone ID: 701109067H1
ctttgccaaaaatctctcgggaagactttgaattaatatttgatgngctcgatgatagtcatgatataaagattaacaaggatgaatttgcagatatttgcaatgccattgctttaaaatttcagaaggaagatgttatgtcttactttgagtatttagcattctaccattcacccagctcaaagagattaanagaatttgtgaggagtcctatgtttggatacctagtgtcctttgttctcgtaataaatctggttgctgttattattgag

SEQ ID NO: 35315 - DNA, 270 bp, Glycine max
  Clone ID: 701109068H1
gatgaatgcctctcaaatatgaaggctttgacttgtagtagaggttctgaggttttgccatctgatgttagtccagaattgaaggtttcttccagctatgactgtgagtcttttgctggattgaactcaccagtcaaaagagaacagtttaatgatgtggacatgatggatgttgattcaactggtattgtgaatgagatttcttgtggtgctgttgaatcatcttatgtgcccatttctcaaacagacagtgatttgggggatgtagat

SEQ ID NO: 35316 - DNA, 274 bp, Glycine max
  unsure (1)..(274): unsure at all n locations; Clone ID: 701109069H1
tgtgaatcaagaaccgctctgctatggctgctctgcaatacttggnatcgctgcgcaattcgcaccctgagctctccgattggtacaattcgctggcggatctgtaccagaagaagctctggcaccagctcactctcaagctcgagcagtttgtggctctcgccgtcttccaggctggtgatgctttaatacaattatatcacaatttcatcacagactttgagncgaaaatcaaccttctcaagcttgcacattttgctgttatagtttctcg

SEQ ID NO: 35317 - DNA, 273 bp, Glycine max
  Clone ID: 701109070H1
gttcaaggccgggtcccagatcttcagcgagggtgggctcgactacttgggcaacccaagcctgatccacgcccagagcatcctcgccatctgggccacacaagttatcctaatgggtgccgttgaaggttaccgtattgctggtggccccctcggtgaggtcactgacccaatctacccaggtggcagcttcgacccattgggccttgctgatgacccagaggcttttgctgagcttaaggtgaaggaatcaagaacggacgattggccatg

SEQ ID NO: 35318 - DNA, 274 bp, Glycine max
  unsure (1)..(274): unsure at all n locations; Clone ID: 701109071H1
ggtcactgttggggaactaagccactgtgctctggggttctatggtggccattggagcccgaatggngattcaattttagctcatggatatggtggatctttccatctttggaaaaatgttggtaatgataattggctgccacaaaaggttccctctggtcattttgcatcagtgactgatattgcatgggctagatctggtgattatattatgtccgtcagtcatgaccagacaactagaatttatgctccatggaaagttgaggctcctctc

SEQ ID NO: 35319 - DNA, 91 bp, Glycine max
  unsure (1)..(91): unsure at all n locations; Clone ID: 701109072H1
gaaagacaatgccgaagtctcaatttcgaaccccatttctggtttcttttccccttttgttattcatcttcaacctcaccccttcgcncgc

SEQ ID NO: 35320 - DNA, 275 bp, Glycine max
  Clone ID: 701109073H1
tcaagggttgtgaaagcagagaagtgagatacactaagttatcctcataaatacactctaattaggtggcaagataagtgtctaaccttagtaacattgccacatattgtgttcattttggaattgtgccactaaaattctattcaattcatctatggctgcctcttcttatgctatgcaatcaatcctggcaaaccctttgatccgcatttccagcgggtctagggtgaaccaatttggcgttcctgctttgcacatgagaaggaatgttggcc

SEQ ID NO: 35321 - DNA, 273 bp, Glycine max
  unsure (1)..(273): unsure at all n locations; Clone ID: 701109074H1
cgctgaatcctcgctttatcttnccttcccttcatctccgcttcaaaataatatcctcctctctatctctgttcgaaacaagtccaacaccagcaacacantgcttcaatctcaatcgggtacccttctctttttctcttcaccttttaatgttttttgtttcggtctttttagaaaaattaactagattattctttgacattgcattacatcaattgggtgatcttgggtgtggaaaangatagatttttgcccttgcttttctatggtttt

SEQ ID NO: 35322 - DNA, 273 bp, Glycine max
  unsure (1)..(273): unsure at all n locations; Clone ID: 701109075H1
cnaaaacaaaagcccacatgcatgccaattcctcgttgcttttacctgcaaaagtgctaagtccttgcatcagttctctattgttttggcttcaaagttcagatcatgctttccttttcatttaagaatatcttagattttgagaacactgctcatgtccagctggaattggagtaaaatgtggacaacgatcacggaccttaaatagaagtacctgttgtttgttgttcaaaaaaagagaganatcagaaaattcaggagtgtttataccag

SEQ ID NO: 35323 - DNA, 257 bp, Glycine max
  unsure (1)..(257): unsure at all n locations; Clone ID: 701109076H1
tgctacggcttcagcttccgctgcttctctctcccttcgctctnctcccttcannctncaaccctccaaaactcaactccgttacgctccgtttccctcaccttaatcgccgttataacagcgccttcagagtcgtcgccgcttccgtttccgtctccaaccccaacgtgcaaaccggccccgacgatctcgttgcttccattctctcaaaggtggtgcaaacggatggaggagtattgctgaaggaggaagagcat

SEQ ID NO: 35324 - DNA, 271 bp, Glycine max
  unsure (1)..(271): unsure at all n locations; Clone ID: 701109077H1
ttttagaagaataccccctcttttgctgcatcagaggagttgtaaattaagagcatggctgcacaagctcttgtatcatcatcttctcttaccttctcagcggaggctgcaagacaaagtcttggaccaagatcactccaatctccatttggcttctccagaaaagcctcctttcttgttaaggcagctgctaccccccctgtcaagcaaggatcagacaggcctttgnggtttgctcaagcaaaagtnttcttactnggagggccnccct

SEQ ID NO: 35325 - DNA, 275 bp, Glycine max
  Clone ID: 701109078H1
ctcaagttcttttcaattcaaaatcaagatatggaagaacccgtcatggaacaacaaccctccgctgctgcctctgggaacactgccagacccaggcttcagaagtacgcactccgatctgccaataagttgaaggaagagaagtcagaaactcccaattgctccattcctacttctgaaaccatgagggggagaagtgtaggtgcttcaagtgtaagtaaaagtgtgagtgttcttgatttttctggcaaggacaagtctggtagtgccaagcc

SEQ ID NO: 35326 - DNA, 274 bp, Glycine max
  unsure (1)..(274): unsure at all n locations; Clone ID: 701109079H1
cgagaacagagtgacgccaacgcaanangcaggggcaggttctccacgacaccattctctctacgtgcaagtcaaaaccggcattcgcacgagtcacaaacttcaccgaacttccgtataaattctcttctcttccgtgattattactgaaanaggaatagaatagtcagcgatggcacagaagagattcatcatcgaggtcgaganggcgaaggaggcgagcgaaggaaggccttcgagaggacctgtctatcgtagcctcttcgccaaggat

SEQ ID NO: 35327 - DNA, 273 bp, Glycine max
  unsure (1)..(273): unsure at all n locations; Clone ID: 701109080H1
ggaccacgttgttggattcattcacaatgggtttgttgagcatttgagaggctttgggaatgtgttcattttccccaaagataaatataatggaggcctctacggagactttgtttctttgcatccaatgctaaagacagctgaggaaagaaccagtgcagttggatatgtagtagaacgtttgggagaggagcatattccagggatacggaatgagctttaccctgtgatatcatcatttggtgcacagattttcttttccattagaacgng

SEQ ID NO: 35328 - DNA, 268 bp, Glycine max
  Clone ID: 701109082H1
ggtggtaatggcagcgtcactacaagcagcagctactttcatgcaacccaccaagttgagcaggagcaacactttgcagcaaaagtctactcagtccatttccaaggcttttggtttggaacctgttggagctaaaaaggtcacatgctcccttcaggctgatcttaaggacttggctcacaagtgtgttgatgctaccaaaattgcaggattcgcccttgccacctctgccctcgttgtctctggggcaagtgctgaaggtgttcca

SEQ ID NO: 35329 - DNA, 271 bp, Glycine max
  unsure (1)..(271): unsure at all n locations; Clone ID: 701109083H1
gcattccctcgtttaccatgctttcctaagagnaagagaaaagtaaaacccctcactactgatagattttcattcctccgaggaaaaaagaaaacatgtcggatgctttgatcaatggattggccggagctggaggagggatcattgctcagctcatcacatacccacttcaaactgtaaacactcgccaacaaaccgagcgtgatccgaagaaagacacgaggagtcaaggggccctcgaacgaatgtgccaggttgtaaaagaagaggg

SEQ ID NO: 35330 - DNA, 265 bp, Glycine max
  unsure (1)..(265): unsure at all n locations; Clone ID: 701109084H1
gnnanangggttagggtttgtncttgtgatcgaagctaagcgtacaaaatgggtggatcagtgagggacgtgaagtcgancggcgaggtcgacgaggtggtngcgagtngctctccggttatcctccacttctgggcgtcgtggtgcgaanttccaagcacatggaccaactcttctctcacctttccactgatttccccaacncccgcttcttaagggtcgaggccgaagagcaacccgagatttctgaggcttactccgtctc

SEQ ID NO: 35331 - DNA, 273 bp, Glycine max
  unsure (1)..(273): unsure at all n locations; Clone ID: 701109085H1
ttcatnaanngnntctcgantnannntgnggnntcngatnntntccgnnggaaggntttggcaatttctcctgttctactggtaancgaaaatgaattattcagtgcgacnagtgtttccaatgtcaagggnangttctcggtccttcgccactgtcacgggaaacccaacgatattccattttcagcccnaacttgctaactccgttnacctccatcggtcatgtccagtccccgattcagttccatgtntctcccaacgatggctncgttt

SEQ ID NO: 35332 - DNA, 274 bp, Glycine max
  Clone ID: 701109086H1
gttcaagtttcggcgtgtgcggtttccgccaccgtcaaccaccttcgcctccgccaaaacgccgtcgtttccttcaggaagaagaagcctctcactctcagagtggtctcaatgtcttccgttcctccttcccaacccttcgaaatcgccgttaaagcttccgtcaccacacccaacaggctcggcgactgccctttttgccaaagggtgctgctgacactggaggaaaaacatctaccttatgaccccaagttggtggatttgaccaacaagc

SEQ ID NO: 35333 - DNA, 187 bp, Glycine max
  unsure (1)..(187): unsure at all n locations; Clone ID: 701109087H1
gcaanagcannancnggnntnatcatnatctcttgtgaattgtgatctccnaatccgaacacaanacancataagnntnagaatctgtactactcactcacttacncacgcccttcaaggactctgtcctgtgtcgatctctcantctcnctctattcgtaaatcgngtgtctcgacaaancagatg

SEQ ID NO: 35334 - DNA, 275 bp, Glycine max
  Clone ID: 701109088H1
gaaagctgtcatggcaattggcaagtgataataatagcaaactaattatacgtttcttttcttccccgtctcaactcaattccattctcttctctgagtctcaacctaattccccattcatccatctttacgtgtttgttggattccatggccaaaagctccttcaagcttgaacatcccttggaaagaagacaggctgagtctgctcgcattagagacaagtatcctgatagaatacctgtgattgttgagaaagcggaaagaagtgacatccc

SEQ ID NO: 35335 - DNA, 274 bp, Glycine max
  unsure (1)..(274): unsure at all n locations; Clone ID: 701109091H1
ccttatcttatctctcgttatatccatctttacaactttcatttcntttccctatttcagacacagnaaganctcggtgtctccgtttgcagcgtcactacttgctacaacacgagccatnaaacccaccttcccaatccactccaattcaaatttcctcactataaaccacttcttcaaacttccctccgcaattcttaattcattcgnaccatggcagcgtcctcgctactgttcctctttcacctccaaancatggaacccgcnccggccg

SEQ ID NO: 35336 - DNA, 271 bp, Glycine max
  Clone ID: 701109092H1
tttcaatctgcacaacctgctcagtcgagtggtgcttttggctttggcaactttggccagacacaacctgttggtgcaagcagcttcggtggcactccaggaatgtttggtcagaataattttggacttgtgtcttctacccccctgagttctgtggctgtacaagcagttccgaatacaaatccatttggaacacttcctgcattgcctcagatgtcaattggtcgagttggaactactccttcaattcaatatggaatctctagcatgc

SEQ ID NO: 35337 - DNA, 270 bp, Glycine max
  unsure (1)..(270): unsure at all n locations; Clone ID: 701109093H1
gagaaaagtgaattggattgcatctctcgctttgtgttggaagaggggaatcgtagatctgannnnnnnnnnnnnnntaataataattttgtgatcagaattattgagctgaagaaaagacaatgggattgtgggaagcttttctcaattggctacgcagccttttcttcaagcaggaaatggagttatctctaataggacttcagaatgctgggaagacttcccttgtaaatgtagttgctactggtggntatagtgaggacatgattc

SEQ ID NO: 35338 - DNA, 272 bp, Glycine max
  unsure (1)..(272): unsure at all n locations; Clone ID: 701109095H1
gatgcaggctcagacataactttttatgctcttttagaggcttctacctttgccaagcattgggtgccattctgcaagagatttaaggtggaaccgaggtcacctgctgcttattttaatacccttgtatcaacaaactcacacgaccataaccatgccaaagacttagatgccatcaagaaactatacgtagatatgaaaagacgaatagaagatgtagtcaagttgggtggagtacccagcgaancaagatcaaagcataatgggttttc

SEQ ID NO: 35339 - DNA, 271 bp, Glycine max
  Clone ID: 701109096H1
cgcgtcgctccgcaccagtttcaccgcacgaatatcttgttgtttggagcgatccgagaaaaactctgtaaacatgttggtttaccaggacctccttacaggtgatgagcttctctctgactccttccgttacaaggaaattgagaatggaatgctgtgggaagttgaggggaagtgggttgttaaaggagcagttgatgtagacattggtgcaaacccttctgctgagggtggaggagaagatgagggagttgatgatgcagctgttaag

SEQ ID NO: 35340 - DNA, 267 bp, Glycine max
  unsure (1)..(267): unsure at all n locations; Clone ID: 701109102H1
ttgattccagcaccacaatcttagatgttcacggagtgggccttaagaactttacaaagtctgcccgggaacttattacccgattgcagaagattgatggtgataattaccctgagactctttgccaaatgtnnattataaatgctgggcctggatttaggctgttgtggaacactgtcaagtcttttctcgatcccaaaacaacttctaagattcatgttcttggaaacaagtancanaggatttgcttgaagttatagtgccant

SEQ ID NO: 35341 - DNA, 126 bp, Glycine max
  unsure (1)..(126): unsure at all n locations; Clone ID: 701109103H1
ctctnnntatncgattctattgttctatggaaccgcagcttcancccaannctgnagcccgcgccagancttgtngagcgctggcgctgaggannccgagaagtcgcatgtcagtnntgtcncgga

SEQ ID NO: 35342 - DNA, 271 bp, Glycine max
  unsure (1)..(271): unsure at all n locations; Clone ID: 701109104H1
actgatgtgtcctcaaccgacacangtncgntcatncacacacagnngaggattcccttgtacctcccaaccctccaaaggcaaactncaatggcatngcactccgtgtgccaacaccgaacgtctcagtggtggacctcgtcgttcaggtctcaaagaagacctttgcagaagaagtgaatgcagcattcagagagagtgcagacaatgagctcaagggaatcctctctgtgtgtgatgagccacttgtgtcgttgacttcaggtncatt

SEQ ID NO: 35343 - DNA, 263 bp, Glycine max
  unsure (1)..(263): unsure at all n locations; Clone ID: 701109105H1
tacaaaggttgctgtaggagataagattgcagtagtgctaagtgctaacacctgcagtgaacaatggcctctgcatcagcatctctgctcaagtcttcacttgttcttgacaagtctgagtgggtgaagggncaaacccttcgccaaccttctgcatcagttgtgagatgcaaccccaccaccccatcaggnctcaccatcagagctggttctatgctgatganntcgttaaccngggaaaacagtggcttccacaggggggg

SEQ ID NO: 35344 - DNA, 265 bp, Glycine max
  unsure (1)..(265): unsure at all n locations; Clone ID: 701109107H1
gtttgttgtgagctataagctagtttatcgtgagganaatatgaagttgtttagttttctttgttgctgcagtagttttggtagcatggccatgccatggcgcaggctaccaaaggttccctctccgaatgaaaactggctatggtgagcgttcttcggaggtaaaatgcgcaagttttaggcttgctgtggaagcacacnacatccgagcctttanaaccattncctgaagatgcgtnggaaccncccaaaggantacntnant

SEQ ID NO: 35345 - DNA, 265 bp, Glycine max
  unsure (1)..(265): unsure at all n locations; Clone ID: 701109108H1
gcttcgtctcgtaaagaaaattcgaaagctcaatagagagaactcaattgaatcatcaaatgaggacagtgatttcgcgcttgatccattccacgccntccatttccncgnctcaatgccacggtagtgtcaatcagngggagaaatctctgcacagatgtctaacaaagttgatgggccattcaaagttgangnngcnngagncngtaaatgtgcctgcactnccaanagnnaagttgcttgtgttgggaaggnaatgggttct

SEQ ID NO: 35346 - DNA, 260 bp, Glycine max
  Clone ID: 701109109H1
ctttggtgtttgggtggcaaaatcagagagagaatagcaataaccgaggaaaacggaagtgatgatattgagaagcctggaggcatttgtgcctattattaaagcaggatggaggttttctaagatctactgttttatacacgttacccaaacctatttgatcgcccctgctgtgatctatggtcctagcatgcttcctactatcgatttgaaaacagctgtgttcttaatggaaaagatctcacccggtttggtaaagt

SEQ ID NO: 35347 - DNA, 260 bp, Glycine max
  unsure (1)..(260): unsure at all n locations; Clone ID: 701109110H1
cttctgccatgtttaattcatgatatctgaaatcatattgaaaatanggtcatgactgtccatcctttcaataagtttcattcataactaatgatgtatttgggatggncccaatttaaaatacttgaaatgggtagtttcagtcaaattngccgaaacatatcatacatagccatcagttaagttggggttggggttcaaatatagtgtcattcttatttaggggtgaatgttcatgctaataattaatttctganata

SEQ ID NO: 35348 - DNA, 250 bp, Glycine max
  Clone ID: 701109111H1
ggcgaagagaagagaaaaattaagatggaggggaaggagcaggatgtgtcgctgggagcgaacaagttcccggagagacagccgattgggacggcggcgcagagccaagacgacggcaaggactaccaggagccggcgccggcgccactggttgacccgacggagtttacgtcatggtccttttacagagcagggatagcagagtttgtggccacttttctgtttctatacatcactgtcttaaccgtca

SEQ ID NO: 35349 - DNA, 258 bp, Glycine max
  unsure (1)..(258): unsure at all n locations; Clone ID: 701109112H1
ctcatcttcctctttttcncaaccaaaaggggttcaattctagctanttctattacatcgtccgcnaccatgaacatggcgatcgtgcttctgttcatggttttcgcagtttcatcagctttagacatgtcaataatatcacatgacaacgctcatgcggatagggccacgaggcgcaccgacgacgagtgatgtcatgttcgaggagtggctggtgaaacacgacaaggtgtacaacgcgctcggtgagaaggagaa

SEQ ID NO: 35350 - DNA, 235 bp, Glycine max
  Clone ID: 701109113H1
accgaagaataacttgactttcccgaactccacctgagaaaaagatacccttaattcgcaggcgcgtcttgtgttggacaacaaccacaagatgattaacttcgaagaaaccgagttgcgactcggcctccctggcaacgactcagcactcaagggaagtgctgccaagagaggctctctgaaactgcttctgttgatttgaagcttaatctttcttcttgcataacgactctgc

SEQ ID NO: 35351 - DNA, 259 bp, Glycine max
  unsure (1)..(259): unsure at all n locations; Clone ID: 701109114H1
agagttgggagttgaatcctctctgattcgatgacgacccgaatcgcgcccggtgtgggagccaatttnttgggtcaacatgccgccgagaggaatcaagatgccactgcttatgtcggaaatctcgaccctcagatatgtgaggagttactatgggagttgtttgttcaggctggncctgtcgttaatgtctatgttcccaaggatagagtcaccaaccaacaccagggttatggttncgttgaattccgcatgaaga

SEQ ID NO: 35352 - DNA, 265 bp, Glycine max
  Clone ID: 701109115H1
gcctctgcaattcagcgggctcaagtgctccccactctcatcttcttctctcttctccaaaccttctctttggacccaacaatcccaaaagcgcgtttcaattaccattgcgaactcaatagcaatagccaatgcgcagaacaaagagagagcgaggcttaagaaactcttcgaagaagcctacgagagatgccgcaatgctcccaatggaaaggtgtttccttcaccatcgaagacttcactgctgctcttgacaagtacgact

SEQ ID NO: 35353 - DNA, 263 bp, Glycine max
  Clone ID: 701109116H1
gggaatatccgctattctagttgctgcttctgtctgtaacacaatacaatcatcattcatcaaatcactgaaaccaaagccacaagctgcgacatcagaagaatggaagacggtgttgaccacttggcttcgagaggaacaaggcgcagttcgatgttgaggacatgaaaatcatttgggccggttctcgtcaagactttgagtttcggatcgaatttctcgccttgttgccagcgatccggcgttcagaaaggatgatagac

SEQ ID NO: 35354 - DNA, 271 bp, Glycine max
  unsure (1)..(271): unsure at all n locations; Clone ID: 701109117H1
caacgttcacataccacgtagaaacagttcaatcattcttagccctaagcagacttcacatactccatccacttagtggcagtgttgtctctctgttactaccgcatcacccacttcttcctccaacctccaacagngccatggcttctcatgactgctgcggagttcttctctcgctgctctggttcttcaaccaagccttccggtggcgaccggtgtcgcggaggtccatgactgagaagcttccgagtgaggngaagctgnggggctt

SEQ ID NO: 35355 - DNA, 137 bp, Glycine max
  unsure (1)..(137): unsure at all n locations; Clone ID: 701109118H1
gcganaacacaacgtagataagacatcattgttttgttcagattctgcgcgttatttcattctcacacataaccacattcctgcatgtccaattcttgctcttaaatatctcatctctcacttccatgcaatcccct

SEQ ID NO: 35356 - DNA, 266 bp, Glycine max
  Clone ID: 701109119H1
gtctctgtgactcaaactcgaaggtgaaggtgaaggtgatgatggaattggaagtcgacgagaacgacttgaaagccgccggtgctgagctcttcgtcgacggtggtcggcgcggcattcgcatcaatggctgggtgatcgagactcggaggcactccatactcaactcttccacactccaagagtgggaacagaatctcgatacgtctcatttaccagaaatggtttttggggaaaacactttgattctaaaacacttgagcagt

SEQ ID NO: 35357 - DNA, 266 bp, Glycine max
  unsure (1)..(266): unsure at all n locations; Clone ID: 701109120H1
tgcatcactagcaagtnattttgatgtcatagcagggactagcacaggagnactcatgactgctatgcttcactactccttcacccagacgaccccactcaccctctgtttactcccagcggaatcatagaattttataaaaaatacggtccttctatattcaatgaaactagtggttgggataatgcattcccgggtcccaagtacgacggcaagttcttacataataaagcacgtgagttgctgcaggatacgcgattgagcca

SEQ ID NO: 35358 - DNA, 234 bp, Glycine max
  unsure (1)..(234): unsure at all n locations; Clone ID: 701109122H1
caatccttcattcgttccaatggcgctagggttttatctcaattagaggcaccgaacgctccaaacggaaccatgaatctctcgttggcagctccttcggcatttcgcgggaatctcctcgttcctctgtcgcgctgcacctcttgcttcaaacttgatctccgttttcagcattccgacggttttcgccattcgcgttgtcgtcggagttgttcaanctgattcgggatccga

SEQ ID NO: 35359 - DNA, 137 bp, Glycine max
  unsure (1)..(137): unsure at all n locations; Clone ID: 701109124H1
gagacttgagagaaaganagagatgaagtagagtccgaaccaagtctcatagctgagagtttaggatcggaattctgcctccgttcttcttcatctcacctacaaccttaacctcatattagcacaaacttggtttg

SEQ ID NO: 35360 - DNA, 260 bp, Glycine max
  Clone ID: 701109125H1
tttgatccttccttagtagctaagagaatggctcaagcaatggcatcaatggctggcttgcgtggttcctctcaggctgtgttggaaggtagccttcaggtgagtggctccacacgcttgaatgtggggagtggaagcagggtggcctcagtcacacgtgcagggttcacagttagagcacaacaacaacaagtgagtggtgaggtacaaagcagccgtagggcagtgctttcacttgttgctgctggtttggccactgg

SEQ ID NO: 35361 - DNA, 259 bp, Glycine max
  unsure (1)..(259): unsure at all n locations; Clone ID: 701109126H1
cttattttcctttgtaatggaaagttagaaaccctcatcgtcaaancacgcgttttttttaatctctctctctcaacaaatatttgtgggtagattcaattcaccatgtcgagctcatcggagtactctgaattttccggccagaaaccggcgaggtcgccggagaaatcgagcttctctcagacttgcagtctgttgagtcaatacatcaaggagaagggtagcttcggagatcttaccctcggaatgacatcatgtg

SEQ ID NO: 35362 - DNA, 265 bp, Glycine max
  unsure (1)..(265): unsure at all n locations; Clone ID: 701109127H1
gtagcctctacccaatttgaggcgttngganctctntngcnccaaaaatctaattaaaatgccatatattggagatgccctatatcttgagaatcttagtcntaaaggatgtatacaantcgaagagatcggcctgtccattgttctttcaccanagcttactgatctgacattgaganattggcaaaagtnttatccaagtggccacggtttgggagangacctaattcttggaagagctagttctcganggatntccaaaaat

SEQ ID NO: 35363 - DNA, 258 bp, Glycine max
  Clone ID: 701109128H1
gaagatccagcacagtgaggtggaagtgaagggactgaagcttcacgtggcagagattggaagtggctccaaaacagtggtattcttgcatggattcccagagatctggtacacatggaggcaccaaatgatttctgtggcaaacgctggttatagggctattgcctttgatttcagaggctatggactttctcagcaaccagcagagcctgaaaaggaaaccatgtttgatctggttcatgaaattgtaggcctttg

SEQ ID NO: 35364 - DNA, 261 bp, Glycine max
  unsure (1)..(261): unsure at all n locations; Clone ID: 701109130H1
gcgaaatcgcaatcgcaatccagcgaatatgaaggtcgtagctgcatacttgctcgcagtgttgggagggaatccttccccttctgccgatgacatcaaacacatcctcggcgcagttggagctgaggctgagaatgagttgattgagttgctcttgactgaagtcaagggaaaagacttcaatgagctaattgctagtggnatgaaaagatgtctgcagtgtctggtggcggtgcagcggttgccgttgctgctgcnacc

SEQ ID NO: 35365 - DNA, 261 bp, Glycine max
  Clone ID: 701109131H1
ctaacgcgtgcagagcagagagagacgcagccatggggcgaagacccgcgaggtgttataggcaaattaagaacaaaccataccccaagtcacggttttgccgtggtgttcctgatcccaagatcaggatttacgatgttggtatgaagaagaagggtgttgatgaatttccttctgtgtccatctggttagttgggagaaggaaaacgtttctagtgaggcccggaagctgctcgtattgcttgcaacaagtacatggcc

SEQ ID NO: 35366 - DNA, 265 bp, Glycine max
  unsure (1)..(265): unsure at all n locations; Clone ID: 701109132H1
tcctagagagagtttggctgaagctgtaaatactgttatcaacctacttggcttggagccttgtgagggcacagaggaggttccacccaattcaagatcacacancatgcttattgtcgggtgtattcacagggaatataaaggtgcttgtacggttgtctttggacttgatggtccaaaggatattgcaatgncattgtctgtcagatctgaggacgaaactgtcagcgataccattcatgagattgtggcaagcggctagtcc

SEQ ID NO: 35367 - DNA, 274 bp, Glycine max
  unsure (1)..(274): unsure at all n locations; Clone ID: 701109133H1
gnaacctcatcctccaattcccacacccactcgttctcgttcccantaagctagcanaatttcatcgagaaattttntattntntngggcatattattcctgctgaaaatanattagatggccattgcanccttttggtaatacatcagctactcaatgggggattcatcctcanattttcgcagggtcanctggngttgggaangattgagncacccggnnanangcgacacncgggaaagggtttgggcggccccnnttccnnanttttttc

SEQ ID NO: 35368 - DNA, 262 bp, Glycine max
  unsure (1)..(262): unsure at all n locations; Clone ID: 701109136H1
cttcaaagctcagctttttactttcctcacatttcacncgaagtagntagggttccttacacgatggagcggttgaagtgggcgcanctgggtgagaggctgaagaccggtggggcccagatggggcgaatggtgagcggaaaagtgaaggagatgcttcaggcgccgacgccgnagtccaagatggtggacgaggccacgctggagaccatggaagaacccaattggggcatgaatctcagaatctgtggcatgatcaaca

SEQ ID NO: 35369 - DNA, 238 bp, Glycine max
  unsure (1)..(238): unsure at all n locations; Clone ID: 701109138H1
ataatagtagaaggtcggagatagtaaagagagaaatccgaatagaaaaagaagctagctagggtttcggcgcgaagaagaatggggaagaagaaggtggagataaagcgaatcgagaacaaaagcactcggcagataacattctccaagaggcgcaatggattgatgaagaaagctcgcgagctatccattctctgcgatgcgaaggtggcgctgctcatttcctcaaccncggaat

SEQ ID NO: 35370 - DNA, 265 bp, Glycine max
  unsure (1)..(265): unsure at all n locations; Clone ID: 701109139H1
cacgtaaattctaagcggtggccaaaggaaannanggctctacnatcatcagtncctaaagcaattgccgcatgagctaagttcaanncattacctaacagtttggcttctgcatcttccttatanttcttcagctaataagaagngaacaaatanaatctgccaccatccccaagaaagatncccataatcggcnctcttcaccagctaggcacactggccacaccgtnccctntcatgnactctcacacaaatatggccnttc

SEQ ID NO: 35371 - DNA, 258 bp, Glycine max
  unsure (1)..(258): unsure at all n locations; Clone ID: 701109140H1
ggtacctgtaatcccatcactcaatgaaacttttgttgttgatcccactgtctcaccatatgagtcaaggatcatatttttctataaaacatgggatccttacggcgtgttgtcaaattactctcctcatcccattcaaatgcctgatgaaaatggtgattgtgtgacttggatgagtgttgagcatactaccaggctcacaagtttattcgggtggntgatcctttgggcacagattgtgttganaggataantctg

SEQ ID NO: 35372 - DNA, 261 bp, Glycine max
  unsure (1)..(261): unsure at all n locations; Clone ID: 701109141H1
tttagttatctactcttttctgcatgtttgttctctcaacgactcctncgcgaaagaatattattccaatattttggntgggtngaatcccggggttgaagcgttnccngacancanggctanntctaagagtgtctcgcncnctcatncatgtccgntctgtacgacggaggacgggtagttgcgtaactgccgttaacccttccgccgcacggtggncgtggnncttngnnttctgaaggnggtagcccttnatantng

SEQ ID NO: 35373 - DNA, 105 bp, Glycine max
  Clone ID: 701109142H1
tgattctgagatttgcagcagctgcagcttctgcttctgcttctgtctcacgcatatcaaaaccccataacccaccattcctttcacttccacaccccaacactc

SEQ ID NO: 35374 - DNA, 257 bp, Glycine max
  unsure (1)..(257): unsure at all n locations; Clone ID: 701109143H1
gtgagtcctgcaactggtataataagaccagatcaaattgttgaagtatcagtgcatcatnaggaatttcagactctagaagagtttgtngatggtgtcgtacaaaattcttngtgtgaagactccagagacaaggaagctattttggttgtcaaggtgcatggcaattacactatccagccaagaaatcaccgagtccgtgttcaccactgttattcntcccagaaaaaatctctgattgactctcaaccagacgg

SEQ ID NO: 35375 - DNA, 256 bp, Glycine max
  unsure (1)..(256): unsure at all n locations; Clone ID: 701109144H1
acctcgaatcctcttctgcttcaacaacttcccgaggcttctggccttctgtcttacgttggatcccctcttccaccgatcacatcatcaatgctgaaaaacgcnttctctctnttgtcaagactccgtatgctcaagaacaggtcaatataggttccggtccacctgattccaaagttagatggttccgttcatctagcaatgaaccaggtttattaacacggttanattgacagtaaggatgattctcctacgc

SEQ ID NO: 35376 - DNA, 262 bp, Glycine max
  unsure (1)..(262): unsure at all n locations; Clone ID: 701109147H1
ggttcgagttgtttgttagatcggacatgtaattggcttgataaaaatcggttggcttgatcgattttagatataattnatgactcacttaaaccggatgatcatataanaaaactaaaaagatacccttgatgcaacaaggttattgcttggagtttgtcgttgcaaagtngctgcaccntcgtcagcacatgtgttcgtccaancataggaaaagctataaatagagaacgagtggaagangaaacntagataagagacc

SEQ ID NO: 35377 - DNA, 262 bp, Glycine max
  unsure (1)..(262): unsure at all n locations; Clone ID: 701109148H1
tcctaatcatctgtcgcaggctangagggtccctcctttcatatttgaggggcctctctgtcccgctaaggagtatttcttgatgcnntgtatttncctntnnctgtnttatattattgatttntcttgtgtctgcatcatcaatgacaattttacgacatcgtcttgtcttttgtgatttagattgtcaagtngtatgagagatgtgtcatngcatgtgccaatnatcctnagtattggatagcnaggttttggtgtatgg

SEQ ID NO: 35378 - DNA, 267 bp, Glycine max
  unsure (1)..(267): unsure at all n locations; Clone ID: 701109149H1
ggtgttggcactgccacacaacagagagaacagaagagaaccgagcatggtgatggccatggccanttcatctccttcttacaacctcactttccttctncctcgctcaggctcacttcaacctcttnctnnaactccgccatcttgttctttttttgctcaacctctccgaaacctttcactcaagttctgtgcaaaaattcanagcgttggagttggaagagaaggtccagcttccgatcccaaggccgggtctcatttanaaac

SEQ ID NO: 35379 - DNA, 261 bp, Glycine max
  unsure (1)..(261): unsure at all n locations; Clone ID: 701109150H1
gtagaaaagcaaaaccaacatgaacctgagaagaaggaagagaatgtaagcattttgcctagcagggggaaagatgaaaagttaattgattcctataagggaagaaaaacgtacaaggacgtagctgatgcagcacaagcagcttttgagtcagcagaatatgctgcagctgctgcaagagcagcactggaatctcccgttctgatcacangatcccgatgatcatganagcacaagccnccacccagaaaggggggaggg

SEQ ID NO: 35380 - DNA, 244 bp, Glycine max
  unsure (1)..(244): unsure at all n locations; Clone ID: 701109151H1
cgtaatcancatttcgcagtgtggacgatcgtcttcttcataccanccacacagagttcaggancagttaggatatctatttnntaatggctaatagaccggatccggatattgatgntgattttngtgagctttataaggagtacactggccccctggggactgctactacaaacatgcnaganagggcaaaatcaaataagaggtctaatgcagggtctgacgaggaggaggaagcccggga

SEQ ID NO: 35381 - DNA, 262 bp, Glycine max
  Clone ID: 701109152H1
gtaaacggttacgactggattaggggacgcgaagaggaggaggtgttgagctttgaataaggtgaagtcaacggcagccattacctcattttcttccgattgcgttggcaggtgcgtaatgcgcacattgcgtacaccagacgggatgtcaaccaatcacacgcgactctgtcagtctcgcacactcaaaaccttccttccccgaacaacaaccaccgttttcttgcattccacttctcaccatgtccttgatgcccaattc

SEQ ID NO: 35382 - DNA, 260 bp, Glycine max
  unsure (1)..(260): unsure at all n locations; Clone ID: 701109154H1
gaacctgnatggttctggagctggagcttcagctcccagttcagccttctttgggaccagcttgaagaaggttattgcctcaagggtccccaacaccaaggtttccggtggaagcttcaagattgtcgctgtagaagagaagaaagagattgaagagacccagcagaccgacaaggacagatggaagggtcttgcctatgatatctcngacgnccatcaagacntcacaggaggaaaggtttgggttgnccccctttccc

SEQ ID NO: 35383 - DNA, 137 bp, Glycine max
  unsure (1)..(137): unsure at all n locations; Clone ID: 701109156H1
cncgagncgttaagatatccccagcntcttgtncnttccctggnacnccaaacngcaattcactgatncaccacatgaggcactnagagagcatttgttgattnggatttggaaggtntttccacttnggnnacggg

SEQ ID NO: 35384 - DNA, 255 bp, Glycine max
  unsure (1)..(255): unsure at all n locations; Clone ID: 701109157H1
tggctactgggtttccatcaacattcaatggtgtaagatctctgcaggantctcctgttggaagtcctgtgtcatggaattcgcgtgtncctcatcctttntcgnanccgcacgagtcatctgacattgatgcttctatagattctccaattggaagccccgnatcttggaatnctcattctcttaaccagggtgacaatgatgctgcccgaatgaggaaaaaatggggaagtgctcaaaaaccattcttgtngc

SEQ ID NO: 35385 - DNA, 259 bp, Glycine max
  unsure (1)..(259): unsure at all n locations; Clone ID: 701109159H1
caacatctatctcacttcttagttctttgtggctctttccatgatggcctctcctacatctccaagagttctcttcttgagtctctttgtaactctttccatgattttacatttgagttcagccaggaagttgtctgagtcagacccccaattgcagttccaataccacagagggccccnctcttcacaggcaaaatctncgtnaacctaatttggtacngtaagttcnaacctctcagaaaggccattgttgctgatt

SEQ ID NO: 35386 - DNA, 251 bp, Glycine max
  unsure (1)..(251): unsure at all n locations; Clone ID: 701109161H1
gacgaaaaggtcttnaataagatcccgaaaggcccattgaaagggaanaagttagcttagtgtttaagcatttgtattctcaagaacanaaataggaggctccacttgagtcttnctattttctagagcctcgtttcttttaaaccatanaccaagcttnttttggatttctttaggcgggtgtgggattcatggttttagcttcaagnagtaaccntttgattngcnacaagcngtcgatttgcgataac

SEQ ID NO: 35387 - DNA, 261 bp, Glycine max
  unsure (1)..(261): unsure at all n locations; Clone ID: 701109162H1
ggcgacgncgagtgtacggattcgctcntntntcgatggtcttcagctccttagcttctggnttctccatttgcntaaganaaanctgcgttctcctcactcttggcttcttcangtnnttcntggggctgggtattggaggagacnaccctctngtctnntanccataatgtcggnttttgcccaacaagaagannagagggtcgctcatngcggcngngttntcgatgcaangcttcggcatatgggcagnccaaccat

SEQ ID NO: 35388 - DNA, 262 bp, Glycine max
  unsure (1)..(262): unsure at all n locations; Clone ID: 701109165H1
cttcgtcccactcgcaacacaacaatnctgttacnccacgngncaccactacnttttctnagaacattgcttcatttccctcttaatagtattcatcattcttctcgcgctttctnctcacnatctcacttnacaaaaccctttctgtttcnaatcntttctcctcacattctcgcnggngctcacnccaaatgaacggagaangctcgncgccgccgacgatctcgncggatcagtcaccaaagactngtactcgngccgg

SEQ ID NO: 35389 - DNA, 265 bp, Glycine max
  unsure (1)..(265): unsure at all n locations; Clone ID: 701109166H1
gtttgatcagaaaaagagatcaccaaaaaaactctagaaccctctgctcttttattgtgctccccgaaatcaaatcaagatccnctaaattgccctaactaaattgcacaataatctcacaactttgaaaaggagntatagcatcgtttgtctctgctctttgattgcagcgtccggcatgtgattgatgtgtgaattttgaggtgctgtgttccgtttgctnaaaatgngtgntgncncngttgcncccangncttccnggggt

SEQ ID NO: 35390 - DNA, 262 bp, Glycine max
  unsure (1)..(262): unsure at all n locations; Clone ID: 701109168H1
gttgggatttgaaagacactaagaagatgaccatatcnctaaaccccatcgtgagcttcagctcaacgaagttggaaacaaagtatcaggatgcatcaagatattcngttggagcttctttaccaaaggcaactcagtttacncctttgttgatagtgtctagatcgagaaagcttgtcaaggnnagaagntttngncattggctnttccagtggcagatagtgatcagctgccgcagacaacagtnncagtaaggattntg

SEQ ID NO: 35391 - DNA, 251 bp, Glycine max
  unsure (1)..(251): unsure at all n locations; Clone ID: 701109170H1
gttttgttttgggaacatcatcacattacattagattggtggtaatggcagcgtcactacaagcagcagctactttcatgcaacccaccaagttgagcaggagcaacactttgcagcaaaagtctactcagtccatttccaagggcttttggtttggaacctgttggagctaaaaaggtcacatgctccccttcaggctgatccttaaggacttggcctcacaagngtgttnngctaccaaattcngggtt

SEQ ID NO: 35392 - DNA, 260 bp, Glycine max
  unsure (1)..(260): unsure at all n locations; Clone ID: 701109171H1
gaactaataaagactaaaccatcggctntngncatggagagcttctcaagtgagnccactatgntcttcttgaggaactctatggttcacatcgtgccacgggactcgtggaatgtattccgaggcaaattcatcaagctatggataggggcaatgtcaagtttatctaaggaaaaaggaagtcagagatggcaaacaaaaganaaggcaaaaaacatctcaacctcaatcacctgagcctgaagcatctgaggacattg

SEQ ID NO: 35393 - DNA, 261 bp, Glycine max
  unsure (1)..(261): unsure at all n locations; Clone ID: 701109172H1
aaaatggcatcattcaccatgacagcttccatccttggcggcccagccgtcaccaaccggttggcagtagcaacgcagaggagatcactcgtagtgaatgctgccaaagctgttgaagcggaaaaggtcagttnctgacaatgacatggatggtagcaatggaaggaggaattgatgttcgccacggcggcggcngctgctgtttgctctggttgctgggatggcaatnggcanatgagccanaaaccaggaacccccagc

SEQ ID NO: 35394 - DNA, 263 bp, Glycine max
  unsure (1)..(263): unsure at all n locations; Clone ID: 701109173H1
ctttttgancttcaatggcggacgctgaaaccntcgctttccangcngagatcaaccagcttcttcagcctcatcatcaanaccttctacagcaanaaggagaaccntntngcgtnaaantcatgcaggcaacgcttctgatgctttggataagattcgatttgagagtttaaccgacaagagcaagctacgatgctcagccagagntcttcattcgtcttgtgcccgacaaggccaacaagactctttccgttattncacag

SEQ ID NO: 35395 - DNA, 257 bp, Glycine max
  unsure (1)..(257): unsure at all n locations; Clone ID: 701109174H1
agcagtgagacgatgatgactagctctagcttgttcttntcntcagcanccctctttctcaatcnccacccaccttcgctctttnntccccttcagacctctcatagcactcttcaacncntctcttntcctccggcctcnctccaaattgagcnacaaccctttcctaanccgcgccgacgatgacganggngacggcggcggccccgancantangagatggacgaggacgaaatggaggagctcgacaacaagg

SEQ ID NO: 35396 - DNA, 254 bp, Glycine max
  unsure (1)..(254): unsure at all n locations; Clone ID: 701109175H1
cttcatttaaggcctcttcgcatcttcgcgagcctgtgaggaatcttcttcagtccctctcatctcaagccaaaagggtcattgtcatccangactcgttaatggcatcagtggcacaagatgccacaaacatgccaaatgttgagaattacacttttcacagcacgtgtgcctttaccaccttcctttattattgggaggtaatgggaagacccccggttgaaggctcttccaagccacagaaattcctctat

SEQ ID NO: 35397 - DNA, 254 bp, Glycine max
  unsure (1)..(254): unsure at all n locations; Clone ID: 701109176H1
ctcggctcttgcatcgatgaagaacgtagcgaaatgcgatacttggtgtgaattgcagaatcccgtgaaccatcgagtctttgaacgcaagattgtacccgcagctccatgaggctagtatcattccatagtcttttccagttgtggtgggaggngttgtatcaagagcctgcttgtttaatttactcggcgcataatatgatttaataaagctggntttttatgagtatnatactttnncctgttnncatgcg

SEQ ID NO: 35398 - DNA, 256 bp, Glycine max
  unsure (1)..(256): unsure at all n locations; Clone ID: 701109177H1
actgaaccaaatcatcacacacacatactaagaagcaacaattctnctacaatgnatctcntcctnctgganangacncncataggtntcttccncgatgcggtggtcgccancgccgtctccacnctccgcggccggaaattcaagctnccaccgggcncantccccgtcccaatcttcgnnaatggctccaagtcggcgangacctcaaccancgcaactncancgnttnngccanaaaattnggtgaattctt

SEQ ID NO: 35399 - DNA, 96 bp, Glycine max
  unsure (1)..(96): unsure at all n locations; Clone ID: 701109180H1
anagaattctccttcctatcaagtgtctatttcaaagtctccaatanttccnaaacacnnttcnngaacataanagccttatttccatncaacnng

SEQ ID NO: 35400 - DNA, 266 bp, Glycine max
  unsure (1)..(266): unsure at all n locations; Clone ID: 701109181H1
cttnactantacaccaaattaataganattaaagatatatcattccacaacacaaattaaanttagtgagacgtacccttattatggccaaagaaggtcttggacttgaaatcactgagctaaggttgggnctacctgatgcggagcatcaagtaagtgtagtcaataagaaaaatgagangaagagggcattctcggaaattgatgatggtgttggagatgaaaatagctcctcgggtgtgctcttaccggaagaagaacagcnt

SEQ ID NO: 35401 - DNA, 243 bp, Glycine max
  unsure (1)..(243): unsure at all n locations; Clone ID: 701109182H1
ctctgttggaactgatgccaagggaacacattaatatagaagagcctgaggnaggctgctgaaaaacacaaggataacttatctgcacttatggtaacatatccttcaacccacggtgtttatgaggaaggtattgacgaaatttgcaatattattcatgataatggaggccaagtatatatggatggtgccaacatgaatgctcaggtttgtttttccatacatatctttacattcatgtag

SEQ ID NO: 35402 - DNA, 263 bp, Glycine max
  unsure (1)..(263): unsure at all n locations; Clone ID: 701109183H1
ctcagaaaaatgagagaaatcancagcattcacataggtcaggccgggatccaggtcggaaactcctgctgggaactctactgcctcgaacatggcatccagcccgacggcatgatgccttctgactccaccttcggtgtagcccacgacgccttcaacaccttcttcagcgaaaccggatctggcaagcacgttcccccgtgctgtcttcgtcgacctcgaacccaccgtcatcgacgaggtccgctgcggcacctaccgtt

SEQ ID NO: 35403 - DNA, 257 bp, Glycine max
  Clone ID: 701109184H1
gggacacataaacccggcggtgacatttgggctgtttttggcgaggaagttgtcgttgcccagggcgattttctacattgtaatgcaatgcttgggtgctatttgtggcgctggcgtggtgaagggtttcgaggggaaaacaaaatacggtacgttgaatggtggtgccaactttgttgcccctggttacaccaagggtgatggtcttggtgctgagattgttggcactttcgtccttgtttacaccgttttctccg

SEQ ID NO: 35404 - DNA, 259 bp, Glycine max
  unsure (1)..(259): unsure at all n locations; Clone ID: 701109185H1
cttcacaactcacttccctnnccttccctncccttcttcctcctctccactttctcgcaaatttcccctcactttccgggaaaaaaacagaactccaatcacacctcacaagctccctttttcagcaaggcctaccaccaccagagtggtgttggtgaagtctcaggccacagcacctgcttcttctgaggctgtggcagtgacactgggtctcgaagatgaaggcatgggcctanggggaatatgggggtgtggatgt

SEQ ID NO: 35405 - DNA, 239 bp, Glycine max
  unsure (1)..(239): unsure at all n locations; Clone ID: 701109186H1
cgttagtgctttatttaggtgacaaacactacttcacagagaaagnacactcggagaccttgcaagccttcancaatggnngtnanagtttatanngtgtactactccatgtatgggnatgttgagaaactagcagaagaaataaagnnaggggcttcctctgtggaaggtgttgaggccanattatggcaggtacctgagacgctgcaggatgaggtgctcggtaagatgactgcacc

SEQ ID NO: 35406 - DNA, 256 bp, Glycine max
  unsure (1)..(256): unsure at all n locations; Clone ID: 701109187H1
tgtcactcctaatcaancaactccaaaggncccttcatggctatccgatagtgnnncaaatcggtgtcctaggtcatgtagccaatgtntacatatacgaancaantccnaacagnnanacnattgagagattgaagaactctcttagcaagcttttggtgtactgacnntgcattcgctggcnganttcagcttgacngnaagtggtcgcatagagtggattgtaacgcnaacgggagtgncattgattggangc

SEQ ID NO: 35407 - DNA, 256 bp, Glycine max
  unsure (1)..(256): unsure at all n locations; Clone ID: 701109189H1
ctttccttacccacctacgtttccttcagatccaaccaattccatcgtcaccaggaacacaccccntntgccnatncagntntanctctcactcttcaacngngnncncagataaggttcaacccttttncngctctcgatgccattccnccagatctgtnagcttgntnaggntnggcnagtgcaaggggtgnggatagtgaggnagaatnagggccaagtcnnatgagtgcttatnaaanactctgagggcggg

SEQ ID NO: 35408 - DNA, 257 bp, Glycine max
  Clone ID: 701109191H1
tatgcctatgcttgtttatcattttcttactttcctctcacgctctgccacaaaactccgtctccgcaataacggaataaaaaaacaagtttaattactattatggcgccgagggatcataagacaagcaacgctaaggctaacggtaacggtaacagcggggtgaaggaggtgcattttcgtggagtgagaaagaggccgtgggggagatacgccgcgggagattcagagatccgggcaagaagagcgcgtctggc

SEQ ID NO: 35409 - DNA, 257 bp, Glycine max
  unsure (1)..(257): unsure at all n locations; Clone ID: 701109192H1
cttcattttttccctttaaatttctcattctctcttcctctttctctttctgcgtctctttctgaatatttgaattttttcgtttcaaatcctcagcattgaaaccaaaaatgatcttcaaatagcatcgccgaagactcaaatccaccccaatataaaggacaatccattttttttaggctctcacaaaaaggggtgaaagaaagatcgaaacttgaacacngaaaccacgttgaagttgaaagtggctgnaaggg

SEQ ID NO: 35410 - DNA, 237 bp, Glycine max
  unsure (1)..(237): unsure at all n locations; Clone ID: 701109193H1
gaaagaggaagtgaaggttcagattaccagatgatagggttcttcagattagcggagagaggaacattgagaaggaagacaagaacgacacgtggcatcgcgtggagcgtagcagtggtaagttcatgagaaggttcagattgccagagaatgcaaaantggagcaagtaaaggcttgtatggaaaatggggttctcatgttactattcccaaaggaagaggttaagaaatctgatg

SEQ ID NO: 35411 - DNA, 256 bp, Glycine max
  Clone ID: 701109194H1
ctacaatggctgcttcaacaatgactctctcttcatcatcattggctggccaagctatcaagcttgccccctccacccctgagcttggtgttggaagggttagcatgaggaaaacagcctccaagactgtttcctcaggaagcccatggtacggcccagaccgtgtcaagtacttgggcccattctctggtgagcccccatcctatctcactggtgaattcccaggtgatatggttgggacactgctgggctttct

SEQ ID NO: 35412 - DNA, 236 bp, Glycine max
  unsure (1)..(236): unsure at all n locations; Clone ID: 701109195H1
aagaagaaagggctatacttcaacttcaacggtcggtncaattcnaaacttatcaacggtcaccacattcaaatttgaaggatcccattcccatccctcgccacggttcgaagcactctgaaattttctctttgccacggaaccagnnnnnnnnnnnnnnnnagaaattcctcttgattgccaagnctccatctttcacatggatccgatcaatcgnacgacgttcagcataccca

SEQ ID NO: 35413 - DNA, 263 bp, Glycine max
  unsure (1)..(263): unsure at all n locations; Clone ID: 701109201H1
ctctgctagggtttcatcttcttccatcacctccgtcgcaatgaaaccaggcttcatctgaatccgattccccttcgccccttctcctccttcactttcaccttctccgaatcctctaccaattattatgatgaactccatcttcgtctctcacaaccttcgcgtctttggtccnggcttgaatcccttcgcaccttattgcatcgccaatcacaccctttcctctncgctaaataccaattcccctctccgattttcggggt

SEQ ID NO: 35414 - DNA, 256 bp, Glycine max
  Clone ID: 701109202H1
gacgattggttcctgtgttgcctacctaccaaacggtattcgtgtggctagtcagacccattccatccaggcctctttgttggggacgctggaggatttcaaagtcccacacgtgaaccacgttagtcgtccatcataacggcttcctgtggcacacgtgtggtgattgttctctcggatgcggtgcatgcagtgaacgtgggtggtctagtgcccccacattgttccttaaaatcggttgtctcggatgacgctt

SEQ ID NO: 35415 - DNA, 252 bp, Glycine max
  Clone ID: 701109204H1
cagatctgtcttccgaagcaggaactaaatatggctgacttgttggaatggtcaaagcaagataagaaacgaatgcttcatgtcgtctaccgtgttggtgaccttgatcgcaccatcaaattttacacagaatgtttaggaatgaagcttttgaggcaaagagatatcccagaggagaaatatgctaatgcttttcttggatttggccctgaagaatcccattttgttgttgaattaacatataattatggg

SEQ ID NO: 35416 - DNA, 241 bp, Glycine max
  unsure (1)..(241): unsure at all n locations; Clone ID: 701109205H1
ccttcttttgggaaaagattaacaatnaaagtgtggagnnctgttgatagcanagangtttggnatcttcgacaaggggcaaaagatanaggggacagtggtgntgatgccaaanaangngttggacttcnacgccntaacctccatcggtaaaggtngtgtnatngacacanccaccgggatcttaggtcaaggcgtcagttagtnggtggantnattnanactgccacttccctcttag

SEQ ID NO: 35417 - DNA, 207 bp, Glycine max
  unsure (1)..(207): unsure at all n locations; Clone ID: 701109206H1
aggcactttttnctcttttttgttggtttctcttgttttttttttgtaggtactgangaanaaanaccaaaactttatccgcttgcttcacttagctcaanagcgtncaattcaggcaaaggccttgaagtcggngtgtgtgttaaggatttctaggagttgcttctgtctgactgaagaaatggaggtatatggcaaatcnatggt

SEQ ID NO: 35418 - DNA, 248 bp, Glycine max
  Clone ID: 701109207H1
aaaggacgcagaaagagatcttttggccaaactacttgtcaaccttgtgaaatctcagcatggcactttgaatcaagaccagctcatcaaagggtttgaatctgttctcagtacattggaggatgctgttaatgatgcccccagagcagcagagtttcttggccgaatttttgcgatagccataacagagagtgtagttactttgaaggacattgggcagttaatacatgatggtggagaggagccag

SEQ ID NO: 35419 - DNA, 250 bp, Glycine max
  unsure (1)..(250): unsure at all n locations; Clone ID: 701109208H1
agcttgctcatcaagtccaagaaccaacctaccttttgcaatctcaattcaatggcgtcctctctcattgcgaangcttacctctcctcttccctcctctccaggtccctccttcgccccgccgcttccgcttcccaccgctctttcaacaccaacgccatgcgccagtatgacaaccgcgccgacgaccacagcaccgacatcgatcgtcactccgaacgctctttccctagcactgcgcgccgcgacg

SEQ ID NO: 35420 - DNA, 241 bp, Glycine max
  unsure (1)..(241): unsure at all n locations; Clone ID: 701109209H1
cagaaaactgctgcttctcgacccacttttgaagttcaaaacttaaaccctagnnnnnnnnnnnnnnnnnnnnncctgnatcttcaaccatgtcagcgatgctgcaacctcagatcattctgctcaaggaagnncacggacacttggcaagggaagccacagctggtgagcaacatcaatgnctgcaccgcngtcgccgangtngtcngnancancctcggnnctcgcggcatngncaagc

SEQ ID NO: 35421 - DNA, 245 bp, Glycine max
  unsure (1)..(245): unsure at all n locations; Clone ID: 701109210H1
tntcacttgtactcactcantccaagaccannacggcgccatgcctaccgtcagtgtggggcgtgatcgcctgtatgcncctctaggaaagacttacacgcaagaggaattccaagacttgtgcttcagtttcgggatcgagctcgacgacgtnacgacggagaaggcaattgtgagaaaagagaagcatttggatgaagaagaagctgacgaggacgaagaagttatctacaaaatcgaagttc

SEQ ID NO: 35422 - DNA, 247 bp, Glycine max
  Clone ID: 701109211H1
agtgaccccaatatacttagccatatctttacttcccaaaacttgctctacaatgagtttccttcgttcttttgcaagaaacaaggatatatcaaaagtaggacgcagaggtatccattgcatgcagaaactatgtgcagaaaaaatatctcctgattcactagagaaggcccaaaatcgtgtgatagatgctgcactcacacttgttcgagaaaatacaaggcttaagaaagaactcgtgcatagt

SEQ ID NO: 35423 - DNA, 246 bp, Glycine max
  Clone ID: 701109212H1
ctcttattcccactcagtggtgaatttgccaaaccgggataaccgtatccctattcaggaatacaatgttctcgttaagactccctattcctctcgttaaaacaccaccttctccctcttgttattattctcactattatcactatcgttatcgttatcgttgttatcatcctttccatcaccgttcccaaacacagagtcttatcgtctcgaagcgcggttccgccattgcgaagtgtcacgctg

SEQ ID NO: 35424 - DNA, 248 bp, Glycine max
  unsure (1)..(248): unsure at all n locations; Clone ID: 701109213H1
gggcagtgacagacgcacctcaacctcttggaacgtggcaccttcttcattggaagttcggccagaccttncacgggcaagaatttccgcgtctgaaaaaaataacaaaatttaaacatggatgtttgtttttgtagttgcgttttggttttttagttttcccgcgttcaactttccctctattttcccgggaaagtttgaagccgtgttctggtttaagtgtgtagtaggggacagaaagtaagaga

SEQ ID NO: 35425 - DNA, 247 bp, Glycine max
  unsure (1)..(247): unsure at all n locations; Clone ID: 701109214H1
tttgactctgcgagatcgctgcatctggcttcactacctgcatctatggctaaaccccacnnnnnnnnnnnnnnnnnnnnnnnnnnctgcgccactcttgagttttcttcatcttcaccctccgatcacctctacaatgttggagaacttgtcccattgtttgtcaacaaagtgggacccttcaacaaccccagtgagacatatgagtactatgatttgcctttctgcaccccagacccaattgtca

SEQ ID NO: 35426 - DNA, 250 bp, Glycine max
  unsure (1)..(250): unsure at all n locations; Clone ID: 701109215H1
gcaatgcaataacatcagtacataacataacataacatccttaaccctttgaacatcgttttgcagccatggaaacaggcatagcatgctacactcgcgggcctttcttgcctagtgtttcttccaagcactctccacctnccatttctccatcttttggcttgaggagtctgaaatcaagctctttatttggagaatcgctaagagtggcctccaaatcaacaataaaggtttcaaagacaaatnatac

SEQ ID NO: 35427 - DNA, 255 bp, Glycine max
  unsure (1)..(255): unsure at all n locations; Clone ID: 701109216H1
aatcaaatgggatactgaaattgatgagagcattgaacgaggccgatatcagatttgatgcaaggagttatagttccagactgaacagtatgntaaggagtgatactgagtcaattttgggagcatcccaagtctatagttattctttcagagtggacagtgcaatagcatccccgctcggtagttttgctttcagagaacacagtgcaataaggagtnntggatgcgtcaattttgggagcatcccctgtccat

SEQ ID NO: 35428 - DNA, 81 bp, Glycine max
  unsure (1)..(81): unsure at all n locations; Clone ID: 701109218H1
cncgantgaacgcggctgcaactccngtcttntctcgtaatncncggnaattggaccgttnagccccttcatcttctatgt

SEQ ID NO: 35429 - DNA, 252 bp, Glycine max
  Clone ID: 701109219H1
cttctctcgttgattcggatctagagttttttttcactcttcagttctcgttgttgttcttcgctttcctgaaactagggttttcaatttcgattcattcgttaataattaaagatgtttgggagggcaccgaagaagagcgataatacgaggtactacgaaatcctcggcgtctcgaagaacgcttcgcaggatgatctgaagaaggcttacaagaaagccgccatcaagaatcaccctgacaagggcggt

SEQ ID NO: 35430 - DNA, 252 bp, Glycine max
  Clone ID: 701109220H1
gataactagaaacagtgtgatgaaaatgaaggtccttgttttcttcgttgctacaattttggtagcatggcaatgccatgcgtaacgatatgttccctctccgaatgaacactggctatggtgcccgtatccccggaggtgaaatgcgcaagttggaggcttgctgtggaagcacacaacatctttggctttgagaccattcctgaagagtgcgttgaagcaacaaaggaatacatccatggcgaacaatat

SEQ ID NO: 35431 - DNA, 250 bp, Glycine max
  unsure (1)..(250): unsure at all n locations; Clone ID: 701109221H1
ctcaaatctcttcgttccttcgattcgttccattccttccaaaatggccaaagacccagttcgcgttctgcgtcactggagctgcagggcaaattgggtatgctcttgtccctatgattgctaggggagtgatgtngggtcctgaccagcccgtgatcctccacatgcttgacattcctccggcagcagagtcattgaatggggttaaaatggaattggtggatgctgcattccctcttcttaaaggtgt

SEQ ID NO: 35432 - DNA, 249 bp, Glycine max
  unsure (1)..(249): unsure at all n locations; Clone ID: 701109222H1
aaaagagtgaagttttctcacgaggaaaaaaaagctaaaaatggggtcgaagtggatgtggttgatattacactttgcatcggttttggtgtttgtttggggagatagaacaattttnaaggtggaagggcctatgttgttggatanttcacaganatatgaangcagtttcattagcaaagcagtgnncttcttatggcaaccaggggaatcaggttatcagcacgtttggccagacatggannttgg

SEQ ID NO: 35433 - DNA, 242 bp, Glycine max
  unsure (1)..(242): unsure at all n locations; Clone ID: 701109223H1
gatntcggctttcagacncgantggatatagntcccttgtgctgcacaaacagagnaggagagaanantggacgaggngaatngttacagtgggagtagcagntcaaacttggngactacaaaancagagagatctgtgtngctgatgaagtgccctttggtggtggctaagtcatggcaggctcatctcttctcaagtctcgccaaggttgtgctctcccttgatcctctccacntnaaga

SEQ ID NO: 35434 - DNA, 247 bp, Glycine max
  unsure (1)..(247): unsure at all n locations; Clone ID: 701109224H1
gtggtttagcgggtatggattggaagcagtaccggctcgtacccaagaacaagaacatggattatggcttcctgcttttgctcctcttcttccatatcttccttcctcactcctctggtaancccagtggagtgtgtgtttctcaaggaggtcgttttcctcccttcaaatcagagggtagcactcccaaaaagggtcctaaagatttgactctttgccggatctttcgcaaaaanacttgctgcga

SEQ ID NO: 35435 - DNA, 245 bp, Glycine max
  unsure (1)..(245): unsure at all n locations; Clone ID: 701109225H1
gccagtagtcatatgcttgtctcaaagattaagccatgcatgtgtaagtatgaactaattcagactgtgaaactgcgaatngctcattaaatcagttatagtttgtttgatggtatctactactcggataaccgtagtaattctagagctaatacgtgcaacaaaccccgacttctggaagggatgcatttattagataaaaggtcaacacaggctctgcctgttgctttgatgattcatgataa

SEQ ID NO: 35436 - DNA, 251 bp, Glycine max
  unsure (1)..(251): unsure at all n locations; Clone ID: 701109228H1
cacatattctttgttgcaatatcacaaacacctcgtccgtcacaatgcagctanctgtggcggccaacgctgttcgtttcaccgtcgccgtttccgaccttcatccccttctccggtcatccttctccggcgtctccgttaagctcactccccaatccataacgttttcacgcttgaagcccctcaccgtcttccgccgccaccaagaaggcngtcnctgtcctcaaggggacctccnccgtcgaaggcgt

SEQ ID NO: 35437 - DNA, 227 bp, Glycine max
  unsure (1)..(227): unsure at all n locations; Clone ID: 701109229H1
gaagaaccaccactaccttatccacttccactcctcaccaagccncnaccatggcctcaaccaacgccctctcttcagcttccattctacgctctcccaaccgncagtctctgaccagaagagcgaaccacaacggaagagtaaattaccgtcaaccgaatagccgtttctccgtcaaagcctccgccaaagagattgcctttgaccagcattcccgctctgctatg

SEQ ID NO: 35438 - DNA, 250 bp, Glycine max
  unsure (1)..(250): unsure at all n locations; Clone ID: 701109230H1
cacacatagaaacccaacaacaagaatgaagaagatgattctaaccctcttcttcatcatcttatctctcctctccctcttcccacgcctccgtggtggatttctgcgtaganagctacacaggccccaatggccccgcaggtcactcatgcaagagcccagcaaaggtcacggtggacgacttcgtctactccggccttggcaccgccggcaacacctcaaacatcatcaaagccgcggtgacgccggc

SEQ ID NO: 35439 - DNA, 254 bp, Glycine max
  unsure (1)..(254): unsure at all n locations; Clone ID: 701109231H1
ccgtaaagggttgtgaagcaggcagagaagagccatggtgcacgtttccttctaccgaaactatgggaaaaccttcaagaagcctcgtgcgtccgtacgagaaggagcgtttggacgccgagttgaagctggtcggtgagtacggacttcgctgtcaagagggagttgtggagggttcagtacgctctcagccgcatccgtaacaacgccaganatcttttgaccctcgacgagaagaacccgcgccgtatctt

SEQ ID NO: 35440 - DNA, 253 bp, Glycine max
  unsure (1)..(253): unsure at all n locations; Clone ID: 701109232H1
aganagatgatacggaagaacgtgaagcagcgataganctgagacaaaggatagaggatcaggagttgttgttagagttccttttgttacttcaacagagannacaggnagttgcngagaagttgcaacatactgtctctnttctgtgttcanatantgaagaagtgaccaagcagcacgttagatttaaagagattactggtgctgaactggggagtnangcncgtncagcatcaagtntcccatccatggg

SEQ ID NO: 35441 - DNA, 253 bp, Glycine max
  unsure (1)..(253): unsure at all n locations; Clone ID: 701109234H1
acagaggactccagccaatggatatgaaaaaggattccctggaaggccagatggtttgcagaagtttcctccattaaattatgatggttccacaaaattgttaaggnatggttctcagtcttccatgggaagtctttctgtggatgatcttagagccagcagcatcagaacatctgctgatgaggatattactagcatccatacttttgttgctgggatgaaagaaatggtcaaacaagaatatgagaagcat

SEQ ID NO: 35442 - DNA, 255 bp, Glycine max
  unsure (1)..(255): unsure at all n locations; Clone ID: 701109235H1
gnaccatnacannacaacnagttggagattaantcncngtgnggtcanagtancaagaggcaattagtgctcatagattattcatattagattaccatgatgcattcttcccgtatttgacgaagataaacagcctacctattgcaaaagcttatgccacaaggacaatcctgttcttgaaagacgatggatctttaaagccacttgctatcgaattaagcaagcctgcaacagtgagtaaagtggtgttgcctg

SEQ ID NO: 35443 - DNA, 241 bp, Glycine max
  unsure (1)..(241): unsure at all n locations; Clone ID: 701109236H1
gcagagttctcggcgcagtttgccttcgtttgagctctgttctgttctgtgcctccacaaaccaaaccaggcacaagtaatactgtgtaatccaacaaactgaagtatagctaggtgancggaagtagtcaagtacaagagaatggcgaagtcattgagatcgaagagggagaagaggctgagggctattcggagggagattgttgaacctttctatgacaagaaagaagctgctaagctt

SEQ ID NO: 35444 - DNA, 251 bp, Glycine max
  unsure (1)..(251): unsure at all n locations; Clone ID: 701109237H1
gctacaaacaaggtgcacttcattttcaagcntaagaatccaaaganctggggagtatgttgaacaccatnctcaagtatcctccttctgtcccatctgacaaactaactcatgtatacactgcaattctgaagcccgataatgaattgcaaattttgattgatggtgaggagaagaaaaaggcaaatttcttgtcttctgaggactttgagcctcctcttatcccttccaagacaatccctgattctgat

SEQ ID NO: 35445 - DNA, 248 bp, Glycine max
  Clone ID: 701109238H1
agactccaaaacagttaaccaacaagcttacttttatgccagagacctcgaagtccatcccaaggacacatttgtgttcagtatagatggcaccgtactctctaatattccatactacaaaaaacatggatatggggtggagaaatttaactcgaccttgtatgatgaatgggttaacaagggcaatgcaccggcactgcccgagactcttaagaattacaacaagctggtgtctcttggcttcaaga

SEQ ID NO: 35446 - DNA, 245 bp, Glycine max
  unsure (1)..(245): unsure at all n locations; Clone ID: 701109242H1
gtctggggaaatttgcgttgtttttcgcggtacagctcacacacactgaacggtaagtatggcggacaaggctgttacaatccgaacccgaaagttcatgaccaacaggcttctttccaggaagcagtttgtncgttgatgttcttcatccancgagggcaaatgtttccaaggctgaacttaaggagaagctagctaggatgtatgatgtgaaagaccctaatactgtatttgtcttcaaattc

SEQ ID NO: 35447 - DNA, 245 bp, Glycine max
  Clone ID: 701109243H1
cacatattctttgttgcaatatcacaaacacctcgtccgtcacaatgcagctatcctgtggcggccaacgctgtcgtttcaccgtcgccgttccgacctcatccccttctccggtcatccttctccggcgtctccgttaagctcactccccaatccataacgttttcacgcttgaagcccctcaccgtcttcgccgccaccaagaaggccgtcgctgtcctcaaggggacctccgccgtcgaagg

SEQ ID NO: 35448 - DNA, 244 bp, Glycine max
  Clone ID: 701109244H1
aattgggtcactggtttctgtcataggtggtagagaatctgagtcctcagagatctaagcctctctgctggtgttttgttcatcacacacaccctttttgttgtggcatagttgtgaaagtgaaagagtgagagaagatgatgaggatgaagaatattagtagtagcatcatgaatggaggtggttcagttggttgtagatctgagccgggttcaaaggaatgggagatgaggccaggtggaat

SEQ ID NO: 35449 - DNA, 194 bp, Glycine max
  Clone ID: 701109247H1
ttcaacaatcagcttatcccggcactggacctttggagaacttggctgctcacttggctgacccatggcacaacaacattggaaacgtcattattccacaatcgattttgccttgaaaaaaaatatatatttgtttcaatagctacctgtataactccgtgtaacaatttgtaatgaatcggatcgatcttgct

SEQ ID NO: 35450 - DNA, 255 bp, Glycine max
  unsure (1)..(255): unsure at all n locations; Clone ID: 701109249H1
cttganaaaccaatgcaacaacaaaaaggaaagaaagctaactactttttttataagaggaaaactgcattgatgtcttgatgacttttagttggaagaagaacaaaaaacaaaagaaatgggttgtggttctgagcattttatcatgntcttcaacatcaccctcttgatgcttctatcatcacaaagcacccacattttgactgtggctggttctctattcaatgcagtgggaagctccaagttcaggcctac

SEQ ID NO: 35451 - DNA, 250 bp, Glycine max
  Clone ID: 701109250H1
agcctaaacgctttgcaattaggcctgataagaccagtgaagtgtttggagctttgcttcctttgatctttcgttttgccactggagttttcgtttctgggtattctttttcaattgtttctaaggatgaaattcctacagacgaatatgcttggaacttaatggcgttaccataaaagaaacagcaaaattaggccctcgcccagagaagcctattgaaatatatgaatttgagagctgtccatttgcc

SEQ ID NO: 35452 - DNA, 252 bp, Glycine max
  Clone ID: 701109251H1
cttgcttccacttctgattcagaaactcttaggcattccacattctccaaccccgaaccctaagagcagagcgaaaatgacaaccaccttcgcgaccgtcgcaggactcggtggcgcattactgtcatccacctcatctcgtctcacctcagggtttgtgaaatccccagtgattgctaggaatcccttgaggcaagctgtggcaatgggaaatgggaggattacatgctttgagaggaattggctgcgggc

SEQ ID NO: 35453 - DNA, 249 bp, Glycine max
  Clone ID: 701109252H1
ctttaaagttacatagtttttcattgttttacttaatctacaatggctgcttcaacaatgactctctcttcatcatcattggctggccaagctatcaagcttgccccctccacccctgagcttggtgttggaagggttagcatgaggaaaacagcctccaagactgtttcctcaggaagcccatggtacggcccagaccgtgtcaagtacttgggcccattctctggtgagcccccatcctatctcact

SEQ ID NO: 35454 - DNA, 247 bp, Glycine max
  unsure (1)..(247): unsure at all n locations; Clone ID: 701109254H1
ccaacaataacaaaggacaaaactaacgaggaagcaaaacaaacattgcttggcaaggacgaggagcagctagcaaaacccctttcttttacttgtttctctaatttcttcattctcgtgcaacatatcacaaaacccttaagccgatattcaccttcaacgcctctgtagtttgttaaagatggaggctgagaaacagcaccagtttgatgtggacctcggcaacctcatggctttcgnttcctat

SEQ ID NO: 35455 - DNA, 246 bp, Glycine max
  unsure (1)..(246): unsure at all n locations; Clone ID: 701109255H1
gtcggttttcagacacgagtggcttttgttactgcgctgcgtgcagaaacagagaaggagagaagaatggacgaggagaatggttacagtgggagtagcagctcaaacttggagactacaaaagcagagagatctgngtggctgatgaagtgccctttggtggtggctaagtcatggcaggctcatcctccttctcaacctctcgccaaggttgtgctctcccttgatcctctccaccctgaagaa

SEQ ID NO: 35456 - DNA, 243 bp, Glycine max
  unsure (1)..(243): unsure at all n locations; Clone ID: 701109258H1
gtggaatatttgngtatctgaattacgacgtnaacagngacagacgatacntcttgcaggttctcttcantggcctcagcagattggagtaccgtggatacgattccgcaggcatcgcgatcnacgattccaatttctctccncttgttttccgtcaagaagganncattgantcgctcgtcaaatcggtttatnaagaagtgggagaaactgaactgaacttgggggaatgcttcggnactc

SEQ ID NO: 35457 - DNA, 234 bp, Glycine max
  unsure (1)..(234): unsure at all n locations; Clone ID: 701109259H1
tataatttgcacaattttgtatatcccccttgttcttatagattggcattaacgtgcttctcctccattcctccggcatgcgttttnacctcataatttcgttaaagagttcggtgagccactcaagacctctatctccaagagttttccacacttcaataggtatcntgtctggccccaccgccttaccattactcattcttttcaacgcttcctttacttcctgtttctgaa

SEQ ID NO: 35458 - DNA, 245 bp, Glycine max
  unsure (1)..(245): unsure at all n locations; Clone ID: 701109260H1
cttgacatccccttcaacttctattctcttttgaaacacttaganaagaaaaaaaaaaatgtctgcgttccttttgcttttcctngttttttcttctcagttgatcggtggactcaatacacctctaccatctccaatctatggaaacctcgtaaccattctcagcatagatggaggtggtataaggggtatcattccagctgtanttcttgaccacttcgaaaaggctcttcaggcatgggata

SEQ ID NO: 35459 - DNA, 226 bp, Glycine max
  unsure (1)..(226): unsure at all n locations; Clone ID: 701109261H1
catcagaggaagcctagatttggtacctcagcttctctgttgnnnttgagcatctggatttanctgtagggtatgtgtgttgctcatcctccggtaatctttgcacattaagtctctcgtccggttcanaatgaggcgtgaaacctgttgcttctttgggtanaggattcaggagtctagctaccttggatcaccacaaagtatgttcagatgtgtgtttcgaagt

SEQ ID NO: 35460 - DNA, 247 bp, Glycine max
  unsure (1)..(247): unsure at all n locations; Clone ID: 701109262H1
gacagtgctttcacttgttgctgctggtttgaccactggcnccttgttcaagctgtgcttgcngatgccaaacctattcanagttggaccacntcncccaccttctggcggattacctggaacattgaactcagatgnaccaagagaccttaagctgccattgaaagataggttcttccttcaaccattgtctccaactgatgcngcacaaagggcaaaggaatcagccaaggaaattgttggaatt

SEQ ID NO: 35461 - DNA, 250 bp, Glycine max
  Clone ID: 701109263H1
gtttccactacttttcttcccttctttccagaacaacaccacaacacaaacagagcaaaaaaagctccaccaatggcgggttacagagccgacgacgactacgactacctcttcaaggtggtcctgatcggcgattccggcgtgggcaagtccaacctcctctctcgcttcaccaagaacgagttcaacttggagtccaagtccaccattggcgtcgagttcgccacccgcaccttgaacgtcgattcca

SEQ ID NO: 35462 - DNA, 254 bp, Glycine max
  unsure (1)..(254): unsure at all n locations; Clone ID: 701109264H1
atccatcaccaanaataatgtctctcttccnttgncatgcntttcacnaccgcatggncannctctcacncttctcacccttgcanttccanacccctctttgcttttctaccaaanccctcttnttnactcatnatnaanaacaacaacancttatnctctcacnaaaaccacaaccactgacctcannaacaataggcntctttcactctncacactgcccagaaagttgctctgcaaaccaccccaggggt

SEQ ID NO: 35463 - DNA, 247 bp, Glycine max
  unsure (1)..(247): unsure at all n locations; Clone ID: 701109266H1
ttctactccaacaaggagattttccttcgtgaactcatcagcaacgcctccgatgctttggacaagattcgatttgagagtttgacagataagagcaagctcgatgctcagccagagttgttcattcatattattccagacaagactaacaatcacactgaccattgttgacagtggtattggnatgaccaaagcgatttggtgacaattggggtacaattggtagatcggtaccaggaattcatgg

SEQ ID NO: 35464 - DNA, 250 bp, Glycine max
  unsure (1)..(250): unsure at all n locations; Clone ID: 701109267H1
cctaattcacacccaaagagaaaagaaaaaaaaaacaacantggtacgtgatgccaccgaagttcgatccctcgnaggtggnggacgtgttcgtccgantcaccggcggcgaggtcggcgcggcgagttctntcgccccgaagatcggtcccttgggaatctccccaangaagatcggagaggatattgctaaggaaaccgcgaaggactggaagggcntccgcgtgantgtgaagctaancgtnnngaa

SEQ ID NO: 35465 - DNA, 247 bp, Glycine max
  unsure (1)..(247): unsure at all n locations; Clone ID: 701109269H1
gaagcattagcaaaagcaagaagaactantctaagcagaaatggcctcttcagtgatggcatctgtggccctgcaaacctgcccctttcactgttgagaagtcctcagttagaggccttccctccctctcaaggaactcctcttcattcagagttgtggccagtggtggcaagaagatcaagactgacaagccttatggaattaatggtggcatggctttgagggaaggagttgatgcatctggcag

SEQ ID NO: 35466 - DNA, 242 bp, Glycine max
  unsure (1)..(242): unsure at all n locations; Clone ID: 701109271H1
ggcagaaggagcaacgtgttcgatccttnctccctcgacgtgtgggatcccttcaaggattttcattttcccacttctctttctgctgaaaattctgcatttgtgaacactcgtgtggattggaaagaaaccccagaagcacacgtgttcgaggctgatattccagggctgaagaaggaggaagtgaaggtgcagantgaagatgatagggttctcagataagcggagagaggaaccttgag

SEQ ID NO: 35467 - DNA, 245 bp, Glycine max
  unsure (1)..(245): unsure at all n locations; Clone ID: 701109272H1
aaaaactactttggcgaaagaagttggtangaaagctgaggagttaaaactttttgagaaggttgtncatggcaacagtctctcaaactccaaatattagaagcatccaattgcnaattgttgataacttgggtttgaaatttggggaanaatcanaggaaggcagagcacaaagactatcanagagattngggacaggcacnactctactaatcnnggangatgtntggganaacctatgactt

SEQ ID NO: 35468 - DNA, 241 bp, Glycine max
  Clone ID: 701109274H1
gcatatctatgatgagttcttggagaaagcaaaggctcgtgctttgaaacgtgttgttggggatcccttcaaaaagggtgtcgaacaaggacctcagattgatgtggaacaattccagaaggtccttaggtacataaagtccggtatttaaagcaaggccacccttgaatgtgggggtgaccaaattggctcaaagggcttctttgtccagcccactgtcttctcaaatgttcaggatgac

SEQ ID NO: 35469 - DNA, 242 bp, Glycine max
  unsure (1)..(242): unsure at all n locations; Clone ID: 701109275H1
gagtttttcaaatttttaatttcttctacatatttggtacaacatttacatgaatttactttttcattagtcatagtagaaacatgaactttatcactagatttagagattgaaacttcagttttaagaagatctatttctgtttaattttgaaatttctttctctaaacccnaaatttttttcttagatgaagaaacaagttttgccagtttaatagattctctatgtaattcaacaaaca

SEQ ID NO: 35470 - DNA, 160 bp, Glycine max
  unsure (1)..(160): unsure at all n locations; Clone ID: 701109276H1
ggngnnaggtncaagctnattcagtgttagccgntcattgaccctggatgaataatcggtctaccactactancagtggtgtantgctctgnaantgcaacagnaacagnaanagcaangcatggggagaggaanangagggangagtcgcactngaaga

SEQ ID NO: 35471 - DNA, 241 bp, Glycine max
  unsure (1)..(241): unsure at all n locations; Clone ID: 701109277H1
gttgatcgagataactagaaacagtgtgatgaaaatgaanntccttgttttcttcgttgctacaattttggtagcatggcaatgccatgcgtacgatatgttccctctccgaatgaacactggctatggtgcccgtactccggaggtgaaatgcgcnagttggaggcttgctgtggaagcacacaacatctttggctttganaccattcctgaagagtgcgttgaagcaacaaaggaatac

SEQ ID NO: 35472 - DNA, 244 bp, Glycine max
  unsure (1)..(244): unsure at all n locations; Clone ID: 701109278H1
caatttttctctcaaccggcccaatttagcataagcccagcatggccaccgcaacancagcagccacctcgtccttcatggggacgcgcctcctggaggcccattccggggcggggcgggtgcaggcccggttcgggtttggcaagaagaaagccgccgccccgaagaaagtttccagggggtcgggctntagctccgataggcccctgtggtatccggncnccaaggcgcccgagtacctgga

SEQ ID NO: 35473 - DNA, 228 bp, Glycine max
  unsure (1)..(228): unsure at all n locations; Clone ID: 701109279H1
tnaagcgcgaccttgtgactactgnngcaactgccacagcacactctctattgcagagccgatnccagcaaaactctgtttctcgtgcgatcgcgaagttcactccaccaaccagctcttctccaagcacacgcgcacgctnctctgcgacgcatgngatgnttcncctgcgaccatactctgttcaaccgacacctctgttctgtgccagaactgcgactggganaa

SEQ ID NO: 35474 - DNA, 250 bp, Glycine max
  unsure (1)..(250): unsure at all n locations; Clone ID: 701109280H1
cacagnaactcaatcannataaaaatttattatggatcataggttacgttgttttgtgacaatacccaaaattccgtttctattgctactttctctgattnctcgtcttcagttacgttaacgcagccttcgacctcgctactatacccttcaacgatggctattctccgctcttcggagatagcaacgttgttcgctccgaggatggcaacttcntacaagtccgcctcgatcgctacacaggttcggg

SEQ ID NO: 35475 - DNA, 250 bp, Glycine max
  unsure (1)..(250): unsure at all n locations; Clone ID: 701109282H1
tgcnctctgtgtttctgtctctctgttcctntctttcttttcttattttccatacacatattatatanaatatatcctctctgcttatactcctagtattatataaggcctagagacaacattcattgcaattggcagcacataattcaaagggcaatggcctcttggaagaagaccatcacaactccattcaaaaaggcttgcactgtanttaaacagcagcnaccaccaagggatcaanagaagtctc

SEQ ID NO: 35476 - DNA, 249 bp, Glycine max
  unsure (1)..(249): unsure at all n locations; Clone ID: 701109283H1
agangaaccgccgcgaacttccagagcgtgggcctggtgatcngngtgacgggcatcgtgggcaacagcctcnccgagatcctccctctngccgacacccccgccggtccatggaaggtctacggngtcgcacgccgtnncacgtccgncgtggaacgccgaccaccctgtcgagtacatccagtgcgacgtctccgatcccgccgacgccgaagccaaactctncgccctaaccgacgtcactcangt

SEQ ID NO: 35477 - DNA, 247 bp, Glycine max
  Clone ID: 701109284H1
ctccaatccattagccttctttccagttttcttcccctctctctggtcaccaggctctaacataaaacagaagcctttgtgaaaaaagagagaagagaatgctccctccacaacagcagtcacgggttggaggactacaaacctctctatctctagtttcttcagatccccgcctttctcccgaggagcctagatcaaactctgacaatctccgtgaatctcctactgaaagtgccagttctcgaga

SEQ ID NO: 35478 - DNA, 238 bp, Glycine max
  unsure (1)..(238): unsure at all n locations; Clone ID: 701109285H1
cactcataacacaaagcangcagcaaagctcatccttgagttaaaaaatggcancagcttcttccatggctctctcatccccatccttggctggcaaggccgtgaagctgggcccatcagccccagaagtgggaagggtgagcatgaggaagaccgtcaccaagcaggtctcctcaggaagcccatggtacggcccagaccgagtcaagtacttgggcccattctctggcgagccccc

SEQ ID NO: 35479 - DNA, 246 bp, Glycine max
  unsure (1)..(246): unsure at all n locations; Clone ID: 701109286H1
caagaacaacaaagtaacgtgaaagagagagagatggaggcgattgttccagtggtggatttccagaggctttcagangaagnggagcgcaagaagcngagaaaaacatgtganaaaccagggtgtttcagaatcatcanccactcaattccactaacactcatggctgacatgaagtcagtggttaaatacttgcntgancttcccacgganatcanaatgacgnnacnaaccctccgtccctga

SEQ ID NO: 35480 - DNA, 212 bp, Glycine max
  unsure (1)..(212): unsure at all n locations; Clone ID: 701109288H1
canncgaagcaaggttattattctttctggctgacggaacgaaacatgctgttgttcgagaatggatgagtngaactgcgnnnnnnnnnnnnnnnnnnnnnnnnatagcaatgcggagtggttcaatgggagaggtttctgccgcggatggtgctcagagtgctgcttgtagaagctgatcattccacacaacatacgaggncactctgagc

SEQ ID NO: 35481 - DNA, 243 bp, Glycine max
  unsure (1)..(243): unsure at all n locations; Clone ID: 701109290H1
gatcgagataactagaaacagtgtgatgaaaatgaaggtccttgtnttcttcgttgctacaattttngtagcatggcaatgccatgcgtaacgatatgttccctctccgaatgaacactggcctatggtgccnntactccggaggtgaaatgcgcaagttggaggcttgctgtggaagcacacaacatctttggctttgagaccattcctgaagagtgcgttgaagcaacaaaggaatacatc

SEQ ID NO: 35482 - DNA, 243 bp, Glycine max
  unsure (1)..(243): unsure at all n locations; Clone ID: 701109291H1
gaatgatgcaggccagcttcgtggaagaactgaaatagctcctgatcaaagggaaaagtttttgcagaagtatcagcaagtgcaacaagggcatagtacccttcttaatatgccttctcttgttgggggaaaccataagcagttttctgcccagcagcaaaatccccttttgncagcagtntaactctcatggctcatctgtntcttctcaatctggtattggattggngtccagtccnacaa

SEQ ID NO: 35483 - DNA, 242 bp, Glycine max
  unsure (1)..(242): unsure at all n locations; Clone ID: 701109292H1
attgttcatgaaagcttcgtttcggattaacatttnttgaataatagagacattactttctgcggttttaacctttttaaggcttccctaacttgaggctgctacttgtttaagaagaggctgtgtgctcatttgcttagagagttttgctgctaaggacttgacacaattgtgtaaatgtctgtggcttttaccaacctctcttggtggttgtggagtggaaagcatcaagatccaagaat

SEQ ID NO: 35484 - DNA, 242 bp, Glycine max
  Clone ID: 701109293H1
gtgacatctgacagtgaaaccactggtgaagaaaaatcgtctacttttcctgaaatagcaattggcattgatattggcacatcacaatgtagtgttgctgtgtggaatggctcccaagtggagcttttgaagaacacaaggaatcaaaagattatgaaatcatatgtaaccttcaaagataacatcccttctggtggagttagcagtcaactctcccatgaggacgagatgttgtctggagc

SEQ ID NO: 35485 - DNA, 236 bp, Glycine max
  unsure (1)..(236): unsure at all n locations; Clone ID: 701109295H1
ggagatcaaaactttggctggctcttggcanaaagncntgntttctacgcatctttcgggaagcccatggcggangttttatagccaaggaagcgtatgggatgtntgaagatngttctctcttctcngntattcccaattgtgtntacctgttngcagnggntcttagtnggggttncannccttttgnncaccaaannnaaataagnannnanncggtgtggcttttggtgtgt

SEQ ID NO: 35486 - DNA, 249 bp, Glycine max
  unsure (1)..(249): unsure at all n locations; Clone ID: 701109296H1
gctcattgaggtanaagttgnaaaaaaaggttgccacttgccaacagaggctgcntgaaggtagaaaatganacactgtgcagaagatagagttacgaaagagagaacagagatcaatggctgcatggcgtggggtcggagatgaaggatgacgattaaggttaattattactctcgatcgtgggtaatatcantaattattcaatcgtaaagcanaccatgctgtaaaaaacaaatttcaattcaagt

SEQ ID NO: 35487 - DNA, 263 bp, Glycine max
  unsure (1)..(263): unsure at all n locations; Clone ID: 701109301H1
gggggctgttngtgtttngtggcacgtgcngcaggagattgacgttggcacgacagtccacgcaganacagaaacagtggtgggnnnnnnnnnnnnnnnnnnnnngctccaaaaaccttcattgggcaggtctcatggagagtaatgggaactcggtgaaggatgctgagaaacaaatcacccgtgttttgttttgtggacccgtttccctgcttctcatgaatatacaattgagtatttgcaaaatcatccacatataaggt

SEQ ID NO: 35488 - DNA, 261 bp, Glycine max
  unsure (1)..(261): unsure at all n locations; Clone ID: 701109302H1
atgaatgaatgaaaattaacaaataataacattccaaataaacattagaantaatgaataatagtatattgttatctgagttgttgtttgtacatttttaatcacaaaagtatcgttaattattttgttattaagttatatctgttgggagaccaaagtgttattacataacaacacattagcatgaaatcagaaagagaaacttcttctcaaaatagtcgtttaagtttaaaaatagaaaaatcaacattttaaaaaaag

SEQ ID NO: 35489 - DNA, 261 bp, Glycine max
  Clone ID: 701109303H1
ctaaagccgagcagcgagagagagaaaccctagcaaaaatgccggctggtcacggtttgagatcccgcaccagagattccttctctcgtcccttcaggaagaagggtaccatcgccctcaccacatacctcagaacctaccacgtcggcgattatgtcgacgtcaaggttaacggcgccgtccacaagggaatgcctcaaagttctaccatggccgcaccggtcgcgtctggaatgtcaccaaacgtgctgttggggtcga

SEQ ID NO: 35490 - DNA, 256 bp, Glycine max
  unsure (1)..(256): unsure at all n locations; Clone ID: 701109304H1
ctgacttcctgtttgtttctgatctatggcttccaaggagttctctggtctttgttccttggtttcttcactctccgagagcntnntgtncactactgggttgaaaatgtatttggtggagagcaaaggagntgccataacatgcatgttcttggctcttttcttcttggggacatggcctgctcttttgactatgtagaaaggcgtggtcgtcttccacacaanatangantcgacganacgngnatganctgct

SEQ ID NO: 35491 - DNA, 261 bp, Glycine max
  unsure (1)..(261): unsure at all n locations; Clone ID: 701109305H1
gttagctaagagnaacanagnttgannaaagttatgatgggacggagaagttgatccattgatgaagagggagacagccaagganaatagagtgaagaatgagggctgngaagaggattttcttgatannccaataacagagttgatcaagatggaagttgaaggtggagatgcaaccaagcctcattgttttcaatattcnatttccataaaaaagttgtatgatggaaacaaaatcattgttgggcccagttcgatctg

SEQ ID NO: 35492 - DNA, 258 bp, Glycine max
  Clone ID: 701109306H1
tagctgttggagtcatcaagagtgttgagaagaaagaccccaccggagccaaggtcacaaaggctgccgccaagaagaagtgattgcattttggcaattttgctagcacatgtgatcatcaacgtggtttcaaaaaaacttgttcctttacagtagtttatctttgcagagtcttaggtgtttgttttaccagttatatttgaagtgtccgccgatttcatgtagccgtagccttcaaaactgggttctgatcggcgg

SEQ ID NO: 35493 - DNA, 260 bp, Glycine max
  unsure (1)..(260): unsure at all n locations; Clone ID: 701109307H1
gggggctgtttgtgtttggtggcacgtgctgcaggagattgacgttggnacgacagtccacgcagaaacagaaacagtggtgggnnnnnnnnnnnnnnnnnnnnngctccaaaaaccttcattgggcaggtctcatggagagtaatgggaactcggtgaaggatgctgagaaacaaatcacccgtgttttgttttgtggaccccgtttcccctgcttctcatgaatatacaattgagtattgcaaaatcattcacatatc

SEQ ID NO: 35494 - DNA, 261 bp, Glycine max
  Clone ID: 701109308H1
tgcttacactctcactctctgtgcctctgcagaagcaatacccattttccatctctcagcttccttcctctgcttacattactctctgcaaatggggtcttttcattctcagcctactcctcaccgctctcatcttccgcttccgccaaaacgcaactccctttcctcttatcatcgctcattgtggattatagccacacgacgatgacgacgaaatctactccacatcggagtttgaagatgacgatgacgaagaagaag

SEQ ID NO: 35495 - DNA, 261 bp, Glycine max
  Clone ID: 701109309H1
aaagaaaaaacgaaatcaactattgaccgcgggaataacatattaacatcaacaggcctcgctttgagaaatcagacggcggagagaatgggtttatcactcttacggtgggttctgccgctgactctgttgctcacctgcgcgctaggtttccaatcggacgagcttctcctcgacgacgaagagttcggcatcgaaggggacgaacctccttcgattccgatcgcatccaccttccaccgcctccacctcgaggaagag

SEQ ID NO: 35496 - DNA, 260 bp, Glycine max
  unsure (1)..(260): unsure at all n locations; Clone ID: 701109310H1
tttcaaagtatttgcttttattttttggtgaaaaagtgttttgcttttgctgttgtacaagatgagtgatgagaatggcgaagaacctcgagaaaaccgtccggttccacgcttgaatgaaaggattctttcatctctgtctaggagatcagttgctgctcacccttggcatgatcttgaaattggacctggagcgccatgattttcaatngngttgtggagatcactaagggaagcaaggtcaaatacgaacttgacaa

SEQ ID NO: 35497 - DNA, 263 bp, Glycine max
  unsure (1)..(263): unsure at all n locations; Clone ID: 701109311H1
gccttcagaaaccctaattcccaaatctcaaacgaaccatggaattcaccaagaagcgcaaaaccgaagagaacggcgacaccaccgattatccgccgcagcaatccaccgaagaatccccaatcgccgccgcagcccccgcccccctacgccgccgaagacatccgcaagatcctacaaccgttctcccaggagcagctcctgacctcctccaatcggcatcgntccgccacccgganntctnngtgccgtgggcngttcgg

SEQ ID NO: 35498 - DNA, 256 bp, Glycine max
  unsure (1)..(256): unsure at all n locations; Clone ID: 701109312H1
cagggatcaagaaagcagtggaagaactcaatccagtgaggagaacagtttttggcatgctctacaactacaaacttggttggatgaaaaaaggatacaaacatagacaagcatcacgtttagccganttattagccttcagaaaggtcaaagctaggcttgggggtcgtgttcgactaataatatctggtggggcagcttgagcccagaggtggaagaattcttgcgtgtcanacttgtgcctttttancccagg

SEQ ID NO: 35499 - DNA, 265 bp, Glycine max
  unsure (1)..(265): unsure at all n locations; Clone ID: 701109314H1
cacaccgaacaaacacaaacatggatgcatccaaactcaatcaattgaagcatttcatcgaacagtgcaagtccaacccttccctcctctccgatccttcactctccttcttccgcgactatctcgaaagtctcggggcgaaactccctgaatctgcttattccgaatcgacgggcgtggagagcgatganggacatagatntgttacggagggagccagagagggtanaggaggagnagganggtgntgnaattattgcnnccg

SEQ ID NO: 35500 - DNA, 261 bp, Glycine max
  unsure (1)..(261): unsure at all n locations; Clone ID: 701109315H1
gacaatcaaaatcaggtactgcagggttgtgaaagctagatactaattagatcgctgattcgaagaaagagaaacaaaccatagtactagtactctttttnattagagatttcatctaatataatatggtttcacgatttaattaaccgcagaagctgccttggtgtgtgagggacganagaanagggananggagagantcngaanagatgtcancngctcggntcgcnggttgncngtcncntttccnngggccgannc

SEQ ID NO: 35501 - DNA, 221 bp, Glycine max
  unsure (1)..(221): unsure at all n locations; Clone ID: 701109316H1
caccaagtttttattatgtgatgtgttcaccatccaatttttgttgtgggtaggctttgtgtcacaattgatggtttggtgagggaaattatttttgtgttgctagcncaattgcataggaatatctagaaagtttgtgaaattgcttgtgacgagaattgcgctgggggtgttgtttgtntggattngaaatcnccngcgaancaccagggctttttaga

SEQ ID NO: 35502 - DNA, 261 bp, Glycine max
  unsure (1)..(261): unsure at all n locations; Clone ID: 701109318H1
ctccgaatttcattttcagaagcctctttgggaatcaaattggagtgtctgaaatccaatccgaagcatgatgcattgtgcgagcattgtctcggctccgtcctacgcgttcccttttcgctctggctccgcttccactactccaactgcgatctcgctctctaagcgcagttggaagccacctccgagcatggcaaaagcccagtcagagccaccgtttctatagagaaagagaccccggaggccaatngtcccgaaacg

SEQ ID NO: 35503 - DNA, 259 bp, Glycine max
  unsure (1)..(259): unsure at all n locations; Clone ID: 701109319H1
ggnaaaatacccaggatttgaggtgctggagaagaagggataaagtgtatggtatgggggcgtggtgaccgagggcacgaaaggaggaaactattggctacagaaagtcgtttctttagccgggtttctttcaaaaaatggtgcagagtctctgtttgatggcttctcatggttaccctcctggccttgtcttgcacccaaagtactgggcttgccctgcgctaccatgaagggctaccaaacattcttcctccccagt

SEQ ID NO: 35504 - DNA, 260 bp, Glycine max
  unsure (1)..(260): unsure at all n locations; Clone ID: 701109320H1
ttttgcaaaccaatatgcaacctatctcagcacctcatgtcagaacttcaatcaaaattgttagcacattanacgaaagctaccacaccaatcaaccacccttggcaggcaaaataaaacgccttgttctcacccaggaaggtagaacaaagctcaacatttacccagatagagagttctatgcatttcnacgctttgaaaccnngtaagaggttggtttggtttttacatggaccattctttacggagagaggttgaga

SEQ ID NO: 35505 - DNA, 258 bp, Glycine max
  Clone ID: 701109321H1
tcattccccttatctttctctcttctctctccccgcccaaaccctaactccctaccctattccgctttctctcatccatcatgaaaggaggaaagtccaagaccgaatctaagagagccgatgccaaacttgctgtgaataagaagggcgccgccaccaagactaggaaacccgccggaaaggggaaggcagcgaaagtcctaacaagccaaagaggcctccaagtgctttcttcgttttcatggaggattcaggagg

SEQ ID NO: 35506 - DNA, 260 bp, Glycine max
  Clone ID: 701109322H1
aacgaaatcgcgaacagaacagcaacgttaacaatgggttctcgctacgaggtggaactgaagctctcatcggcacgcgctctcaagaacgtgaactggcgccatggcccgaaccgcccatacgtcgtcgtttgggtcgacccaagcaacaagctctcgacgcgcgtggacgaaagcggcgacactgacgcgaattggaccaaacgctcacaattccgttgccaccaaagcctcttcgaggatcaaaacgttgtacatcg

SEQ ID NO: 35507 - DNA, 240 bp, Glycine max
  unsure (1)..(240): unsure at all n locations; Clone ID: 701109324H1
caacacacaaacacaacaacatatncgaggtgctaagggtgcnaaccatagcttccaaatcacaagatgctgccatcccagccatgtttgttagggcagagacagagcaaccaggcatcacaaccgttcaaggggtgaaccttgaggtgccaattattgattttagtgacccagatgaagggaaagtggtgcatgagattttggaggcatttngggnnggggcngtnccannttgtganc

SEQ ID NO: 35508 - DNA, 265 bp, Glycine max
  unsure (1)..(265): unsure at all n locations; Clone ID: 701109326H1
ctcggttcgttcttccatcgaagacactgaccttttcgaggaacactcttctgggttaattgcagtgtttgttattttcngaatacagcaagaaggagcatcagattcaagcatttccttgcttcagaggtcaatttccgaaagaagtattgcccattatattcttcactatcangggtcagccaattanntgggngcccntttggnnggggcccnagggggttccccaaaancnnttnngnagcnccnaaggggggnccccccg

SEQ ID NO: 35509 - DNA, 214 bp, Glycine max
  unsure (1)..(214): unsure at all n locations; Clone ID: 701109327H1
caaacatttcttctcttcccatatatatcccttcttaatttcttatagccagcgatggatcttttgttcttatgcctccttcccttcttattttactctttctttaccctctacaagttgattcttgaacgtagaggccaaccatgctacatgttggcctacgagtgcttcangccccngnaagacganatcggaaaggtcccngnggaaaaat

SEQ ID NO: 35510 - DNA, 258 bp, Glycine max
  unsure (1)..(258): unsure at all n locations; Clone ID: 701109328H1
tacaggttagaaccttggtgtaatggattaagcacaaattcaggctatccaacagatgctcaactgatctctgatttgacatttttatttgattcaattattcaccctgacaaaatggtgtgctacagacccaagaatatgaggaaaagggtggcggattcagccaggaagctccttgactgtaaacagttcatgaaggttacaagccatatgaatggctgttgaccgccttcagtcttaggctgttgngncatgggg

SEQ ID NO: 35511 - DNA, 256 bp, Glycine max
  unsure (1)..(256): unsure at all n locations; Clone ID: 701109330H1
ctgagacataccatagactatatggtgtttctccacaattcccatggagcctaagacacaaccccaagcgaatagtcctccaccaaaaccttggnacacaagcaggttcctcttcgggtccagcgcctttcaaacccccgtcagctggcaacacaagtgatgtagttgaggttcagggactgcaaaactggggaattgttctagtctgataggagtgcatttnaaaaggaatnnggggggngncncnnccnagggg

SEQ ID NO: 35512 - DNA, 262 bp, Glycine max
  unsure (1)..(262): unsure at all n locations; Clone ID: 701109331H1
agaaaaacaagtagttgagaactaagaagaaggaaatggcttcctcaatgatctcctccccagctgttaccaccgtcaaccgtgccggtgccggcatggttgctccattcaccggcctcaaatccatggctggcttccccacgaggaagaccaacaatgacattacctccattgctagcaacggtggaagagtacaatgcngcaggtgtgcncncccattggcaagaanacgttcgagnttctttcctattgnnagcacnng

SEQ ID NO: 35513 - DNA, 263 bp, Glycine max
  unsure (1)..(263): unsure at all n locations; Clone ID: 701109332H1
aaggattctacccgncgtatcgatgggaattgcgnttcaaggcgtctcgtanggctaatccgcctcacgagggtcaccaacggcactgcctttggggggccgaggccccctactgctggtcggcaaacggacggcgggcgcacgcgtcgcttctagcccggattctgacttagaggcgttcagtcataatccaacgccacgtagcttcgcgccangggctattcaaccaagcgcgatgaccaatngnncnatcaaggttccnt

SEQ ID NO: 35514 - DNA, 262 bp, Glycine max
  Clone ID: 701109333H1
ggcaaagacggaggagaggtcgcaaacgcaaaaatggtgaagtttctgaaaccaaacaaggccgtcattgtccttcagggacgctacgccggcaagaaagccgtgatcgttcgaaccttcgacgaaggaactcgcgagcgcccctacggccactgtttggtggcggggataaagaagtaccctgcgaaggtgatcaagaagactcggcgaagaagacggcgaagaagtcgcgcgtgaaggcgttcgtgaagctcgtcaacta

SEQ ID NO: 35515 - DNA, 261 bp, Glycine max
  unsure (1)..(261): unsure at all n locations; Clone ID: 701109334H1
acttactgagtgcttgcagttgctgcgtcgcaaggtaccggcggcgacggagagctatcttctcaatttccgatcactgcattggttctgttgacgagggttttgttctacttgacttgcatacttgatggcgtcaaagttgcagaagttgcagtccgcagcatgtcaagcatctcaatttgtatccagtcgtggantaactactacaggcaattgcgggaaccaaaccagnaacccnttcgggagccnccctncnanaag

SEQ ID NO: 35516 - DNA, 237 bp, Glycine max
  unsure (1)..(237): unsure at all n locations; Clone ID: 701109335H1
ctggtgtattcgtgcagttaaatacnagaaaagatgaccanctgacttcatgtgaagtgtacgttgtttcatcacgaagatatgggcataccctgggaaattgctaagcttggagttcgacagggnatntgggnnccnnnnagaagtttgatncaggactacgggcatntnngaaacnaanggcttctggtacgtttgncancctgtgcacgtgctgctaagtcaaccactaaggta

SEQ ID NO: 35517 - DNA, 251 bp, Glycine max
  unsure (1)..(251): unsure at all n locations; Clone ID: 701109336H1
cacaattcctacgcatttctactctttagtttctccaattttctttctcaattctacaacaatggccactacaacacaacttcacttaccccctggattcagattccatccaacagatgaanacnctcgtcatccactacctttgtcgcaaatgcgcttcgcaacatatcgcggttcccataatcgccgaattgatctgtacaagtacgacccttggggacttccaggaatggctttgtacggagagaaag

SEQ ID NO: 35518 - DNA, 248 bp, Glycine max
  unsure (1)..(248): unsure at all n locations; Clone ID: 701109337H1
tctggagcttgatcctcaacttgatgcactggttgggaggcacagtcgcaanccttggtctaaatttatcaatgcagataatcaacatcttgtgtctcctgaggcaattgattttcttgataaactccttcgatacgatcaccaggacaggttaacagcnagagaagcaatggcacatccatatttcttcaagtaagggcagctgaaagtagcagaatgaggacacagtaactnaaaacattttggat

SEQ ID NO: 35519 - DNA, 256 bp, Glycine max
  Clone ID: 701109338H1
gcgacctgagggggattctgggcctggtgaacgtcccctgctgtattatgcagacggcacgtgacatgtccgtgccggccagcgtggctacctacatgagggaccacatcgccggaaagagcaccatccagtggctcgacacggaggggcacctcccccaccttagtgctccttcatacctagcacgccagctagaattgcgctctcgcagtagcgcgtgtaagtctaggcgcgtggctctggtggttattaagta

SEQ ID NO: 35520 - DNA, 260 bp, Glycine max
  unsure (1)..(260): unsure at all n locations; Clone ID: 701109339H1
cacaacacaaaacgatcttttatttctctgtctagagaagaatctagcaagccttgctccgtcacaaaatcaaaggttgcaactgagaactcactccttcgaatcaaaatcaaaaaatgtcggtgactctgcacacaaacctaggcgacatcaagtgtgaaatcttctgcgacgaggtccctaaaaccttcggaggtantctttcattttaccggctttaatnaattttgggcggnanaatggnccccctttttnatttt

SEQ ID NO: 35521 - DNA, 257 bp, Glycine max
  Clone ID: 701109340H1
gaagattggattggggattaggaaaaaatggcgtgcaggggtatgcttcgttccaccattctcatagaacccaccctactccgttctttaaatttcaattctaacaaacatcacatagcttcactcaaccaatggtcttgccggtttcattctccaaaacccccttattcttcctctcagaacgaaacgccgttgtccaggaccctgtcttgaaggccattcagagatttccaaaggcgaagggagggttggccaaa

SEQ ID NO: 35522 - DNA, 259 bp, Glycine max
  unsure (1)..(259): unsure at all n locations; Clone ID: 701109342H1
gaactccatagccttcaaatccttcgtcggcctccgccagtacctcgccggaggncccgcatttcgccncccagccaagacccgccactccccaccgcaaattccgcgtcttggcaggaaaattcagccccaagctcaatggacggaacctccgcgtggcggtggtgggaggcggtccggctggcggggccgccgcggagngctggccnaagggccggnttgaaantttcntnntggggcaaatntggananntgnanc

SEQ ID NO: 35523 - DNA, 260 bp, Glycine max
  unsure (1)..(260): unsure at all n locations; Clone ID: 701109343H1
gccacaaccctgataacgacacctctaggatcaagcttccttctggtgcgaagaagattgtgccaagtgggtgcagggcgatgattgggcaggttgcaggtggagggaggactgagaagcctcttctgaaggctggtaatgcttaccataagttcagagtgaagaggaattcatggcctaaggtgcgangtgtggcgngaacccagttgagcatcctccacggaggaggtaatcatcagcatattgggcatgcgagtacc

SEQ ID NO: 35524 - DNA, 262 bp, Glycine max
  unsure (1)..(262): unsure at all n locations; Clone ID: 701109344H1
cttcagtttaaagttacatagtttttcattgttttacttaatctacaatggctgcttcaacaatggctctctcttcatcatcattggctggccaagctatcaagcttgccccctccacccctgagcttggtgttggaagggttagcatgaggaaaacagcctccaaaactgtttncctcaggaagcccatggtacggccaaacggtgtcangtacttgggcccattcccaggngagccccaacntatcccacgggggaattt

SEQ ID NO: 35525 - DNA, 260 bp, Glycine max
  unsure (1)..(260): unsure at all n locations; Clone ID: 701109345H1
gatgctccaagggcagtgtttcctagcattgttggtcggccacgtcacaccggtgtgatggttgggatggggcaaaaggatgcatatgttggggatgaggctcagtccaagcgtggtatactaactcttaaatatcccattgagcatggtattgtgagtaactgggatgacatggaaangntnngncntcactntcctanantnaaaccccgtgnggccacaagngggagcacccgntccncncnnggaaagcccttcaa

SEQ ID NO: 35526 - DNA, 260 bp, Glycine max
  unsure (1)..(260): unsure at all n locations; Clone ID: 701109346H1
ctataagctagtttatcgtgaggagaatatgaagttgtttgtttnctttgttgctgcagtagttttggtagcatggccatgccatggcgcaggctaccaaaggttccctctccgaatgaaaactggctatggtgagcgttcttcggaggtaaaatgcgcaagttttaggcttgcngtgaacncacanaatatcggancnttaaaancatccngnaaanccgtgcgtgancccacaagggncnccntgggggnngantntt

SEQ ID NO: 35527 - DNA, 263 bp, Glycine max
  unsure (1)..(263): unsure at all n locations; Clone ID: 701109347H1
gaaaccgcagtgggccggctaaaatgccttacactttgctctatccttctagtgaggagggattgactttcagaggaattcccaacagtatctccatctaggggctctatggttgttgcagtactttcccnggtttcnatnaaaggtnaatagngggaatangttccctncatccnacctaggtngggnnaagttatgtttgggggtgattnantgtcccccgtgtttgctgtaaagngtnaatgcaagncttctgtnaaaaa

SEQ ID NO: 35528 - DNA, 264 bp, Glycine max
  unsure (1)..(264): unsure at all n locations; Clone ID: 701109348H1
tttgtagtgtagcaggaacaagcagcaatggcgccgaaggtaacacgcaaggttagcagaaaccccgaattgataaggggaattggaaagtactcgaggtcgcagatgtaccacaagaggggcatttgggctatcaaggccaaaaatggtggcgttttacctcgccacgaccctaaacccaaacctgaaacacccgctgaaaaaccaccnnntttcccccctgctgnatgatancaagccnncccttgtncaaaaaccacnncc

SEQ ID NO: 35529 - DNA, 255 bp, Glycine max
  unsure (1)..(255): unsure at all n locations; Clone ID: 701109350H1
aacactatagcaatagaaacatttgcttttgaaaaacccctcactcttcatcactacactagctancccacatacaatgtcgaccaaatttaaggtgtttcgtgaattcacaagcgatgactcattcctaaaccaagttatccctgaaaacatcaccgaattccaagtgactctgtccctcgctagagactacgatggcaacaantcaccnangggaatnnnntcncntggggggngacaagaggtcccccccga

SEQ ID NO: 35530 - DNA, 257 bp, Glycine max
  unsure (1)..(257): unsure at all n locations; Clone ID: 701109351H1
cttctgttctgatccaggtatggcttctaaacgcatcttgaaggngctcaaggatttgcagaaggatcctcctacctcatgcagtgcaggccctgtggctgaggacatgtttcactggcaagccacaatcatggtnggcngctgatagcccatatgcaggtggtgttttcctagtttcaattcattttcctcctgatatcccttcaagccaccaaaggttgcttttcggactaaggtgttccacccaaacatcaaca

SEQ ID NO: 35531 - DNA, 256 bp, Glycine max
  Clone ID: 701109352H1
tttaccagctatacttgttccttttgaaggttagaagtgctacaatacaaacaatggcagctactcaggaagatgtgaagcttttgggtattgtgggaagcccatttgtgtgcagggtccagattgcccttaagttgaagggagttgaatacaaatttttggaagaaaatttgggcaacaagagtgatttgcttccaaatacaaccctgttcacaagaaggttccagtgtttgttcacaatgagcagcccatagca

SEQ ID NO: 35532 - DNA, 256 bp, Glycine max
  unsure (1)..(256): unsure at all n locations; Clone ID: 701109354H1
ggcgtcttcataaacgcctttcttctccgtttccgtttcctcgttncaaattcgctttttgatctgcgaaaatgagagagtaccatctcgatccacattggtcaggctggtatccaggtcggaaatgcttgctgggagctctactgcctcgagcacggcatcgggcccgatgggcaaatgccaagtgacaagacagtggcggtggtgatgatgcttcaatactttcttcagcgagactggtgctggaaagcacgtg

SEQ ID NO: 35533 - DNA, 255 bp, Glycine max
  unsure (1)..(255): unsure at all n locations; Clone ID: 701109355H1
attttttgatgagcgcacattatcgatctcctattaactactcaaatatacagcttgaaagtgcttcagaccgtgttttttatatatatgagacattacatgaatgtgaaagctttttgaatcagcatgatcagacaattaggaaggattccatcccaccggataccttggatattattgataagttccatgatgttttttgacctcgatgtcggatgatcttcanactccggtngtattggcggaaatgnccga

SEQ ID NO: 35534 - DNA, 256 bp, Glycine max
  unsure (1)..(256): unsure at all n locations; Clone ID: 701109356H1
ttttctcttattgccgggataattctttttggtggtctccttgcacctagtttggagcttaagcttggactagggggcacatcttatgcagattttattgaaagtttacatcttcctatgcaactgagtcaggttgatcccatagtggcatcattctctggaggagcagttggagtaatctcggcattaatggtgttgagataaacaatgtaaaacaaccgggagcagaaaagatgcaaatacngtctggtactgg

SEQ ID NO: 35535 - DNA, 256 bp, Glycine max
  unsure (1)..(256): unsure at all n locations; Clone ID: 701109357H1
ctttaaacccattccctttcaacatcacaangagctnacacatannaacatccatcatcattattattttacnccgaacgagttgacaccgattccactcactcaaccangngccgattcaggngtttngagctcatngaacaacnactttnttccactcctgctactctnncccnnccttcgtccctcaaagantnatntntntggactggactctggcaattccaagcaatttggangtttcgcagatctggtg

SEQ ID NO: 35536 - DNA, 258 bp, Glycine max
  unsure (1)..(258): unsure at all n locations; Clone ID: 701109358H1
gaaaattcagtgctgaaacatggcttcggctactctctctgtagccaaaccagcccttcaggcaaatgggaaaggcttctctgaattctctggcctccgaagctcatcaggcttccttcccttttctagaaaancttcagaggatttccattctgtcattgccttccagacctatgcagttggaagcagtggaggatncaagaagggtgtgacagaagcaaaactgaaggttgccataannggtttggaagnttngaa

SEQ ID NO: 35537 - DNA, 183 bp, Glycine max
  unsure (1)..(183): unsure at all n locations; Clone ID: 701109359H1
ctgcaacaacgaaaaccaaagaagaaaaaagagtttcttctttccgaaatccaagcagtagggttagggttttttccgatctcaatggcggaggaaccggagagcaccgtcaccaccggcgcccccgacgaatcgctgctcgataagatccaccgagaagcttcacggccacgnttcttcctt

SEQ ID NO: 35538 - DNA, 261 bp, Glycine max
  unsure (1)..(261): unsure at all n locations; Clone ID: 701109360H1
taccaatactcctcgcacaacacaaccncaatggccgngncagaagaagaatggcggcggaaacggcaacaacaaggagaacgaagacagcaccatcaccgtcgtcttgaaggtcgaaatgcactgcgacggttgcgcttccaaaatcatcaaacacctccgctgtttccaaggtgtggaaacggtgaaggctgatagcgacgccgggaaggtgaccgtgaccggaaaagtggaccccacgaaatgagggataacctggcg

SEQ ID NO: 35539 - DNA, 259 bp, Glycine max
  unsure (1)..(259): unsure at all n locations; Clone ID: 701109361H1
ataatcgagacacaaagatcatagtgatcatttttnaatttctcagatttatccgacgtccttgcagatccaccaaccgttatggcngccttcagcggtgatgaaacggcaccgtttttcggctncctnggcgccgcagntgccctngtcttctccngnatgggagcngcctanggcncagcgaanattggcgtgggntggctcccangggtgtaataagactgagctggtnannaanncnnttgnccctgtnannnag

SEQ ID NO: 35540 - DNA, 261 bp, Glycine max
  unsure (1)..(261): unsure at all n locations; Clone ID: 701109362H1
ctggatttcgncctggaaaganagttccagaaaacatncttattagttatgttgggngtcaaaatgttcagaaggctactattgaatctatattgaggaggacactctcacatgctangacatcagttactggaagggcttgcaggactcagtacaaatagtgnccnangttttctgagatggaggagacatattcttncnngggnccncnaganatgcnnnccnctgtggtnatgncncanaaagtnagcnggncccccc

SEQ ID NO: 35541 - DNA, 258 bp, Glycine max
  unsure (1)..(258): unsure at all n locations; Clone ID: 701109363H1
ggtacctgtagagcgtgcgtgaaaacatatncaaacattttgtcaacaagntttactctcactgaagaatgatctctgtaggcttgtggcatctcctccaaatatttacatgttttctgcttttgactcaatcattttctaaagatgatcgaaagacttacatcgtctacatgggcgattncccgaagggtgtgggnncgcagaatcncttccacactagtgntggttgagagcctccncggaattnttcccccaggg

SEQ ID NO: 35542 - DNA, 257 bp, Glycine max
  unsure (1)..(257): unsure at all n locations; Clone ID: 701109364H1
ctaaaaggttgcagaatgttatgaactctttagtccacgacaagcagaagcaatatggaggtttctattacagatgaaattgcaggcactatggagctcaaccctgataggctgggtgagctcaaagcatttgatgacacaaaagctggtgtgaaaggcctgttgatgaaggggtcgcaaagatcccaagattatttntcatccacctgatgaatttgtcagggctcaaagttaggcnacacngantacctatncct

SEQ ID NO: 35543 - DNA, 264 bp, Glycine max
  unsure (1)..(264): unsure at all n locations; Clone ID: 701109365H1
cgagacacaccctcatatatcnccaacttggaagagtaagctagaggcacacacacanacccaatgggcctccattnatgctccaacaagatcacttcncttcacccatacaaccaaatgcttcttccgtcccttcaaaccctcttcntctccctttcctctccactgcgccacaaaaaccacctgcagcaccctccaanaacaacctcgccgcaacaacgacaatgacanggncatcggantcctcgaagagnggtggntttg

SEQ ID NO: 35544 - DNA, 252 bp, Glycine max
  unsure (1)..(252): unsure at all n locations; Clone ID: 701109366H1
gagtctgacatgtgtgcgagtcaacgggcgagtaaacccgtaaggcgcaaggaagctgattggtgggatccccctgtgggttgcaccgccgaccgaccctgatcttctgtgaagggttcgagtgagagcatacctgtcgggacccgaaagatggtgaactatgcctgagcggggcgaacagaggaatctggtgangcccgcagcgcatactgacgtgcaaatcgttcgtctgacttgggtataggggcgaaa

SEQ ID NO: 35545 - DNA, 256 bp, Glycine max
  unsure (1)..(256): unsure at all n locations; Clone ID: 701109368H1
agcaagctcatcctagagttttaaaaatggcagcagcctcctaccatggctctctcttccccatccttggctggcaaggccgtgaagctgggcccatcagcccccgaagtcgggagggtcagcatgaggnagaccgtcaccaagcaggcctcctccggaagcccatggtacggcccagaccgcgtcaagtacttgtgcccattctctggcgagcccccgtcctacctcactggcganttcccnggtgactncggng

SEQ ID NO: 35546 - DNA, 255 bp, Glycine max
  unsure (1)..(255): unsure at all n locations; Clone ID: 701109369H1
cttgacatccccttcaacttctattctcttttgaaacacttagaaaagaaaaaaaaaatgnctgcgtncctttgcttttcctagttttttcttctcagttgatcggtggactcaatacacctctaccatctccaatctatggaaacctcgtaaccattctcagcatagatggaggtggtataaggggnatcattccagctgtagttcttgaccacttcgaaaaggctcttcaggcatggganaaanntncntcct

SEQ ID NO: 35547 - DNA, 255 bp, Glycine max
  unsure (1)..(255): unsure at all n locations; Clone ID: 701109370H1
ctcacgcgaanagnaaacacgaactaagaatccatggcgacaccaacgacgacgaagagaaaaccggtgttcgtgaaggtggatcagctaaaacctggcaccaacggccacacgctgacggtgaaggtggtcagctccaagccggtgaagacggtgaccactcgcggcggtcgatcgtcggtgctcgcggcgcgncgtcgcgcatcgccgagtgcctctcggagacgaaaccggaaccataatcttcacagcagc

SEQ ID NO: 35548 - DNA, 257 bp, Glycine max
  Clone ID: 701109371H1
gcacaacccatggccaccacctccgcattcctcctccttcaccctcctcctgctgctccacctcgccatcgccgctcacggcatcggcatcaactacggcacgctcggcgacaaccttccaccgcccgcggcggtggccgaacttcctgaagacgaagacgaccatcgaccgcgtgaagatctacgacgtgaacccgacatctgcgggccttcgccggcagcggcatctccgtgacggtgaccgcccccaacggcga

SEQ ID NO: 35549 - DNA, 248 bp, Glycine max
  unsure (1)..(248): unsure at all n locations; Clone ID: 701109372H1
cttcaacctcacactccaaacccacctctcattcccnagagtaagaccctccactccatttctcattattcattaacgccgataaagcaaaaaatacacccttcacaagttcacataaacacacccgaagagnnnnnnnnnnnnnnnnnnnnnnnnnntcgggtagggttttgttctttgttactcgttccttccaaattagggtttccctttttgattcaccaaacttctcccgattcgaattcgcc

SEQ ID NO: 35550 - DNA, 254 bp, Glycine max
  unsure (1)..(254): unsure at all n locations; Clone ID: 701109373H1
gagantcaagaaaattatnatacccattnagatgaatccgtacctacgtccaatattccnattatgccttatccttctccaccaatccatttcggcgagtgcttcaaatagtaggntnatagaattcttttcaaaattaangaattcntttaatcctaagtctgaagaactcaaatcnaangttataaggaagcccggggcgncgaatnttggaagagntaggggggggngtgaggnnntatntcntttngncc

SEQ ID NO: 35551 - DNA, 259 bp, Glycine max
  unsure (1)..(259): unsure at all n locations; Clone ID: 701109374H1
ggagacaaagatgtgactcagtttcagttagattgtgaggatcaggatttggatttcactacaaacataaaagagaaactgactgtaatgccaccatttcaagttggagcaagaaatggaaacattagaaacacactttctagactagaggaaagcatgatggaggacgaggcctgagantgaaggggattacctangtggtggggantacaangggccnggggtnaaatgggggccccnattgttcccaannctttcc

SEQ ID NO: 35552 - DNA, 258 bp, Glycine max
  unsure (1)..(258): unsure at all n locations; Clone ID: 701109375H1
tggaaacaggcatagcatgctacactcgcgggcctttcttgcctagtgtttcttccaagcactctccaccctaccatctctccatcttttggcttgaggagtctgaaatcgagctctttatttggagaatctctaagagtggcatccaaatcaacactaaaggtttcaaagacaaagaatacttcactcgtgaccaatgtgaaattggtgacagtctggaagatttcctcacaaaagcnacaccggntaggggntnnt

SEQ ID NO: 35553 - DNA, 257 bp, Glycine max
  unsure (1)..(257): unsure at all n locations; Clone ID: 701109376H1
gatttctgtttctctgtcttcattttagtttttacggctggaagaatgtccagctcatcggaatatttggtattttccggccaccacccggcgaactctccggcggaaaagtccactttctctcagacttgtagtctattgagccaatacatcaaggaaaagggtacttcggagaccttaccctcgggatgacttgnctgccgaaacaaanggttcccctgaaaacatcgtgncactnngnaacacccgggggnttt

SEQ ID NO: 35554 - DNA, 258 bp, Glycine max
  unsure (1)..(258): unsure at all n locations; Clone ID: 701109378H1
tggtctgacagaaatgagaaaatatttggttaacattgaagcctgaaaagctatttatttcctgacttgataatattttgatttagtatacctctcagaagactaagcgtgcattttatttgagacaaactcgcagacccagttccttattcaggcntcnatgtttaatggggtataaagcttaangggggtccccnttgncatttctccnggggaaaccncaaggcnccccctttnccccgggngngnnaaaccccc

SEQ ID NO: 35555 - DNA, 234 bp, Glycine max
  unsure (1)..(234): unsure at all n locations; Clone ID: 701109379H1
cagagattgggggaagtggaagtnccgggcataagcagcanccgatggaggatgtaacagacaggttctcctgctccaagcttctcgttccaaaaggagaacccattttcgtgaaggccacttggtttcccactcacttccatctcgccgtcaccgacggcatcaccgcctggcactncacccatcgnaggaggagtaaagcaggtgnncnnagggccnttncttgtnnaaaaa

SEQ ID NO: 35556 - DNA, 259 bp, Glycine max
  unsure (1)..(259): unsure at all n locations; Clone ID: 701109380H1
gttagtgggttgaaaacgttagagaggaactttgcaacaagcatggagacagcctcagactatggagcattcacagagaaattcactttaccaccaaattctgcaccagctcttcctctcaaatcactcacctttgcagtgaaagagattttcgacacggaaggatacgtgaccggcttcgggaatcctgactgggtaggactcatccggtgnntacctctacggctcnannagntnnggctnctctaaggngggntnt

SEQ ID NO: 35557 - DNA, 256 bp, Glycine max
  unsure (1)..(256): unsure at all n locations; Clone ID: 701109381H1
ggcatctctgaaatcaggcaagtgaaaaccaaaaataaaatggtctcacagacagttgaactcttaaagaatgagattcctctggagcaggaatcagtggttttagctgaagatgctgtaaatggtctcgttcttgtggacatcataaatggcttttgcacagttggtgctggaaatctggctccaagagatccatacgcagatttcgggaatgatcagtgnatcagcaaggctggctagagtgttctgtgagaag

SEQ ID NO: 35558 - DNA, 254 bp, Glycine max
  unsure (1)..(254): unsure at all n locations; Clone ID: 701109382H1
gcgacataaataagcatttgcctacgttgttcgtgttggatgcttcccacctctcattgattggattaagcgccaaagtttccgaatttgcataatggtattgctagttgggcttacattgcttttgggtctcttcctcgctgttcttctattcaacccacgacaccgcaaatctgggcntaaggcaaaggctcngcccanttnaacgttgnanaggccaanaannncttacannaaaaagttttggnaaaaaa

SEQ ID NO: 35559 - DNA, 259 bp, Glycine max
  unsure (1)..(259): unsure at all n locations; Clone ID: 701109383H1
cctgaattttctcgggaaaattctgcattcgtgagcactcgtgtggattggaaggagaccccagaagcacacgtattcaaggctgacattccagggctgaagaaggaggaagtgaaggttcagattgaagatgataaggttcttcagataagcggagagaggaacgttgagaaggaagataggaataacacgtgnatcccgtggaacgtacaancggccaaattcnatgagggggttcaatttcccggaaaattccaaa

SEQ ID NO: 35560 - DNA, 254 bp, Glycine max
  Clone ID: 701109384H1
gttttatcagacaatagcccaagtctctgggggggtatttgtcggcttgattttcaaaccagaagagagtggcctcaacatgggttgaagggttcttctaatgcccacttacctgttctaatcttaggtgtttgcaaacctcaaggaagtcgattagattctatctaatgactttttcttataggagtgattattgagatatggtcttgcagaagaggttgaactatggttttaatggctatcaggtgcctgtc

SEQ ID NO: 35561 - DNA, 253 bp, Glycine max
  unsure (1)..(253): unsure at all n locations; Clone ID: 701109385H1
gtggaatctcaatggccacgcttagcttcggcatcgccacgacatgtctgagtgctgccgctgattatcgtagaagaagcaactggaaatggagcagacccagaattgtgtgtgttggatgggacccggaaggcgtgcttggtccaccccaaactgggcacctcgccaggttcgagtttaagaggcgcctcgagagagacgcagatgcccgcgaaccttcnaangtcaagtccgcnaagagaaagaacgcctc

SEQ ID NO: 35562 - DNA, 246 bp, Glycine max
  unsure (1)..(246): unsure at all n locations; Clone ID: 701109386H1
tcactcccttatccattnccacaccacannanagnggtnannnaacgctctctcttaagnctncattcnacgctctcccaanngncagtctctgacccgaagagngaaccataatggaagagtaaattaccggaaaccgaataaccgtttctccgtgaaagcctccgccaaagagattgcctttgacagcattcccgctctgctatgcaggccggcattgacaagctcgccgacgtgttgggncca

SEQ ID NO: 35563 - DNA, 256 bp, Glycine max
  unsure (1)..(256): unsure at all n locations; Clone ID: 701109387H1
agtgcgtttcggaagcagagaccgaaatacttcgagatggcccgtacaaagcaaactgctcgtaagtncaactggaggaaaagctcccaggaagcagcttgcaaccaaggctgcacgtaagtctgctccaacaactggtggtgtgaagaagcctcatcgttatcgccctggaactgttgctcttcgtgagattagaaataccagaagagcactgagctcctaatccggaagcttcctttccagaggttggttcgtg

SEQ ID NO: 35564 - DNA, 247 bp, Glycine max
  Clone ID: 701109388H1
cttcttccatggtgatccatataatcctgagaatgctagcaggtctatccctgtttggttaaaagatcatggcacggacaaaggatctgaagctgcaaaatccataattgaagctttgaaaagtaaaggtgtgatggctattggggctgctggattttgttggggggctaaagtcgtggttgaactgcaaaatccagactaatccaagctgccgtgctattacatccatcgtttgtctctgtggatg

SEQ ID NO: 35565 - DNA, 256 bp, Glycine max
  unsure (1)..(256): unsure at all n locations; Clone ID: 701109390H1
gtcttcataaacgcctttcttctccgttnccgtttcctcgttcaaattcgctttttgatctgcgaaaatgagagagtgcatctcgatccacattggtcaggctggtatccaggtcggaaatgcttgctgggagctctactgcctcgagcacggcatggggcccnaggggcnaatgccangnganananacttgggngggggggananngngttanaattttnctnnagcgnantggggttnaaaccccggnnccct

SEQ ID NO: 35566 - DNA, 241 bp, Glycine max
  unsure (1)..(241): unsure at all n locations; Clone ID: 701109391H1
cacttctttcatcgcttcggatcaccaatctcatctgccgaacntcaaaatgcccgccgtttatggagctcgcttgaccaccttcgaagactccgagaaggagagtgnatacggtnacgttcgcaaggtttcnggaccngtgngggttngcgtgtgnaggngggggggngggtttgtannnccnggttgtggggnngggngangccncctggggnaagatttngcnccccagggggnttnt

SEQ ID NO: 35567 - DNA, 259 bp, Glycine max
  Clone ID: 701109392H1
cgtcgctactaagagttgctgcttcttcagccactccgcacctcgcagcctgctgtgccctcaacaaccatggctgaaatcgaaactaccgttccagatcccacccaaatcgacgtcaaactcttcaatcgctggagcttcgaggatgttgaggttaatgatatgtctctggctgattacattggagtgtccccatcaagcatgctacatatgttcctcacactgctggtaggtactcagtgaagaggttcaggaaagc

SEQ ID NO: 35568 - DNA, 258 bp, Glycine max
  unsure (1)..(258): unsure at all n locations; Clone ID: 701109394H1
gctggagacacccttgagattttactcaccaataagctctccacagagggaacagttattcactggcatgganttagacagtatggaacaccttgggctgatggaactgctgccatttcacagtgtgctattgctcccggagaaacttttaattacacatttacagttgacaggccgggtacatacttctatcatgnacactttggtatgcaaagagcagcaggacngtatggttcctgatagtgaattgccaagggg

SEQ ID NO: 35569 - DNA, 257 bp, Glycine max
  Clone ID: 701109396H1
gttgaacaagggtttctctgtctgcttcttcactttctctcgtttcaatcgaaaccaaaacaaaatcatgggcagaaaattcttcgttggtggcaactggaaatgcaatgggaccactgaggaggtaaagaagattgttactactttgaatgaggctaaagtccctggagaagatgtcgtagaagttgttgtgagcctccttttgtgttccttcctgttgtaaaaagtttgctgcgccctgatttccatgtttcggc

SEQ ID NO: 35570 - DNA, 265 bp, Glycine max
  unsure (1)..(265): unsure at all n locations; Clone ID: 701109401H1
caaaaatatctgttgctctctacnctgcttagggttccaacttccaacccaacacttatcgttctcatgcaacaagggaaaatgaggcctattttctgtggaaattttgaatatgatgcccggcagtcagagctggagcggctttttagacgatatgggaaggttgatagggtggatatgaagtctggttttgcttttatctatatggaagacgagagagatgctgaggctgctattcgtgctcttgatcgagtagaatttggtc

SEQ ID NO: 35571 - DNA, 269 bp, Glycine max
  unsure (1)..(269): unsure at all n locations; Clone ID: 701109404H1
acttctcatcaccattaacgcattcggttgtttcatagagacagtttaccttgtcatctatatcacttattgccccaagaaagctaggttctntaccttcaagatgattttcttgttcaacgttggagtgattttcttggtagttcttcttacccacgttctagcaaaagaacgaacagcccgtatcgagctccttgggtggatttgtgttgtcctctctaccagtgtgtttncagcacctttaagcatcattaaagtggttatcgtac

SEQ ID NO: 35572 - DNA, 209 bp, Glycine max
  unsure (1)..(209): unsure at all n locations; Clone ID: 701109408H1
ccctacttctacttccctttgttctcaaaccttatcccttatcctcccaaaaccaaaccatgtctacctccgcagcttctctcgcactcccaaccctcactctccgaactcgacaacctctnctgttctccccaatggcttctcctcgtccctctccctcacccctaactccaaacccatttccatttccgccgttttcctcaaaacaa

SEQ ID NO: 35573 - DNA, 271 bp, Glycine max
  unsure (1)..(271): unsure at all n locations; Clone ID: 701109409H1
ctataatttcagagctagctagttcncagcttcagttcgttnttgttgatcctgtgaacttatggctgacggggtggttctgttggatacatgggccagcatgtttgggatgagggttaggattgcattagctgaaaagggtgttgagtatgaatacaaggaagaaaatctcaggaacaagagtcctttgcttttgcaaatgaacccaattcacaagaaaattccagttctgatccataatggcaaaccaatttgtgaatctgcaattata

SEQ ID NO: 35574 - DNA, 198 bp, Glycine max
  unsure (1)..(198): unsure at all n locations; Clone ID: 701109411H1
ccaattaccaattcgaaacccttattcctctcaaagaaccanattgagtgatcgtgatggcaccaaaggcagagaagaagccagcggagaagaagcccgcggaggagaagaagtccacggtgggagacaaggctccggcggagaagaagccaaaggtcggaaagaagcttccgaagagggaggcgccggcggagaagg

SEQ ID NO: 35575 - DNA, 269 bp, Glycine max
  Clone ID: 701109412H1
gccttcatccgaagccttcttcaggccactacccctacggcaaccaaagaggaccctcttcaccacaaagggcagtgtcaaactcccaaggctcaaatcaatgcatctttgaaggagaaggcagttgcaggactcacagcagcttctgtgacagcatctatggtggttccggaggtggctcatgctgctggatatgagttctccccttccctcaagaactttctgctaagcatctttgctggtgggtttgttctagtagccatatttgg

SEQ ID NO: 35576 - DNA, 236 bp, Glycine max
  unsure (1)..(236): unsure at all n locations; Clone ID: 701109413H1
ttttttctcaancccagactttctggaatgntcaaacatttcttcatcaaggtgattcaaagtcatgaattcaattattgcaactcagaacaatgcaacagcaaaaaggtttcccactgaggaaactgttgttgatggggaagacataattagcaagttgcatgaaagcattcttggtcacattctgtctttccttccaacaatggnntcagtnccacacaacataccnnngacca

SEQ ID NO: 35577 - DNA, 267 bp, Glycine max
  Clone ID: 701109414H1
cacaaaacccaacttcatgcactccttcacgctcctcaaccacccaaattcagtgtggtctgagagaacttcagaacccgcattgattccgtgaagaacactcagaaaatcaccgaggctatgaagcttgtggctgcagccaaagtgagaagagctcaagaagctgttgtcaacggaagacccttctcagagaccctcgttgaagtcctctacaacatcaacgagcagctcctaactgaggacgtagacatccctctcacaaaggtt

SEQ ID NO: 35578 - DNA, 263 bp, Glycine max
  Clone ID: 701109416H1
taaaattctaataaatccaccacatccaacatctctagcttgtttcaattccttccaattttgcaatggccactactctttctgaagcctatagggaccaccctctccaccttcatcatattatccccttagacttttcttcacttaggaccttacctgattcgcatgcatggcctcaatctgaagatggtgatggtgatgatgataatcatggaattggatcatccatacccatcatagacctaatggatcctaatgccatg

SEQ ID NO: 35579 - DNA, 266 bp, Glycine max
  unsure (1)..(266): unsure at all n locations; Clone ID: 701109418H1
gtggacggttgcttccgctctccttcttctctctctcctctttctctttgcagatcaaggtcgaaagtttcaggcgaatgcgagggagattccgacgagcttgtagatcctccgaaggtggagganaagatcggtgctgtgcctcatggnctttccaccgattcagatgtcntnaagancgagncggagtcgatctcgaagagatctctccggagcaatgcggagaagtttgagttccaagcggaagtgtcacggcttatggatat

SEQ ID NO: 35580 - DNA, 273 bp, Glycine max
  unsure (1)..(273): unsure at all n locations; Clone ID: 701109421H1
ataggacaaatattacaatactacgtatttttgttaaaacttcttcctttgcttcgggcagcaggtgcagcagcacctcccagcnggtgcagcagcaacggcaaccgctgcaccgccaccagacactgcagacatcttttcacttccactagcaattagctcattgaagtcttttcccttgacttcagtcaagagcaantcaatcaactcattctcagcctcagctccanctgcgccgaggatgtgtttgatgtcatcggcagaaggggaagg

SEQ ID NO: 35581 - DNA, 269 bp, Glycine max
  unsure (1)..(269): unsure at all n locations; Clone ID: 701109423H1
atttcaatctagggtttctttgcacgctaattccatcttcaaattctgccttcattcgattcaggggggaattaaattgtgtctattntnnntcgnanttaccacnaattagaaatcgataaagannaatggtgagggtgttgagaagctgcattcaatcgattttgaagctggtgaactcggtgattgggatggcggggctagccatgattctgtactccgcatggatgattagggtttggcagaggaagatgggcgaacttcccttt

SEQ ID NO: 35582 - DNA, 269 bp, Glycine max
  unsure (1)..(269): unsure at all n locations; Clone ID: 701109425H1
gtttgttgatcgagataactagaaacagtgtgatgaaaatgaaggtccttgttttcttcgttgctacaattttngtagcatggcaatgccatgcgtacgatatgttccctctccgaatgaacactggctatngtgnncgtacncngnnggtgngannngcnnntnntagncgcttnntgtnnncncacaccatatctngngctttgagaccattcctggagagtgcgttgncgcaacaaaggnatacatccatggcgaacaatatagat

SEQ ID NO: 35583 - DNA, 267 bp, Glycine max
  unsure (1)..(267): unsure at all n locations; Clone ID: 701109428H1
gatttgangtctgaagtgaagagaagtctcatgcatcctgctaaggtgtcattgttggtggatattcatgaatgngggaaccattgagancanaatgnactgtgccaagttgattgngatgttaactggtggaagggaacaatgagactgtttcaagtttgagtcttttagttnagaagttgaggctagtgagggataagaaacacccaaatggggtggtctcaattggtctcatactactcaagaaggctataatatgttcccatg

SEQ ID NO: 35584 - DNA, 265 bp, Glycine max
  unsure (1)..(265): unsure at all n locations; Clone ID: 701109434H1
cctcaaaacaacgcattcctttcactgccccttcccaattcccttccctgattgtcanttggatcttcatgagttcaacaaccactggagcatacttcgtttcctgtgttgcgggaaacaagaacaacgacctcttctgctgggttttgctctgcttgctgccaaaatttttgggaactccatccgcctanatcaactttctcttgattcaggccattgacaggaatccatcggcggtggaggttttgggaaacttcggggtggt

SEQ ID NO: 35585 - DNA, 269 bp, Glycine max
  unsure (1)..(269): unsure at all n locations; Clone ID: 701109437H1
cagatctacaanacctgcgtactggaatctataaagnaacaatccaattaatcannacgnacaacgaagatcgtatgaatacgattttgcacttctcgacnnatataatttgttncnttattctaagcggttatnctnttcttggtaatcnagaacntgntcntnntaactctttggttcgagaatttatatatangtnaggtgacacaatnaaagcnttntcnatgtctgctattanctganttatgtataggagtccatncannccc

SEQ ID NO: 35586 - DNA, 270 bp, Glycine max
  unsure (1)..(270): unsure at all n locations; Clone ID: 701109439H1
ttttgtcacaatgacttacaatatggtaacataatgatggatgaagagacaagatnnatcantanaattgactatgantatggccgnnataatnccattgcatatgaccttcgcaaatcatttttgtgaaatggtggcagattaccacagtgacacacctcatgttcttgactacacgaagtatccaggactagaggancgtnaaagatttatccgcaactatctnagttctganggcaatantaccaancaatgctatagngaaccagt

SEQ ID NO: 35587 - DNA, 251 bp, Glycine max
  unsure (1)..(251): unsure at all n locations; Clone ID: 701109442H1
tgatccggagcgatgagtgatacntgagaagcagaggnnaacggggaangtgaagtngttcgatgaccagaagggttttggcttcataaccaaccgacgacagcggcgaggnattcttcgtccaacagtcctccatccgttcgaacggcttcngcagcctcgccctcggngattccgtcgagttccttattgactccgatcccgaaggcccgcacnaaggccgtcgangtcacnggcctgnncnattcgcc

SEQ ID NO: 35588 - DNA, 266 bp, Glycine max
  unsure (1)..(266): unsure at all n locations; Clone ID: 701109443H1
aaagagtgaagttttctcacgaggaaanaaaagctaaaaatggggtcgaagtggatgtggttgatattacactttgcatcggttttggtngtttgtttggggagatagaacaattttgaaggtggaagggcctatgttgttggataattcacagagatatgaaggcagtttcattagcaaagcagtgaacttcttatggcaaccaggggaatcaggttatcaacacgtttggccagacatggaatttgggtggcaaattatcttgg

SEQ ID NO: 35589 - DNA, 245 bp, Glycine max
  unsure (1)..(245): unsure at all n locations; Clone ID: 701109444H1
gnaaaaacaagtagttgagaaannagaagaaggaaatggcttcctcaatgatctcctccccagctgttaccaccgtcaaccgtgccggtgccggcatggttgctccattcaccggcctcaaatccatggctggcttccccacgaggaagaccaacaatgacattacctccattgctagcaacggtggaagagtacaatgcatgcaggtgtggccaccaattngcaagaagaagttcgagactctt

SEQ ID NO: 35590 - DNA, 260 bp, Glycine max
  unsure (1)..(260): unsure at all n locations; Clone ID: 701109447H1
ctggtggttgtgcagggaacaatctgcaccggcttcgttgcttcggacaacactgnntacctcaaaaccctaaaaaagggngatgtcatggtgtaccctcagggcttgttgcacttccagatcaacgatggagagtctcaggctttggcttttgtgagcttcagcagtgctaaccctggcctccagattctggacttttctttgttcaagngtgatttccccactgagcttatcacgcaaaccactttcattgatgctgc

SEQ ID NO: 35591 - DNA, 244 bp, Glycine max
  unsure (1)..(244): unsure at all n locations; Clone ID: 701109448H1
gnacatagtagcacaaaactctngcctaagttanngagantgatggaaacttcaaagggnaccgcttggttctaataccaccancatttcaaggacacttaactccaatgcttcaactagccaccatccttcatttaaaagggttctccataaccatatcacatgctcatttcanntcccccgatccttctaattaccctaactttagttttctacccttgttctatgatttatccgataccaa

SEQ ID NO: 35592 - DNA, 130 bp, Glycine max
  unsure (1)..(130): unsure at all n locations; Clone ID: 701109449H1
attcctcctcctcctagtggggctcttcgcctcgtcgctctccgagatncggttctccgagatncgaaacgncgatcgcttncatcgttccggnttgatnagtttggattnacccanaagggtcgccttg

SEQ ID NO: 35593 - DNA, 265 bp, Glycine max
  unsure (1)..(265): unsure at all n locations; Clone ID: 701109451H1
ataactagaaacagtgtgatgaaantgaaggtccttgttttcttcgttgctacaattttngtagcatggcaatgccatgcgtaacgatatgttccctctccgaatgaacactggctatggtgcccgtactccggaggtgaaatgcgcaagttggaggcttgctgtggnagcacacaacatctttggctttgagaccattcctgaagagtgcgttgaagcaacaaaggaatacatccatggcgaacaatatagatcagactccaaa

SEQ ID NO: 35594 - DNA, 267 bp, Glycine max
  unsure (1)..(267): unsure at all n locations; Clone ID: 701109452H1
tcttccttagctacctagattattcacttcaattcctcacaagcaacaccgattcttgcttccaatgggcagctttgtatctcccaataagcatgttggcactcattgttgttgtttctcttggtttgtggagtggtgttcaaggtgcaccacnagtgccatgctacttcntttttggtgattctttggttgataatgggaacaacaaccagctccagtctttggctagggctgattacttgccttatgggattgacttccntggtg

SEQ ID NO: 35595 - DNA, 266 bp, Glycine max
  unsure (1)..(266): unsure at all n locations; Clone ID: 701109454H1
caaaaaatgggagttccagagagagaccctcttgcacaattgagcttgcctcctggatttagattttatcccactgatgaggagttttggttcagtacctttgccgcaaggttgctggccatcatttctctcttccaatcattgctgaagntgatttgtacaagtttgatccatgggttcttccaggtaaggcagcgtttggagatccggagtggtacttcttcagtccaagagacaggaagtacccgaatggttcacgaccaaac

SEQ ID NO: 35596 - DNA, 268 bp, Glycine max
  unsure (1)..(268): unsure at all n locations; Clone ID: 701109455H1
ggcttcttcaatccctaatgcgccttctgcgttcaattctcagagctacgttggtctcagancgccactgaggaccttcaacttttcttctcctcaagctgccaaaattcctcgctcccaacgccttttcgtcgtcagagcctccgattcggagttcgaagccgccgttntcgccggtaangttccgccggcgcctcccgtnccgcncagaccggcggctccggttggaanaccggtggttccttcacttccanttcaccggcgtcct

SEQ ID NO: 35597 - DNA, 268 bp, Glycine max
  unsure (1)..(268): unsure at all n locations; Clone ID: 701109458H1
gcggaagtcatcaccgtcgatggaaccctaacctcttccgagaatgacaagagcggaatcntccgtcgatgccgccgcgcacggcggtggaaaagacggtgtccaacgctgaaacttccggtagcgatcctcagaagactctggagttggcgaacgagctgatggaaaaaggaaacaaggcaattaagncgaacgattttggagaagcagctgataacttcagccgtgctctcgaaatcagagtggcgcattatggtgaacttgctcc

SEQ ID NO: 35598 - DNA, 129 bp, Glycine max
  unsure (1)..(129): unsure at all n locations; Clone ID: 701109460H1
tgaaagttacaggagtttggaaatctctatgtctatgatagtntccatgagcatgctttaannattctctntggtcanattacaaaangtangaanagacanaacaacacaananaagactnncnagng

SEQ ID NO: 35599 - DNA, 253 bp, Glycine max
  unsure (1)..(253): unsure at all n locations; Clone ID: 701109461H1
ctccctttcactctcgtagacatcacaaaccttccctccattcatcccacgcatggntgccatgaactctagnactattggcctgtagctatgccatatcaggtgcagcgtgttcggagcncaatgggaaggtcacttccgtggcctatgttgcatgctctggctacaagntgccttgatcaaagctgaggccagagttcctaaagccaaagaatctgaaggagaagagagtgccttgtttctggcactacct

SEQ ID NO: 35600 - DNA, 260 bp, Glycine max
  Clone ID: 701109463H1
gcatttcagcagcacaccacaatggccaccaatgcattcactggcacatctctctccatgcgatctgtcattcctcaaacacaggcatttgcctcaatttctggcccgacatctgcttcaatttccagctttgggagaaagaatgtttcttttagcttgcagccacgcttaattcgccttaaaatttcctgtgctgccgctaaaccagagacagtagagaaggtgtgcaaaatagtaaagaagcagctggctatgcctga

SEQ ID NO: 35601 - DNA, 256 bp, Glycine max
  unsure (1)..(256): unsure at all n locations; Clone ID: 701109464H1
gataactagaaacagtgtgatgaaaatgaaggtccttgttttcttcgttgctacaattttngtagcatggcaatgccnggtacgatatgttccctctccgaatgaacactggctatggtgcccgtactccggaggtgaaatgcgcaagttggaggctgctgtggaagcacacaacatctttggctttgagaccattcctgaagagtgcgttgaagcaacaaaggaatacatccatggcgaacaatatagatcagac

SEQ ID NO: 35602 - DNA, 260 bp, Glycine max
  Clone ID: 701109465H1
ctttatgtgcttaagcctatcaagtatgtaggcattgaagtttggcaggttaaaggcggttcagtttttgacaacgttttgatttgtgccgaccctgattatgcaaaacaagttgttgaggaggtgtttgccaacagggagattgaaaaggaaggttttgaggaagcagagaaagtgagaaaagccaaagaggaggaggaggctcaaagagcaagagaagaaggtgaaaggcgtagacgagagagaggtcatgatcgacg

SEQ ID NO: 35603 - DNA, 263 bp, Glycine max
  Clone ID: 701109467H1
attttgccaaatgtattttgtagggagctgcgcacaaggagcgttctggattcgagggtccctggacctctaatcctcttattttcgacaactcatacttcaaggagttgttgagtggtgagaaagaaggcctccttcagctaccttctgacaaggcacttttgtctgaccctgtgttccgccctcttgttgagaaatatgcatcggtatgtatgtcgtaatattttgcataacatgaatttttggaatgtagaacatttctt

SEQ ID NO: 35604 - DNA, 205 bp, Glycine max
  unsure (1)..(205): unsure at all n locations; Clone ID: 701109468H1
aaacatggatatggggtggagaaatttaactcgaccttgtatgatgaatgggttaacaagggcaatgcaccggcatgcccgagactctaagaatacacaagctggtgtctctngctcagttatatctgtcggagacatggcaacggtctacgagaactaagangtgncacctggaaatatccagtcaaagtctcatcaatggtct

SEQ ID NO: 35605 - DNA, 245 bp, Glycine max
  unsure (1)..(245): unsure at all n locations; Clone ID: 701109469H1
aaaccttgcaaattgcaatggcactcaannaggttattnnnaccatcttggttctttctctccttgcctactcaacatcattcaccantgcatgtggcacatgccanncaaaacctactccttctcccnctcctccatcagggaagtgccccaaggatacattgaagctaggggtgtgtgctgatgntctaggacttgttaatgttgttgttggttcccctgtctctagcaagtgttgtgcattg

SEQ ID NO: 35606 - DNA, 266 bp, Glycine max
  unsure (1)..(266): unsure at all n locations; Clone ID: 701109470H1
gaaacagtgtgatgaaaatgaaggtccttgttttcttcgttgctacaattttngtagcatgggcaatgccatgcgtacgatatgttccctctccgaatgaacactggctatggtgcccgtactccggaggtgaaatgcgcaagttggaggcttnctgtggaagcacacaacatctttggctttgagaccattcctgaagagtgcggncaagcaacaaaggaatacatccatggcgaacaatatagatcagactccaaaacagttaa

SEQ ID NO: 35607 - DNA, 265 bp, Glycine max
  Clone ID: 701109472H1
ggcaacaccctctttctgaattaccttcaaacaacacaatcgctcctcttcgatttctagggttttgctattgctttgcatccgttcccccttctcacaaaaacaacgcgttttctcttccccttcgtatctattctttgcgtttgtttttggttgattgaaggcattcacagcgtaattcgttgctgcattttaatcgatttatccaaccaggtttataaataataaataaataaaatatcgtagacacatgtgaatgtgtgat

SEQ ID NO: 35608 - DNA, 259 bp, Glycine max
  unsure (1)..(259): unsure at all n locations; Clone ID: 701109474H1
atgaaaactatacgattcgattccttgttttnaatggacaccttcttgaattctnnntcttctttcttcttcgagnngccgctggagttangatnctctnnagaatttncgtgagatntntcngntggttnngaatcagatnaaangggtttattttatgttatgttgcgctgtggtggctgctgctgttggagttttcttcntgttctgtggaaattgggggttttctnancagttggcttccttggaagctggtttg

SEQ ID NO: 35609 - DNA, 262 bp, Glycine max
  Clone ID: 701109475H1
cggagatgcagtcatgaacaggacaaagttcagattcttcttctgagcaaaattttggggcagcaactaactaaatcctcaaaacagtgcaatctagtgaagattgttgggtcagttatggcagcgttgatttccaaaaggatcctacgttgttcttctgggtccttgcattcactaggacgatgttactttgattcacctgggtttgcctctatttataaaccacgtgatgtatgcggcggtttatctggggagagaatgt

SEQ ID NO: 35610 - DNA, 260 bp, Glycine max
  Clone ID: 701109476H1
agaagagaagggctacacaaacacaatctctaatggcacttcaggatgtgggcttcttccactgccaatgcactcaaactctcttctgtctccagacctcatctcttgcctcctttttctttctccagatgcttatcttccgtcttggatggacttaagtacgctgattcacatgaatgggtcaagcacgaaggctcagtcgccaccattggtatcactgaccatgcccaggaccatcttggagaggttgtgtatgtgga

SEQ ID NO: 35611 - DNA, 258 bp, Glycine max
  unsure (1)..(258): unsure at all n locations; Clone ID: 701109477H1
aaacagtgtgatgaaaatgaaggtccttgttttcttcgttgctacaattttngtagcatggcaatgccatccgtacgatatgttccctctccgaatgaacactggctatggtgcccgtactccggaggtgaaatgcgcaagttggaggctngctgtggaagcacacaacatctttggctttgagaccattcctgaagagtgcgttgaagcaacaaaggaatacatccatggcgaacaatatagatcagactccaaaac

SEQ ID NO: 35612 - DNA, 259 bp, Glycine max
  unsure (1)..(259): unsure at all n locations; Clone ID: 701109478H1
aaacactcataacacaaagcacaaagcaaagctcatccttgagttaaaaaatggcagcagcttcntccatggctctctcatccccatccttggctggcaaggccgtgaagctgggcccatcagccccagaagtgggaagggtgagcatgaggaagaccgtcaccaagcaggtctcctcaggaagcccatggtacggcccagaccgagtcaagtacttgggcccattctctggcgagcccccgtcctacctaaccggtga

SEQ ID NO: 35613 - DNA, 236 bp, Glycine max
  unsure (1)..(236): unsure at all n locations; Clone ID: 701109480H1
caaccggatatttccaccaaaccantttgngatgttgtanncgaataaatggcgactacnaggagcgtgggaacgttgaaggagggtgatttgaaggggaagagggtgttcgtgagggtcgatctgaacgtgcctttggatgacaaccttaacatcaccgatgacactagagtccgtgctgctgttcccaccatcaagtacttgactggttatggtgctaaagtgatcctttctag

SEQ ID NO: 35614 - DNA, 94 bp, Glycine max
  unsure (1)..(94): unsure at all n locations; Clone ID: 701109481H1
catccttcgccgtcgccaccatttttgtcaccctccattcatcaccgggttcggtttcgggtattgaacgaggncaaacttccacaccaacata

SEQ ID NO: 35615 - DNA, 241 bp, Glycine max
  unsure (1)..(241): unsure at all n locations; Clone ID: 701109482H1
agagaatccgaggcgaangcnanagaaaaattaagatggaggggaaggagcaggatgtgtcncngggagcgaacaagttcccggagagacagccgattgggacggcggcgcagagccaagacgacggcaaggactaccaggagccggcgccggnccactggttgacccgacggagtttacgtcatggtccttttacagagcagggatagcagagtttgtggccacttttctgtttctatac

SEQ ID NO: 35616 - DNA, 205 bp, Glycine max
  Clone ID: 701109485H1
ccgtatgaagagtatgaggtggaaattgagcagccctttggactcaaatttgcaaagggtagagatgggggaacttacattgatgctattgcaccaggaggatcagctgataaggctggagtcttcactgttggggataaagtaattgccaccagtgcagtttttgggaccgaaatttggccagctgctgaatatggaaggacaa

SEQ ID NO: 35617 - DNA, 265 bp, Glycine max
  Clone ID: 701109487H1
gaaggcatcgttagcagttttgtagattcaacctcaatttgcagagttacgttctaatatatttacacaagactgataagagaaaatgtctctgattccaagtttcttcggtggccgaaggagcagtgttttcgaccctttctccctcgatgtgtgggaccccttcaaggattttccatttcccagttctctttctgctgaaaattcagcgtttgtgagcacacgagtggattggaaggagacaccagaagcacacgtgttcaag

SEQ ID NO: 35618 - DNA, 131 bp, Glycine max
  unsure (1)..(131): unsure at all n locations; Clone ID: 701109488H1
gntttgancngcggaanggcgagananaggtgataagcagcaaagagtgacgaatcgtnnaccatnctnccanctcattcgttcaattcccgnaggctaancaatcagtaagaanattttgcgngctcttt

SEQ ID NO: 35619 - DNA, 261 bp, Glycine max
  unsure (1)..(261): unsure at all n locations; Clone ID: 701109489H1
aggcataaacacagtgatgtactacagcccaacaattgtccaaatggctggctttcaatctaatgagttggctcttctcctttctctcatagttnccggcatgaatgctgccggatcggttcttggcatttaccttattgaccatgcaggacggagaaaattggccctatatagcttagggggggtaatagcatctctgatcatcttggccttgtcattttttaaccaatcatctgaaagtggtttgtatggatggcttgc

SEQ ID NO: 35620 - DNA, 262 bp, Glycine max
  unsure (1)..(262): unsure at all n locations; Clone ID: 701109490H1
ataaatcgatttcaatctttgcagtatcgaacatctctgcacacttcattcccnantcncactcgtttctctgttgtttctgcactgttttgaggaggttgaaggggaaaagtgggtatcaaagttggcatagcagaagtgcaatcagctctagtttcttctcttccaagcaacaggnncattcgatgcacaagccaagaaaaaagcattgtttcgtgctaaattgaatgcccagaagaaggaaaaacgcatagaatctccc

SEQ ID NO: 35621 - DNA, 240 bp, Glycine max
  unsure (1)..(240): unsure at all n locations; Clone ID: 701109491H1
gagtttttgctctaatttcaaanntgaccccttttttacgctgattttatggttgaaaattttaattttgtggttgattgcttcgataaaaaaatctgctaagatgtgtgacttctctatgcattcccaagtgtccttttttcaatnggttcatcaattttcannatcgacacaacnnngggcnnaggnttagagagggggagtggtttttntttttttnnagaanngttanaggnaggg

SEQ ID NO: 35622 - DNA, 259 bp, Glycine max
  unsure (1)..(259): unsure at all n locations; Clone ID: 701109492H1
gtgtgaagctatgttgggtaacttctttgtttcagattatattcctttcatgggttggattgataaactcaggggactggatgcacgtcttgaacgcaatttcaaggagatggatnagttctaccaagaagccattgatgaacacatgaattctaagaaaaaaactccngaggaagaggatttagttgatgtcttacttcaactgaaagagaacaacacgtttcccatagatctcaccaatgataacatcanagcagtg

SEQ ID NO: 35623 - DNA, 256 bp, Glycine max
  unsure (1)..(256): unsure at all n locations; Clone ID: 701109493H1
ggnnaggactatgtcactgattttcaaattagatgcccaatgaaggaganaaagtatancaagaaatgtgctgatgcngtcattgaatcacttggccttgatantaaaaagattgaaaggtgcatgggngatccaantgctgattctgaaaatcctgttttgaaagaagagcaagatgcccaagttggtaaggggtcacgaggtgatnttaccatattgcctactctagttgtcaataatagacagtatcgaggaa

SEQ ID NO: 35624 - DNA, 270 bp, Glycine max
  Clone ID: 701109501H1
accaccacaacccacaagtctttacgaggtccaagaggtggtatgatattcttcaagaaagatactgtgcatggggttgatttggagcctgccattaacaatgctgtttttcctggtctacaggggggtcctcataaccacacaattggaggactagcagtttgcttgaagtatgctcagtctccagaatttaaaaattatcaaaatcaggtggttgctaactgtagagctcttgctaagcgattaattgagcatggatataaactggtt

SEQ ID NO: 35625 - DNA, 269 bp, Glycine max
  unsure (1)..(269): unsure at all n locations; Clone ID: 701109502H1
ctagtttcttacaaggctctactctactgcttcaccttctgctctagaaaattcagtggtgatacatggcttcggctactctctctgtagccaaaccagcccttcaggcaaatgggaaaggcttctctgaattctctggcctccgcagctcatcaggcttccttcccttttctagaaaatcttcagaggatttccattctgtcattgccttccagacctatgcagttggaagcagtggaggatacaanaagggtgtgacagaagcaaaa

SEQ ID NO: 35626 - DNA, 249 bp, Glycine max
  unsure (1)..(249): unsure at all n locations; Clone ID: 701109503H1
caaaaaacgagctctgaactctgaacctctgaactatagctactctacccattacattacaancttagctcaacaacaaccatatttccaacgaattgagttatttctaattagcctcccatccagtgaggcaccggattccgtaggataaaatagcttgtcaagagtagagttgccttgtgaaatctgtttctgtcttctgtcaagtgcatcaaatatagctggttaagattctccacgcaggtgcat

SEQ ID NO: 35627 - DNA, 267 bp, Glycine max
  unsure (1)..(267): unsure at all n locations; Clone ID: 701109505H1
gtttgcccaaaaccttatctgacttaacttccacactgtctgtcncnacntctccatctttgtgtcacatgaaatttgttctctgaatttttanttttttgacatcatttcaatggcagccatcatcccctgccactactgtgcttccctcagtcctagatggttcaattccaacaacacacattctnggcgtttatcctacccacttcgaggactccgaggtttgaatgctcgttgctcttaccaaccaccccatcattctgaatc

SEQ ID NO: 35628 - DNA, 266 bp, Glycine max
  Clone ID: 701109506H1
ctttctttgtcgaactcgtgcgaagatgcgtgagattcttcacataccagggagggcaatgcggaaaccagatcggagcgaagttctgggaggtggtgtgcgcggagcacgggatcgattccacggggaggtaccagggggacaacgagttgcaactcgagcgagtcaacgtctattacaatgaagcgagttgcggaaggttcgtgccgagggcggtgctcatggatctagagccagggaccatggacagcgtcagatctggtccc

SEQ ID NO: 35629 - DNA, 264 bp, Glycine max
  unsure (1)..(264): unsure at all n locations; Clone ID: 701109508H1
cagggtcatcctgaaactgatcctgtagaagatgttcttgaacaatcaacctcacagagttggggctcatccaagagtcccaagtttgaagagtccaactctagtgagcttccttaaaaaaaaccagggtttccgtgcgtgcaagatcagaagctcctctgattagcgatggatgtcaatggaggaaatatggacanaaaatagccaagggtaatccttgtccccgtgcctattatcgttgcactatggccgtaggatgcccgg

SEQ ID NO: 35630 - DNA, 262 bp, Glycine max
  unsure (1)..(262): unsure at all n locations; Clone ID: 701109510H1
ttacagcttctggtcggagttccattcaaaattatgaatgtggtataacctaaatccccaaattcattattggaatgttttgaaatttcatcttcttggctcttctaatatgaaagtnacatgaagtacaggaaaccaaaatggggtagaaaaacatatttcttatgcagttttataattttccaatatctggctatatacttaaatagtgttgaattttaaacttgtgttgttccctttagaactccgaaacatttttcgt

SEQ ID NO: 35631 - DNA, 263 bp, Glycine max
  unsure (1)..(263): unsure at all n locations; Clone ID: 701109511H1
cagagaagcaatcagttgccaaactatttttctctctcctttttttgacttttctttctttctgcaactccaaaatgtcttccataggggcaaaaaatctagcactctcctccgcctttttgctccttttggtcggttttgcaacctcagacatcaaccaagacaaagcagaatgtaccgacaaacttcttggtctagctggntgtcttccctatgttggtggtgaagccaaagtccccgccatggattgttgctctggtatc

SEQ ID NO: 35632 - DNA, 261 bp, Glycine max
  unsure (1)..(261): unsure at all n locations; Clone ID: 701109513H1
acgaaactactctacaaacacaacaaaactctccaattctgaagattttcttatctcttgtctttgaaactagaagctccgtgattgatcaatggcgacaaaagaaggcaaagccataggcatagantcggcacgacctacagctncgtgggcgtgtggcaaaacgaccgcgttgagatcatccccaacgaccaaggcaaccgaaccaccccctcctatgtcgccttcaccgacaccgagaggctcatcggagacgccgcg

SEQ ID NO: 35633 - DNA, 262 bp, Glycine max
  unsure (1)..(262): unsure at all n locations; Clone ID: 701109515H1
caaaaaccgtacaacaaggttgtttttgttttgttttgtgttttctctctaatcattcgaatggccaaagaaggacctaactgggacggnttgctgaaatggagcattgctcactccgatgggactagccctactcgcaatttaagtgaggaggatcgaaaatggtttatggaagcgatgcaagcacagaccattgatgttgtaaaacgtatganaganatcacacttgtgatgcaaactccagaacaagtattgaaagacc

SEQ ID NO: 35634 - DNA, 264 bp, Glycine max
  unsure (1)..(264): unsure at all n locations; Clone ID: 701109516H1
atcgagataactagaaacagtgtgatgaaaatgaaggtccttgttttcttcgttgctacaattttggtagcatggcaatgccatgcgtacgatatgttccctctccgaatgaacactggctatggtgcccgtactccggaggtgaaatgcgcaagttggaggcttgctgtggaagcacacaacanctttggctttgagaccattcctgaagantgcgttgaagcaacaaaggaatacatccatggcgaacaatatagatcagac

SEQ ID NO: 35635 - DNA, 272 bp, Glycine max
  unsure (1)..(272): unsure at all n locations; Clone ID: 701109517H1
gaattcacaaccgacaatggcgacaaaacctcgtttggcttatctctcttccacttttcttnttcttncatgttgtaactgtctttacttcggtgtcggcanaagccccagaatccccatcantctacaacaccttccttcaatgcctcaccaaatacacaaataacccctccaacatagtcttcgccaacaccaaccccaagttccccactatcctgccanaactacatccgaaacgcgcgtttcaacacctnctcgacgcgaaaancata

SEQ ID NO: 35636 - DNA, 270 bp, Glycine max
  Clone ID: 701109518H1
gtccttaccgaaaactagaggccagggtctcggagtgtttgggtttgtttatcttaaacaccacaaacacagaacagaggtgtagagaagaaagctcaaaaatatggcggcagagtcatcactgagggtggcgactcccactctttgcaacctcaatgggtctcagagacgaccaaccaccaccactctctctccgcttcgcttcatgggttttcgtcctcgaccctcctctcactctctcacctcctcttccctttcacacttcttcgg

SEQ ID NO: 35637 - DNA, 270 bp, Glycine max
  unsure (1)..(270): unsure at all n locations; Clone ID: 701109519H1
gtgcaacaaagcttggggtgccacctgctcttgaccaatctacacctatgcgcatctgtaacaagagaaaattgcatacagggagtgaaaaaacacaataaacagcgaaaaangangattacaaagangcagattgangganaanctaacgctggcttagttgctaanacanagggtgtgttatctgctagtcacagttcatctgancctgagcatcctcattgtagtaacagaggcgaagaagaacatgaggtgaaaaatgactgtgga

SEQ ID NO: 35638 - DNA, 267 bp, Glycine max
  Clone ID: 701109520H1
caatactcctcgcacaacacaaccacaatggccgcgaagaagaagaatggcggcggaaacggcaacaacaaggagaacgaagacagcaccatcaccgtcgtcttgaaggtcgaaatgcactgcgacggttgcgcttccaaaatcatcaaacacctccgctgtttccaaggtgtggaaacggtgaaggctgatagcgacgccgggaaggtgaccgtgaccggaaaagtggaccccacgaaagtgagggataacctggcggagaagata

SEQ ID NO: 35639 - DNA, 266 bp, Glycine max
  unsure (1)..(266): unsure at all n locations; Clone ID: 701109521H1
ctttctctctaactccctcactcacactcacagttaagcaatggcngggaaaggaggaaaggggcttcttgcagcgaaaaccaccgcggctaacaaggacaaagacaaggacaagaagagacctatttctcgttcatctcgtgccggaatccagtttcctgtgggacgtatccataggcagctgaaacaaagggtccaagctaatggacgtgttggtgccactgctgccgtatacttagcctcaattcttgagtatcttactgctg

SEQ ID NO: 35640 - DNA, 267 bp, Glycine max
  Clone ID: 701109522H1
cccgattcaagaagaaccgcaagaagcgcggccacgtgagcgccggtcatggccgtatcggaaagcaccgtaagcaccccggcggccggggaaacgccggtggcatgcatcaccacaggatcctgttcgacaagtaccatccgggcttcttcggtaaggtgggaatgaggtacttccataagcttcgcaataaattctactcccccatcgtcaacgtcgaaaagctatggtctctcataccccaagacgcgaaggaaaaagccctat

SEQ ID NO: 35641 - DNA, 265 bp, Glycine max
  Clone ID: 701109523H1
tgggattggagggattgacgctgcgtctcttcctcttctctttcgatccatccctcattcctaatcctccaatccaaccacctcagcctcacactcacatatacacatatctgaacgcgtatcgtccctcctatggcttcaaagcgcatcctcaaggagctcaaggacttgcagaaagacccaccaacttcttgcagcgctggtccagtagctgaggacatgttccattggcaagcaacaataatgggtcctgctgatagtcctt

SEQ ID NO: 35642 - DNA, 267 bp, Glycine max
  unsure (1)..(267): unsure at all n locations; Clone ID: 701109524H1
ccacgtcctcctcgactacttcggcgccaagaagctccaccagatgcaccaacggcaccgcccttcgccgccaccatgtaccaggccaccggcagcgctcccggatccgccggctttgtcaacatcaccgacctccacggcggaaaggtcggcttcggcgccgaaaacaacgacggcacactctcctcaactttcgtcaaatccgtagaagaaatcccttacaacatctcagtaatccagatcagcaaagntcttccctctgccgca

SEQ ID NO: 35643 - DNA, 264 bp, Glycine max
  Clone ID: 701109525H1
ataacacaaagcacaaagcaaagctcatccttgagttaaaaaatggcagcagcttcttccatggctctctcatgccccatccttggctggcaaggccgtgaagctgggcccatcagccccagaagtgggaagggtgagcatgaggaagaccgtcaccaagcaggtctcctcaggaagcccatggtacggcccagaccgagtcaagtacttgggcccattctctggcgagcccccgtcctacctaaccggtgagttcccaggcga

SEQ ID NO: 35644 - DNA, 262 bp, Glycine max
  unsure (1)..(262): unsure at all n locations; Clone ID: 701109526H1
cgagataactagaaacagtgtgatgaaaatgaaggtccttgttttcttcgttgctacaattttggtagcatggcaatgccatgcgtacgatatgttccctctccgaatgaacactggctatggtgcccgtactccggaggtgaaatgcgcaagttggaggcttgctgtggaagcacacaacatncttggctttgagaccattcctgaagagtgcgttgaagcaacaaaggaatacatccatggcgaacaatatagatcagac

SEQ ID NO: 35645 - DNA, 260 bp, Glycine max
  unsure (1)..(260): unsure at all n locations; Clone ID: 701109527H1
tcgaatcttttgaaacccctctcgtcgtacttatccctacnacgccgttcggtgtcgacctcgtcggagcccctcaccgtggagacctcggtgcccttcacctcccacaactgcgacgcgcctccacncgccgtggagacgtcctcggcggagtcttctcgttcttccgtnacatggcgctgatgcggcggatggagatcgcggcggactcgctctacaaggccaagctcatacgcggcttctgccacctctacgatggc

SEQ ID NO: 35646 - DNA, 262 bp, Glycine max
  Clone ID: 701109528H1
taagcttaatataccttcaccagggatcaatacaatataatggttcaaacatgctaacggtgtatgctcctagagctattctgaagtgtcatttacaccaagattcagcttctgctcaacaagcatatccatgcaagatcaataataatgctaatttggtgaattgtaatcctaaaccttttggcactccttgtagtaatatattgtttcatagttcctcctctgggaaatgtgataagctacaaaagagccttcatctatt

SEQ ID NO: 35647 - DNA, 262 bp, Glycine max
  Clone ID: 701109529H1
gcaagctcatcctagagttttaaaaatggcagcagcctcctccatggctctctcttccccatccttggctggcaaggccgtgaagctgggcccatcagcccccgaagtcgggagggtcagcatgaggaagaccgtcaccaagcaggcctcctccggaagcccatggtacggcccagaccgcgtcaagtacttgggcccattctctggcgagcccccgtcctacctcactggcgagttcccaggtgactacggctgggacact

SEQ ID NO: 35648 - DNA, 224 bp, Glycine max
  unsure (1)..(224): unsure at all n locations; Clone ID: 701109530H1
tcttagatctnttctttctgctacgccgcacgccgaaaccatggccggaaaaggagagggtcctgctatcggaatcgatctcggaaccacctactcttgtcgtcggtgtgtggcaacatgaccgcgttgaaatcatcgccaacgaccaagggaacagaaccacgccgtcttacgtcggattcactgacaccgagcgtctcatcggtgatgcggccaagaatcaa

SEQ ID NO: 35649 - DNA, 265 bp, Glycine max
  Clone ID: 701109531H1
taactttacctttctatcctcatggagtagtaaagaagtaactaatcaaccacaaacctaaacaaccccttttgcctaaagctccttccttttctccaatggcaacctgggttttatcagaatgtggcttaaggcctcttccaccagtgtttccacggtcaacaagacccatttcgtgccaaaaaccttcaaagtctagatttttaagcacaaacaagggtgtgccagatctgaatctccaagcaagagggttaacatgctgtag

SEQ ID NO: 35650 - DNA, 256 bp, Glycine max
  unsure (1)..(256): unsure at all n locations; Clone ID: 701109532H1
ctttctcgcattttccctcttctttctctctcacgtnttccgcttcagttttancgngaaaatcatggtgaaaggtccaggcctctactctgacattggcaagagagctcgcgatcttctgttcaaggattatcagaatgaccacaagttcaccatcaccacttacacttccaccggagtggaaatcncttcaactggagtcaggaaaggtgagatatatttggccgatgtcagcactaaggtgaagaacaagaac

SEQ ID NO: 35651 - DNA, 270 bp, Glycine max
  unsure (1)..(270): unsure at all n locations; Clone ID: 701109533H1
ggataagacccctctctctctctcacacacacaaacacanaaaaaacaaagcaaaaaaaantctcaaaataaaacaaccaaaccacacacctcanacccttcttcaanatcctcagcnnnnnnnnnnnnnnnnnnnnnnnacaatgtcttgctccaatntgacaatgttggtgtctcaaaancttcccttttccgancctcggnagntctncttnggtntgtctggnancttttnngctccctaacacaaaacccagntntggaaccctt

SEQ ID NO: 35652 - DNA, 265 bp, Glycine max
  unsure (1)..(265): unsure at all n locations; Clone ID: 701109534H1
tagaattttgttagttatgtatctgtntttcntttttcaagcagccctagctagtttttgaggaagggagaaaacccttcaatttgaatatggatgatgattggtggggaaatcttgtgtcttgcgccaaggctcactctctgnttctttngtttccaagtattttncttccgattattcagcagactttgggtgtattaaactattcgtggnctnattgtnattttttagcaactataaaancggaaaancttgggnatggagg

SEQ ID NO: 35653 - DNA, 258 bp, Glycine max
  Clone ID: 701109535H1
tgtgtcaagagcaaagagccaagagggtgcaattacatgagctgaaagaagtaacgcaaaagcccctttatttttaatggttagaacttagaagctgattgtgacaatggatgctcgtggagaagggtcttctacttcttactacaacgttcttggtgttagctcagattctaacgtggatgagattagacgtgcttataggaagctggctatgcaatggcatcctgataagtgcacaaggtcgccttctttgctggg

SEQ ID NO: 35654 - DNA, 268 bp, Glycine max
  unsure (1)..(268): unsure at all n locations; Clone ID: 701109536H1
gantttcattgctcctctctcgctctctatcttccanttcttttcaagntnccttctctacttcactcactagggagaaactctggcaagtggggaaactttaacagattcagcactgcagcagcagttgaggatttaatcactccacaagttccaataacatacantanaccatctgataaatggacaatttgtggatgctgcttcagggaaaacttttccaacatatgacccacgcacaggagaagtgattggctcaagttgctga

SEQ ID NO: 35655 - DNA, 264 bp, Glycine max
  unsure (1)..(264): unsure at all n locations; Clone ID: 701109537H1
tcacacacaactacaaganngaacttccttataaccaaaaccaanaacaactatggcaagttatcagaagcattacgatgatcagggtcgcaaggtcgacgagtatggcaatgttgagaggcaaactgacgaatatggcaacccggttcatgccactagtgtcacttatgtagccaccaaaagtgttggtggctacaatgatgacgctaataagcaacatgatattactggtgtctatcccgagaaagacaccggtagacatct

SEQ ID NO: 35656 - DNA, 264 bp, Glycine max
  Clone ID: 701109538H1
caacttacggctaaattctcaaagatttaaactttgtctcagagtttccaaattcacccaaccccagagagaaaatgtctctaatcccaaatttcttcggtggcagaaggagcaacgttttcgatcctttttccctcgacgtctgggaccccttcaaggattttcctttcccaaacactctttcttcagcttcctttcctgaattttctcgggaaaattctgcattcgtgagcactcgtgtggattggaaggagaccccagaag

SEQ ID NO: 35657 - DNA, 267 bp, Glycine max
  unsure (1)..(267): unsure at all n locations; Clone ID: 701109539H1
ggcgccgcacaaacatattcacaagaagatgangaaaacactctttcgtcgcaccaacgtcagtgcttgtgtcacgtttaagtgttttccatttgcgtccaggcccacccatcntcgaaattaacacggtttttgggtnccntgtgaagatgaancgtgaccttaangctattacccctttcaagcncntcncatgttaagggggntgttgggaatgatnaaccaggncttggtatgttcaaganctnggtccgctgnngcctgccc

SEQ ID NO: 35658 - DNA, 262 bp, Glycine max
  unsure (1)..(262): unsure at all n locations; Clone ID: 701109540H1
tttctccaccgtccattgcaaagtcttgcgcccaatttccatggaactgtaaagannaggatagttagaagattaaatcttaaagcagtaagtcatcatggataaatcagnnnnnnnnnnnnnnnnnnnnnnnnnnnnnnntgtgatgggagttgccgcaggggctagccaaatggcctattcttctcactacccgactgcttccatggtggcttctggcacgcccgctgtaactgctcctccccaactcaggctccagctg

SEQ ID NO: 35659 - DNA, 260 bp, Glycine max
  Clone ID: 701109542H1
tacttactgagtgcttgcagttgctgcgtcgcaaggtaccggcggcgacggagagctatcttctcaatttccgatcactgcattggttctgttgacgagggttttgttctacttgacttgcatacttgatggcgtcaaagttgcagaagttgcagtccgcagcatgtcaagcatctcaatttgtatccagtcgtggaactaactactacaggcaattgctggaacagaacaagcaacacattcaggagcctcctacagta

SEQ ID NO: 35660 - DNA, 259 bp, Glycine max
  unsure (1)..(259): unsure at all n locations; Clone ID: 701109543H1
tcaaaganggcgtcttcataaacgcctttcttctccgtttccgtttcctcgttcgaattcgctttttgatctgcgaaaatgagagagtgcatctcgatccacattggtcaggctggtatccaggtcggaaatgcttgctgggagctctactgcctcgagcacggcatcgngcccgatgggcaaatgccaagtgacaagacagttggcggtggtgatgatgctttcaatactttcttcagcgagactggtgctggaaagc

SEQ ID NO: 35661 - DNA, 260 bp, Glycine max
  unsure (1)..(260): unsure at all n locations; Clone ID: 701109545H1
gtgagacttcacttattcttttttcttccaatttcccttcactcctaaaaacttttttaggagggaangggggcaatggaaccacataagaaacaccattttggaacctccaacgtccccatgctagtacaacattgttgtcttattagcatcttcatcttcaccntcttcactgccaccaccacccaagcttttgattatgctgatgccctttcaaagagtcttntctactttgaagcacaacgctctgggaggatacc

SEQ ID NO: 35662 - DNA, 261 bp, Glycine max
  Clone ID: 701109546H1
acccttctttctttcaggttcattacttgatcagtgtcaaaagggtagttgcaaattgcaatggctaagcatgatgttgagggtggttccttctcagcaaaggactaccatgatcctcctccagcacctttgattgatgctgaggaactcacacagtggtccttctacagggctttgattgctgaattcattgccacattacttttcctttacatcacagtggctcactgtgattggttacaagagccagagtgatgtcaa

SEQ ID NO: 35663 - DNA, 261 bp, Glycine max
  unsure (1)..(261): unsure at all n locations; Clone ID: 701109547H1
ggcaatgcttggtgcccttggctgcaccttcccagagatccttgagaagaatggtgtcaaattcggcgaggccgtgtggntcaaggccggtgcacagatcttctcagagggaggccttgactacttgggcaacccaaacctgatccatgctcagagcatccttgctatctgggctgttcaggttgtgctcatggggtttgttgaaggttacagngttggtggaggaccacttggtgaaggacttgacccaatctaccctgg

SEQ ID NO: 35664 - DNA, 260 bp, Glycine max
  unsure (1)..(260): unsure at all n locations; Clone ID: 701109548H1
ttgaaagtgnactgaggaagtggagaggcaagtggctgtgactaggcctgtgagaatgcattggactggctgccccaacacttgtggccaggtgcaagttgctgacattggtttcatggggtgcatggctagggatgagaatggtaaggccactgaaggtgtggatattttcctgggagggagaattggaagtgattcacatctagctgaggtgtataagaagggtgtgcctgcaagaacttggtgcctattgtggtaga

SEQ ID NO: 35665 - DNA, 267 bp, Glycine max
  unsure (1)..(267): unsure at all n locations; Clone ID: 701109549H1
caaacttccgattgggctcaacaagaagaagaacagagcctcgctgaaaccgaagcgggcctggaaagttgggagcccaacggcgaagacgccggcgatgagagcttcgtcgaaccgccggaagaggccaagctcttcgttgggaacttgccttacnacgttgatagccagaaattggccatgcttttcgaacaggccggaaccgttgaaatcgctgaggttatttataacagggaaactgaccagagtcgcgggtttgggttgtga

SEQ ID NO: 35666 - DNA, 266 bp, Glycine max
  unsure (1)..(266): unsure at all n locations; Clone ID: 701109550H1
cttctgttctgatccaggtatggcttctaaacgcatcttgaagganctcaaggatttgcagaaggatcctcctacctcatgcagtgcaggccctgtggctgaggacatgtttcactggcaagccacaatcatgggacctgctgatagcccatatgcaggtggtgttttcctagtttcaattcattttcctcctgactatcccttcaagccaccaaaggttgcttttcggactaaggtgttccacccaaacatcaacagcaatggca

SEQ ID NO: 35667 - DNA, 153 bp, Glycine max
  unsure (1)..(153): unsure at all n locations; Clone ID: 701109551H1
ctctgtttttacaccgtagaagaggtattttgatggacaatttgaggaaacttgaagctatggtatgtgaatgtaatataatttggattggatgattcanaataanactagctgtttgcagctagtagtgtgcacctctgtggcctgtgcatt

SEQ ID NO: 35668 - DNA, 263 bp, Glycine max
  Clone ID: 701109553H1
cacaatcagtctgagattcgccaccgaaaaacctctcaccatggtttctcgccatttggtttcgctcttcctctgtttcctctgtttcgagatctctgtttcatcaattcgattgcccggtttggaccaagacgccaaggccacgcatggatcggtgcttaggttgaacagaggaggctcttcagtgaagtttgatcccacacgggtcactcagctctcgtggagtcccagggcttttctctacaagggctttttatccgatg

SEQ ID NO: 35669 - DNA, 263 bp, Glycine max
  unsure (1)..(263): unsure at all n locations; Clone ID: 701109554H1
cagantcagagtggatctgancagaaagaaaaaacttgatatataanacaccagcagcttcctatggagtattgaatctcaatgtanttgtcttcaatcaagtggtggatctgaatcagcagaggcagatggcgagagcaagttctggtctgcaatacccagagcggttctacgctgcggcgtcttatgtggggtttgatggatcctctccaaccaaatccctcacctccaaattcccccagtccaccgntcttcttctctac

SEQ ID NO: 35670 - DNA, 262 bp, Glycine max
  Clone ID: 701109555H1
ctcacttccttgcctactacacattcttcatcacttcattcaacatttctccccttagcttgtttcaccaatggctgctgcggttagtgctgcagtctcttttccatccaccaagtctacctctcttccaagcaggacctccctcattgccccagagagagttgtgttcaagaaggcttcattgcaaaacagagatgtttctagcagtggacgggtagtttccatcagagctcaagtcaccactgaggcaccagccaaggtt

SEQ ID NO: 35671 - DNA, 261 bp, Glycine max
  unsure (1)..(261): unsure at all n locations; Clone ID: 701109557H1
ctnatatttttctnactatctctccatagaacttgntaanagananggcagctgnaaaatctggtgctgtgttaaatgggttgggatcttccttcttgagtggagnaaacagganccaaacccttctgggccantggctattggaggcaaagttggtgctgctgttactgttaatcccagaagactcattgtggtagctgctgctgcaccaaagaagtcatgngctcccnggtgttagagtggtggcaatctcgtcgaccc

SEQ ID NO: 35672 - DNA, 260 bp, Glycine max
  unsure (1)..(260): unsure at all n locations; Clone ID: 701109561H1
gtttacaccgagcagccacacctcccgcagcagccatggttctgcaaaactgaactatgccgattcagtggtgccaagatctacccaggaaagggcatcagatttgttcgttgtgattctaggttttnctgtttgcaaactcaaaatgtaagangtatttccacaatcgcctgaagccttcaaagctcacctggactgcaatgtacagaaagcnacacaaaaaggacattgctcaagaagctgtgaggaagaggagacgt

SEQ ID NO: 35673 - DNA, 238 bp, Glycine max
  unsure (1)..(238): unsure at all n locations; Clone ID: 701109562H1
aataaaaccacacanacactntggcanaccattctgcagtatcactagggttttatattattcatccatggcgctaancgttttctctctcttntttttcttcctctccttcaccttccaccttccctcctgntncctcagggcaatcgagctccatggaatnagtgcctgatcttcagaacactatgtacgcttccatcgacggttatccttgcgtgcgcctggatgaatctctctg

SEQ ID NO: 35674 - DNA, 260 bp, Glycine max
  unsure (1)..(260): unsure at all n locations; Clone ID: 701109563H1
atcattgagggatggcatatattccaaggaagtggttagtgtgtcaaagattttaaggngaattcctgggaatgataaatgtgctgagtgcagtgctcctgatccagactgngcatctctaaaccttggcatattgctgtgtattgaatgctctggagtncatcgaaatcttggtgttcatgtctcaaaggtgagatctataacattagatgttagggtttgggaaaataccgttctagagttatttgataacttaggna

SEQ ID NO: 35675 - DNA, 263 bp, Glycine max
  unsure (1)..(263): unsure at all n locations; Clone ID: 701109564H1
cttcttcttatccgagatactgttaaatatcaactctgttgctaaaacatgatactcactcaacctgggatcacaatggcaggacagtgtcaggaaggacattggtgaagtgctcattggaagtcccaagtaaggttctnacaaagcatgtcttatccgggcttgctgcttccttgatatttatttctccagcaaatcagactattgcagcagatctatctcgtgcaccaaataatctatgccaattgccagtgccagtgaga

SEQ ID NO: 35676 - DNA, 267 bp, Glycine max
  unsure (1)..(267): unsure at all n locations; Clone ID: 701109565H1
ctatcttcactaacatgtcctctttaacgttcacaacggaggtagcatccagcttcctcggnctcgnttatcacaatcccaaacccttcactctctcantccaaaccantnttctccctcttctacgcagaacaaccantcattcccgatcgctaacatttcctctccgaccctctcgccgcttcttcgttacctccgccaccactgcacctcctcaatccgaggntttccgacgtttccaccgtcnttcctcccgacaatcgcata

SEQ ID NO: 35677 - DNA, 265 bp, Glycine max
  unsure (1)..(265): unsure at all n locations; Clone ID: 701109566H1
ttcagcatcgccttcctaaattcaacgactccgttccgttccctttcttcttcctgcgaaaccctaatcagcttctgcacttcntggctgattccactttngnttctaccnggaagatactgtagggcctnggccacctaatgataagatatccaatttctacataagtttccattgatacttttttaatcaaaatggattcagtgcctgctgatgtgtctaattcacatcctatcagtgaaccgtcgaattctcctccagctga

SEQ ID NO: 35678 - DNA, 157 bp, Glycine max
  Clone ID: 701109568H1
cttcttcttttcacactgccgctgcaacaatggcttcagagaagaaactttcgaacccaatgagggagataaaagtgcagaagctcgttctcaatatctctgttggcgagagtggagatcgtctcaccagagccgccaaggttcacttcactcattg

SEQ ID NO: 35679 - DNA, 262 bp, Glycine max
  unsure (1)..(262): unsure at all n locations; Clone ID: 701109569H1
ctagctattagctatagctagangtccctccaatccctctttgtctntgtgcttttctagttccttccaaaataccaacaaaagcaaagacaatgagttgccaagcatggcccgaacccatagttcgagtccaatccttagctgaaagtggcctaagttcaatcccttcacgctacattaggcctcactcccaaagacnctccaataccanttcttttccaactcctaaaccttttcaaantgatcatcatcatggtcatga

SEQ ID NO: 35680 - DNA, 259 bp, Glycine max
  Clone ID: 701109570H1
ggaagaagaacttagctacaagctaaggaaggatcaaagagaatggctcaagcaatggcatcaatgactagcttacgtggttcctctcaggctgtgttggaaggtagccttggctccacacgcttgaatgtggggagtggaagcagggtggcctcagtcacacgtgcagggttcacagttagagcacagcaacaacaagttaatggtggtgaggtacaaagtagccgtagggcagtgcttcacttgttgctgctggttt

SEQ ID NO: 35681 - DNA, 262 bp, Glycine max
  unsure (1)..(262): unsure at all n locations; Clone ID: 701109571H1
aaaccagctttgagacagttatggctcacggtgcttacagcaagcngcgcgtgagccaaacgcgtagatccaaactccaagcctctcggcatcgccaagaagtccaaaccctccgtttccctcaaaaaccagattcgntcccttnagcgcatgctccgcaagaacctgcctcccgaggtgcgcgaggcgcaggagcaaaagttggaggcactgaagaagcagcaggagattcacacgcgcctcgccgccgaacgcaagatat

SEQ ID NO: 35682 - DNA, 258 bp, Glycine max
  Clone ID: 701109572H1
tgttctctaatcttgtaattttctgtgtcgcttcgtggttcattcttctcgttcttgtgatccgttctattttggagtacttacaacactcctttgcaagtttaattaattaaagaggctaatcaattttcaattggactgcagcagatggctgaggagggttgcagggttactctaaatgtttatgacttgagccaaggactagcacggcagctttcaatgtcctttttggggaaagctattgaaggcatatggcac

SEQ ID NO: 35683 - DNA, 257 bp, Glycine max
  unsure (1)..(257): unsure at all n locations; Clone ID: 701109573H1
tttntctgtcagtgaaggantccctttcatattttcccttcctcaactaaggntttaaaacnatttaatatttgggctgttgagattaaggctaggatctggctcctctgaagtgtatgtgaactttagagggantagtgaggggttataactgtttgttggaaaatctagagtagattttaacttcatanattgttatgaatatgcntatatttgatcaaaatttaagcctttgatttataaccaatggttataaa

SEQ ID NO: 35684 - DNA, 257 bp, Glycine max
  unsure (1)..(257): unsure at all n locations; Clone ID: 701109574H1
ganaatgcaaatctggagtttgtgggggtgattagggcaaagcagcaggtggtggaagggttcatatactacatcactttggaagcaaaagatggtgaaaccaaaaatgtgtatgaaacgaaggtgtgggtgagatcatggttgaactccaaggaggtcctcgaattcaagcccatcagtattaatcctctttcggtgtcggtctagtctttataaggttacagaaataaatggtcgcaaggtnaaagttgtactaa

SEQ ID NO: 35685 - DNA, 260 bp, Glycine max
  Clone ID: 701109575H1
agaaaaacagatagtgtgggagagagaagagcggaagagaaaatgacgaccaggttcaagaagaacaggaagaagagaggtcacgtcagcgccggacacggccgtatcggaaagcaccgcaagcatcccggaggtcgcggtaacgccggtggcatgcatcaccaccgtatcctcttcgacaagtaccatcctggtttcttcgggaaggtaggcatgcgctacttccacaaacttcgcaacaaattctacaatccgatcat

SEQ ID NO: 35686 - DNA, 257 bp, Glycine max
  unsure (1)..(257): unsure at all n locations; Clone ID: 701109576H1
gaacaatgatgagctacatgtggttatgttcccattccttggcatttggccacattagtccatttgttcagctctccaacaagttgttctctcatggtgttcatgtcactttcttgtcagctgcatccaacattcccagaatcagatcaactcttaatctcaatccagccatcaatgttntctcactaaagttcccaaatggtataaccaacactgctgaattgccacctcacttagctggaaatctcatacacgcc

SEQ ID NO: 35687 - DNA, 249 bp, Glycine max
  unsure (1)..(249): unsure at all n locations; Clone ID: 701109577H1
tagcattgttcctcaacgcacacacaagaaaaaaactccttgtatattgttgcagctctagctagggtttcgcaagtgcgatcgaagaagaacaacgacgatggcgatggctgcagctctgcgtcgcgaaggaaggcgtttgacccaaccaatcaacgccctacactcttctctcaattcctccctcatctctcaagaccaagcccctcatggcgcgcgctccatttccactcaagttgtnaggaaccg

SEQ ID NO: 35688 - DNA, 257 bp, Glycine max
  unsure (1)..(257): unsure at all n locations; Clone ID: 701109578H1
tgtcaganatgaaaatctgcaccaccttttgtgtgtcactggccacggttttggtgatgatgagcaacatcgtcatggcagtggctganactcacattcccaccaccctggatggcccatttgacccggtgacccgacggttcgacccgtcactgcgacggggcagtgatgacttgcctatgactcatccaangctcagaaagaatgtcacttcaaacttccctgaacagattgctcttgcantttcttcaccaact

SEQ ID NO: 35689 - DNA, 259 bp, Glycine max
  Clone ID: 701109579H1
cgaatatcttgttgtttggagcgatccgagaaaaactctgtaaacatgttggtttaccaggacctccttacaggtgatgagcttctctctgactccttccgttacaaggaaattgagaatggaatgctgtgggaagttgaggggaagtgggttgttaaaggagcagttgatgtagacattggtgcaaacccttctggctgagggtggaggagaagatgagggagttgatgatgcagctgttaaggttgttgacattgtt

SEQ ID NO: 35690 - DNA, 265 bp, Glycine max
  unsure (1)..(265): unsure at all n locations; Clone ID: 701109581H1
ctactactcactcactgcagatctcaattgcatcgctgtccatggcnaccatcgttagcatcaaggcccgccagatcttcgacagtcgtggcaatccaactgtcgaggtggatttgacttgctccgatggtacttttgccagagctgctgttccaagtggtgcatccactgggatttatgaggcccttgaattgagagatggaggatctgactaccttggaaagggtgtatcaaaggctgttnncaatgtgaacaccgtcattgg

SEQ ID NO: 35691 - DNA, 279 bp, Glycine max
  unsure (1)..(279): unsure at all n locations; Clone ID: 701109582H1
tcaaaactcattttccagaaaagcgtgctgctganatcntacatggtcttgggctntgacaagcaaatgcatngnaaagaanacacgtgatttttccggtgggctggagaatgaggattgcattagcgcnagctctatttatnnancccanccattcttctacttgatggaacnanccagtcatccttgaatttggaagcctgtggtgtgggctggaggagaagtttgaggnaggtgttgaacngtattntgggtggtgaatttcacatcctnngggnt

SEQ ID NO: 35692 - DNA, 266 bp, Glycine max
  unsure (1)..(266): unsure at all n locations; Clone ID: 701109583H1
ctggctatcgaatactcngataagngaggaacatcttttcaatggcgtcccaaattcacccgtgagtggtctggaatncaatacattcgnacctgctacccagactaagttgncntgaactcttgggaaaacttaaacaagagaatgtgaactccttaactatacttgtgatgggaaaaggtggtgttggaaaatctcaactgtgaactccatcattggggatagagtggtttcgataatcctttccagtcggaagggccaagacc

SEQ ID NO: 35693 - DNA, 259 bp, Glycine max
  Clone ID: 701109586H1
tggaaagtggagtacccttccttgactgtctcttgcaaaacactcttagaagcatttgctcatttcccacttcttcaacttcttccaagtgggtgtatgcagtcttctggaggatagtacctcgaaactttcctccgcctaggtgggaatttggaggaacagctcttgatcgctcaaagggaaacaaaagaaactggatccttgtatgggaagatggtttctgcgattttaatgaatgtgaacaagggaggaatggatg

SEQ ID NO: 35694 - DNA, 261 bp, Glycine max
  unsure (1)..(261): unsure at all n locations; Clone ID: 701109587H1
aagaagaaaaatcccaatgattgtgactcgttctgctttgatgctccatctccaaaacccaccaattcgctaccacttnttctcccacttcagctatgctcccaccttccctactctattcaaacctcgccctttctctccaaccactccacgccaagcacaaaccagaacctttgtaagcgctgttgnnnnnnnnnnnnnnnnnnnncatggttccaatgggcagagacactttctttgcagaagaaaacgtttcgtgga

SEQ ID NO: 35695 - DNA, 237 bp, Glycine max
  Clone ID: 701109588H1
cttcgaatcgaaactcagaagtagaaaaaaacacaaattcacaatgcgctatggctaggtacgaccgagcaatcaccgtgttctcccctgacggccatctcttccaggtcgagtacgccctcgaagccgtccgcaagggcaacgccgccgtgcggcgtccgcggcaccgacaatgttgtcctcggcgtcgagaagaaatccaccgccaaactccaagactccaggtcggtgaggaag

SEQ ID NO: 35696 - DNA, 259 bp, Glycine max
  unsure (1)..(259): unsure at all n locations; Clone ID: 701109589H1
cgagaggtacttgctcacagatatattttttttttgtctccatcattttctccgagagctttcagtttctgtggttcatctttcttcttcttaatctttccccccctctctgtaacatcccgcttctctgaatccctttctgntaatcatctgtctttcaagctaagattttctggtttgtcttttaattcaccaaaaagcaaacttagaaggatttttcgaaagccaggtgttttcagaaacgngatccaggttttat

SEQ ID NO: 35697 - DNA, 257 bp, Glycine max
  unsure (1)..(257): unsure at all n locations; Clone ID: 701109590H1
ctaggattatctattaaggtggggtaacagacaccatttaatggttggttcccttgttctggacataacataactccactgtacaatgttgtccttgttatcgtattctatcagtaagantgtctgcaagattgcatgtctttcttggcttcaccaataggaagatataccagtcattntgcatgactaccgaatttcttaaaacaaattttcagataaattattatcggtgtcctttcttctgcatctttctaaac

SEQ ID NO: 35698 - DNA, 259 bp, Glycine max
  unsure (1)..(259): unsure at all n locations; Clone ID: 701109591H1
ttcagtgtctaatagagantctgtaaaagangaagcaactagtgtgcccgaatcgcccttgcctgtccaaaacaagcctcctgagcaggataactatgccgaaacaagaagccaaacaagagggaanatcagaaatagaaccggaaaaggaacaggataagaagaaacagaagaaacgtggttcagtgaagagagtttctagcgcagggcttcgtgttgattctgtgttgcaaagagagaccgataatttcaaggagtt

SEQ ID NO: 35699 - DNA, 259 bp, Glycine max
  Clone ID: 701109594H1
gcggaggagaagagggagcaactctggagttcactccgacgtgggttgtggccgccttttgcacagtcatcgtcgccatttccctcgccgctgagcgcctccttcattatggcggaaagtttctcaaagccaaggaccagaagccgctctacgaagctctccagaagatcaaagaagagctgatgcttttggggttcatttccctgcttttgacggttacacaaaacggcattaccaaaatctgcgttcgaccctcttt

SEQ ID NO: 35700 - DNA, 261 bp, Glycine max
  unsure (1)..(261): unsure at all n locations; Clone ID: 701109596H1
gtgtctcananggtctgtgacacacagactcacttccaagttccaagctttggccatttattcccactgtttattgagaacaactgcagaacatggcacagattttggctccctctacgcaatggcagatgagaatctcaaaatcctctcccaatgcaagtcccattacatcaaacatgtggaattctttattgtggaaacaaaataagaaagtttcacccacaagttctgctaaatttagagtgatggcaattaagtctg

SEQ ID NO: 35701 - DNA, 282 bp, Glycine max
  unsure (1)..(282): unsure at all n locations; Clone ID: 701109601H1
gataacaccaatacctcaactcaaacgcttgtntcgcctaaccnaaggaaactccactggcggnttccctttgcttcctctgtctttcactantctcttttctcaatagggaacaagaaaaatggaagttgcggcngcgaaagcgctgaaaccaagctgcggacagagttantttccctcaagcaattacgacgagatttttatgtnttaacgcgaacangttgttgncngtgaagattcctccaggacgacttacttgacttttccaacggggnttccaag

SEQ ID NO: 35702 - DNA, 280 bp, Glycine max
  unsure (1)..(280): unsure at all n locations; Clone ID: 701109602H1
ctgcaacgtncccaacantgtggtcctgtncttcttcttcnatggcngcaacctcaacatcactggnttctcaactntacattggcctgcgctgnncatgcctcaagctggnttcnttcaattctcaatcttnctctgtnttngaanncaatcttcgactatccctctcttctcccaganctcacgcgccatcgtngccatggcagggnaacnggcaagttctttgttggcgncaactggaagngtaagnnanaaaagactccatgagtnagnttnttgc

SEQ ID NO: 35703 - DNA, 284 bp, Glycine max
  unsure (1)..(284): unsure at all n locations; Clone ID: 701109603H1
gagnacttgcaaactagttttgttttgggaacatcntcagattaacattagattggtggtaatggncancgtgcactanaagcagcagctactntcatncaacccaccaagttgagcaggagcaacactttgcagnaaaagtctactcagtcctttccaaggcttttggttnggaacctgttgggagctaaaaaggtcacatgctcccttcaggctgatcttaaggacttggctcacaatgtgttgntgccaaccaagattgcnggattcgcccttggcacctc

SEQ ID NO: 35704 - DNA, 272 bp, Glycine max
  unsure (1)..(272): unsure at all n locations; Clone ID: 701109609H1
catgtggctgcctcaagtgatgaagtagatgaattttcttctcatatagcaacagagagtagtagtgttatgtcatgtttagttttttgtagcctctttcaatatggaggaaatttatccgcttcatcactggatggtaaacctcattctagnctataggactttatagcatgtanagtcttgttaaaaatcttngtgacgcttgatgtgaattgcggttnataaatggatangccaatgtgtntataaggattaancgttaacancataat

SEQ ID NO: 35705 - DNA, 276 bp, Glycine max
  unsure (1)..(276): unsure at all n locations; Clone ID: 701109611H1
tcaaatattcctattccaattccaatcctattcctttcgattccncttcccccagtttggaaattttgttgctggaagaattgcttaagggcatataactggctttaatcacatgggatcagagagtgcggntccaatggttgacnacatcaagaaacaggtctcttctgataaaatgaaccaagggaaagtccccaggacaattcacaaggctgaaagggaganaatgaagcgtgagctttgaacgatctcnttcttgancttgccagtgnantt

SEQ ID NO: 35706 - DNA, 278 bp, Glycine max
  unsure (1)..(278): unsure at all n locations; Clone ID: 701109612H1
gcttcggacanagcggggttgttgttactccgaagcgntgtggggggacgcacggtgttatggnactcgncccaaacaagcccgtnttcnnngancggcntgntttgctgcagnggagantnattntgttgngtcttcccgcgatgggtctctcccggttcgcttccctccgtttgggcnaacctnaccgaactgcanacacttcccnnccggttnaangcgcnaacnngangaatccccgaaggatttcgcaaaccngaaatctntccncnacctnt

SEQ ID NO: 35707 - DNA, 262 bp, Glycine max
  unsure (1)..(262): unsure at all n locations; Clone ID: 701109613H1
caaaggttgctgtaggagataagaacngcagtagtgcnaagacntaacacctgcantgaananangngcctctggatcagcattctctgctcaagtcttcacttgttcttggacaagtctgagtgggtgaanggacaaacccttcgccaaccttctgcatcattgtgagatgccaaccccaccaccccatcagggctcaccatcagagctggttncctatggctgngagctcgtnaagacgcgaaaacnttggcttcaccag

SEQ ID NO: 35708 - DNA, 285 bp, Glycine max
  unsure (1)..(285): unsure at all n locations; Clone ID: 701109614H1
ctccttggcaacatactactaagctagaaanacataaacaaagtgggttgatttagntttgaccaanagctttgctaccncnntggnagtttattggaagacannngttgtcatcatggggntaacacttccctgggatctcagcattantnccncgcagagtttcatggaagaangctgttcctaaggtggtagaaagcaagcttttctgcnttgggaatgcccaagtttancgtcgaagaagaggctactagtggntnggaggngggnctgnngcgggtgagt

SEQ ID NO: 35709 - DNA, 260 bp, Glycine max
  unsure (1)..(260): unsure at all n locations; Clone ID: 701109615H1
ttaaaagggagtttgagtacgagaacncaatgcgcttgtgacnaagttttatggacacattntccgtctgagcatntgcacctgtatgtatgtgtggcaatcttgaaacgatatcgtggtanaataattggagagcaaatggacttcgncacccttttgaagtttattaatgagttaagtggtcacatcgatcttgatgcaaccctcagagatgcagaggctctatgtatatgtgccggtgagaacggtgctgctcgtat

SEQ ID NO: 35710 - DNA, 282 bp, Glycine max
  unsure (1)..(282): unsure at all n locations; Clone ID: 701109616H1
atttaactgttcccaaggaaccaaagtttcagagtctacatgtgccaaaggactgcaccaccaggaaacacacataagagntncttcacctacaagtaaaactncaggttnccgtttcacaggcctttttcgcgggggaaggaaggatttaactgttcccagggaaccanagtntcagantctacaagtgcccaaaggacgttgggggtggaggnagggatgttgttcatataatcattgnattttagcagctttgggaaaatggtngntgatgttgttgnc

SEQ ID NO: 35711 - DNA, 278 bp, Glycine max
  unsure (1)..(278): unsure at all n locations; Clone ID: 701109617H1
tgcgncgatggcttttncagttancgcccaagataataacggtgtcattcgataagcaanaccaaaggaggantttcgaaggattcnttgggaaaaggtatcgggtaagggtgaagncnaagtcaagatcattcagtgaagtntggtattgancgaancagcagcgatggaaagaaagggggcggaggaggangcgtgtcaattcgaactacgtggtgccgctggacaacatggcgaactcatcctgncataacacgtctttagccgagatactcagg

SEQ ID NO: 35712 - DNA, 280 bp, Glycine max
  unsure (1)..(280): unsure at all n locations; Clone ID: 701109618H1
ccatcactgcagcattagggtttatcatctggcntcaatggggaagggaacagggagctttcggtaagaggaggaacaagacccanactctctgtgtgaggtgtggccgccgncagctttccaccctccagaagagttcgctgcgccgcttgtgctttcccccggtgngacgcangcggaaatatanctggagcgtcaaggcaattcgcaganagnccaccgganctggcaggatgagtattgcntaagtgcctcgccgtttcaaaatggcttcagagaa

SEQ ID NO: 35713 - DNA, 275 bp, Glycine max
  unsure (1)..(275): unsure at all n locations; Clone ID: 701109620H1
aatcgggtncgangtacaaaanaatanagccnagnggaccnnttncaananacatgcnnatnataccntgtatgaanctatcaangtcctggangcaagagacgcattcaggtcnccacnaccgggttggaatcggacaaggnaaggcgccagtaaatgctaaccgtaatccnagaatagangtaanaggntagcntttactcctcctggaccaagatactcaatgccttcccatgtagaatatctgcnatcctcttcctaatgctccnaatacc

SEQ ID NO: 35714 - DNA, 51 bp, Glycine max
  unsure (1)..(51): unsure at all n locations; Clone ID: 701109623H1
gatcaccaatggcagtggcgaatctngnagagantggtcctcgtaagtnna

SEQ ID NO: 35715 - DNA, 267 bp, Glycine max
  unsure (1)..(267): unsure at all n locations; Clone ID: 701109625H1
attaaaatattggcacaggtggtggaggagacttggaaccggagagatcaagtggttgatccgacggtgtacacgggactgttgggcaccgcctttacttgcttgcggtcctaccaggttaccggttgccgganacgacttaatattatccagcgaaatcattgacacgtgtgtcaccgctgcacgtgcctccctcaggcacgtgactttttgtgtggtagaggaggcgtttatgcgcttggtgctgtcgtnnccaattacatgggg

SEQ ID NO: 35716 - DNA, 275 bp, Glycine max
  unsure (1)..(275): unsure at all n locations; Clone ID: 701109626H1
gcccttcccaattgagaaggcccccactaagagaattgcaagtgtaaatggtggggtgaagatatctgaactgttgaagtatncggttagaggctttgtctttgagggcggcgaaatgctggaagatctatcaaacgttgtttcagatgcatgtatatgtcttcagaacaacaacatacctttcaatgttcttatctctgactgtggaaagcaagtgtatctgttaccacagtgttatgcagagaaacaagctcttggagaagtgaatgctgagc

SEQ ID NO: 35717 - DNA, 274 bp, Glycine max
  Clone ID: 701109627H1
caactagcaagggaagaaagaaactacagaaaagaaatggcttccacttctgcagtttcaatggctatgccagtaacttatgctagccagaagagggtggtgcctagctcggatgcattcttcaagccactgcctctacggtcttccaaggcagtgacagcatcaaaactcaatggaaggtttcaagtgagggcctccatgaaggagaaattgtgacggggctcaccgcagctgcattgacagcttcatgatggttcctgatgtggctgaggct

SEQ ID NO: 35718 - DNA, 275 bp, Glycine max
  unsure (1)..(275): unsure at all n locations; Clone ID: 701109629H1
agcacntcagaaaatcgatgagtcccatgaccatgatcacgaccacgaccacgatgtttctttagacatgtcaaggttcgatacctgctaaggttgcctagatttctgtgaagattctcgcatatacgtgcttacccttcatattatgttaacaattggtccantgattccctgtggctancagtgtgagatttgtcttgtgagttgagtttcgaccactgattttgatggagctgaaatcgtnctctccttgttctgcgtccacatctgaggtg

SEQ ID NO: 35719 - DNA, 277 bp, Glycine max
  Clone ID: 701109630H1
cctcggtgttgctcagagatggcatgaccagagcacccgttgttcggttaccctccgctcagcgcgccgcgcagttgaagttcttcttggaggatcctctcaacttcgattcgcttgctgtcgttttcaataagtcaagcagatttgccaggttgcagaacattcagtgtgctattgcgggcaagaatctgtacatgagattccgatgcagcactggtgatgccatggggatgaacatggtgtcaaaaggtgttcaaaatgttcttgattttcttca

SEQ ID NO: 35720 - DNA, 271 bp, Glycine max
  unsure (1)..(271): unsure at all n locations; Clone ID: 701109631H1
tgttaattaaaccctttgtttgcaccagaaaagagtaataacttgatcatcatcaacatgagtncgcttcaacaatcagcaagaagcccctgtatcatatcctccagctccatatgttagtggccccaccacctatgggttatccttccaaagatgatcctacagctgtagggtgcccccaacaaagagttccgaggaaaccacaagcaggggtgatggattttggaaaggatgttgtgctgccttatgttgctgctgggtcctggattgt

SEQ ID NO: 35721 - DNA, 270 bp, Glycine max
  unsure (1)..(270): unsure at all n locations; Clone ID: 701109632H1
atcatggttaggctatggtgctcttctctctcaattacacttttattccaacagctcatcagattgtgcatttcttggagtgtgcaaaccccaacacccccattgccaatcctcnctctcccaacatattcccagttgaaatggcaacaaagggagatcataatgtttttccttttngtntgancacattcagtgacagnnaatggggcactggccaggntannccagcaatcttcaatccaacggggctcaacaccacccagtnggcca

SEQ ID NO: 35722 - DNA, 275 bp, Glycine max
  unsure (1)..(275): unsure at all n locations; Clone ID: 701109633H1
ccagccacacgcttcagaagacatggcctcattgggtgggttacaaaatgtgagcggcatcaattttcttatcaaagagggtccaaaagtcaatgcaaagttcgagctgaagccgccaccatatccactgaatggtttggagccggtgatganccagcagacacttgagtttcactgggggaagcaccacaagacttatgtggnaaatctgaaaaaacaagttgttgggacagagcttgatgggaagtcctaggangngntattgtcacatcata

SEQ ID NO: 35723 - DNA, 274 bp, Glycine max
  Clone ID: 701109634H1
gctatattaatatcttcacaacgtaacctttgatctccacaacatggagaaatcgagagaagaaaagcttagccaagtttgggattgtggcagcaccctttatgattcctacgagctcaactcttcaaacgccaattaaacacggcaatagcgaattccccgagcaatagaagaaccctttccatgtctcatttacccgaacgttgtctctcatcactacaatcacagccacagccacccatgtccaacaacaacaagtctttcaagatctctc

SEQ ID NO: 35724 - DNA, 265 bp, Glycine max
  unsure (1)..(265): unsure at all n locations; Clone ID: 701109635H1
cttgtnattgtctttgtatcacgaaaactatacgattcgattccttgttttcaatggacaccttcttcaannnnnnnnnnnnnnnnnnnnngagaagccgctggagttacgtactctcaagaatttccgtgagatctctccgctggttcagaatcacatcaaacgggcttattttacgttatgttggcgctgtggtggctgctgctgttggagcntttccttcatgttctgtggaacattgggggttttctcaccangttggctt

SEQ ID NO: 35725 - DNA, 101 bp, Glycine max
  unsure (1)..(101): unsure at all n locations; Clone ID: 701109636H1
ctcaatttgaatttcgntcaatctgantttcgcttntctggttacaatgntgnacattggctttagcngcaccggtctctnncatcgtngtcgnttttnca

SEQ ID NO: 35726 - DNA, 115 bp, Glycine max
  unsure (1)..(115): unsure at all n locations; Clone ID: 701109637H1
tnatatatgtgtaaatgatcgaatttnttttcatnttcaattgcaattcaagcnanttagtttttgcatggaataatattcatnttagnacacanaatgtcnatcttatttttgt

SEQ ID NO: 35727 - DNA, 273 bp, Glycine max
  unsure (1)..(273): unsure at all n locations; Clone ID: 701109638H1
cgtcttcgagtttcacagcnaagtcgtaggagggtttcaaaagatggagaacatgcagagcttctggcaattgggnnatgaactccgtgganantcaaaagcatcggaggatcacaaatggntaatggttgcttcgaaattggcggnacagacnagattgaagggggagcgtgtgaacaancttgatctttcaaagggccccattnaaacaangtcaagggataaatttgggttccaggaagagaacaatttgattctcttaacttaagcntg

SEQ ID NO: 35728 - DNA, 270 bp, Glycine max
  unsure (1)..(270): unsure at all n locations; Clone ID: 701109639H1
caactcgccctcgactnacatccttgtccgnttccgcnaacgagtcgagttaannnggttngtaanatcctattctgtttntcgtcatggcaaccgganaactattgctcgcgtanctacacagggnttgttttacaactananggcaantttcncatncagcggangcttgattttgactttcctttgcggcagggagacaccatcagttgctggaataattaancctggttctgagggattcaaaaacttttttttgggtcaggaggg

SEQ ID NO: 35729 - DNA, 224 bp, Glycine max
  unsure (1)..(224): unsure at all n locations; Clone ID: 701109640H1
tccanntacctnntntggagtttcacattcttcccatcattacntntctcatgcttgttgtggcaactaatgntgatgctgattacctcctgcatgttacnggaagtccaagcttctaccacaccnatgccgangagccattcacngctttgcnacgacctgattggaaggnngaganaganacntntgtggactagggnaaggnggagtnnntgntaggnaga

SEQ ID NO: 35730 - DNA, 274 bp, Glycine max
  Clone ID: 701109642H1
gccgctggggtggaaaagggttcaaaagaccccaaggcggaaatggtaggaaaggtcacgattgatccaattgcgtacaattgctgctgaaaagctaccggacttgaattgctcgagtatcgaatcagctatgagaattatagcgggcactgcggcaaacatggggattgtggttgatcctcctgttcttgaacccaaacagaaggaatttgtgtagagaaatttcagtttggccgagtgtaaaatcgcgcaggacatatttactgacttgttt

SEQ ID NO: 35731 - DNA, 274 bp, Glycine max
  unsure (1)..(274): unsure at all n locations; Clone ID: 701109643H1
gttaatttgcaccttttgtttctctctagaaattagaagttcatgcttaaactttaccttgatacttctttctcgcatganttttcgaacattgaacaggaaattaaccatggctcaacctggcaagcctcacaagaataggccttgctggcctggctgtgatgggccaaaaccttgctctcaacantgctgagaaaggctttcccatttctgtctacaaccggaccgcgtccaaggttgatgagacagttgaaagagcaaaacaagnaggaaa

SEQ ID NO: 35732 - DNA, 270 bp, Glycine max
  unsure (1)..(270): unsure at all n locations; Clone ID: 701109644H1
aggctgctaagagcattgtngcaagtggacttgccagaaggtgcattgtgcaagtntcttatgccattggtgtgcctgagcctttgtctgtgtttgttgacacctatggcactgnnaagatccatgataaggagattctcaacattgtgaaggaaaactttgatttcaggcctggtatgatctccatcaaccttgatctcaagaggggtggaaataacaggtttttgaagactgctgcctatggacactttggaagagaagacctgactt

SEQ ID NO: 35733 - DNA, 272 bp, Glycine max
  unsure (1)..(272): unsure at all n locations; Clone ID: 701109645H1
cagcaccgcacttgttctgctccgccgcgattgcaatcgtttccactcccgccgctgatnggtttctcaaaggaacagcttcttgcgcggttaaaggagcttcaggttccattttcccagtatgagcatcctgttgttttgaccgtcgacgctcaggctcaatatgttggacatttggggggtngcctcagcaagaatttgtttctcaaggacaagaaaagcaggttgtatatgtttctgctttagctggtaccaaagtagatctcaaagtg

SEQ ID NO: 35734 - DNA, 275 bp, Glycine max
  unsure (1)..(275): unsure at all n locations; Clone ID: 701109646H1
tcatatggtatctggatatatgcttaacaaggcagatgtaaggnagtttaagtttacattatgtatcacttttcgttgtatcagaatttttcttgagcagaattgaaggattactagtctattagtgattatgncccaaaaaaaaatgtgtttgaganttcccttgcgtacattttgtttatatgaattgactttatnctgtagtcctcagggttcctatanannannaacgcncagncncnactanctcnnatcggncnccnngannttctccc

SEQ ID NO: 35735 - DNA, 249 bp, Glycine max
  unsure (1)..(249): unsure at all n locations; Clone ID: 701109651H1
aacaacataacatcctcaagcctttacnacatcgttttgcagccatggaaacagggcataggcangctacactcgcgggnctttcctgcctagtgtttcttnccaagcactctccaccctccntctctccatcttttggcttgaggagtctganatcgagctcttattggagaatctctaagagtggcatccaaatnancactaaaggttcaaagacanggaatacttcatcgtgaccagatgtggatt

SEQ ID NO: 35736 - DNA, 241 bp, Glycine max
  unsure (1)..(241): unsure at all n locations; Clone ID: 701109652H1
caagtgtttctgtaaccatggnatannatcactctacncgnanncaaccccttctgagntatgctcaggaaaaagtgggnttttgcagttcctcananggcacttcttgtgaagccagtgaagaggcagatgatggggaanagcaagggattgngaattgcntgccaagccaccagcatttccgctgntagagtccctnncatggggctaaaggcagctcangagtctcttcttctggtgc

SEQ ID NO: 35737 - DNA, 267 bp, Glycine max
  unsure (1)..(267): unsure at all n locations; Clone ID: 701109653H1
gcatgangaagancgtcaccaagcaggtctcctcaggaagcccatggtacggcccanaccgagtcaagtacttgggcccattctctggcgaggccccgtcctacctaaccggtgagttcccangcgactacggctgggacactgctgggctttccgcagacncagaaaccttcgccaagaaccgtgaactcgaatgatccactccaggtgggccatgctcggagcntgggctgcgtcttcccggagttgtgtcccgcaacggggtga

SEQ ID NO: 35738 - DNA, 136 bp, Glycine max
  unsure (1)..(136): unsure at all n locations; Clone ID: 701109654H1
gcattncaatcgntcccagaatcnnntctagtttgttcataantcnataattntcatcatgggctcnttgattgttcncnggtgaacatgatncncanactaaagcgtgtatcctcttcccgtgtatcnancggtc

SEQ ID NO: 35739 - DNA, 272 bp, Glycine max
  unsure (1)..(272): unsure at all n locations; Clone ID: 701109655H1
atcgagataactaganacagtgtgatnanaatgaaggtccttgttttcttccgttgctacaattttggtngcatggcaatgccatgcgtacgatatgttncctctccgaatgaacactggctatggtgcncgtantccggaggtgaaatgcgcaagttggaggnttgctgtngaagccacacaacatcnntgggnttgagaccattcctgaagagtgcgttgaagcnacaaaggaatacatccatggcgaacaatatagatcagactccnca

SEQ ID NO: 35740 - DNA, 268 bp, Glycine max
  Clone ID: 701109659H1
tgaaatgggttggaaagctgctgagaaactcattaggcactggaaagttgtcagaggggataatgttatgataataaggggcaaagataagggcgagactgggactattaagcgtgtcattcgctctcagaatcgtgtcattgttgagggtaaaaatctggtgaaaaagcacatcaagcaagggcaaggtcatgaagggggcatctttacagttgaagctccaatccatgcctccaatgtgcaagttcttgacccagtgacagggaag

SEQ ID NO: 35741 - DNA, 270 bp, Glycine max
  unsure (1)..(270): unsure at all n locations; Clone ID: 701109660H1
cagttggaacttaggattcttgcacatcttgctaattgtaagagcatgttggaagcatttgaagctggtggagattttcattcaagaactgcaatgaatatgtatccatatattcgtgaagcagttgagagaaaggaagtgcttcttgagtggcatcctcagcctggtgaagacaaacccccagttcctctcctgaaagatgcctttgcttctgaaagaaggaaagccaaaatgcttaacttctcaattgcatatggaaagacgccantt

SEQ ID NO: 35742 - DNA, 93 bp, Glycine max
  unsure (1)..(93): unsure at all n locations; Clone ID: 701109661H1
tatncaagagcgtcattangcgttactctgctatctatctancgtgtntganaattncgtgnngttgacgagcgagggtgcgantatgacctg

SEQ ID NO: 35743 - DNA, 271 bp, Glycine max
  unsure (1)..(271): unsure at all n locations; Clone ID: 701109662H1
caaaatttagcagagttcaaaacaccaaccaagtaaagtaaagaagggaagatgtcactgataccaagtttcttcggtggtcgaaggagcaatgttttcgaccctttctcgctcgacgtatgggaccccttcaaggatttgtctttcccttctgctgaagattcagctttcttgaaaacacgagtggattggaaggagaccccagaagcgcacgtgttcaaggctgatattccggggctgaagaaggagcaagtgaaagtngagattgaag

SEQ ID NO: 35744 - DNA, 280 bp, Glycine max
  unsure (1)..(280): unsure at all n locations; Clone ID: 701109664H1
ctcgagatcatggttagggctatngtgnnnttnngcctgantnatnaggagagaaaaccgcacgctgtggttactccatatccagctcaaggacatgtgaacccttgttaaaactagcgaantggctttcatcttcagaggctttcacataacctttgttcttaactgagtacaactacaagcgtttgcncaagtcaaggggtcctaatgcccttgatggcctaccagattttagatttgagagcatcccagatggtcttcctccattggatgatgataa

SEQ ID NO: 35745 - DNA, 268 bp, Glycine max
  Clone ID: 701109666H1
gttggatttgtaggaggaagtaagaaaacacaacacgaatttcattgcagagtgttattttgagtatcagcatcaatggctccaattgcagtgggaaacgtgattccagacggcattttggcttacttggatgaagaaaacaaacccccaaactgtctccattcactctctcgccaccggcaagaaagtcatcatctttggggttcccggtgccttcatcctattgcagcttgaagcacgttcctggcttcattgagagagcagaaga

SEQ ID NO: 35746 - DNA, 268 bp, Glycine max
  unsure (1)..(268): unsure at all n locations; Clone ID: 701109667H1
attttggctcatttaaggcagttcctcccataccaggggccttcctttggcattgttggagatgttngacatgtttggagcaatggaaaattttggaatgccagacatcgtgtaatatgcaaggaaacgggtactcgttattcatttggtgcatttatgttatcaccaagggatggtaatgttgaggccccaaaaaaatggtggaagttgaccatgtacaacgctatcgaccatttaagtacgangatttganggatttcagantccc

SEQ ID NO: 35747 - DNA, 273 bp, Glycine max
  unsure (1)..(273): unsure at all n locations; Clone ID: 701109668H1
cttatcctgtttctttcaatggaagtcatttctgcttctagcttgaatcccaacgctccgatgttcgtgccacttcgcctattcggacggtggaggatttctccgaccagtggtgggacctcgtttcactcctccccctggttccgcgactactggnnccgcgagtgcttccaagatccccagttcccaaaacgacgacgccttcgactttcgantttgacctagatctccaagatgaagatgaaaaggaacgaaaggaagggaaggangtgg

SEQ ID NO: 35748 - DNA, 98 bp, Glycine max
  unsure (1)..(98): unsure at all n locations; Clone ID: 701109671H1
gttcattcctattaatctggaagatgctgcagtggacttgttaaaccatgtggtgaanttgaaggagaagggatggattccacnctncattccacanc

SEQ ID NO: 35749 - DNA, 262 bp, Glycine max
  unsure (1)..(262): unsure at all n locations; Clone ID: 701109672H1
ccacgtttgangngtgagcaataactctgttacggnagaagaaagtgagantganaatgcngctgncaactcagttcctctcttgtngggttcaacacttgtctcccgggcanacccaaggcagattgttcttgagaatcnatatcaanttcagaaaaggcctcttcagatngttctggtccctcaaaaaccggggtngggtttggatcatcggacacagctgntgtgccctgtgagcagtaaaaagaaaaggaagcgcaaa

SEQ ID NO: 35750 - DNA, 268 bp, Glycine max
  Clone ID: 701109673H1
cacaccaggcgcacgttagcacaaactatcatggccacggcaacagcagctgccacctcgtcctttatggggacgcgtctcctggaggctcactccggagcggggcgagtgcacgcccgattcggcttcggcaagaaaaaggctcccgccccaaagaaagcctccaggggatcgggccgagacaccgacagaccctttggtatccgggcgccaaagcgcccgaatacctcgatgggagtcttgtcggagactacgggttcgatccttt

SEQ ID NO: 35751 - DNA, 121 bp, Glycine max
  Clone ID: 701109674H1
ctttgagtaggaattgtgggtctgtggatcattttacttagttaatggtatttgtgtatgctacaatgtgtctttggggttgtattattgacatttttttacgtggatttgaggatttaaa

SEQ ID NO: 35752 - DNA, 264 bp, Glycine max
  unsure (1)..(264): unsure at all n locations; Clone ID: 701109675H1
gccttcctatgaccggaatcagctccatgccgcggtggtggagttgtattgcggcgagggggcggagattaagtactccacggtgcagaattggtacgctggggatgnagaagggaagggtggggttnacaatttcgtgacgaagnnagggctgtgtgctggtgccgggtcgaagatatcgtggacgcaggtggagacgggttcggcgatcacgtggaagtacccgagcgttgtgttggagggagatggcagtgtgggggattt

SEQ ID NO: 35753 - DNA, 267 bp, Glycine max
  unsure (1)..(267): unsure at all n locations; Clone ID: 701109676H1
ctatatagcataaacatttgagtcttcattgcacaatgtcgacctcttccattaacgggtggtgcctctcttccatctccccagccaaaacctctctcaagaaggccacattaggcccttctgtcttcgcaaccgttagcannnnnnnnnnnnnnnnnnnnnnnnnnnnnnnnnnnnnnnnnnnnctcattcaagacaggcctgtctttgctgcccctgcccccatcatcaccccaactgtgagagaggatatggcaaaggaatacg

SEQ ID NO: 35754 - DNA, 268 bp, Glycine max
  Clone ID: 701109677H1
gcgtctttcattttcacactcaaccctttcttcatccttttatctcgtctctgccaaaacgatgccgtttgctctggagaataacggaggagttacgatcggacggtcctccttcgcttactgcgtcgcgatctgcgatcgtgattttccggaggatgattccgactccagctccgactcctccatcggaaggaacagcatctcgtcggaagattcctccgaccgggaagacgccgtcgaagttgaggttcagagttccttcaaaggc

SEQ ID NO: 35755 - DNA, 269 bp, Glycine max
  Clone ID: 701109678H1
atcagcacaacaactcactcactaagctaaacaatttcatcaagcctgccatggcttcctcgtgtgcttcctctgccattgcagctgttgccatctccacaccaagttcccagaagaatggatcactcttgggaagcacaaaagcttcttttcttagtgggaggaaactgaaggtgaacagttttacagcaccagttggagcacgatccagcactacagtgtgtgcagttgctgagcctgataggcctctgtggttcccaggcagcacc

SEQ ID NO: 35756 - DNA, 270 bp, Glycine max
  Clone ID: 701109680H1
aaaaaaggagagtgcttagagagagagcaaaacatattattttcattttcatctttttttgagtatcaacaaatggcaaccactgtgatgaccactctcccccaattcagtggtctagaccccaattctcagctgcccctgtgaagaacttggttgctgtgcaacccatgagtcgcaaggggaagggtgcattgggagctcgatgtgactacattggttcatccactaatctgattatggtggcttctacaaccctgatgctgtttgctg

SEQ ID NO: 35757 - DNA, 179 bp, Glycine max
  unsure (1)..(179): unsure at all n locations; Clone ID: 701109683H1
caaantgaagctcattgatcntgggcatgcacaaacgtaagnatatgcctttnccatgtnactngtnaatncctgantccctgttgcngntaagtatatgnctctttactgnttgcacngtacagaancanganannagattggtgttggagtgagaangccgatnggaaaagcgcgtg

SEQ ID NO: 35758 - DNA, 267 bp, Glycine max
  unsure (1)..(267): unsure at all n locations; Clone ID: 701109684H1
tnganccgtgaggatggtatcttcaaggaggtcttacgtaagangcctgattttnatcnntaaccatggccaactattagtantggccgcaaannattttttgaacnacattactagtaaaggatcctcgggcgagattaactgccggctcaaggtttatcacatccatgggttagngaaggaggtgaagcattggagattcctattgatatatctgtcctcagcaacatgcggcagtttgtgaaatatagtcgaatganacaattt

SEQ ID NO: 35759 - DNA, 263 bp, Glycine max
  unsure (1)..(263): unsure at all n locations; Clone ID: 701109685H1
tcgaatttgcgctgtgtgcaanttcactaggnattcttgnattnaattactatttaaacggagtcagaatgtcttgatctgtcaggattgtcgtttctatatattgagggagtgatttattagtgtgaattgtaagcactaaggttttanaattgtggccgcagttggcnatttgtcgagatccctaatattgcagagaattactgacaaatgcngtgnagttgtggtttccatgtagttggagnctccaaaaactgacattg

SEQ ID NO: 35760 - DNA, 267 bp, Glycine max
  unsure (1)..(267): unsure at all n locations; Clone ID: 701109686H1
tgcaaaagagcgtcgtagtcgcaaccctaatcagaanaagcgcagtttcaagcgagtgacagccaccagccatgggtcgtatgcacagccgcggtaagggtatatcctcttctgctttgcncctacaaaaggacacctcctagctggctcaagatctcttcgcaagatgtcgaagaaaatatctgcaagtttgcgaaganaggtttgaccccgtctcagattggtgtcattctcagagattctcacggtattgctcaggtcaatagc

SEQ ID NO: 35761 - DNA, 265 bp, Glycine max
  unsure (1)..(265): unsure at all n locations; Clone ID: 701109687H1
cttctttttactctctctctgtctctctctacgctttctcgttcganntccctcaagggatccactaactgaaggagaaatggggttgacattcaccaagcttttcagccggcttttcgccaagaaggaaatgcgaattctgatggtgggtctcgatgcagctggtaagaccaccatcctgtacaagctcaaacttggagagatcgtttaccacaattcccaccattgggttcaatgtggagatgtggaatacaaganattagtt

SEQ ID NO: 35762 - DNA, 269 bp, Glycine max
  unsure (1)..(269): unsure at all n locations; Clone ID: 701109688H1
ggcgtcttcataaacgcctttcttctccgtttccgtttcctcgttcaaattcgctttttgatctgcgaaaatgagagagtgnatctcgatccacattggtcaggctggtatccaggtcggaaatgcttgctgggagctctactggcctngagcacggcatcgggcccgatgggcaaatgccaagtgncaagacagttgngcggtgggtgatgatgctttcaatacnntccttcagcnagactggtgctgganngcacgtnncanntgna

SEQ ID NO: 35763 - DNA, 266 bp, Glycine max
  unsure (1)..(266): unsure at all n locations; Clone ID: 701109689H1
ggcttcttcaatccctaatgcgccttctgcgttcaattctcagagctacgttggtctcagagcgccactgaggaccttcaacttttcttctcctcaagctgccaaaattcctcgctcccaacgccttttcgtcgtcagagcctccgattcggagttcgaagccgccgttgtcgccggtaaggttccgccggcggcctcccgtgnccgcccagaccggcggctccggttggaacaccggtggttccttcattccattcancggcgtc

SEQ ID NO: 35764 - DNA, 239 bp, Glycine max
  unsure (1)..(239): unsure at all n locations; Clone ID: 701109690H1
cnttgcacagtgcatgccataaacatgaagtaatgangtantctaaagtggaaaaaatgggtgggggccggttcaaaccgacgcagaagaggaagagggttccaaagagggtgtggttaagcttccaaaaatcaatgggtgtntcgtgggtggaaaccatacctcctccaggttttgcactcgctaactcccctcccttccccctttcggctttcaaaagatccatctttctctcactc

SEQ ID NO: 35765 - DNA, 244 bp, Glycine max
  unsure (1)..(244): unsure at all n locations; Clone ID: 701109691H1
aacgcgatctctctctattctttgaaaccaaagttcaaactcngtcttccctgggttctatnncgaaatcaacgacgatgagttccacagaggcagcagccacagagaagaaaggtggaagagggaaaccgaagacttcaaagtccgtttcccgttcctccaaagctggccttcagtttcccgtcggccgtgtcgctcgctacctcaaggccggtcgctacgcccagcgcgttggctccggttc

SEQ ID NO: 35766 - DNA, 267 bp, Glycine max
  Clone ID: 701109692H1
gcaaaacgagaagtatccaacaatgactaccacccgtgttgctatctgtctttgctttgcatttcctttactacgcggctgaaggagccaaggttagtttcaataacaagtgctcatacacggtatgggccaggaaccctaaccggtgaccaaaagccccaattatcaacaactggtttcgagttgggtccaggagcatccaactctgtggaccttccatctcccatggtccggtcggttctggggccgaacaggatgctccaacaa

SEQ ID NO: 35767 - DNA, 264 bp, Glycine max
  Clone ID: 701109693H1
ggaagttgaaggagataaatatcgaaagcgatctattgggtatgtatatagctgtcaatgtttgtgtgcacaataagctgcttcttttatactgatcaaagaccaactcatcctaacaggctgcctgaaacaaaagccctttggcttgaagtgtattcaacgcacaggccattataccttgtgcctaatttaattttgaggaatgaattaatgattgacttcctatcaacttaatcatgatctaataccttgtgaaagacaaat

SEQ ID NO: 35768 - DNA, 269 bp, Glycine max
  unsure (1)..(269): unsure at all n locations; Clone ID: 701109694H1
ggaagaaccaccactaccttatccatttccactcctcaccaagcnacnaccatggcctcaaccaacgccctctcttcagcttccattctacgctctcccaaccgccagtctctgaccagaagagcgaaccacaacggaagagtaaattaccgtcaaccgaatagccgtttctccgtcaaagcctccgccaaagagattgcctttgaccagcattcccgctctgctatgcaggccggcattgacaagctcgccgacgccgtcgggctcat

SEQ ID NO: 35769 - DNA, 268 bp, Glycine max
  Clone ID: 701109695H1
ggaaaacacacaattcacaaaggcattcgacggagaatggaaaagaagcggaagaggaagcagcaggtgaagcgcgacggagagccaaagcccaaatcggttcgtgcgggttcaacccgaaccgacaatgtgaaagatccatttccatctcatgctcgacccaccccacaggaatgcgaaccgtgcgtgacactctcttagccctacacggcattcccccggaactcgccaagtaccgcaaatcccaccgtccgatgacccggtccaa

SEQ ID NO: 35770 - DNA, 274 bp, Glycine max
  unsure (1)..(274): unsure at all n locations; Clone ID: 701109696H1
cttaactgtaganaagaaaaaccgaagatgagcttgttgaatgagnagaganaaccgcacgctgtggttactccatatnnncncacacagatgaatctgatcgcctcctgaagatggaagagactttacataagcgagtcattggtcaggatgaagcagttaaagccattagtcgggctatccgtcgagctcgggttggactaaaaaatcctaatcgtcccattgccagcttcatcttttctggtccaatggtgtggggaagtctgaattggcc

SEQ ID NO: 35771 - DNA, 285 bp, Glycine max
  Clone ID: 701109701H1
gccatgtcagtgataactttggaaggcttattctcaccactaacttatttcttctcaagaaatggatctcacatgttggattaccagcttgctcttcagcgatgcgttagaaacgatactggtaaatagttgcaatttcagtctaacaataatatccagcagaatcacaaattacatggttgttatccatatagaagtgaatggagaatggtctggaaatcttttgattgtatgaatggattttttggagtctcagatttgaaatataataggatctaaattaac

SEQ ID NO: 35772 - DNA, 284 bp, Glycine max
  unsure (1)..(284): unsure at all n locations; Clone ID: 701109702H1
caagaagtgtaagttttcattcaatggccagcgctcagctctcagcaatatcttcgtcgatctctacggcgtcgtttgaagggcttcgaccttcggctgttcagtttgcttccgcgggcagaattagaattggnaatctctcccaaaggtctttccggggcttggttgtcaaagccgccaccgttgttgcccccaaatacaccgcgattaagcctctgggagacagagtgctgataaaaattaaggaagcagaggagaaaactgagggtgggattttgcttcca

SEQ ID NO: 35773 - DNA, 280 bp, Glycine max
  unsure (1)..(280): unsure at all n locations; Clone ID: 701109703H1
catacattcaactagctgctgtttcaacaagtaaggagttatcagggtactctatggtggactttgatattctgtaattgatttgatggaatcttccaaccaattcaatgaatcatttaggcaaggtcttacagctggatatgtctttgctgcaacttttgtcatagtactttatatgtcctcttgtctccctgcacaacttatcaagaacaggaagaatagaacgggtggatttaagaaagcaacacagnagcgtaagttgccgcttcaggagttgaac

SEQ ID NO: 35774 - DNA, 277 bp, Glycine max
  Clone ID: 701109704H1
tgaagcttgtaaatctagggtttcactcatcgattccgtgttctccgaggcccttgaaagatcggttcgtgcttcggtcttctaaagtggagcaaatatcgtttacggaatctgagaactcactcatcgaagcccttcttggcatccaaggacgcggacgttcttcttctcgtcagcagctcaatgctgttgagcgtgctgttcaagtcctggagcggttagggggtgtacctgatccgacaaaatcaaacttgatcgagggtcgctggcagctaat

SEQ ID NO: 35775 - DNA, 276 bp, Glycine max
  unsure (1)..(276): unsure at all n locations; Clone ID: 701109705H1
acagtataagattgggaagcaaaagcgagtatcgtattgttctgaccagtgactactgaccctacaatctctccacttttcaatcaaatcaattccantgtcggctctcttctccttcatcttcccatccagctgaaaagggaggagagagtgtttgcgttgcggcaatggaggaaccgagcaaactgaagcgtgccatgattgattcctgggctggggcaattctggtggaatatcacggacagttacctcgccccctcgatgttattaagattc

SEQ ID NO: 35776 - DNA, 277 bp, Glycine max
  unsure (1)..(277): unsure at all n locations; Clone ID: 701109706H1
ttggagagaaacaaacaccaaataaaaatagcaatcatggcaaataagtaccatgttcgttctattagtttgccttctagatctcatcctagcaccattagagttgaggaggagcttagcaagatcaaaacttgggaaggaacattcacatccacatcagggtccattcacacaggcanatccttgattgaagatttgtacatttgcttggatgatcttctcaacatggcatctacccaaaaggtgatttctcaccatagaggtgaaaaatgtgtgc

SEQ ID NO: 35777 - DNA, 273 bp, Glycine max
  Clone ID: 701109708H1
agacaagaggcttcacatcgagactcagcttcacctgtaatcagacaattgcggtcaacgtcgaagtcatatcattacgatgcaagtaaatgaagaacacaacaaaccttgctcagacccatttttacagtggagtcagtggcagttgcttgattctcttttacctacgggtggatttgctcattcttttggccttgaagcagcagttcagtgccacttagtgtctgattccaatgaccttaagacatttgttatccatatattggagaatac

SEQ ID NO: 35778 - DNA, 270 bp, Glycine max
  unsure (1)..(270): unsure at all n locations; Clone ID: 701109709H1
ctcgagcagtttgcattgctacaagatatagtgctgttagaagacngtttggatcacataatggaggtctagaaacacaggtgattgattacaaaacacagcaggctaggctcttcccattgctggcttctgcttatgctttcagatttgtgggcgagtggctgaaatggctttatatggatgtgacgaaaagattgcaagctaatgatttttcaacattacctgaggctcatgcatgcactgctgggttgaaatcctgactactacggc

SEQ ID NO: 35779 - DNA, 259 bp, Glycine max
  unsure (1)..(259): unsure at all n locations; Clone ID: 701109710H1
caattaaaagcaatatagtttgtttaattgttgcttcatttctattgtgtgantggcatttgggaagttcattatgaatataggggtagtggcaatggttctgggtttatggattcgggttggatttgcacaacaagtaccttgctactttatttttggagactctttggtggataatgggaacaacaaccagcttaactcactggctaaggctaattatctcccttatgggattgacttcgctggtggcccaactgga

SEQ ID NO: 35780 - DNA, 136 bp, Glycine max
  Clone ID: 701109711H1
gttttggcctgtgtgcacgatggttgtgagaaaactactctagcaacatgagttatgttgtgtctatgtgtagacccgatatggacttgaaataaaataaattattgtccaaataaataatggttaatttacttac

SEQ ID NO: 35781 - DNA, 266 bp, Glycine max
  Clone ID: 701109712H1
gtaatcgcaaaatctagggtttgttcgttcgctcgttcgcaacaatggcgctgaggagattctacaacgagatcaaggggaagagggtgagcgaggtccctgagcacgtgaagccgatgctgtccctgagctacatcaagaaagcgattcagagaggcttcgacaattaccatgccaagtacattgaaaccagttcccctgatcccatcttccatgtctgctacggcggcatgatcttctcctacctcgtcgctctcccccacgag

SEQ ID NO: 35782 - DNA, 265 bp, Glycine max
  Clone ID: 701109713H1
gtgggttggctggtttagatctgagcaacagcttttaattttctacttgcttgaattttattggaagccatggattgttcatcatggattaacacttccttggatctcaacattaatccccgcagagttcatgaagaagttcccaaggaggtagaaagcgagcttttctctttgggaatgaccaagtttaacgtggaagaagagtctactagtgacttggaggaggaactgaagcgggtgactgcagaaaacaagaagttggccg

SEQ ID NO: 35783 - DNA, 263 bp, Glycine max
  unsure (1)..(263): unsure at all n locations; Clone ID: 701109714H1
tctcttccnttgccntgnctccgtgtgaaagatcncaacttccaccggtcaaccgntttccaaggntgagttaattgcnggnctacttaaccatacngtcnaatttgacnccngagattgcnagtgagtcctggggcatagacattatatagctcactccaatgtttgagggtgaaccgaccagaactggatcatatgcatatgggatcaacaatatgtgaaccttggtaggagtagcacttcagaccatgggttctttattt

SEQ ID NO: 35784 - DNA, 268 bp, Glycine max
  Clone ID: 701109715H1
ctctggcttccttggtacgggaagaactcaatcttgtccatttccctttggtttttctttcttcgatctcttcaccttcctttcgaccactctcttatcaccgctcgctttcttaactagagccctctccgttgagggtttctccaggtgtggtttgatttacagtttctgatgctgaagaaataaaaaagcttgaaggcttttgctcttctgtgtgaaaaatgttggaaagtggtgcgaaattcccaggaataatagatctcaacaa

SEQ ID NO: 35785 - DNA, 272 bp, Glycine max
  Clone ID: 701109716H1
aaagaacctttgagatttggggatttgttgccacgttcatctttaaggcttggctgaacaaccagaagttctcttacaaaggaggaatgaccgaggaaaaaaaaaccttaaggcgaaaggcccttgccaagtggctgaaggaaaacattctgagattaggtcctacattcatcaaaattggccagcagttctccactagagtggacattcttcctcaagaatatgttgaccagttgtccgaacttcaggatcaagttcctccatttccctca

SEQ ID NO: 35786 - DNA, 283 bp, Glycine max
  unsure (1)..(283): unsure at all n locations; Clone ID: 701109717H1
ttcttctcttgcggctanggttttagcgcacttcttctagatttaaggaagatgggtaaggaaaaggttcacatcagtattgtggtcattggccatgtcgactctgggaaatccactaccactggtcacctgatttacaagcttggaggcattgacaagcgtgttattgagaggtttgagaaggaagctgctgagatgaacaagaggtctttcaagtatgcctgggtgctggacaaacttaaggctgagcgtgaaagaggaatcaccattgatattgctttgt

SEQ ID NO: 35787 - DNA, 283 bp, Glycine max
  unsure (1)..(283): unsure at all n locations; Clone ID: 701109718H1
cgttgcagctctactagctagggtttcgcaagtgcgatcgaagaagaacgatggcgatggctgctgctctgcgtcgcgaaggaaggcgtttganccaaccaatcaacgccctccgttcctctctcatctctcaagaccaatcccctcatggcgcgcgcttcatttccactcaagtggtgagaaaccgaatgaagagtgtgaggaatatccagaagatcaccaaggccatgaagatggttgccgcatccaagctgagagccgttcagaccagagctgaaaattc

SEQ ID NO: 35788 - DNA, 279 bp, Glycine max
  Clone ID: 701109719H1
gctttactaggatgggttgccaacatttcctgatgaggaggcgtttgcatgcattgagagggaactaggactatctattgactctattttctctactatatctccaacggctgtagcagcagccagtttgggtcaagtttataaaggccggttgaagtactctgggaaacttgttgctgttaaggttcaacgccctgatattgaagaagctataggaatggacttctacctaattagaggtttagggtctctcataaataaatatgtggactttatcac

SEQ ID NO: 35789 - DNA, 278 bp, Glycine max
  unsure (1)..(278): unsure at all n locations; Clone ID: 701109720H1
ccatatcnggttcataacgcaaactctgtccaaaatcaccgcttgatgctcttncatcttttccaatgcttatccaaattcttcccttcaattctcttcactcttttttctncgccgaaatgggtctaatcttgaatataatcttgaatcataatgtgcaatcttcatcggttacgtgtccttaaaattggattctttctatccatgagttcaattgggttatccgtttcaatccagttttcgtaacagtttgatacacacactcatatatatatatt

SEQ ID NO: 35790 - DNA, 277 bp, Glycine max
  Clone ID: 701109721H1
caatgaccttgatgcatttgccatggtctacaatcattttgatatgaaacatgagacggcagctcttttagagtcacgtgcagagcagtcatgtgagcagtggtttcaccgctacaacaaagaccagaatgaagacttgttggattccatgcgctacttcattgaagctgctgaagttcactcttcaatcgatgctggcaacaaaacacgtaaggattgtgctcaggcttcccttctgtcccttcaaatacgaatgccagacttccaatggcttata

SEQ ID NO: 35791 - DNA, 255 bp, Glycine max
  unsure (1)..(255): unsure at all n locations; Clone ID: 701109723H1
ggctgaaagagggactcgagaaaacacgggcgattttcaattgtgtccaaagacaatggtgtgcctttggtggctttcacactgaaagaccacacccactttgacgaattccaaatctcagactttttaaggcgctttgggtggatagtgccagcatacaccatgcccccagatgctcaacatgtcacagnncttcgtgttgtcatcagggaggacttctcaaggaccctcgcggaggtctcgtgtccgatgtgg

SEQ ID NO: 35792 - DNA, 274 bp, Glycine max
  Clone ID: 701109724H1
gctctccaatacaaaataaccactcactgaatattcggtcgaagatgtccgccgccgaagaagctaaagttcccgccgtcgaaaagccggtggaggaggtgaaggcgccgaagcttgccaaggagaagaaacctaaggctccgaaggaaaagaagccgaaacaggccaaaactgcttctcatcctccatatctccagatgattaaggacgctttgattgctctgaacgagaaaggaggatcgagtccatatgcgataggaagtacatggaggag

SEQ ID NO: 35793 - DNA, 270 bp, Glycine max
  unsure (1)..(270): unsure at all n locations; Clone ID: 701109726H1
ctctcccagaaaagaggcatcagttgcaatggctcgttacggtganggcgacaagcggtggatcgtggaggaccgccccgacggcaccaatgtccacaactggcattggtccgagaccaactgcctcgactggtccaagaccttcttcaccagcctcctcactaacctcccaatcctcgacggcgagggtaacctcttcctcaaaacgacgtcgcttcgctcccttcgacggcgaggcctacatcaatgtccgaaaggggaagatcatcc

SEQ ID NO: 35794 - DNA, 267 bp, Glycine max
  unsure (1)..(267): unsure at all n locations; Clone ID: 701109727H1
cgctgattccagcaacaagcggctggtgctcgcactgtatgacgccctaaactccggcgactccgacgccgtcgtcaagatcgtcgccgccgacctcgagtggtggttccatggtccgccctcacaccagtttttgatgcgcatgctcaccggcgactccgctgccgacaactccttccgcttccttccgcagtccatcgccgccttcggctnccaccgtcatcgtcgagggctgcgacaccgcccgcaacattgcctgggtccacg

SEQ ID NO: 35795 - DNA, 266 bp, Glycine max
  Clone ID: 701109728H1
gcagttaacaaaatttcgataagaaaagttcccaacttcagctaagagaaaatgtctctgattccaaactttttcggtggccgtaggagcaatgtgtttgatcctttctcccttgaagtgtgggatcccttcaaggattttcattttccctcttctgtttctgctgaaaatttagcatttgtaagcactcgtgtggattggaaggagactccagaagcgcacgtgttgaaggcagatattccagggctgaagaaggaggaagtgaa

SEQ ID NO: 35796 - DNA, 267 bp, Glycine max
  Clone ID: 701109730H1
agccctctcttcaggtcaccatctagactgcaatcatggctgatcgaccacagcatccatcagttgttcagaagctagctggacagtcttacctggtgtccaggcttagccccaactttaactctaggaattattctgcaactggttcttacgtcaatggcggaatgcactcgcctgggttggctgttgtgtcacctgtatctccagttactgtgcatgctccagcagagaaaggagtgagtggatttctagtggattttctgatgg

SEQ ID NO: 35797 - DNA, 205 bp, Glycine max
  Clone ID: 701109731H1
tagtgcctccttgccaggtgctgccactctctctttctctctcttcatccttctgttgggttggttgtggagtgttgttttctgttgtgcacgtgttgtcattttttaccctcgccacagatctgaagtgttcaagtttggattttgtgcttctggaagttaaaatggcccaagaaactttcctattcacatctgaatcagtgaa

SEQ ID NO: 35798 - DNA, 282 bp, Glycine max
  unsure (1)..(282): unsure at all n locations; Clone ID: 701109733H1
gccttcaaatccttcgtcggcntnngccagtcntcntccggangcnncgcatttcgccgcccagccaagacncgccactccccaccgcaaattccgngtcttggcaggaaaattcagcnccaagnncaatggccggaacctccgcgtggcggtggtgggaggcggtccggctggcngggccgccgcggagacgctggcgaagggcggcgtggagacgttcctgatcgagcgaaagatggacaatgcaagccgtgcggtggcgccatcccgctgtgcatggtg

SEQ ID NO: 35799 - DNA, 184 bp, Glycine max
  unsure (1)..(184): unsure at all n locations; Clone ID: 701109734H1
ctcacacacacatgctcnctggaagaagcaacttcaagtcttcaacgatggctacgaattcgattacctcatcctccttccgattagtaacaacgagaatccctctctccctcttccgaaaaaccccacctctcctttcattccccacaaaacccttttnctcaaaacccatcaccttccagag

SEQ ID NO: 35800 - DNA, 278 bp, Glycine max
  unsure (1)..(278): unsure at all n locations; Clone ID: 701109735H1
tgccagtagtcatatgcttgtctcaaagattaagccatgcatgtgtaagtatgaactaattcagactgtgaaactgncgaatggctcattaaatcagttatagtttgtttgatggtatctactactcggataaccgtagtaattctagagctaatacgtgcaacaaaccccgacttctggaagggatgcatttattagataaaaggtcaacacaggctctgcctgttgctttgatgattcatgataactcgtcggatcgcacggcctttgtgccggcg

SEQ ID NO: 35801 - DNA, 275 bp, Glycine max
  unsure (1)..(275): unsure at all n locations; Clone ID: 701109736H1
cttttttcactcttcagttctcgttgttgttcttcgctttcctganactagggttttcaatttcgattcattcgttaataattaaagatgtttgggagggcaccgaagaagagcgataatacgaggtactacgaaatcctcggcgtctcgaagaacgcttcgcaggatgatctgaaganggcttacaagaaagccgccatcaagaatcaccctgacaagggcggtgatcccgagaagtttaaagagctggcacaagcatatgaggttctgagtga

SEQ ID NO: 35802 - DNA, 274 bp, Glycine max
  unsure (1)..(274): unsure at all n locations; Clone ID: 701109737H1
gccatggcggtttctgcaattggttttgaaggtttcgagaagangctggaaatatcctttttccagccgggactttttgctgaccctgagggaatgggtttaagagctcttgcaaagtcccagttggatgagatacttacaccggctgcttgcaccattgtttcatctcncagaaatgatcatgtcgactcctatgttctgtctgagtccagtctctttgtttatgcctacaagatcatcatcaaaacctgtggtactacaaagctactgcttg

SEQ ID NO: 35803 - DNA, 273 bp, Glycine max
  Clone ID: 701109738H1
ggataaatgacaccacgactgctgtttgtaaccgtttgtctgaggctctggaaatgctaagaagtgaagttagtgcaatgcaagctacttcaatcctccaaactctcctaaaaataatcaggaatgtgattgaacaccctgaggtggaaaaatacaagagattacggaaggctaatccagtcattgagaggaatattgtaaataataaagctgccttggaaattctatttttggttggctcagcgaagatgttatgtttgacaatcttggaaa

SEQ ID NO: 35804 - DNA, 275 bp, Glycine max
  Clone ID: 701109739H1
cggctactttagaatcagccttcatcctcttcgcaccttcaacggttctccaatagccatcgtttctctgcaaaagcaccgatctccatcaagctccatgcttccacctcccttttcttctcttccaagtcctccttcaaaacgggaagactctgcttccagttatgctccactttgcaagaggtagcagcaacagaagaaacacctgagctaacgcaaccaacagacaacgtaaagaagctgtacgtggttaacttgtcttggtctctgacggc

SEQ ID NO: 35805 - DNA, 271 bp, Glycine max
  unsure (1)..(271): unsure at all n locations; Clone ID: 701109740H1
ccaccaataaggtccataccttctaattctctactctctctcacttctctctatcacatttttcttacaagatggcagcatcatcagcatgccttgtagggaatggtttatctacacggggtaatagaataactcttaagaaggacttcaatggnagaagatatctctactcatcttggagattttcattattgaacaacaataaggcatcaaaagcattttccataanggcatctttggagcaaaggcaagaagaagggagaagggggtt

SEQ ID NO: 35806 - DNA, 268 bp, Glycine max
  Clone ID: 701109741H1
gtgaaatatgaaaaagctgttgatcctcaatatcttccaacacagtctgatgttcagaaggttcttaatggctctatgaacagctttaggatttataatgtttatccaagatatttccgtgtcactggttcaggtgatgttagacctttggaagaggataatgctcttagtgctgatctcattttgaatcgcgagcaatttgagtggtgggccttccgagattttaatccatcaaatttgagtggactttgtggaggtttgacgggac

SEQ ID NO: 35807 - DNA, 135 bp, Glycine max
  unsure (1)..(135): unsure at all n locations; Clone ID: 701109742H1
atgtttagtgttttaccttttagactcacacntgtctctctctagaaatcacgcaattctcatataaccggatttttctttccattcatcacccaccaaactaccaactctctctatctcttaccacaactcant

SEQ ID NO: 35808 - DNA, 265 bp, Glycine max
  unsure (1)..(265): unsure at all n locations; Clone ID: 701109743H1
ctcttctccaattttaaangaaacttccatatttttcttaaatttatttgatcnttttgctcgtggctgaggagctcctttatgcagaaatggccaacacctacaagccaaagancattctcataacaggagcagcaggcttcattgcatcccatgtatgcaacaggatagtgcgaaactaccctgactacaaaatcatagtccttgacaagctcgattactgctcaaatctgaagaatctcattccctcgcgttcatctccgaa

SEQ ID NO: 35809 - DNA, 263 bp, Glycine max
  Clone ID: 701109744H1
aatcacttcatcatggcttcctcgtgtgcttcctctgccattgcagctgttgccatctccacaccaagttcccagaagaatggatcactcttgggaagcacaaaagcttcttttcttagtgggaggaaactgaaggtgaacaactttacagcaccagttggagcacgatccagcactacagtttgcgcagttgctgagcctgataggcctctgtggttcccaggcagcacccctcctccatggctagatggcagtttgccagg

SEQ ID NO: 35810 - DNA, 262 bp, Glycine max
  Clone ID: 701109745H1
cttttaatttcctagatctcccaaacaaattgtagcataagtcccatggccaaagagactagtgttgtttatctatatcccagcaaatcacaagtttggggtgagaattttgatcataaaaaacttgtaataacaacactagctgctaatggaaagaaggaggagagtaatggagcacctaatgacacatatcctgcgtttcccgggtggtatgctgatgtttcctggccaggagaagcacacacatataaaatagaaaaga

SEQ ID NO: 35811 - DNA, 265 bp, Glycine max
  unsure (1)..(265): unsure at all n locations; Clone ID: 701109746H1
gcgattttntcttcaatttccagatcacgaaactaaagaagatggagaaagcgatcagcagacagaagattttgcttcatcatctcaacccttcatcgtctacccacgtcaacgaatcatcctccctctatgcttcagcatgtgtggcgggggacagcgctgcttatcaaaggacatcgacattcagggatgatgttgtgatcgtggctgcttatcggactgctcattgcaaaggtaaacgtggtggtttcaaagatactcttcc

SEQ ID NO: 35812 - DNA, 266 bp, Glycine max
  Clone ID: 701109747H1
aacattgtagcttttgctgtctggattgcttacaaggaatcaaacttgatcagctcaattctgtggattgttttgattgccttgttagggagtatctttacatctgcctatattgttgtgcaatttctgaagttgtcatctcaagaatcttcacaggatcctatgtattatgttctgttgcggcatccaaacaagaatggcacagcaccacaaagacagcgttcatctgttgtgactctaagaataattttcagcattttgggtgt

SEQ ID NO: 35813 - DNA, 271 bp, Glycine max
  Clone ID: 701109748H1
gtttgcgagagaatggagttcctggacgaggacgcaaggccaaggttcgtgttccagtccggtgcagctgcgaggagcagcgagccaccgcacccgatccacaaacctaccaagccattcctcttcgccaccgtttccctctcctcactcttcctcactctctccctcttcttcctcgaagcggagcccttcaaatcgctcctcttctggctcgcactctctctcctcgttggccccttcgcccctccctccatcactggcggcgacgtcc

SEQ ID NO: 35814 - DNA, 273 bp, Glycine max
  unsure (1)..(273): unsure at all n locations; Clone ID: 701109750H1
tttgtttgtggaaatattggatcacttcttcagcaatgtctgtgagctcgatttggtttttaacttccacaaggtctatcttatacttgatgaattcattctagcgggtgaactgcaagaaacaagcaagaaggctatcattgagagaatgggggaacttgaaaaactagaatgaaaaattacttttcagcagtcatatcaatttggagatttcgatgacttactcatgcccttggctaattcttgtatttcaatgtgatacagaatttgana

SEQ ID NO: 35815 - DNA, 275 bp, Glycine max
  Clone ID: 701109751H1
ttgttacttctcttcgccttttgctttgcaattgtcaccaaacaattcttgcttagctctcacaagcaagcattatcaacaatgaagaaaattgtgttaaaggtggacttacatgatgacaggatcaagcgaaaagctatgaagacagcatctggcctttcgggggttcaatcagtttctgttgacattaatgacaagaaaatgaccttattgggggatgttgatccagtgagtgcagtgtcaaagctacgaaagtggtgtcacactgaaatagt

SEQ ID NO: 35816 - DNA, 265 bp, Glycine max
  unsure (1)..(265): unsure at all n locations; Clone ID: 701109754H1
tttgacgaactctgaaacaaacatgctcttattggtnacttgctgagttatctnactctgatgatgaaattcgtggccctggttcacaggacgagttaaattgatcaagagcaggaacagagacaccgttttgcctgttaagatataagactctttccttgtacagtttttgcaccttttgttttcttagcgatttaggggcgaacaaagccccccaccaaagtgaaagaaagggctgcagacctgccattcagaatgttgaaga

SEQ ID NO: 35817 - DNA, 255 bp, Glycine max
  Clone ID: 701109755H1
aaaaataaaacacaccctctacgtactccacactctctgatcaccaacacacccgcttaattaaatctctatatataaaccccttcaggcactccactatgacgggcaaagaaatttttcataagatgaaggaaaaagttttgggatcatctgatcccgattcaggtaaaggaaagagcaagatgaagaagcacataactcatggctttcacttggtaaagggaagatcaggtcatgccatggaagactatcttg

SEQ ID NO: 35818 - DNA, 272 bp, Glycine max
  unsure (1)..(272): unsure at all n locations; Clone ID: 701109756H1
gnaatcgcgaanagaacagcnangttaacaatgggtnctcgctangaggtggaactgaagctctcatcngcacgcgctctcaacaacgtgaactggcgccatggcccgaaccgcccatacgtcgtcgtttgggtcnncccaagcaacaagctctcgacgcgcgtggnngaaagcggcganactgacgcgaatngggaccaaacgctcacaattccgttgccaccaaagcctgctcgaggatcaaacgttgtacatcgacgtggtccacgccg

SEQ ID NO: 35819 - DNA, 266 bp, Glycine max
  Clone ID: 701109757H1
gcttcgcgtggaccaacaagaagtgtaagttttcattcaatggccagcgctcagctctcagcaatatcttcgtcgatctctacggcgtcgtttgaagggcttcgaccttcggctgttcagtttgcttccgcgggcagaattagaattggcaatctctcccaaaggtctttccggggcttggttgtcaaagccgccaccgttgttgcccccaaatacaccgcgattaagcctctgggagacagagtgctgataaaaattaaggaagc

SEQ ID NO: 35820 - DNA, 99 bp, Glycine max
  unsure (1)..(99): unsure at all n locations; Clone ID: 701109760H1
ggatattcatatccatagtgtcgttcctctgttggaattattaaatgtgttttgtcaaagcnangaaaacttagcangagacnncatannntgnttcgc

SEQ ID NO: 35821 - DNA, 253 bp, Glycine max
  unsure (1)..(253): unsure at all n locations; Clone ID: 701109761H1
gataactaganacagtgtgatgaaaatgaaggtccttgttttcttcgttgctacaattttngtagcatggcaatgccatgcgtacgatatgttccctctccgaatgaacactggctatggtgcccgtactccggaggtgaaatgcgcaagttggaggcttnctgtggaagcacacaacatctttggctttgagaccattcctgaagagtgcgttgaagcaacaaaggaatacatccatggcgaacaatataga

SEQ ID NO: 35822 - DNA, 191 bp, Glycine max
  Clone ID: 701109762H1
ctgatctgtgctgttttttcagggtacaacaaaattgggtgctttcggttaaactgtgatgtctccgccagtgctgagcataggggaggaggagggtaaaagcaatgtcactttgttggtttcctcatcaaccaccatggaaagtgtgtgtctcaagagcttagaatttaaagagcgcaactacatgggat

SEQ ID NO: 35823 - DNA, 252 bp, Glycine max
  unsure (1)..(252): unsure at all n locations; Clone ID: 701109764H1
attagatgctgcccaggccaaattcnatgatatcctcaattactccttctattgatattgcangtcagaagatcaaaagcttagcaaaggcaaaggaacttgattcttcattgatattgttgataagcagtgcttgggctaaagcaaaagaatctacaacaatgaagaatgaggtgaaagatataatgtaccaattgtacagggccacaaagagcagcctaaggagtattactccaaaagaaataaagctac

SEQ ID NO: 35824 - DNA, 278 bp, Glycine max
  unsure (1)..(278): unsure at all n locations; Clone ID: 701109765H1
ggggtctatcgacactaatactaatgcaattagacatttacaccactaattaatatgtagaaaatgattttgattagtctaattctagaattatagctaattattatgtagatcttacatgttaaattttagaattttaaaaatattattactcaatcaataatttatttctttgaaaagtaatttatacattaatttagtgaaatacattttggtagagtaaganacaaagttacatcgttcaaactttctgttcagcaatgaatttgtgagaattt

SEQ ID NO: 35825 - DNA, 276 bp, Glycine max
  Clone ID: 701109766H1
agcaggtgtggcatcagtatgcaagggatgggatgcaaggtcaatctagcttggccaaactgaatggcgctggatactatgccggaggtcctatgcccatgatgccttatgggatgcccccagttaatggaatgggacctccaaccgggtattatcacactccttactgataccccttttcacttttttctttgtgtcatatctataggttgtttcgtttattttttactatgacatagtgttttccttggtttcaaatgatgtcatcttattctt

SEQ ID NO: 35826 - DNA, 275 bp, Glycine max
  Clone ID: 701109767H1
gcaacaagtaactcgttcagattttggtttttgcttccctatccgctctctcttcttcacttcagtatggcggtggtaccttacaccaccggttctgcacctcttctttctcctccttctacttctagtgttgccacaaagctctactccggattgaaacttcaagctgcgagtcctttcggagctgcaaaacctaacgtaaccgctgagttttatggaaaagttcacaacactcttcactgtcggtatgctaaccacaatacatcaatggcacg

SEQ ID NO: 35827 - DNA, 264 bp, Glycine max
  unsure (1)..(264): unsure at all n locations; Clone ID: 701109768H1
aattcggcagttaatagcaatttcgataagaaaagttccaaaattcagctaagacnaaatgtctctcattccaaacattttcggtggccgtaggagcaatgtgttcgatcctttctcacttgacatgtgggatcccttcaaggattttcctttcccaaattccgtctctacttccttccctgagttttctcgggaaaattctgcgtttgtgagcactcgtgtggattggaaggagaccccagaggcgcacgtgttcaaggccga

SEQ ID NO: 35828 - DNA, 274 bp, Glycine max
  unsure (1)..(274): unsure at all n locations; Clone ID: 701109769H1
cacaacaaaactctccaattctgaagattttcttatctcttntctttgaaactagaagctccgtgattgatcaatggcgacaaaagaaggcaaagccataggcatagacctcggnacgacctacatctgccgtgggcgtgtggcaaaacgaccgcgttgagatcatccccaacgaccaaggcaaccgaaccaccccctcctatgtcgccttcaccgacaccgagaggctcatcggagacgccgcgaagaaccaagtcgcgatgaacccgcagaa

SEQ ID NO: 35829 - DNA, 271 bp, Glycine max
  unsure (1)..(271): unsure at all n locations; Clone ID: 701109770H1
caaacctcttcgttccttcgattcattccatttcttccaaaatggccaaagacccagttcgcgttctcgtcactggagccgcagggcaaattggatatgctcttgtccctatgattgctaggggagtgatgctgggtcctgaccagcccgtgatcctccacatgcttgacattcctccagcagcagagtccttgaatggggttaaaatggaattggtggatgctgcattccctcttcttaaaggtgttgttgcnacaaccgatgtggttga

SEQ ID NO: 35830 - DNA, 271 bp, Glycine max
  Clone ID: 701109771H1
atgtctatgaggaggccactaattcatctgtatcattagagacttcaagtaaagatgagactggtcagtttttggatccaaaagaaggtacacattcaaaggaacctaatgcaagtgaaagaaaattcaaagagttcatttgtggtgaggaagcattaagaatatccccaactgaaccatattgtttttgccatccaattcgcagaggacatttgaacatttcacaatattattccatgcagcaggtacttgcaagatctacatactattt

SEQ ID NO: 35831 - DNA, 269 bp, Glycine max
  unsure (1)..(269): unsure at all n locations; Clone ID: 701109772H1
ttccgattgttgtgatccgtacaacacagcacancaccatggctggnccccaaccccatccccaagtggttgtntctctctctgactctgatcctcagtctctctgtctccgtcggcgcccgccacttcgtcctcgtcctctcccaggaagactacaaggacgacccccccgccgatcccgactccgccgccgagtgggacgagttcggcgacggagactcccacaaatccgaggacgacctcgaccccggctcatggcgccccatctt

SEQ ID NO: 35832 - DNA, 265 bp, Glycine max
  Clone ID: 701109774H1
atcttgttctctctatcaccgcaatggagactccttcatccacagcaagaagaatcacaagatcccaaaccgcctccaacaacatccccgtttcaagaaagaagaacgaggagtgctcaggaaaaaagagcgtttcgaaaacgcggcagagaagcagcgtgcaacaacagcaggataatcggtgtgcgctggtggacatatcgaacgattcgccgatcgtggggctggcgaacggtaaggacatgatcgagacgcctttgtcatc

SEQ ID NO: 35833 - DNA, 262 bp, Glycine max
  unsure (1)..(262): unsure at all n locations; Clone ID: 701109775H1
gcacatttgcaaagtgttatttttcttttttttctcatttgcattgcaaattgcaatggcttccaacaaggttattgccaccatcatggtgctttctctccttgcctactcaacatcattcaccaatgcatgtggcacatgccacccaaaacctannnnnnnnnnnnnnnnnnnnnnnnnatcaggaaagtgccctaaggacacattgaagctaggggtgtgtgcagatattctaggtcttgttactgttgttgttggctcc

SEQ ID NO: 35834 - DNA, 261 bp, Glycine max
  Clone ID: 701109776H1
attcaagattcagcaagtgcgtttcggaagcagagaccgaaatacttcgagatggcccgtacaaagcaaactgctcgtaagtcaactggaggaaaagctcccaggaagcagcttgcaaccaaggctgcacgtaagtctgctccaacaactggtggtgtgaagaagcctcatcgttatcgccctggaactgttgctcttcgtgagattaggaaataccagaagagcatgagctcctaatcaggaagcttcctttccagtggt

SEQ ID NO: 35835 - DNA, 240 bp, Glycine max
  unsure (1)..(240): unsure at all n locations; Clone ID: 701109777H1
tccaattcctctggatctcgtctcactncgatagatctcgaacatgagcactggggagcttancaacatcgaacctctcgaactcaagttcccctttgagctgaagaagcagatctcatgttctcttcaattgtccaataagaccgatagctatgtagccttcaaggtgaaaacaaccaatccgaagaagtattgtgttcgtccgaacactggggttgtcacgcctcgatctacgtgtga

SEQ ID NO: 35836 - DNA, 265 bp, Glycine max
  Clone ID: 701109779H1
gcgccggccaaggagcctttggaaacatgtgccgcggcggacgcatgttcgccccgaccaagatctggcgccgctggcataggaagatcaacgtgaaccagaagcgctacgccgtcgtctccgccattgctgcctccgccattccttccctcgtcctcgcccgcggccaccgcatcgagtctgtcccggagctcccccttgtcgtcagcgactccgccgaagagtcgagaagacaaaagaagcgatcaaagtcctcaagcagatc

SEQ ID NO: 35837 - DNA, 268 bp, Glycine max
  Clone ID: 701109780H1
aagaaacagtcagaatcagaatcagaagaagcgagcaaagatgtcgggtcgtggaaagggaggcaagggtttgggtaagggaggagccaagaggcacaggaaggtgctccgcgataacatccagggaatcacaaaacccgccattcgccgtttggctcgcagaggcggcgtcaagagaatcagtggcctcatctatgaagaaacccgcggcgtccttaagatcttcctcgagaacgttattcgcgacgctgttacctacaccgagcat

SEQ ID NO: 35838 - DNA, 275 bp, Glycine max
  Clone ID: 701109781H1
aaaccctaacaattgacctcaactttctcgacaagaggctctctgtcggtgttctctcccttccctttggtgtcgtgtcttccaaatggcgaaggtttgattcctctgttcaatcgggttttggtggagaaaatcgtgcctccatcgaagaccaccgctggcattttgttacccgagaaatccaccaagctgaattccggaaaagttattgctgttggccctggctttcacagtaaggatgggaagctaattcctgtggctgtaaaggaaggtga

SEQ ID NO: 35839 - DNA, 275 bp, Glycine max
  Clone ID: 701109782H1
ttgcatttcatttgagagagagagcgtcttacctttccattatcaaaatggctgtttcggctatcacaggagcgaggctaaccctagggatagggttggcgatacctctttcctctcccacgcgctctcgaaccgtcgcaatggccgtatccgtcgaccccaagaccgacaacaaactcactcttaccaagtccgaggaagctttcgctgctgccaaggagctgatgcctggaggtgtcaatccccagttcgtgccttcaaatccgtgggtggtc

SEQ ID NO: 35840 - DNA, 276 bp, Glycine max
  unsure (1)..(276): unsure at all n locations; Clone ID: 701109783H1
gaaaaaaaaaagagtggagaaaattgttatccacaacacaacatcatcaangttacacaagtctctctgatggcaacctcgacctctttctctccgacagcctctgtccgctccatcatcttccaaaagcaaaaccctcccaaagcccttcttcttctctcccagcagcgctccttcgcctcttccgcaagctatgcaactctcaagctccctcgcagacccctcctttccaaagggagaacgccacttgtnagggctgctactatcgaagaaatt

SEQ ID NO: 35841 - DNA, 272 bp, Glycine max
  Clone ID: 701109784H1
tcggcgtagtcggagaaaggtcattgctgaacagaggacagctagttcaagtccagaacatccatcatttcgagcacgtggaaggtccatgcttagtggtgataggacaacgtttagagattttaccgatgatcaggctacatcaagatccagctataggtcagatggcacatcctcgtcagaagctcgtcggatacgaagaagaagcatcagcattacaccagagattggagatgatatcgtaagggctgtacgggcaatgaatgaaactc

SEQ ID NO: 35842 - DNA, 272 bp, Glycine max
  Clone ID: 701109785H1
aatcagagcaaggagaaattttgacccagcctttcttggatgcttgcaagcatatacttcctgttatagataagtttggagctgctatggcccttgttaaatctgacattggtggtaacatatcgagattggaatctaagtactcctccaatccaaccaaattcaactacctgtacagtttggtacaagttgaggttgaaactaaaacggctaaatcatcatccagttgtaccaatggacttctttggcttacaagagcaatggatttcttg

SEQ ID NO: 35843 - DNA, 272 bp, Glycine max
  unsure (1)..(272): unsure at all n locations; Clone ID: 701109786H1
gttgttggctgttaatttgttganaganagcaatcaaaaacattcatggcgtcttccaaggaganagaagaaaacaccaattaaccaccacctgataggctgatacaatacaatctcctttcctttttcgacaacaagaatggctgcgaaatctagttcgagttcgacaacaacaaacgtggtgactctgaaggcggcgtgggttctcccgcagcgcacgcagaacatccgtgaggtgtacgaggttgggcggaagctcgggcagggccaat

SEQ ID NO: 35844 - DNA, 268 bp, Glycine max
  unsure (1)..(268): unsure at all n locations; Clone ID: 701109787H1
cagaaacaatgaggactaccgttctccagcaattccagctatgaccaaaacactgcttgaggatgtcaagaagattttcaagaccataactggaatcccatttctcatccctacaactggnactggtgcttgggagagtgctctcacaaacacactgtctcctggggatcgaattgtatctttcctgattggccaattcagcttgctttggattgatcagcagcaacgcctgaaattcaatgttgatgttgtagagagtgaatggggc

SEQ ID NO: 35845 - DNA, 99 bp, Glycine max
  unsure (1)..(99): unsure at all n locations; Clone ID: 701109788H1
ttttatgtcaaaannntnaatttctcactatatcanattttatttgggatatttgaataggaaattctgcataaaatttgacatagtgagaaattaatc

SEQ ID NO: 35846 - DNA, 255 bp, Glycine max
  unsure (1)..(255): unsure at all n locations; Clone ID: 701109789H1
gttcctcaacctctgctaacccttttcctctttctctcccttctctcaattgtcaactcctctccttcccaacaccttcagatcnccaatgctgaacgcaggattgacttgacttctcacattattaaggtgtacttgacgttgaaggttgaaaatttggggacatctcctacttcagaagtacatattgccttttcacccactgaagtagancatctagcaatagtcagagctgctgcaacttctgggaagagg

SEQ ID NO: 35847 - DNA, 319 bp, Glycine max
  unsure (1)..(319): unsure at all n locations; Clone ID: 701109790H1
ctctcttcgacctcgcatcgcaccttcaacttaacctattccacttgtaatcgtaantcgctttgctagaagaagagacaaagtgtgttctgtgtgtgtgagagagcagagcaatggctgggtcgtggggcacggccgttgctgtgattgttcctaggccattcatttccttncggcatgtnctatcttgtcgcattttgccattngctgaagcgcaggganagnccaaccaaagtnttagggngaacgggtncattcgnggcatttggattctntgggaaaacaaacctgatttncaatggtggttcgggtcgttttc

SEQ ID NO: 35848 - DNA, 261 bp, Glycine max
  Clone ID: 701109791H1
ctagggttttcgagcggtctggacagagagctggccagataagttcccagaagaaaaaaactggtgtcattgctcccaaacgatttgtacagaggttgaaaaaacagaatgaactcttccgtagctatatgcaccaggatgcccatgagttcttgaactttttgctgaatgaacttgttgacattctggagaaagaggctcaggctgcaaaaactgatcaggagacatctccaccttctgaaaaggctgttaatgggccca

SEQ ID NO: 35849 - DNA, 303 bp, Glycine max
  unsure (1)..(303): unsure at all n locations; Clone ID: 701109793H1
gcacaacgaaccactctgaagncgctcacgttatccacaacactctcaacnntccttaaaccctaaccaatccaacntgncttcttcttccaccttcactgcaatganccgcctgcaagctcttcctcctgccgccggccatncttcnctccttncccctncccgnccgnccggctnccaaacgnccgtncgttnctgttcggagggcggcagcggngcccggccaggggtctaccggccatgggccaagggagttggcaactttcaaacaaaagaacgggcaccggcaaattnaaggaagcc

SEQ ID NO: 35850 - DNA, 263 bp, Glycine max
  unsure (1)..(263): unsure at all n locations; Clone ID: 701109794H1
gccgaggtattccatttnctttttcttccctgagacggagtcattgggtgagtcacccgctgcaacccaactcgtgcatttgaagaaagacaaaaaggggttggtttttggttttggtttggttaactccctcttcctcttctactctcacccatggtctccgaatccgaactcatcggccgcctccgcgagtttctccggagctccgacctcaacaccaccacaaccgccaccgtccgccgccagttggaggccgatttcgg

SEQ ID NO: 35851 - DNA, 267 bp, Glycine max
  Clone ID: 701109795H1
ctctactctactgcttcaccttctgctctagaaaattcagtggtgatacatggcttcggctactctctcctgtagccaaaccagcccttcaggcaaatgggaaaggcttctctgaattctctggcctccgcagctcatcaggcttccttcccttttctagaaaatcttcagaggatttccattctgtcattgccttccagacctatgcagttggaagcagtggaggatacaagaagggtgtgacagaagcaaaactgaaggttgcca

SEQ ID NO: 35852 - DNA, 259 bp, Glycine max
  unsure (1)..(259): unsure at all n locations; Clone ID: 701109796H1
gtgatttggagtttggagcgactgaactaatcattaatttgcactccgctgtttcagcttcatcacccttcttttgcatcatttatatctcttgagaaatggcacaagaaacctttctattcacatctgaatctgtaaacganggtcaccccgacangctgtncnancagatctctgatgcagtacttgatgcgtgcctgancaggaccctgacagcaaggttgcctgtgagacatgcaccaagaccaantggtcatgg

SEQ ID NO: 35853 - DNA, 267 bp, Glycine max
  unsure (1)..(267): unsure at all n locations; Clone ID: 701109801H1
attgtcatgtcctatcatacccatgtaccagtgtacattccaagatatacctttagctggctggtgaaacccatgtggttgatcataaaatttcttcacgnagcagctgatctgactctggtgccatctgctgccattgcgggggatctcctagcagctagagtcacagcagctaacaagattcgtctttggaacaagggtgttgattctgaaaaattccatcccaaataccgctcccatgaaatgcgattaagactaagcaatgat

SEQ ID NO: 35854 - DNA, 263 bp, Glycine max
  Clone ID: 701109803H1
ctcaatttttctctcaaccggcccaatttagcataagcccagcatggccaccgcaacagcagcagccaccttcgtccttcatggggacgcgcctcctggaggcccattccggggcggggcgggtgcaggcccggttcgggtttggcaagaagaaagccgccgccccgaagaaagtttccagggggtcgggctctagctccgataggccctgtggtatccgggccgccaaggcgccgagtactggatgggagcttgtcggagat

SEQ ID NO: 35855 - DNA, 227 bp, Glycine max
  Clone ID: 701109804H1
tctcgatttacggttcagcgctccgtctcctgcctctctttcttccttctccagcaactccggcagtaaccggagtgccagcgctaatgccaccgccattcctccgatttcggtcgccaggcctaacagatctccttctcctgcgttaggtcggaactttgtagagcatactcattcggttcgttcaacatcagctggaagaccagcggtttcagttcgctcagcgg

SEQ ID NO: 35856 - DNA, 264 bp, Glycine max
  unsure (1)..(264): unsure at all n locations; Clone ID: 701109805H1
atgaagagggcaagggatgatatgtatcctgcctctcaattcaaacgcccctttgcttcatcacgtgctgattcctatggacaaaaccaagtccctnnnnnnnnnnnnnnnnnnnnnnnnnncaatggaggtgttgttggcgggggagcaaatacttcccaaaagcttactaccaatgatgctttatcctatttgaaggaagttaaagacatgtttcaggaccaaagagagaagtacgacatgttccttgaggtccatgaaaga

SEQ ID NO: 35857 - DNA, 155 bp, Glycine max
  unsure (1)..(155): unsure at all n locations; Clone ID: 701109806H1
aaatgggcaaacaagtattgaattcctttcgtcccccagtggttttcttgttattcttcattgtcttttccgttgtttcctgngatgaagcttccaagaccttcatctttcgcgtggattcccaatccaagcccaccatcttccccacccattat

SEQ ID NO: 35858 - DNA, 264 bp, Glycine max
  Clone ID: 701109808H1
aaaacagagaatgctactgttgctgagttgcctgacttgatagacactggtgattcaaatgattaccatggaactgatgacactctaaagggtacaagtgatcaaaatatagcaaatttgacatcatcaactcctctggttgatgatttatttggagattttagtgcttctattggagctagtcaagaactaaaaaatgatgatccatttgctgatgtatcatttcacacaaatgagaacaaagaacatgcagatgatctcttt

SEQ ID NO: 35859 - DNA, 264 bp, Glycine max
  unsure (1)..(264): unsure at all n locations; Clone ID: 701109809H1
anaggcaatggatatgaggttgatggatttggactctccattcttcaacactctgcacagaatcatggatctgacggaggacgccgagaagaacttgaacgctccgactcggacatacgtgcgcgacgccaaggcaatggctgcgactcctgctgacgtgnaggagtaccctaactcgtacgttttcgtgatcgacatgcctggcctcaaatctggggacattaaagtgcaggtggaggacgacaacgtgcttctgataagcgg

SEQ ID NO: 35860 - DNA, 263 bp, Glycine max
  Clone ID: 701109811H1
aaagactctgcaaaaacctatcctgaaacggttcgcagagaggcagcaaaacgctaaagccctaaacccccatattgagctttctccctctctctccgtcttcgatggcaacatctcttctgaaaactccgctcaatgtgttcaacagacaccacaatcacgtcgcattcttctccaatggcacaagtgcaagaagcagtgctccaatttcgcagaagaggagatcgcgtccattccccgtagtgtcaatggcatccacaccg

SEQ ID NO: 35861 - DNA, 261 bp, Glycine max
  Clone ID: 701109812H1
gaaaaagtaaagtttccagttttgttaagcaggtctacttattcagccttatggtataagccagatacattgttttctacacccaaggcttatgtaaagattgatttcaattgcccatattctggaaactctcctgaggctgaagttttgacgcatattttcacagagttattgatggattacttgaatgaatatgcttattatgctcaggttgctggtttatattacagcataaatcaaacagatggtggtttccagatg

SEQ ID NO: 35862 - DNA, 261 bp, Glycine max
  unsure (1)..(261): unsure at all n locations; Clone ID: 701109813H1
aacaaaganaaaaaaaacccttagccaacacaaccatcatggccacctctgctattcagcaatcagcattcactggtcaaactgctctgaagcagctcaatgagttcgtccgcaagaccggtggcgccggcaaaggtcgcactaacatgcgccgcaccgtcaagagtgctcctcagagcatttggtaactcaacattacccttcccactccactagttcaacttagtagttactgcttttaatataatactcgcntgacaa

SEQ ID NO: 35863 - DNA, 261 bp, Glycine max
  Clone ID: 701109815H1
cttattctttttctctctttctctctgcttgcggtgcttcacaagccaaatctaacttgtctctgttttctccgatctagtactactatcaatggccggaaaaggagatggtcctgctatcggaatcgatctcggcaccacctactcctgcgtcggagtgtggcagcacgaccgtgtcgaaatcatcgccaatgaccagggtaacagaaccacgccgtcttacgtcgctttcactgattccgagcgtttgatcggtgacgc

SEQ ID NO: 35864 - DNA, 262 bp, Glycine max
  Clone ID: 701109816H1
gtggacctgggcgttgcaagataaacaatggaggttgttggcatgaagctaggaatggacatgcatattctgcttgttcggatgatggaggggttaaatgccagtgtcctgcaggctttaaaggtgatggtgtcaaaaactgtgaagacattgatgaatgcaaagagaagaaagcttgtcagtgccctgaatgtagctgcaagaatacttggggaagctatgactgcacttgcagtggggatctttgtatataagggaccac

SEQ ID NO: 35865 - DNA, 264 bp, Glycine max
  unsure (1)..(264): unsure at all n locations; Clone ID: 701109817H1
ctcggcttcntcatattagaattcagacaaagcctcatccttcatagttcagatccattcttgctgctgtattttgtttntcttttaaatttttctttaaatttctcaattgatcaaagatcttcagcaaaccggtcaagtttgtgtagtttggccagatgggaggtgggtttagagtgctacacttagttagacctttctcncgttcctacctgaagtttcagactgctgataggaaagtggccatttagagagaaggtcttc

SEQ ID NO: 35866 - DNA, 262 bp, Glycine max
  unsure (1)..(262): unsure at all n locations; Clone ID: 701109818H1
ccacttcctctgacgatgctccaaatccacgcactcggaaggaccttgttctaatgatttgcggtttgtttttgctctcttcccttgttgcctttggagggtacagggcctccaacgcgccacatgctgacgtgtcatcgccagcatcgaacgatgaacaacctagtcccacatcggtgccttctccgaaatggtacccggtttcgcggggtgtttcttctggggtctcggagaagtcatcaagcatgttttntgcggttaa

SEQ ID NO: 35867 - DNA, 257 bp, Glycine max
  unsure (1)..(257): unsure at all n locations; Clone ID: 701109819H1
aattcgctctgtgcagtttcctcgctctcttttctgcaattttcttttttgtncgttctctgcggttatctttttgagcttcaatggcggacgctgaaaccttcgctttccaggctgagatcaaccagcttctcagcctcatcatcaacaccttctacagcaacaaggagancttcttgcgtgaactcatcagcaacgttctgatgctttggataagatcgattgagagttaancgacaagagcaagtcgatgtcag

SEQ ID NO: 35868 - DNA, 260 bp, Glycine max
  Clone ID: 701109821H1
cgttcatcatggttcggttcagcaacaacgtgatcggactcctgaacttcctgaccttcctcctcggcgcgtgctgtcgcgtgtcgtggctcctctggctctacctcctcgtcatgttcgtcctcatcgttcttctcttcgccttcaccatcttcgccttcgttgtcaccaacaagggcgctggcgaagttgtgtctaatagagggtataaggagtataggcttggggattactcgaactggttgcagaagagggttaac

SEQ ID NO: 35869 - DNA, 261 bp, Glycine max
  Clone ID: 701109822H1
ccaaagcaaaaggttgaagatggtatctttggcacttctggaggatttggttttactaagcagaacgagctctttgtgggtcgtgttgctatgcttggttttgcagcatcactgttgggtgaaggaataactgggaaaggaattctagcacaattgaatctggaaactggaattcccctttatgaagcggagcctcttcttctgtttttcatcctcttcaccctgctaggagccattggaggtttaggtgaccgtggaaaa

SEQ ID NO: 35870 - DNA, 260 bp, Glycine max
  unsure (1)..(260): unsure at all n locations; Clone ID: 701109823H1
gaaggtcagagtgacatctactacatcacaggtgaaagcaagaaggctgttgagaactctccattcttagagaagttgaagaagaagggatacgaggttctttatatggttgatgccattgatgaatatgctgttggtcagctcaaggaatttgagggcaagaagctgtctctgccaccaaggaagggctcaagcttgacgagagtgnagatgagaagaagaagcaagaagagttgaaggagaagtttgacaacctctgc

SEQ ID NO: 35871 - DNA, 262 bp, Glycine max
  unsure (1)..(262): unsure at all n locations; Clone ID: 701109824H1
aaagttaccagtttgcgatctcattacaatcnccccaagtttctaatctcagctaagaaaaaccaaaagatgtctctgattccaggtttcttcggtggccgaaggagcaacgtgttcgatccattctcactcgacatgtgggatcccttcaaggattttcatgttcccacttcttctgtttctgctgaaaattctgcattcgtgagcactcgtgtggattggaaggagaccccagaggcacacgtgttcaaggctgatattc

SEQ ID NO: 35872 - DNA, 240 bp, Glycine max
  unsure (1)..(240): unsure at all n locations; Clone ID: 701109825H1
antgatttctccctgcttcgntntanctcagtgancagagacnagatgatgatggagatgncgaacganancgctgtcgttgcggcactcgcggngttggtgttactcgcggcgagtgtggnggtggatgctcangagaactcggacgtgaagacnctggtgaagtacaagcacgggaagaagtactgcgacaaaggatgggaatgtaagggctggtcaatttactgttgtnacctcanc

SEQ ID NO: 35873 - DNA, 260 bp, Glycine max
  Clone ID: 701109826H1
aagtgtggttcaaaagaagaagagcaggatagtgtttagttggtcatctgtggatggcatattgcattccaaactcaccatcactccagggttggaagacaggtccatgttgtttattcggctggaacataggcaagaatagagttaatggcaaacctcagattaagtaccatgatattgatcttacattcccaacttctctggtcgacaaaacatttttgagagggaaggagctcaaatgctgctatagggctacaatt

SEQ ID NO: 35874 - DNA, 258 bp, Glycine max
  Clone ID: 701109827H1
tttaggtgagagatgtccgtctgatcatggataggaactcaagacgatctaaaggagttgggtatgtgttttattgtcaaataatttattgtttaaatgtatgtgctattgtggtattaggatatgaacttccaagaatcatgtttaactgtatctttaaatggactagcaatgcgataatgatgagggatggtgggaataccttgcactcatgtttaatcaattcatgctgcgcactcaaggtagatgacataatcc

SEQ ID NO: 35875 - DNA, 253 bp, Glycine max
  unsure (1)..(253): unsure at all n locations; Clone ID: 701109829H1
cgagcagccacacctcccgcagcagccatggttctcaaaactgaactatgccgattcagtggtgccaagatctacccaggaaagggcatcagatttgttccgtngtgattcttaggttttnctgtttgcnaactcaaaatgtaagaggtatttnccacaatncgcctgaagccttcaaagctcacctggactgcaatgtacagaaagcaacacaaaaaggacattgctcaagaagctgtgaggaagaggagac

SEQ ID NO: 35876 - DNA, 242 bp, Glycine max
  Clone ID: 701109830H1
ctcagaatttctatctatctcttgtttcaatttcaacaacggttactccttttaccgttttgagtttcaatcaagccatcatcatgtctaccgcatcgcaacccaaggccaagaaaacggcgtcgtccaagaagcccctctcccaccctcccttcgccgtgatgatagcagaggcgattgcgagtctgaaagagagaaccggttcgagccaatacgcgataaccaaatacatcgaagggaag

SEQ ID NO: 35877 - DNA, 261 bp, Glycine max
  unsure (1)..(261): unsure at all n locations; Clone ID: 701109831H1
gnaaagaaagaagtcatttggtccatgataggagctcaaaccacagaacaaggagatngctntaagttnaaaggcaacatacctcattgctgcaagaaaattcccanagttgtggaccttctccctggtgtacnttacaaccagcaattctcaaactgctgcaagggtggagtagtggcagcatggggccaagatccttcacaagctatctcatccttccaagtgagtgtaggccaagctggtacctcaaacaagacagtt

SEQ ID NO: 35878 - DNA, 264 bp, Glycine max
  unsure (1)..(264): unsure at all n locations; Clone ID: 701109832H1
gaaagatcccgattgggagcgnagaaagatggagtccccaatctnangtaagcgacactgagatccctnttctaatgcagagcattcgatgctttnaccgcttcttacgtnaaatccctccattccctcagagccagagcgcaagaaaccgctcgatgtcaagttnaactagacgaggttaaatctaaactcagagagnccgaggatgatttcgtcaaagcattgcggtcaagacccgcaaagaggccaagcgaatggtttgat

SEQ ID NO: 35879 - DNA, 263 bp, Glycine max
  unsure (1)..(263): unsure at all n locations; Clone ID: 701109833H1
atttctcaccggctcctcatcatagatntttnccattcacaccttcatgcatcangtatgaaacgaaaccttgtnaaattagtagcatgtaacactncgnaaccntcactacttattatcgcatatatatnacaagtgtaagtttcaacttatctttngaaacatgtcttcttcttttcaccttcttggttaacttctcctncatgttccgcnttggacanagttgcnnnttccncgantgcgtactcnaagttncgtgggtg

SEQ ID NO: 35880 - DNA, 221 bp, Glycine max
  Clone ID: 701109834H1
agacttagattttgtgaatggctgaagtggaagagggacaggtcatcggcgtccacaccgttgatgagtggaagctgcaactccagaatgcaaaagactccaaaaaactgattgtggtggattttactgctcctggtgtggtccatgccgttttatggccccagttcttgcagagattgcaaagaaaactcctgaattgatcttcctcaaagtggatgtgg

SEQ ID NO: 35881 - DNA, 228 bp, Glycine max
  unsure (1)..(228): unsure at all n locations; Clone ID: 701109835H1
aggagtcttcagtactctcctcgttgttcancgctttccacntttcaatttcgattctttanttaatttaataagatgtttgggagggcaccgaagaagagcgataatacgaggtactacgaaatcctcggcgtctccaagaacgctttcgcaggatgatctgaagaaggttacaagaaagccgccattaagaatcaccccgacaagggcggtgatccgagaagttta

SEQ ID NO: 35882 - DNA, 260 bp, Glycine max
  unsure (1)..(260): unsure at all n locations; Clone ID: 701109836H1
cgaccttgcgattcagcgcagatttgaaggcgattttttactagcatggcagcaataatgttgacgactatgaatattcctctgcacacttcggtttgggttaattcccggcggaagagttggtgctgctacgcctcactttcgcagccagacaggaaggagatccgtctcggtttgcccagcaaaggtcgcatgtncgcngacaccctcgaacttctcaagaattgttaatgttagtngaagcaggtcaatcctcgtca

SEQ ID NO: 35883 - DNA, 256 bp, Glycine max
  unsure (1)..(256): unsure at all n locations; Clone ID: 701109837H1
aataactccgttgctgacaaattagcatggccgctgccatcggaagcatggtggacacgaatgggctcatggtccaagtcatcaccgnaaggtggttcgtggtgttcgcctcctttctaatcatggccgccgccggcgccacctacatgttcagcctctactccggagacatcaaatccgccctggcctacgaccaaaccaccttaaacctccttagtttcttcaaagacttgggtggcaatgtcggcgtctctcg

SEQ ID NO: 35884 - DNA, 258 bp, Glycine max
  Clone ID: 701109838H1
ggaattggattgattcaaacgagttaacgccatgctcagatcactgtcgaagctctcactcctcttttcctcagccaggaatccccattatctttcaagtgctcagcgtttcatatctcaagggagaatagcagcttcaagagtcaagattggagtggtaagcactattcctattcgatccaagttgacttcaacaatttcatcagcaattgcatcagaaatggctgcagaagatcaagttcaaagggttaactacta

SEQ ID NO: 35885 - DNA, 260 bp, Glycine max
  Clone ID: 701109839H1
agcttacatgctcctaccctgggcatcaaattcttctatggaccagagacttactacggaaatgaggtgtcagttgtagaaatggatggacaatttgacagactagatgaactaatatacgttgagagccacctaagcaacctctctacaaagttctatggagaggttactcaacagatgttgaagcatgctgatttccccggcagcaacaatggaacaggtctcttccaaaccatagttggtttgaagataagagattt

SEQ ID NO: 35886 - DNA, 252 bp, Glycine max
  unsure (1)..(252): unsure at all n locations; Clone ID: 701109840H1
aacagcagaaggaaggaaaangtgactgcacagaggtatcgaataaagtcaaaagtccggaatggtttcactctgatcaaactgaggaatcgaggaaggaagggttaggattagggtaaggattgggaagccataggagaagagaacaagaggaagaagaggtcaattcaaaatgccggaagaggatttggtggacatcaaatttaggttgtacgatggttccgatatcggacccttcaggtactcctccgc

SEQ ID NO: 35887 - DNA, 238 bp, Glycine max
  unsure (1)..(238): unsure at all n locations; Clone ID: 701109842H1
aacaaagtttcggttattggtgtacatttttcttcctccanactttctctaaaacattaantgaactctccattccttaaattttaccaacgagctagttccgacacagacaaagcaatggcaaagactgagttagaggtgactgttgagagcaagaacaaagaactaaagcacctgggatttgtgaggattgctgctattcaaacttttgtgattgtgtcaaatctgtatgagtacg

SEQ ID NO: 35888 - DNA, 257 bp, Glycine max
  Clone ID: 701109844H1
aaatcacttcatcatggcttcctcgtgtgcttcctctgccattgcagctgttgccatctccacaccaagttcccagaagaatggatcactcttgggaagcacaaaagcttcttttcttagtgggaggaaactgaaggtgaacaactttacagcaccagttggagcacgatccagcactacagtttgcgcagttgctgagcctgataggcctctgtggttcccaggcagcacccctcctccatggctagatggcagtt

SEQ ID NO: 35889 - DNA, 247 bp, Glycine max
  unsure (1)..(247): unsure at all n locations; Clone ID: 701109845H1
ttcaagcaattctcactttctcacaaatggccaatnccttcccaacattccacccctcttccctcatcttcttttccttcttctttttcttattctcccctctcaccgccgccaaaacacaccgtttcgcgcgcaccatctccccctcctccctgggcctggacggggagcctgagaaactaagccacctccacttcttcttccatgangttgtnagtggccaaaaccagaccgcggtgcgagtcgc

SEQ ID NO: 35890 - DNA, 257 bp, Glycine max
  Clone ID: 701109846H1
ctcccttcataataaacccactgatcgcttctctttcctcttctctctctctcgatcagtgctagacaaggactggtaaccaaaaattccaagaagggtacattaattcatggcctttgaggagcactatgtttctcaggaattgaaaaccatccccagccccatgacagtgacagaaaatttggatgggtgttttgattgcaacatctgcttagattttgcacatgaaccagtggtcaccctttgtggccacctat

SEQ ID NO: 35891 - DNA, 261 bp, Glycine max
  unsure (1)..(261): unsure at all n locations; Clone ID: 701109847H1
gctactcactctncctggtaatctcatnacctaaccattgcttaangcanccttatccttangtcctatgaccnantctctgntatnncgntttgtttgatttgaancgacggagangacttacaaagnatcattcgattccgctgcaaacaagcgctacgctgatcanataattcctcatattctgcatctgtatggatcatctgcaacctctcgcgactttgaaatctatgccgcaaatgcttcatttgaggatccact

SEQ ID NO: 35892 - DNA, 240 bp, Glycine max
  unsure (1)..(240): unsure at all n locations; Clone ID: 701109848H1
tggaaatccatcagaaattatcacgatcttcattgaggactatgtccacagctcctcaggncctaacaaaggtgttcaaagattcagggctgagcaagtacatattcccggtgtctcgcatgcccaagaatggtggagattggccaaccgtcgatgacatggttcagaagaatcagcgcctagtcgtcttcacctccaaatctgccaaggaagcttctgagaacattgcttatcagtgga

SEQ ID NO: 35893 - DNA, 257 bp, Glycine max
  unsure (1)..(257): unsure at all n locations; Clone ID: 701109849H1
cggatttctgtttctctgtcttcattttagtttttacggctagaagaatgtccagctcatcggaatatttggtattttccggccaccacccggcgaactctccggcggaaaagtccactttctctcagacttgtagtctattgagccaatacatcaaggaaaagggtaccttcggagaccttaccctcgggatgacttgcactgccgaaacaaacggttcccctgagacatcgtgtcactctgcaacaaccatcgnc

SEQ ID NO: 35894 - DNA, 258 bp, Glycine max
  Clone ID: 701109850H1
caaatacctgcatggtatgtcactttggaggatgatgttcttcgggaatttggtgcttataatgatcattgggtagtggcaaaaaatgaagaggaagctcagaaagaggctagccagaggtataatggaaagcagtttcatttaagccaggatcctgacgttcttgatacatggttttcttctggtctgttcccattatctgtgctgggatggcctgatgacacagaggacctgaagacattctatccaacttctgtt

SEQ ID NO: 35895 - DNA, 257 bp, Glycine max
  Clone ID: 701109851H1
agaaattagggtgaagtgaaggagaagctcttgagaaggtgcaccggctttattgcttgtacatcaaacagtttttgttaattccaaaattatcctgtatcgaaggcatgttctgtcgggaatgattgtagctgacttgaaagttgaaactgaagatgggagaagcaacagaaagatatgcagttgtgacgggtgcaaataaatgaattggattagagatagttagaccagttagcttcactggaatcaaagtgttg

SEQ ID NO: 35896 - DNA, 256 bp, Glycine max
  unsure (1)..(256): unsure at all n locations; Clone ID: 701109852H1
tccttatgaggaattccagaaactaaagcatcatcctgcaattaaatcatttctggaaggtggaacagttatccagtatggagctcgcactttaaatgaaggtggttttcagtctatcccatatccagtttttcctgnaggagcaattattggatgttcagctggcttcatgaatgtgccanagatanagggaactcacacggcaatgaaatcaggaatgcttgcagctgaagttacatttggtgcacttaatgaa

SEQ ID NO: 35897 - DNA, 254 bp, Glycine max
  unsure (1)..(254): unsure at all n locations; Clone ID: 701109853H1
aanaaggnngnaatggntcncctaagctccgatcangtcttnaaggacaacaatgccgcngacnnaacttccgttacnactcttcacctcactcacaaagctctttccgacatancgtgtttggccaatttcgtaaacttggaaaagcttgacctcaagctcaacaatctcacttctcttgagggattgagatcatgtgttaatttaaagtggctatccgttgtagaaaacaaattagaaagcttggaaggatt

SEQ ID NO: 35898 - DNA, 254 bp, Glycine max
  unsure (1)..(254): unsure at all n locations; Clone ID: 701109854H1
ttttgttcattcagagctttactcactcctttgcacgtctcaatctgagtcttcacttcatcgtttttgggattctctctctcaataatggcagcacgctttcaatctgcagctgtaagttcttcanttttnnnnnnnnnnnnnnnnnnnnnnnnnnnnnnnnnnnnactcactctttaagcactgagtaatttgtaatattattctgttcttgctttgaggtcactgttctttctgcagttgctgcattagca

SEQ ID NO: 35899 - DNA, 256 bp, Glycine max
  unsure (1)..(256): unsure at all n locations; Clone ID: 701109855H1
cctccacccacccagcatatntctctattccnatttattagcacccctcacattaccttgtgtcaccaactactttgactcctttaccataccattacaataattatcaaacctaaccagtaaaaatggtgaccgtggaggaaatccgcaacgctcagcgttcccatggacccgccaccatcttggccttcggcaccgccacgccgtccaactgcgtctcccaagccgattaccctgactatacttccgcattacc

SEQ ID NO: 35900 - DNA, 258 bp, Glycine max
  Clone ID: 701109856H1
gccgatgacgggaacggctggacggttatgctcgattaccgaaccctaaagactccttccaagagacccctcaagcttccctctcttcctcttgctaaagccattgctgctgaatgggaataccagcaaacggatggcataaggcccttcacaatgcctcttatgagacttgcttgcactgccttggaaagagttccactcacaaggagcaaagttattgagaatttgatgaagaaatttaatcaagatttagtattt

SEQ ID NO: 35901 - DNA, 253 bp, Glycine max
  unsure (1)..(253): unsure at all n locations; Clone ID: 701109857H1
ctagaggaaagaagtgatggggctcctcctctacttgatagttaaaggtataatcctactcttcgcatccctataactatcaagtagaggaggattataccttttcttggtaaatggaaaggtcattccatcacaaaacgaagtgctgtgtatggatctacaattgctaatgctgatactgtngtgttgcacgatatggatgacaatggccancttatgcaggatgttacttcaagttcaacttttgatgggg

SEQ ID NO: 35902 - DNA, 254 bp, Glycine max
  Clone ID: 701109858H1
ggccatgcagcagctcctaatgacaagattttggaagatggagacatggcgctgtttgatatgggagctgagtaccatttctatggatctgacataacttgttctttccctgtgaatggaaagtttacaagtgatcaatctcttatatatagtgctgtgctagatgctcataatgccgttatatctgcaatgaaacctggaataaactgggttgatatgcacatattagcagaaaaagtgattctggagtcact

SEQ ID NO: 35903 - DNA, 255 bp, Glycine max
  unsure (1)..(255): unsure at all n locations; Clone ID: 701109859H1
ttcacgtaccttggaatcgattcttagggtttctgactcctttatgtgtttgtcctcgcaattgatcatcgcaaccacaatgtccggtcccctcgatcgttttgccagaccttgctttnaggggttttcgggcagtgacgagaagaaggagaggagatctgacttcgagaactccgaggatgaaaggaggaccagaattggatctctcaaaaagaaggcacttaatgcatcctccaaattcaaacacactcttag

SEQ ID NO: 35904 - DNA, 240 bp, Glycine max
  unsure (1)..(240): unsure at all n locations; Clone ID: 701109860H1
ccgtccatggcttcctccaccgctttcttcacacccctccatgattncactcaagaccagaacaaccccatcaccccctttgcctttcatcaaatcctcctttgcttcctccaagtcaaccttttttcaccctgccctttccctacaaacctcttccaactttcccaggctttttggaaagcctaagtttttctctgttcatgcaagggctgccacagaaaaaaccatttatgattttac

SEQ ID NO: 35905 - DNA, 233 bp, Glycine max
  unsure (1)..(233): unsure at all n locations; Clone ID: 701109861H1
acaagctcttggagaagtggatgacgagcttcttgacacacaagtgaatcctgctgtgtncggaaattagtgggcacatggttctaaagaggaagaaggattatgatgaggcatctgaaggcaatgcttggaggcttcttgcagaggtgtccctctctcaagagaggtttcaagaagtcaatgatcttatttttgaagccattggctgtggtgaattggaggatgtcaacgtt

SEQ ID NO: 35906 - DNA, 184 bp, Glycine max
  unsure (1)..(184): unsure at all n locations; Clone ID: 701109862H1
ctctagcttctcatctcaaggaggtgagcttagctattagagaggtatgtgtatctgcaatgaagaggcctagccaccttcatcaccatatgnnnnnnnnnnnnnnnnnnnnnnnngaaactatgaactgcgtttatgcatgtcggaaaatcttcttttgataagagtttggaaatcctcttgt

SEQ ID NO: 35907 - DNA, 256 bp, Glycine max
  Clone ID: 701109863H1
gttggctgttttgaacattcacccaatttgcagagttccaagttatatacatacactgcataattaagagaaaatgtctctgattccaagtttcttcggtggccgaaggagcagtgttttcgaccctttctccctcgatgtgtgggagccctttaaggattttccatttcccagttctctttctgctgaaaattcagcctttgtgagcacacgagtggattggaaggagacaccagaagcacacgtgttcaaggct

SEQ ID NO: 35908 - DNA, 237 bp, Glycine max
  unsure (1)..(237): unsure at all n locations; Clone ID: 701109865H1
gcccatgataagagatatgcgcacacatcatcacgctatttactaccactgatccgctacttnctgcctaggctagtgtgcacccctgtcttgaacctcttaccgtgcgcatcttctcaatccataacaacttcgccaccgttgcaccgaaaccaatcgccacaaactcgggatctcagattcgacgcgccaaaccatgtcgaaggcgcgtgtctacacagatgtcaatgtccttcg

SEQ ID NO: 35909 - DNA, 254 bp, Glycine max
  Clone ID: 701109866H1
gccattgttgatgtggcagaaggatttgtgtatcttgtgagctcagtgggggtcactggagcccgcgcatctgttagtggttctgttcagtcccttctacaggaaattaaagaggcaactactaaacctgtcgcagttggttttggaatatcaaaacctgagcatgtgaaacaggtagcgggatggggagctgatggtgtgattgttggcagtgctatagtgaaggtgcttggtgaggccaaatctcctcaaga

SEQ ID NO: 35910 - DNA, 256 bp, Glycine max
  Clone ID: 701109867H1
gccatggccacccacgcggctctagcttctacaaggatccccactaacaccaagttcccatccaaggcttcacactctttcccaacccaatgcgcctcaaagagacttgaggtgacagaattctctgggctaagatccacttcatgtgtgacatatgctaacgatgctagagaatcttccttttttgatcttgtagcttcccaacttcactcccaagaccaatgggatcatcaatcctgtgaggggagagacagtg

SEQ ID NO: 35911 - DNA, 251 bp, Glycine max
  unsure (1)..(251): unsure at all n locations; Clone ID: 701109869H1
tacaggtcaatctggantttagttctgaagctgacatgatcaggaaatntcgtgcaggtcttgctttgcagccaatagcaacggctctttttgcaaattcaccctttaaagagggaaagccaaatggttttttcagtatgagaagccatatttggactgatactgacaaggatcgcacaggcatgctgccttttgtttttgatgactcttttgggtttcagcagtatgttgatatgcacttgatgttccta

SEQ ID NO: 35912 - DNA, 254 bp, Glycine max
  unsure (1)..(254): unsure at all n locations; Clone ID: 701109870H1
ctttcgaaagattttatccaattganattttaaaaatgactgggatnaacttaaganttcaattattgaaattgaataagtaaacaatttaattggattggtcgaatggtatcaaaaaaatggagtactaactcccatttcttatttattattgaattaaccgatcaacttgctttgttatcgaacatttctttttgatttcaaaaattttccggaaaanatttgaatctatttttatatgcgaatcaatccta

SEQ ID NO: 35913 - DNA, 253 bp, Glycine max
  Clone ID: 701109871H1
ttcccaattcctaattgtttaaacctaattctcatttcttcatcgttcgattcttctcctcctaaagatgcagatcttcgtgaaaactttgaccggtaagaccatcacccttgaggtggagtcctccgacaccatcgataacgtgaaagctaagattcaagacaaggaagggatcccacctgaccagcagagacttatctttgcgggtaaacagcttgaggatggtcgaacccttgccgactacaacatccaa

SEQ ID NO: 35914 - DNA, 250 bp, Glycine max
  Clone ID: 701109874H1
ttggttcaaaatggtccttttatcgtttaaagttaacgtcattaatgatattcaaatattgatagctaaatggcttatttatcaaagcgtaagtaatggtccgtttggtagagtagaaaataataaaataaagatcaaatggttcatttatctttggaaaagttcattttggttcttatttttttaaattggttcaaaatgattcttctatgagtttgaagttaacgtcattaatgatattcaaatattg

SEQ ID NO: 35915 - DNA, 253 bp, Glycine max
  Clone ID: 701109875H1
aaattttctctctttctctaattaattccctttgttatcaaaatggctgtggctatggctgcttgcagtcttggacttcacttgagtgctgacaacaccttgagaccttttgaaaaaaccactatcttgaaggccctctctatctctgatgctactaaaccatgttacatttctcacaaaacaagattatcatcttcatcttcaggaataacaatgatcccacgagcaacaacagttactggtactgtggagg

SEQ ID NO: 35916 - DNA, 250 bp, Glycine max
  Clone ID: 701109876H1
gttggtgagtgtgagtgagtgtatcaatcggccacacagaaatgggcagtgcttctctgattccagtttcctggttgccttggcggccactttctcctttcaagggaacggtgaaaaccttggtcgcaaaaccatggctgaagaagattcagcaagcaagacccctcatttccgtggttaacaaggctgcctctctatcttcccccgtgacagcacccagcgtcggcgttcggtttcggctggacaattg

SEQ ID NO: 35917 - DNA, 251 bp, Glycine max
  unsure (1)..(251): unsure at all n locations; Clone ID: 701109877H1
gctctcagagagtttacgatgagaggcgaggtggaaaagatagtgcgtgtgaacgcagagttccgattcggggaggagtacaccttcccatgctgggtggagactgcttaccgttccaccaagggcaaccgtnacacccttgaaaccctagtcccactacattaaaaaccaccacctcaagcacaccgagtacatccagaacaccttcgccgtcggcatcccctccgtnaccctccccgaccgcaagccct

SEQ ID NO: 35918 - DNA, 253 bp, Glycine max
  unsure (1)..(253): unsure at all n locations; Clone ID: 701109878H1
antctagatcgnggagcngccgcncgcgatctagaacctgagtaatggcttcgtcgcgagtagatctggatgggaaccccataaagcccatcaccatactgcatgattggcgccggtggcttcattgggtcccacctctgcgagaagctcatgtcggagacccctcacagtgtcctcgccttggatgtctacaatgacaagatcaaacacctcttggaaccccacacgctcccttgggcctctcgcatccagt

SEQ ID NO: 35919 - DNA, 256 bp, Glycine max
  unsure (1)..(256): unsure at all n locations; Clone ID: 701109880H1
cgaagaattaaccttttttcctctgccgccactggtttcnatcccacacccacaaccctctatcnnncgaatgctcttgcgttttccttaaactgcctcattccgaagccatacacacataacggtttttctaggtgctagcaatgtcgactcctgctaggaagaggctcatgagagatttcaagaggctgcaacaagaccctcctgcaggaatcagtggcgcccctcaggataacaacatcatgctgtggaatgc

SEQ ID NO: 35920 - DNA, 216 bp, Glycine max
  unsure (1)..(216): unsure at all n locations; Clone ID: 701109882H1
ggtggcacttctcgtgttgctcaacnacagacaacnaatggcgtcggtancagtaatggctacgaccagcaacaacaggnnggtccatggcttccttgcgctctgctttgccctctcattctccttctgtttcctcttcattgcgcttccctgtattgccatcttcctcttcatccaagctccgaatttctcgaaccaaacccaaatcccttctca

SEQ ID NO: 35921 - DNA, 253 bp, Glycine max
  unsure (1)..(253): unsure at all n locations; Clone ID: 701109883H1
ctcaaggatacactccggacttaattacgttattttgttagggtcaccgtttcgagatattctaaacttgtactgaaaaatatggagggaaaagaagaggacgtaaganttggagccaacaggtacggagagaggcagccaatagggaccgctgctcaggctaaagactacagagagccaccgtcggcgcctctcttcgaaccgggagagttgtcatcgtggtctttctatagggctggcatagcagagtttg

SEQ ID NO: 35922 - DNA, 253 bp, Glycine max
  Clone ID: 701109884H1
gtaaacccagatagtggcactgtttgggttaggttcgtccccagatcccagaaatggcgctgctttccaggataacaacatcctcattactactatccctatcctccaaacccatttgcaacgcctttctgctttctcgttcaaccgccacaacctgcacaaaacatcagaacaagaagaaaaaggaaaacgccaaagcagcgttggcgaaggagaagcgcagaacccgttccgacaaacagttcaaccacga

SEQ ID NO: 35923 - DNA, 250 bp, Glycine max
  Clone ID: 701109886H1
agagagagagaaggctctttttttcttttttgttggtttctcttgtttttttttgtaggtactgaggaagaaagaccaaaactttatccgcttgcttcacttagctcaagagcgtacaattcaggcaaaggccttgaagtcggagtgtgtgttaaggatttcttaggagttgcttctgtcttgactgaagaaatggaggtatatggcaaatctatggttgcaggtcctgcaaatgttatttttctgtcaa

SEQ ID NO: 35924 - DNA, 252 bp, Glycine max
  unsure (1)..(252): unsure at all n locations; Clone ID: 701109887H1
ctattctcctcatcttcctctttttctcaacaaaaaggggttcaattctagctagttctattacgtcgtccgcnaccatgaacatggcgatcgcgcttctgttcatggttttcgcagtntcatcagctttagacatgtcaataatatcacacgacaacgctcatgcggatagggccacgaggcgcaccgacgaggaggtgatgtcaatgttcgaggagtggctggtgaaacacgacaaggtgtacaacgcgc

SEQ ID NO: 35925 - DNA, 253 bp, Glycine max
  unsure (1)..(253): unsure at all n locations; Clone ID: 701109888H1
ggatgttgaagagtcccattgcatggatgatcaaactgctttgataccaataacaccaattnnnnnnnnnnnnnnnnnnnnnnnnncattaatggattccttgaaaccatttgatgtttcacaatctcttcaattagctcctggtattcttaaggattcaaactctgctacaattaatcatattctcaacaatccagaagtgatcgtgaagttggttagagattatagagctgctaataattcacaatatgta

SEQ ID NO: 35926 - DNA, 250 bp, Glycine max
  Clone ID: 701109890H1
caaacgcattccatttgatccaggctcatggaaccagggcttttccctttacaactttgaatgaagaaaaaataaacagtgagaacgattgggttggctccgtattaggcagcattcaccccagcataagcacctcgatcaaagagcaaaagtacattttcttttatgggggcaacgacaaagactggatccaacagttcaccaagtacgttactgccctgcaaatgatgctgctataaaggaggcaaag

SEQ ID NO: 35927 - DNA, 240 bp, Glycine max
  unsure (1)..(240): unsure at all n locations; Clone ID: 701109892H1
ttaagatcagctcaacaccatctcaaaaaccatgttggctcattctctcagganaacaagctttcttcttctgctatgatatccacaacactaaaacatgagaaggcaaatcaatcagaagagtctttgagaactgtcatgtacttaagctgctggggtcccaactagatatcataagcccaacaacaaaatattcttttctcttttcaattctaggaatcaggaatcaagcaagcttaa

SEQ ID NO: 35928 - DNA, 249 bp, Glycine max
  Clone ID: 701109893H1
atactcctcgcacaacacaaccacaatggccgcgaagaagaagaatggcggcggaaacggcaacaacaaggagaacgaagacagcaccatcaccgtcgtcttgaaggtcgaaatgcactgcgacggttgcgcttccaaaatcatcaaacacctccgctgtttccaaggtgtggagacggtgaaggcggatagcgacgccgggaaggtgaccgtgaccggaaaagtggaccccacgaaagtgagggataa

SEQ ID NO: 35929 - DNA, 249 bp, Glycine max
  Clone ID: 701109894H1
tgaaatttgatcctcaaactggatctgttttacatattgaacttgccaggtcaaactctaggaggaagcgtaaaccaggtggtgaagcctacgtggttatagataaaaggtccacaggggagcctgatcttcagggatcatcaagtgatgatggtgacagtgaccctgatgaaccatcagacagtggtgacaaccagggtgatatagcaatcatgacaagtgatgaaacggctgtaggttctgacaatg

SEQ ID NO: 35930 - DNA, 253 bp, Glycine max
  unsure (1)..(253): unsure at all n locations; Clone ID: 701109895H1
atttacttcagtccaaactgaacacactanccagaaataaaaccgataagccgaaaaacattgagttctctctcaaattcanccanccttcagtatcgnccatagattgtgaattcacagatttagtttcntgagtactgtgtggcgaagtttgtgtcttggattttgtggacatgggtgcttatgatcaagtttctcttaagccattggattcttctagaaanaggaaaagtaggagcagaggggatgggtc

SEQ ID NO: 35931 - DNA, 289 bp, Glycine max
  Clone ID: 701109901H1
tttccaatcccacagctcctaccatctcacaccaaccactccttaacttgtttcagtagtaacactaacactctgccgttgtcatcctcactgttgcgccgtcgccggagtctcgactctctccgatgctcggcgtcgtcggagaagcagccccacgacgacgcgcttgagctccctctcttccctctccctttggtcctcttccccggtgcgatccttccccctccagatcttcgagttccgctaaccgcatcatgatgcacacgttctccatagcgacctccgcttc

SEQ ID NO: 35932 - DNA, 276 bp, Glycine max
  unsure (1)..(276): unsure at all n locations; Clone ID: 701109903H1
aaaaaatgaaagttgtgtacttccttgttgctatcttggctttggcatcctctcttgtctctgcccatgaccctagtcctctgcaagatttttgtgtggcaaccaaagaacgcgatggtgtatatgtgaatggaaaattctgcaaagagcctaaagatgtgaaagccgaagatttctacaaagaagtggagcctgggaatcctcgaatcaattggggtcagcagtgactccgtgtttgttgatcaactaccagggctanacacantggtttatctt

SEQ ID NO: 35933 - DNA, 279 bp, Glycine max
  Clone ID: 701109904H1
gaaacagtgtgatgaaaatgaaggtccttgttttcttcgttgctacaattttggtagcatggcaatgccatgcgtacgatatgttccctctccgaatgaacactggctatggtgcccgtactccggaggtgaaatgcgcaagttggaggcttgctgtggaagcacacaacatctttggctttgagaccattcctgaagagtgcgttgaagcaacaaaggaatacatccatggcgaacaatatagatcagactccaaaacagttaaccaacaagcttacc

SEQ ID NO: 35934 - DNA, 277 bp, Glycine max
  unsure (1)..(277): unsure at all n locations; Clone ID: 701109905H1
aacaacttctgctacttcctactccaaccgcacttctgttccgcaattatcatgggcaaggtcaagatncggaatcaacggatttggaagaattggccgtttggtagccagagtggctctgcagagagacgatgttgaactcgttgccgttaacgaccctttcatcaccaccgattacatgacatacatgtttaaatacgacagtgttcatggacactggaagcatccacgatgtcaccgttaaggacgagaagacccttctctcggtgacaagcca

SEQ ID NO: 35935 - DNA, 279 bp, Glycine max
  unsure (1)..(279): unsure at all n locations; Clone ID: 701109906H1
agatgatgcaggatatccagagagatcctaataaccttcaacttgcacttgaaggaccagagaatcatgncaggccctaggagttttgctccaacgtcaagattcaaacccctcccacgggggctgacaccgatatgccggattctccatcgccctctgcggcagcgtctgagaggaagagagctgcggaagccgagcctgctaagcagcccgagcctgaacctgagcccgagcccgtgcccatggaattgacgggggaggagaaggacgcaaagcaga

SEQ ID NO: 35936 - DNA, 274 bp, Glycine max
  unsure (1)..(274): unsure at all n locations; Clone ID: 701109907H1
ggaagaaacaagatattaccatcactggtgctagcaccttgccttcagatgaggtggagagaatggtaaacgaagctgagaaattttcgaaggaagacaaagagaagagggatgctattgacacaaagaaccaggcagactctgtggtataccagacagaaaagcaattgaaagagcttggagacaaggttcctggccctgtgaaagagaaggttgaagcaaaactaggagagctaaagacgccnttctgggggttcaacccaagctatcaagg

SEQ ID NO: 35937 - DNA, 270 bp, Glycine max
  unsure (1)..(270): unsure at all n locations; Clone ID: 701109909H1
ctctaatcttgtaattttctgtgtcgcttcgtggttcattcttntcgttcttgtgatccgttctattttggagtacttacaacactcctttgcaagtttaattaattaaagaggctaatcaattttcaattggactgcagcagatggctgaggagggttgcagggttactctaaatgtttatgacttgagccaaggactagcacggcagctttcaatgtccttttggggaaagctatgaaggcatatggtgagtgctctctatatgttgg

SEQ ID NO: 35938 - DNA, 277 bp, Glycine max
  unsure (1)..(277): unsure at all n locations; Clone ID: 701109910H1
gtggacttttccagataggacaaaagttttctcaaccacctgctgaagatactgcactatgctaaaacaagacacatgttgaacaatcttggccttcagagttacgaaaagaatttcaagaaaggcttgttaacagacaacactctgcctttactcacagacagtgctctcagagatgtgaggattcctcctggacctaggcttttgattctgaccacatccagagggacgcggatttgaaagataagcgaggaagccgnaagtggatgatatgaat

SEQ ID NO: 35939 - DNA, 277 bp, Glycine max
  Clone ID: 701109912H1
gattttgccaaggagaatgatttggatgttgtggtggtaaatcctggcactgtgatgggtcctgttattccaccaaggcttaatgcaagcatggtcatgcttgtgcgccttcttcaaggctgcgctgaaacatatgaggacttttttatgggatcggtccactttaaggatgtagcattgtcacatgttttggtgtatgagaacaaatcagcggctggtaggcatctgtgtgttgaagctatctctcactacggtgactttgtggcaaaagttgctg

SEQ ID NO: 35940 - DNA, 279 bp, Glycine max
  Clone ID: 701109913H1
gtgctctgctcgtgcctctagggttatcatatctccatttccatttcctctctctcagtttccaagaatcttaagctatgggaaagtcttacccaaccgtgagcgctgattaccagaaggccgttgagaaggcgaagaagaagctcagaggcttcatcgctgagaagagatgcgctcctctaatgctccgtttggcatggcactctgctggaattacgacgtgagctcgaagaccggtggtccctcggaaccataaagcacccctccgaactcgctcac

SEQ ID NO: 35941 - DNA, 286 bp, Glycine max
  unsure (1)..(286): unsure at all n locations; Clone ID: 701109914H1
gagacagcattgcttgaagttggaagaggggagaaagatttggcaatgagctgctaaagtagatgctaannnnnnnnnnnnnnnnnnnnnggtntctgcagtttctgncaangnnncagcagtggcacatccattggactgaanagcctgatgaggttgacatccaatattagttaccatgctacagttcagtcctcattttccccttcaagtttgagctggaacaaggctactatgnccactgcagagngtgttcgtgcccgtctgattcggcaatgggaatgaa

SEQ ID NO: 35942 - DNA, 282 bp, Glycine max
  unsure (1)..(282): unsure at all n locations; Clone ID: 701109915H1
gctggttgtcgaaggatggatgcaagaaccctctctctttgatggaattgtcaacaaagatctcttggatggaactcaagtgcaacttaagtccacaaagttcaacaagtatctcacttctgaaaatgggggtggagctgatgttgtagccaaccgaggttctgcttctggttgggaaacattcaagctgtggaggatcagtgactcatccttcaacttgagagtgttcaacaagaaatttgntgggctggaaaatcagggggtggaaacaaaattatatcg

SEQ ID NO: 35943 - DNA, 283 bp, Glycine max
  unsure (1)..(283): unsure at all n locations; Clone ID: 701109916H1
gttatgtccccgccctgtttttacctataactctccttattatgatgggacacgaaccaaaggtggttattctaacatcatggttgtgccaccagcgttatgtgctccgatttcctgagaacttgcctcttgatgctggtgctcctctgctgtgtgctgggataactgtgtatagcccgatgaaatattatgggatgacagagccaggcaaacatttgggantggcagggcttggtgggtnagtcatgttgcaatcaaacttgctaaaggcgtttgggctgaa

SEQ ID NO: 35944 - DNA, 272 bp, Glycine max
  unsure (1)..(272): unsure at all n locations; Clone ID: 701109917H1
aggggncnacacacactaancactaanagagnnaacacactgtnactccacacncgccatgggtaaatgaatggtttttgagcaacagcagttaanagagaaaagggattcagcgaagatgacatcngttggtgtggcaccaacttcgggtttganagaagccagtgggcatggngcagcagctgcggatagattgccagaggagatgaacgatatgaaaattagggntganagagnaatggcngccacattgntgatngncacggaacggt

SEQ ID NO: 35945 - DNA, 278 bp, Glycine max
  unsure (1)..(278): unsure at all n locations; Clone ID: 701109918H1
ggctgcggaaaacgttgtagagttcacagacttacccgtcaagagacctagnnnnnnnnnnnnnnnnnnnnnnnnnnnnaccaatggagtctccaacgacgccgtttcaacgctacccaatgaccctcaataccctggtatctctgctgttattcccggttggttctcagaaatcagcccaatgtggctggggagncgcactccttgaaggtggaaagattttgtttcaagggaagtctgactatcagaatgtcatggtctccagtcatcaacatatg

SEQ ID NO: 35946 - DNA, 277 bp, Glycine max
  Clone ID: 701109919H1
tccactgaactcccatttctttcatctactctaaagggttgtgaattgtgataatcttaggaaccagaagtcaaagcatgaaaagcaatcccacttccaatgccgaggctgttccttcctaatcccaatcccaatcccaatcccaatccaaggttgtcacttatattcccacaaactaacaccaactagagaagcaaaagcaattcccatgaacaaaaccaactctttcaacaagaatcaagtatttttatttaaactcaacccctacactcttcat

SEQ ID NO: 35947 - DNA, 272 bp, Glycine max
  Clone ID: 701109920H1
aatccttcattcgttccaatggcgctagggttttatctcaattagaggcaccgaacgctccaaacggaaccatgaatctctcgttggcagctccttcggcatttcgcgggaatctcctcgttcctctgtcgcgctgcacctcttgcttcaaacttgatctccgttttcagcattccgacggttttcgccattcgcgttgtcgtcggagtttgttcaagctgatcgggatccgagatcgagcaggaggagagggatgcttgtagtgttaccgc

SEQ ID NO: 35948 - DNA, 276 bp, Glycine max
  Clone ID: 701109921H1
gcacacacagagcacacacatttcgtcggaatgggaagggtgattcgcgcacagcgtaagggtgcggggtcggtgttcaagtcccacacccaccaccgcaagggtccggcgaggttccgcagccttcgacttcggcgagcgcaacggctaccttcaaaggggtcgtcaccgatatcatccacgaccctggtcgcggtgctcctctagccaaggtggcgttccgccaccccttccgctacaagaagcagatggagtcttcgtcgccgccgagggcct

SEQ ID NO: 35949 - DNA, 274 bp, Glycine max
  unsure (1)..(274): unsure at all n locations; Clone ID: 701109922H1
attgttgatgcggttttatgcattcggaaacctgaggaagaaattgacctgtttatggtggagatcatgcacatgcggcacaaatttgatattgacacacgcttggttgagggtattgtccttgatcatggttctaggcaccctgacatgaagcgacgtgcagagaattgctatatcttgacatgtaatgtatctttggagtatgagaagagtgaagtaaacttcagggtttttctactncaagtgcggaacagagagaagctatggttgcagc

SEQ ID NO: 35950 - DNA, 272 bp, Glycine max
  unsure (1)..(272): unsure at all n locations; Clone ID: 701109923H1
ggcgcacgcgaagaancggaaggacagcttcatccaattcttcgccatgacgggtatccttctattgagcatgcgatctttgagtcagaagtacaaaatccatggcctccaagaagacatccacgccctcagggtcgaccacggttctctcaccgaccgcatcaacaacatcaagaacgacctccttcgagaagcttctcaagattccaccggcctcttcgcttctcgccttcgccacctctttgcagaacaacatgatccctttcccctcc

SEQ ID NO: 35951 - DNA, 273 bp, Glycine max
  unsure (1)..(273): unsure at all n locations; Clone ID: 701109924H1
cacactcccttgccgnttccaaaaaaggcaanacatancattttcaaattatttaattaaccccattccatctttnttttacatatccctcatcagcnttctggattttcatatatgcaccantatatctgaattctgctcatcatcctatacagtaccagctanctatacacttttatataagtgttttcgtttttattactatttataaatccaatacaaggttgaaattcctaggataatattcatgttggcggtgtcaccttgaggagc

SEQ ID NO: 35952 - DNA, 270 bp, Glycine max
  Clone ID: 701109925H1
tctgaactctgtgaagccgaaaataaaccagatgttcaattttggtgacaatcttgagggctactacagccctatagatcaggtggaacagaaaccactggttaaccagtatgttaaccgtgccccgtttgctggaaatggagttcaagtctcacctgttactccatctgctgatgttactgcttacttcagctctgagcattcgagcagctcgtttgattatctgacctcggatggggtgaacaagtccccaagacacccgagatctca

SEQ ID NO: 35953 - DNA, 277 bp, Glycine max
  Clone ID: 701109926H1
atgagacatcagtgcctccttctggtctccctggtgttggtctcctacgctgcccggttcggaatcagcgctgggcggctggagccccatcaaggacgtaaacgacagccacgtggcggagatcgccaactacgcgctgagcgagtacgacaagcgttctggggccaagctcacccttgtacaaggtcgtcaagggcgagactcaggtcgtttccggcaccaactaccgtctcgtcctcaaagccaaggatggatccgccacggccagttacgaagc

SEQ ID NO: 35954 - DNA, 276 bp, Glycine max
  Clone ID: 701109927H1
tgccaaacgacagcgttctgagtcttttcttcttcgttaccctcttcacatgccttctctctgctacttcccacgatgaccatattttcctaccgagtcaactccatgacgatgactcagtgagttgcactgcaaccgacccaagccttaactacaagccggtgatcggaatcctgacccaccccggcgacggtgcctctggccggctcagcaacgccaccggggtttcttacatcgccgcctcctacgttaaattcgtggagtccggtggtgcta

SEQ ID NO: 35955 - DNA, 280 bp, Glycine max
  unsure (1)..(280): unsure at all n locations; Clone ID: 701109928H1
ctgatccaaacgaagtaacgaancaaccaatcaccctgtctttctgacccaaaaacatagtcccaaatcgaacaaaatcaatcaactaactcctccaacgttgttgttattatgcagacaacaagttccaacacctccggcgccacctcgatccgttccggcatggagctcttccaccgcgcgaaggcggtgcgcctccgcagccaccacgacaagtacctcctggccgacgaggacgaggagtccgttcacgcaagaccgcaacggatcctcccgcaac

SEQ ID NO: 35956 - DNA, 277 bp, Glycine max
  Clone ID: 701109929H1
cgtggcttgattaaaggttcaggtggacaggaacgtgatgctactcttaatcagctcctggtgtgcttagatgggtttgaagggaggggagaggtgatcactattgcatccacaaaccgaccagacattctggatccagcacttgtgaggcctggcaggtttgatcggaaaatatatatccccaagcctggccttattggccgcatagaaattctaaaggtccatgctcgtaaaaagccaatggctgaagacgtggattacatggctgttgctagta

SEQ ID NO: 35957 - DNA, 285 bp, Glycine max
  unsure (1)..(285): unsure at all n locations; Clone ID: 701109930H1
ttattctacatctaagataaaanananaatcnataantaaaggnaaaagctaacaacnagctactggctaatactnttnggttttgtttttctttataatccacaacacaacctacgtgtgattccatngagtagttgtncgttatttctgcaagtagtggtggtggacgncggcganagcggtggtggcggccgaagagtggnaacaacaactggcagcattattgttgctgnatgtnatggaattnttcttgncntgggtttactacgctgacttgccaaccc

SEQ ID NO: 35958 - DNA, 291 bp, Glycine max
  unsure (1)..(291): unsure at all n locations; Clone ID: 701109931H1
ccaggcgcacgttagcacaaactattcatgggccacgggcaaacagcagctgccaccttcgtccctttatggggacgcgtctcctggaggctcacttccggggcggggcgagtgcacgcccgattcggcttcggcaagaaaaaggctcccgccccaaagaaagcctccaggggatncgggccgagacaccgacagacccctttggtatccgggcgccaaagcgcccgaatacctcgatgggagtcttgttcggagattacgggttcgatccgtttgggctagggaagcccg

SEQ ID NO: 35959 - DNA, 283 bp, Glycine max
  Clone ID: 701109932H1
gcaaaaatgagcgtggttggatttgattttggtaatgagagctgcattgttgctgtcgcaagacaaagggggatcgacgttgtgctcaatgatgagtcaaagcgtgaaacacctggcaattgtatgctttggtgacaaacagcggttccttgggacagctggggcgcttctacaatgatgaaccctaagaattccatctctcagataaagaggttaattggtagacagttttctgatccagaattgcagcgagacctgaagacattccctttgttgtcactga

SEQ ID NO: 35960 - DNA, 278 bp, Glycine max
  unsure (1)..(278): unsure at all n locations; Clone ID: 701109934H1
attttgatctcccaagtttcaaatctcgcgaataaatatatcaaaagatgtctctgattccaagtattttncggtggcagaaggagcaacgtgttcgatccttctccctcgacgtgtgggatcccttcaaggattttcattttcccacttctctttctgctgaaaattctgcatttgtgaacactcgtgtggattggaaagaaaccccagaagcacacgtgttcgaggctgatattccagggctgaagaaggaggaagtgaaggtggcagatgangac

SEQ ID NO: 35961 - DNA, 267 bp, Glycine max
  unsure (1)..(267): unsure at all n locations; Clone ID: 701109937H1
attccacaacagtgggaggnngatccaaaaagagagagtggaaaagatggcgcggttgatcacagtggtgtggtgcgcggtggcggtgctattatgcgccgcggccggtgcgtcgngggtggaggaggcggcgaacccgatacgaatggtgtctggcgtggaggcggaggtggttcgggtgatcggggagtgccggcgtgcgttgaagtttgctaggttcgtnagcaggttcnngaagagttaccaaagcgaggaaganatgaagna

SEQ ID NO: 35962 - DNA, 268 bp, Glycine max
  Clone ID: 701109939H1
cacaagagcagtagaaggcaaccccatttccttgcacaagctgcttcatcttctgctgcaaatgccgaatacgtggaggaaccagcaacaaatgtgaaattccagacatctttgaattttcctggttgctcaaattcattaactttgtttggaacaggatacagggagaaagtttttgcaattattggtgtcaaggtctatgctgcaggtttgtatctagatcaatctgtcacccaggaatgaatgcttggaaagggcaatcaaaaga

SEQ ID NO: 35963 - DNA, 270 bp, Glycine max
  Clone ID: 701109941H1
aaacactcataacacaaagcacaaagcaaagctcatccttgagttaaaaaatggcagcagcttcttccatggctctctcatccccatccttggctggcaaggccgtgaagctgggcccatcagccccagaagtgggaagggtgagcatgaggaagaccgtcaccaagcaggtctcctcaggaagcccatggtacggcccagaccgagtcaagtacttgggcccattctctggcgagcccccgtcctacctaaccggtgagttcccaggcg

SEQ ID NO: 35964 - DNA, 272 bp, Glycine max
  unsure (1)..(272): unsure at all n locations; Clone ID: 701109942H1
ggcaacttcttgtaaatttctgagattgcattctcacctcanctactcaatgggngaaccaaatattttcnnttccnctntctctttttcttctctcgtggttgggtaaaaacancaataatgntttacggacatgaattttactctggatggtgaattcaacaagatatcatcatttaagttggacatgtcagatctgattttacatgcccagccaagaagaattcccagtctaaggatnagaaaggagaagtttctggttcacaagaagg

SEQ ID NO: 35965 - DNA, 273 bp, Glycine max
  unsure (1)..(273): unsure at all n locations; Clone ID: 701109943H1
agcaggaacacccaaaccttgaaagcttcttatcatgggcagcacagcttggaatatcagactcaacaacacgcaccaaccaacctcagcactctctttcctcatgtttgggttcttctctatctgtctctcattttcctcacactggcgggantcngtttgggtgctgtgagagaccttaggaggggagagattgttctcagagttccaaaatctgctttaatgacaagagagactgtnaggaagataaaaagctctgtgatgctgtcaata

SEQ ID NO: 35966 - DNA, 275 bp, Glycine max
  Clone ID: 701109944H1
aaagagttgcagaggaagtcctcgccgttattgtttcagcaaacatgcggcattcaaattcaaattcacatttcaaatttcaaatccccttctcttgaaattgcttcaggttccgaactcgcacattaaaacgacgctggatcaggaaatggcttcccttcaaagctcgcaacgttcttgggacttccttattacctctctctccccttcttcctccgacaaagctcgattgattttggaatggatttggagaagatgctgaaagaaaatgagaa

SEQ ID NO: 35967 - DNA, 275 bp, Glycine max
  unsure (1)..(275): unsure at all n locations; Clone ID: 701109946H1
taggaaatgaattcttcaagcagcagaagtatcctgatgctgtgaagcattacacagagtctatacgaagaaatccaaaagatcctagggcttatagtaacagagcagcatgctacactaaattgggggcaatgcctgangggttaaaggatgcagagaagtgcattgaacttgatccaacctttgtaaagggttatacccggaaaggtgcagtccagtatttcatgaaggaatacgacaaggcttggagacatatagggaggggttgantatga

SEQ ID NO: 35968 - DNA, 276 bp, Glycine max
  unsure (1)..(276): unsure at all n locations; Clone ID: 701109947H1
ctttgtgtaggtgctcaaccctagtaagccgcaatggtgaagtactcaagggagcctgacaatccaactaagtcttgcaaggctagaggcgccgaccttagggttcattttaagaacacaagggaaactgcctttgcaatcaggaagttgcccttggtcaaggctaaaaggtacttggaagatgttcttgcccacaagcaggcaattccatcagacgtttttgtncgaggtgttggaaggacagcccaggctaagatagacacttctatggccagg

SEQ ID NO: 35969 - DNA, 166 bp, Glycine max
  unsure (1)..(166): unsure at all n locations; Clone ID: 701109949H1
caacattttttgtgcaaatnccttttcancaatccntgcatttgcgataccatgttccccttgaatcgcatagaccgacccaccaaacctaactccaaaaaggcctaatttttgcactcgtnacagctacccaatagcttttgncagtctgggncncnnccatttc

SEQ ID NO: 35970 - DNA, 234 bp, Glycine max
  unsure (1)..(234): unsure at all n locations; Clone ID: 701109950H1
ggccaatgcnatcttacaaagtcaaaatgaaggggctgataaagcaaaagaacttctcgatactgtgatgaatatttacatcaagactatggttgaagatgatgacaaggaagtggttgctcaagcttncactagtgtggctgacatcattagagattatggttatgccaactcttgagccttcactgtcccagcttgttgatgnacttcantgttgcttcggnagcanccccc

SEQ ID NO: 35971 - DNA, 268 bp, Glycine max
  unsure (1)..(268): unsure at all n locations; Clone ID: 701109953H1
caaaaaaatagcaacanaaacaagaaaaaaggttacctctttcaattttatcccttgtngtgancttaattcaatttctgctcacacataatggcttgcacgctcgctgattcattactcctattcaagggttcttatcaganaccagttctgangagagacattgctgcccggtactccccgggtatatttagtctaaacagtaatgggcttctccagaaaaggttcaggcgtcaaaggaattttgttactaggaataaggttactc

SEQ ID NO: 35972 - DNA, 266 bp, Glycine max
  unsure (1)..(266): unsure at all n locations; Clone ID: 701109954H1
atttattctgtttgtggtctcactagctagaaacaacatcactacacacaaatggcacatnctttataccactaatctggctcttaaccttcccacatcgaggtatgttcgtccctcgagaccaacccaggtgaagcccatgaaggtcatgatgggtgatgcaagagaaaagctagaacatgtccatgtgcctaaacacaacaagcaccaccagcccctccccaaaaacaaagttgctcctaccccacccgtagtaattaattaag

SEQ ID NO: 35973 - DNA, 249 bp, Glycine max
  unsure (1)..(249): unsure at all n locations; Clone ID: 701109955H1
cacacactcaatgaagggagttaacgtgaaagttgaagaacacaatggcgtatgctaatgactgcttcaactagcccagcaacatcttcaaacctctccccgcaacccatggaagggttgcacgaggtgggtcccccttccgtttctcaccaaaaccttcgacgttgtggaagacccatccaccaacgantcgtttcgtggagcagagcccgcaacagtttcgtcgtttgggattctncacaagttctc

SEQ ID NO: 35974 - DNA, 85 bp, Glycine max
  Clone ID: 701109958H1
gatatatgctatcttcagacaagtaccctggcaatttagtcacatttctgtttatcactataataacaaggtaaattatgttggt

SEQ ID NO: 35975 - DNA, 268 bp, Glycine max
  unsure (1)..(268): unsure at all n locations; Clone ID: 701109959H1
ggcgtcttcataaacgcctttcttctccgtttccgtttcctcgttcaaattcgctttttgatctgcgaaaatgagagagtncatctcgatccacattggtcaggctggtatccaggtcggaaatgcttgctgggagctctactgcctcgagcacggcatcgggcccgatgggcaaatgccaagtgacaagacagttggcggtggtgatgatgctttcaatactttcttcagcgagactggtgctggaaagcacgtgccacgtgcagtg

SEQ ID NO: 35976 - DNA, 280 bp, Glycine max
  unsure (1)..(280): unsure at all n locations; Clone ID: 701109960H1
atcgcacacgcatacgggtcgagcacaaggcagaaagcaagctcatactagagttttaaaaatangcagcancctaactcccatggctctctcttccccatccttggntngcaaggccgtgaagctgggcncatcagcccccgaagtcggganggtcancatgaggaagaccgtcaccaagcaggcctcctccggaagcccatggtacggcccagaccgngtcaagtattgggcccattntctggcganccaccgtgcctcacctcactggcgagtttcc

SEQ ID NO: 35977 - DNA, 270 bp, Glycine max
  Clone ID: 701109961H1
caagccaagaaaaaaaaaattaagttagtatgtatggatgtatgtgttcttagtaatcataaagtgctaagtcaaatacaaatattgtttgtgtgtggtggtttgatcaacaacacacagaaggggtatctcaaaaacacaacaacattggagattatggagctagcgcaaaagaaaggatttctggttcatcatgagtacgatgatcttgttggttcttttattcttcctcgacatctcttctgtttctggatttcaagtgggtcatcg

SEQ ID NO: 35978 - DNA, 247 bp, Glycine max
  unsure (1)..(247): unsure at all n locations; Clone ID: 701109962H1
aaaccctattctccccagcattcaatttctattaanntncacaaccttgattgcgttcttggattttctacgtgggtcgggggtttctcctctctttctctgcagtttgatggatcgggaaggaggatccaacgccggatcttgctactactccgttctcgggattcgtagggatgcctccttctctgatattcgcactgcctaccgcaaactcgctatgaggtggcacccggacaagtgggctctg

SEQ ID NO: 35979 - DNA, 244 bp, Glycine max
  Clone ID: 701109963H1
aaagtcttttcttcttcggcttttggttgtaattagaacattttcacttagttggattagtagtacttgtgaaaaacttgtaacgtgaaattggagaggctaagcagaaatgctctgcttgatgttaagtgttctcctgtaaatgtttattatgcacggaatcgagagggaatgacgagggtaaaaaaatactgataaaattgagatcactacgaaaggtaatggcagggattggattgaggcc

SEQ ID NO: 35980 - DNA, 282 bp, Glycine max
  unsure (1)..(282): unsure at all n locations; Clone ID: 701109964H1
atgagngtggttggatnngnttnnggtaatgagannngcatnntnantganntanacccagntggtacgaangtacaaccgtgancggtgncgnnanggntgcnccattcacnggcctcaagtccatggctngnntccccaccaggaagaccaacaatgacattacctccattgctagcaacggtgggaagagtgncaatgcatggcaggtgtggccaccagttgggcaagaagaaattgagattctttcctacctgccagacttgatgatgcacantggcc

SEQ ID NO: 35981 - DNA, 272 bp, Glycine max
  unsure (1)..(272): unsure at all n locations; Clone ID: 701109965H1
ggggtctatcgacactaatactaatgcaattagacatttacaccactanttaatatgtagaaaatgattttnattagtctaattctagaattatagctaattattatgtagatcttacatgttnaaattttagnattttaaaantattattactcaatcaataatttatttctttgaaaagtaatttanacattaatttagtgnaatacattttggtagagtagganacaaagttacatcgttcaaacttctgttcagcatgatttgtgagc

SEQ ID NO: 35982 - DNA, 253 bp, Glycine max
  unsure (1)..(253): unsure at all n locations; Clone ID: 701109966H1
gaaggntggtctttctgccgtgcacgtnccttatgcatatangatttgctatcatattgctcactgttatagttaaggcagcgacncttcncctgncaaancaacaggttgaatctacattggctatgcaaaatcttcaancaaaaattanggccattcagatagatatgcnggcaatccaagaaagnatacaattgcagacgtcaaggctatatcggcaggtggggttaacncactgggcaggttgttttnc

SEQ ID NO: 35983 - DNA, 272 bp, Glycine max
  unsure (1)..(272): unsure at all n locations; Clone ID: 701109967H1
ctngaggcganatnggntcgagttttaatttcctagntctcccaancnaattgtngcatcaagnccccatgngccaaagagactantgttgtttatctatatcncagnanatccacaagtttggggtgagaattttgntcataaanaacttgtaataacaacactagctgctantggaaagaaggaggagagtaatggagcactaatgacacatatccgcgtttcccgggtggtatgcntgatgtttcnggncaggagaagcacacacatnt

SEQ ID NO: 35984 - DNA, 263 bp, Glycine max
  unsure (1)..(263): unsure at all n locations; Clone ID: 701109968H1
catacattcaactagctgctgtttcaacaagtaaggagttatcagggtactctatggtggactttgatattctgtaattgatttgatggaatcttccaaccaattcaatgaatcatttaggcaaggtcttacagctggatatgtcttgctgcaacttttgtcatagtactttatatgtcctcttgtctccctgcacaattatcaagaacaggaagaatagaacgggtggattaagaaagcaacacagnagcgtaagttgccgc

SEQ ID NO: 35985 - DNA, 264 bp, Glycine max
  Clone ID: 701109969H1
ggagacaatacccatgtttcaaccagagtgatgggaacatatggttactgtgcgccagagtatgccatgagcggcaaattaactcttaaatctgatatatatagctttggtgtggttttgttggagttgatcactggacgtagggcaatagatactaatagaagaccaggagagcaaaacttggtttcatggtctcgtcaatttttcagtgaccggaaaaagtttgtacaaatggttgaccctctgttacacgaaaacttcccc

SEQ ID NO: 35986 - DNA, 263 bp, Glycine max
  Clone ID: 701109970H1
cagcaacacactgcttcaatctcaatcgggcacattgagaaatggttttgagtaatgggaaaactgaggcaccattgccaagtagtaatgggggaggtgctgagattgataacaatgagaagaagcccttcaagatcttcgtagggtatgaccctcgcgaagatcttgcctatgaggtatgtcgccactccatcttgaaaaggtctcaatccctgttgagatcataccaattaagcagtcagatctgaggaaaagtggtttgt

SEQ ID NO: 35987 - DNA, 242 bp, Glycine max
  unsure (1)..(242): unsure at all n locations; Clone ID: 701109972H1
gatttantcccttcagacgggttgaccatctgattcctatacaatatcagtttcaattttntcacaatctctggctcagttttcggcggtcatcatccagtttccagcaagtgatggggctcttctgagatctagtttagaatctgctcgcctctatttccaccaaagggaaacatatccacctgcagatataatccatactagcgagtctcgtgagtggtgcaaaacatcggttattcagc

SEQ ID NO: 35988 - DNA, 264 bp, Glycine max
  unsure (1)..(264): unsure at all n locations; Clone ID: 701109975H1
agcagtgcaatgttgccaacaagcaccatgatcaggacccttgaattttcctccccttgtctatgatcgaggaagaaaatctgtaatatattatgcaaaanataattaaggtcttttcctttaaatgggctggttcaatgaaccgagaccactgcaggttcatggggatgggaggattaagaggctatgttttttaatctccgatgttactgttgttttttttttaattcaataaggatattatatatgtagtactatgcaagt

SEQ ID NO: 35989 - DNA, 273 bp, Glycine max
  Clone ID: 701109976H1
cgagaaagccaaacgaaaatcagtaggcgtagagaacagaacagaagtagaggaataatggagcaggaagagcacgaggtgtacggtgcagacattcccgacgaggagattgacatggacgcagacgccgaacagcaagacgagcaacttgcccccaattcacacaaacaaggaactggaggacatgaagaagaggctgaaggagattcgaggaggaagctagcgcccttacgcgaaatgcagggcaaaggttgagaaagagatgggcgtgtt

SEQ ID NO: 35990 - DNA, 270 bp, Glycine max
  unsure (1)..(270): unsure at all n locations; Clone ID: 701109977H1
ctctaaaccctaaacaactnctttctcttcttccttcgctcgttgtnctccctcgcgtagatcgacaatggcggagacagagacgtttgctttccaggctgagatcaaccagctcctcagtctcatcatcaacaccttctactccaacaaggagattttccttcgtgaactcatcagcaacgcctccgatgctttggacaagattcgatttgagagtttgacagataagagcaagctcgatgctcagccagagttgttcatcatattatt

SEQ ID NO: 35991 - DNA, 272 bp, Glycine max
  unsure (1)..(272): unsure at all n locations; Clone ID: 701109978H1
cggtttcgacactcgcgtctnagnctcagtttcggatctctcacttnctctcaccaatttccaggtcgcattccaatcttcaatctcctttcccttttccttcaatctatttgtttccttttcactctcataactcgattttcatggaaaanaaaaaacaaaaaaacttngctctttaattgttgggtttctcgaaattttaatagttttttttcccgngaattnatttgaattnctcaagtatgtttgatggaattggaaaattggtatgc

SEQ ID NO: 35992 - DNA, 274 bp, Glycine max
  unsure (1)..(274): unsure at all n locations; Clone ID: 701109979H1
tttcatttccctatcttttgttcgtagatatctctttttgccgcgacaaatgctaccatcatccactgtcctatctctcgccggaacccgcgccggcgttccggtgagcttttccggcgaactgggtcacctcgaaaccaagttttcttcaagacccagaaaggttttcagccgttcgtgcataaaggggattcccttacaacaaaacaccatcaatggtttgaattcgaagnacagaaactcactttcgagcttcgcattcggtaaaaaagcc

SEQ ID NO: 35993 - DNA, 276 bp, Glycine max
  Clone ID: 701109980H1
gaaagccgttgcaatcctcaagggcaattcctccgtccatggccttgtcactctaacccaacaacaagacaacggcccaacaactgttactgttcgtgtttctggtcttactcctgggcctcatggttttcatctccatgagtttggtgatataacaaatgggtgcatatcaactgggccacatttcaatcctaataaactcaaacatggtgctccggaggataaaattcgccatgcgggtgacctgggaaacatagttgctaatgccgatggagt

SEQ ID NO: 35994 - DNA, 276 bp, Glycine max
  unsure (1)..(276): unsure at all n locations; Clone ID: 701109981H1
aaagaatattaaaaagcggaagganagcagaacagagcattagcagagcagagagggaggtgggaaaaagaaanaaaggtgaggaagaanatcgagggaaagggaagagaagaagaangaatgagtgccacagtgacttctaacttctaanacctatgtcgttcttccatcgttgcttctgtccacattataaccacaaaccaaaccctaatttcaatgcctgtttagcttctcttgtccctgtctctgtctcaccacanagganngnaatctgca

SEQ ID NO: 35995 - DNA, 267 bp, Glycine max
  unsure (1)..(267): unsure at all n locations; Clone ID: 701109982H1
aaaacactcataacacaaagcacaaagcaaagctcatccttgagttaaaaaatggcagcagcttcttccatggctctctcatccccatccttggctggcaaggccgtgaagctgggcccatcagccccagaagtgggaagggtgagcatgaggaagaccgtcaccaagcaggtctcctcaggaagcccatggtacggcccagaccgagtcaagtattgggcccntctctggcgagcccccgtcctnaccnaaccggtgagttcccgg

SEQ ID NO: 35996 - DNA, 265 bp, Glycine max
  Clone ID: 701109983H1
cttggaggaacttgtgtctgtgtgtccttttttccagagtcatggctatggctttgagtctctcccaattccctgttcgtgggtctgtttctttgcccaaaagaagactacccagaagaagcttttgcattaggggcatgtcagaaacctcttccacttcttctgtgagcacccaacaagaacaaccaacttctgataatgctcttcagtgacaattgctcctccccctaacttcaagccccctgagcctaaacgctttgcaatt

SEQ ID NO: 35997 - DNA, 264 bp, Glycine max
  Clone ID: 701109984H1
tctctcccctgtcttcttcttaattaccctccctcattgcgtgcaccccccaaaaaataagaagatatacataaaaataaaacacaccctctacgtgtccacactctctgatcacaacacacccgcttaattaaatctctatatataaaccccttcaggcactccactatgacgggcaaagaaatttttcataagatgaaggaaaaagttttgggatcatctgatcccgattcaggtaaaggaaagagcaagatgaagaagcac

SEQ ID NO: 35998 - DNA, 266 bp, Glycine max
  unsure (1)..(266): unsure at all n locations; Clone ID: 701109985H1
caaaacactcataacacaaagcacaaagcaaagctcatccttgagttaaaaaatggcagcagcttcttccatggctctctcatccccatccttggctggcaaggccgtgaagctgggcccatcagccccagaagtgggaagggtgagcatgaggaagaccgtcaccaagcaggtctcctcaggaagcccatggtacggcccagaccgagttcaagtacttgggcccattctctggcgagcncccgtccttaccttaaccggtgagt

SEQ ID NO: 35999 - DNA, 267 bp, Glycine max
  unsure (1)..(267): unsure at all n locations; Clone ID: 701109986H1
ctttcccctaattccgaccatggaagccacggcctccgcaatgagantcgcccttcccttcaacaaaagcccaagcccaagcccaactcctgacccggcccaccaatccattcaccattccctcccgcagcccagcccaccgccccccgccgcgcctccccaccatccgcgccgcaattccccgcacaaagaaagaggcaacggtgganactgtgcgggagcagctcgagaactgttacctncctncgccggcatcaattacaaggg

SEQ ID NO: 36000 - DNA, 260 bp, Glycine max
  unsure (1)..(260): unsure at all n locations; Clone ID: 701109988H1
ccaaaaccaaaaccaaaacacacaaacactaagaaaganagaggttttagttttttagtttaagcacaccaactaactccacctaacttcttttctctctggggttctttctccatttccattggctttcaaaagtcaccaacacaattctcccttcagagtttcaatggctgtttcaacaagtttccctggtgcaaagttggaggtttgttgctgaaatgtggctcctccaatgctgccatgccactgccaccaccacc

SEQ ID NO: 36001 - DNA, 265 bp, Glycine max
  Clone ID: 701109989H1
gtcagcgagtgcaccataaatgtagaaacccctcaaatcaaaacaaaaccatacaacacaaatcgtagattgaaaaaaataataataaagaatcagaaaaaatgggttctgagaacaaagaagccgcaggtggagaacttaacaattcgtctccttcgccctcttcttctcatgcttggaaaagtcgaatcgttattccaacccttctcgcaggagttgctggtgctggagctgggttgatttcaaagcatcgaagaactcttgg

SEQ ID NO: 36002 - DNA, 261 bp, Glycine max
  unsure (1)..(261): unsure at all n locations; Clone ID: 701109990H1
gctagtttatcgtgaggagaatatgaagttgtttgttttctttgttgctgcagtagttttggtagcatggccatgccatggcgcaggctaccaaaggttccctctccgaatgaaaactggctatggtgagcgttcttcggaggtaaaatgcgcaagttttaggcttgctgtggaagcacacaacatccgagcctttaaaaccatcctgaagagtgcgttgaaccaacaaaggactacataatggcgaacanttagatcaga

SEQ ID NO: 36003 - DNA, 264 bp, Glycine max
  Clone ID: 701109991H1
ctattaaatgtttcctttagttcaatttaatataagcaaatcaacttatcattgagtttctaagttaatttctattgtcacagccgcatggaatcaattgtcagcagaatcttgcaaaggaatgtgaagaggaagcaggaatacctagatctatctctgtcaacgccataccggttggtgctgtttcatacaaagacattgatggatatagatacaagagagatgttctgttctgttatgatctaaaactccaaaagatttcat

SEQ ID NO: 36004 - DNA, 266 bp, Glycine max
  unsure (1)..(266): unsure at all n locations; Clone ID: 701109992H1
agaatgtggggattctcgccattgacatctacttccctcccgcttgcgttcagcaggaagcattggagactcatgatggtgccagtaaagggaagtataccattggacttggccaagactgcatgtncattctgtaccgaagtagaagatgtcatctcaatgagtttgacagtggttacttctcttcttgagaagtatgggattgatcctaaacaaatcggtcgtctggaattggaagcgagaccgtgatagacaaaagcaaatcc

SEQ ID NO: 36005 - DNA, 271 bp, Glycine max
  unsure (1)..(271): unsure at all n locations; Clone ID: 701109994H1
ggcatatcctttnactttnccttcaacttcatttggatgcatgaaacaaganaancacagcttgattcatgcatccaaatgaagttgaagggaaagtgaatcaagntgtggttgtcttgtttcatgcatccaaatgaagttgaagggaaagtgaaacaagacaaccacagnnngnntccttgggnnctggagaacgagtccttcttaagcganctataccaaacacaatacctatncacaanaataccagaatcaaactatttcccatctc

SEQ ID NO: 36006 - DNA, 269 bp, Glycine max
  unsure (1)..(269): unsure at all n locations; Clone ID: 701109995H1
gctctggtggcaagtgattgatttcgcgaggctaaaccacagcaccatttcgttcttcaatttgcctgagagtgctgcgtcacggtggagtagggtcnaactcaacgcttccaaggtgggaaagggtttgtacttggacgccaaagcacaaaaattgggctttcaacattggattgaagctattgatccacgccaccgctatggacataattgcattattactatgaagatggtgcaanaccgattctggccagccatcttttactggt

SEQ ID NO: 36007 - DNA, 273 bp, Glycine max
  Clone ID: 701110001H1
caaatatatacatgggattgtggccttgcttgtgtcttgatggttttgaaaactattggcgtcaacaactgtgatattcaaacactggctgaactatgctgcacaactagcatttggactgttgatttggcatatttattacagagatttgctgttgcttttcctacttcacagttacatttggggcaaacccaaactatagcatgaatcattctacaaggaggaacttcctaatgatcagtgagagtggattgctatttcaaaaagcgtggg

SEQ ID NO: 36008 - DNA, 266 bp, Glycine max
  unsure (1)..(266): unsure at all n locations; Clone ID: 701110002H1
tgctatgatcacattcttagcagctgcagaggctaaagttagacgcgtggtgttcacctcatccattggtgcngtttacatggaccccaaaaggagcatcgatttggtggttgacgagtcctgttggagtgatttagaattttgcaagaacaccaagaattggtattgctatgggaaggctgtggctgaagaagcggcatgggacacagcaaaagagaaaggggtggacatggttgtagtgaacccattttggtattggaccatac

SEQ ID NO: 36009 - DNA, 138 bp, Glycine max
  unsure (1)..(138): unsure at all n locations; Clone ID: 701110004H1
agatgctcaaggttacaccagccatcttcnctccantaaaatgcagttcatatntggncaaatgtgtctccaaatatggactttgnactactggatngnngangctannggntgcannaggagtccccgntggatnag

SEQ ID NO: 36010 - DNA, 256 bp, Glycine max
  Clone ID: 701110005H1
attgttttcgtgtggaaacaaaaaaacaatacaaaaacaaacatatgatggtgaagccgagtagcgaaaagccagaggagcatagggattccaagtactacaaaggggtccgaaagagaaaatggggcaaatgggtatccgaaataagactacccaacagccgtcagaggatttggttgggatccttcgacacccccgagaaggccgcgcgtgccttcgacgccgcaatgttctgcttacgtggccgcaacgccaa

SEQ ID NO: 36011 - DNA, 259 bp, Glycine max
  unsure (1)..(259): unsure at all n locations; Clone ID: 701110006H1
cttctcttctttctctagggttttaaccttagggtttcagtgtnntttcactccactctctctctnctctctctctcttccggcatagctttgccatggataggtaccagaaagtggagaggcctaagcctgagtctcccatcaatgagaacgagatccgaatcacgacgcagggcgctattcgcaactacatcacctatgccacttcgcttcttcagttaacacagtgtgaagaagatggctggtattaagagaagat

SEQ ID NO: 36012 - DNA, 258 bp, Glycine max
  unsure (1)..(258): unsure at all n locations; Clone ID: 701110007H1
aacatgttaagtatagnaatgttaatgtctngtctctaacacacactcnatgtgcccctctcgaagcatgtcnttngnggtggntatcaagttgaggacgaggntgatgcagnagactgttacaattacaaanacatggattatgacaaatnggggctcaaaaaaattcctcgagagttgggattgnctgatgtgttnnttcatcgtnggtaaagangaaaaacccgttcccgctcacaagtcaattttagcngcatc

SEQ ID NO: 36013 - DNA, 258 bp, Glycine max
  unsure (1)..(258): unsure at all n locations; Clone ID: 701110008H1
ctttcatctttcaatacaatattgctctctaagctttgattcttcttaattcatacccttcccacactcattcattgttgtgcgtctggttttctgcctgaaatggagtacatgaaccagagaccaaaatatgattgccttctttttgatttagatgatactttgtatccactaagcactggtcttgcaaaagcatgtggccaaaacattaaagactatatggccgaaaagctggcatagagaaaancaaaattgatg

SEQ ID NO: 36014 - DNA, 262 bp, Glycine max
  Clone ID: 701110009H1
aatgaaccatgccctcatcagaattgcacttttggcgggatatggaacggtggaggggggagtggacaaaaagtcctttatgttactacatctttctattatctggttatacaggctggtatagccgatgcaagtaaaaccagttccaaagtttatcctgcggaattcaaggccgcagctaagcgagcgtgtcaagtcaaatttgaggatgctcaatccacttatccacttatgatggaggatgcacttccatacatttgca

SEQ ID NO: 36015 - DNA, 261 bp, Glycine max
  Clone ID: 701110010H1
gagaaacaatggccaatgtttcaattccactcccacgaaacggtttctccaaacccaattactcgacaaaacgcccatgtttcaccccttcagcttcaacactcagaatttcttgctctggagtggctgagtttgatggatctcatcagaaaaaaggaggtttgtttaatttcaatggaatcaagggcgtggctgtggtattcttgcagcttgtgctgttacttctgctgcatttcctgttactgctgctactcagaggct

SEQ ID NO: 36016 - DNA, 267 bp, Glycine max
  unsure (1)..(267): unsure at all n locations; Clone ID: 701110012H1
tgannatancgnaancctttgatctcngtntaattccctttgcatctgaaagaagaaactcacagtggcttacggtcatcgatttcatagntctattaagattatctggaatggcagcaatttacagtcttacatcatcaataaatctggtggnttaatctattataaggattatgggtctgctggacgaatggataccaatgatagcttgcgggtggcgagtttatggcactcaatgcacgctatctctcagcagttatcnnctgt

SEQ ID NO: 36017 - DNA, 255 bp, Glycine max
  unsure (1)..(255): unsure at all n locations; Clone ID: 701110013H1
gnacacagacatcgaatgtgaccgcacacctcgttcacattnnttatagtctttcaaaggacatggggttccctggcttcagagttggcatcatatactcttacaatgatgctgtggtcaattgtgcacgcaaaatgtcaagctttgggttggtgtcaacacagactcagcatcttttagcatcaatgctaaatgatgatgagtttgtggaaaggtttctggaagagagtgcaaaaaggttggcacaaaggcata

SEQ ID NO: 36018 - DNA, 278 bp, Glycine max
  Clone ID: 701110015H1
ggagtacttgcagtatgctatggccttttccgtcttgccatggcaaaaggacttgcctgggtggtgtgtgtttatggagttccattggctagtggtcaatggatttttggtgttgattacattcttgcagcatactcaccctgcattgccacattacacttcctctgagtgggactggttgagaggagcttagcaacagtggatagagattatggaatcctgaacaaggtctccataatattacagacactcatgtagcacatcacttgttctccaca

SEQ ID NO: 36019 - DNA, 281 bp, Glycine max
  Clone ID: 701110016H1
cccagcattcatattaatatcatgcccttcttctgcatccaaaccttcattttgtagtgggtgggggtttctcatttctctgccgttcgatggatcgggaaggaggatccaacggcggatcttgctactactccgttctcgggattcgtagggacgcctccttctctgatattcgcactgcctaccgcaaactcgctatgaggtggcacccggacaagtgggctcagaatcctgcaaccgctggcgaacaaagcggcggtttcagcaaatccaagaagcta

SEQ ID NO: 36020 - DNA, 274 bp, Glycine max
  Clone ID: 701110017H1
gttcgtgggtctgtttctttgcccaaaagaagactacccagaagaagcttttgcattaggggcatgtcagaaacctcttccacttcttctgtgagcacccaacaagaacaaccaacttctgataatgcttcttcagtgacaattgctcctccccctaacttcaagccccctgagcctaaacgctttgcaattaggcctgataagaccagtgaagtgtttggagctttgcttcctttgatctttcgttttgccactggagttttcgtttctgggt

SEQ ID NO: 36021 - DNA, 268 bp, Glycine max
  unsure (1)..(268): unsure at all n locations; Clone ID: 701110018H1
ataatctctctctcatccgaaaatgccactcaccttgcaaattccgccttctacaactctctcttctgcatcttccattcacagaacaataacaagatccaccacattctccttctcgntttgtcctccaacaactcttcacttcaatccccacaggtccctctctctaattcgcgcttccaattcttctatcaatgccgcttcgaccactgaactggacgctgtgtccgccttcagcgagatcgttcccgacaccgtcgttttcgag

SEQ ID NO: 36022 - DNA, 261 bp, Glycine max
  Clone ID: 701110019H1
aaaataatttaacttctctgtctcaatcatttcattatagttttctctcccttccaatcacagcgatctccagttagggtttcgtttcgtgatttctgtctcactggaaaaggaatatcaagaagaagaattgtttatctacatctgattcaagtccatgaagccacaatcatcgtctttgaatccatatgcagcgtcatatgttcctctctctaaaaggggggtagatggtagaacaccttcgactgaaaaagatccaag

SEQ ID NO: 36023 - DNA, 257 bp, Glycine max
  Clone ID: 701110020H1
cgacgccgtcctgaagctcgactgctacgcccactccgtccacctcgacctcgccatcaaccaaatccgccctctgaaaatcctcaccgacacctggtgttcctccggccagttcctccccgacggcaccctcctccagaccggcggcgaccttgacggcctaaaaaagatccgcaaattctccccttgtgatgtgtcgtcgtcgagctctttgcattctccttgcgattgggaagagctcgacgacatcgattggc

SEQ ID NO: 36024 - DNA, 253 bp, Glycine max
  Clone ID: 701110021H1
ctttgccaaaaatctctcgggaagactttgaattaatatttgatgagctcgatgatagtcatgatataaagattaacaaggatgaatttgcagatatttgcaatgccattgctttaaaatttcagaaggaagatgttatgtctactttgagtatttagcattctaccattcacccagctcaaagagattaaaagaatttgtgaggagtcctatgtttggatacctagtgtccttgttctcgtaataaatcggt

SEQ ID NO: 36025 - DNA, 256 bp, Glycine max
  Clone ID: 701110022H1
ggacgcacacgtgacaaacgtaattgggaaataagcaatgccacgctatagtaactaatatgacataattttaaatgttatattgaaaaatgaagagtcaattttgtatatagtgtcaaattgatccgtaatagttttgaatctaattgaaaacatgatgaattctctcttatcattttctccctcctatggttgaaggatagcgttcgtgtgctaggtccacgtcgatcatcgctctcccagttgtgatggttgt

SEQ ID NO: 36026 - DNA, 259 bp, Glycine max
  Clone ID: 701110023H1
ctcataacacaaagcacaaagcaaagctcatccttgagttaaaaaatggcagcagcttcttccatggctctctcatccccatccttggctggcaaggccgtgaagctgggcccatcagccccagaagtgggaagggtgagcatgaggaagaccgtcaccaagcaggtctcctcaggaagcccatggtacggcccagaccgagtcaagtacttgggcccattctctggcgagcccccgtcctacctaaccggtgagttcc

SEQ ID NO: 36027 - DNA, 261 bp, Glycine max
  unsure (1)..(261): unsure at all n locations; Clone ID: 701110024H1
ctcgaatggattcacaaaactggaaacactctctcctctacatcactttcctcctcgcaattctccacctcacgcagaaccatttctgccacaagctcttcttcgccaaccaaacggtgcgcgtcaagaagaaccccgacctccccctccggttccgttccgacggtaccttcaagatcctccaggtggctgatatgcactacggcactggaactagcgtgacacggtgcagggacgtgttggcctccnagttcgagtttt

SEQ ID NO: 36028 - DNA, 266 bp, Glycine max
  unsure (1)..(266): unsure at all n locations; Clone ID: 701110025H1
caacaatggtgaaatcgagttccaccaagtcnaaganatcnagaggacgttgacctcctcaaagacgtcgcctccttcgcttccgnnnctcggcttgtccacttcgcaaccccactcaggtttcaacgatgttgatttccgcaaaaccaagccntnccaagctcccgaagaagcaacaaacgcctgaaaaagtcacgccccaaaattcccataatccaaagaacaaaacttttggcaaaaacaaggaccccacgagaagcgcaagc

SEQ ID NO: 36029 - DNA, 263 bp, Glycine max
  Clone ID: 701110026H1
ctctgctcgtgttttgcgtttcgttgcgatgttggaaatcaaaaccgccaagacccgcaagggcaagcgggagtcgagaagcgcgcccccaagctcgtggaatcggggaagaagacgctgatcctgcacggaacgaagaccagcggcgtgctgaacgccgtgctcgcgcagatttatcatttgaagaaggacagcgccgtcaagtacagccgcaagaacgagaacgtcaagcctttcgaggccggcggcgagacttcgctcga

SEQ ID NO: 36030 - DNA, 267 bp, Glycine max
  Clone ID: 701110027H1
tgatgctgttgggagtttcattgcctcacttctcattcttaacgattccttttgagttgagttcagataccagaaaaccgaagtgaagggagtgagagatgacagtactgtctccttctctttctctgccaaagttgcattcttcttttctttgttgccctctaaaatccaagctatcatcatcagctacaaatagaattcaacaaaaacccacttcttatccacgcattagagctttggaccttgatcaaaacacggttgtggcta

SEQ ID NO: 36031 - DNA, 273 bp, Glycine max
  Clone ID: 701110029H1
aaagcattggggagtagaagtagaagcttcacttcactctgttcagttcttattgttgcatagataatttgtctctatttttgttattttctttctctctcctctttgtgcattttaatagcaactcttagtttccaatgtccaagatgttgggagtgtttgtgggacttttgctgttggtggggttggctgcctctgccaagtttgatgaactcttccagcccagttgggctatggaccattcatccatgaaggagaacttctcaaactcaa

SEQ ID NO: 36032 - DNA, 277 bp, Glycine max
  unsure (1)..(277): unsure at all n locations; Clone ID: 701110030H1
gtnccctgataacccataaccgaccgcaccaccgttttcctntgctttgcgttctacaatgtcgaaaacctcagagattantacatgcaaagctgctatttgctggggaataggaaaacctgtgactgtggaagagatacaagtagaccctcccaaagccaccgaagttcgagttaagatgctttgtgccagtatatgctccacagacatctctagcacaaaaggattcccacataccattttcctatagcattggacacgangagttggtattata

SEQ ID NO: 36033 - DNA, 277 bp, Glycine max
  unsure (1)..(277): unsure at all n locations; Clone ID: 701110031H1
accggatcgacctcaattcgccgtcgtccaatcgctctcagttccaccgcctccgccgccggcatccaattcggtttggccttgcatctctctcaggtattaagattctactaaaaaaaaggttgatcagcgtaaagatggagctcactattacacagcctgatgattggcatcttcacctccgtgatggttccctcttgaagctgtcctccctcacagtgcgaanattttggaagggccatagtaatgccaatttgaaaccacccatcataccngt

SEQ ID NO: 36034 - DNA, 286 bp, Glycine max
  Clone ID: 701110032H1
tgatattttccttcttatttggttttttaagtgaaatgtgcggcaaacctttagatccagaatcaattcaaagttcaaacgataggagaagaagggagtagcgacgaactcaaacggcgtcgtatcgactcgttgttcatcgattggattgaagggagagagagatctggtagcggtagcggaaagatggataagggtaagatcgaagaggtgatcgagaagcaagtcctgacggtggcgcaagccgtggaggacaagatcgacgacgagatcgccgccctggagc

SEQ ID NO: 36035 - DNA, 273 bp, Glycine max
  unsure (1)..(273): unsure at all n locations; Clone ID: 701110033H1
aaccancactaccttntccatttccactcgtcaccaagcntccacnatggcctcaaccaacgccctctcttcagcttccattctacgntctcccaaccgccagtctctgaccagaagagcgaaccacaacggaagagtaaattaccgtcaaccgaatannccgtntctcngncaaagcctccgncaaagagnttgccttgaccagcattcccgctctgctatgtaggccggcattgacaagctcgncgacgccgtcgggctcactcttgggcc

SEQ ID NO: 36036 - DNA, 265 bp, Glycine max
  unsure (1)..(265): unsure at all n locations; Clone ID: 701110034H1
ctttccctctcaatttcaaaagtttgaaangcagcgtctcagttnaatcacgttcccatggatgacgaagctattgctaacggtaacggagctccgttcgcctccatgtgtcgtttcggtgtctgcattatccggctcccggcgccgcctatcgacgagcttcgtggagcggagccgcctccatttctcgtcgtcggagaagctcaagccaatggcgtgggtatcgctccaggaaggctcctcaacgccgacgaagccagctcgg

SEQ ID NO: 36037 - DNA, 255 bp, Glycine max
  Clone ID: 701110036H1
acttaaggtttcaaacctaggaagttggaagtcatggcagcaacattgatggcagcaacaacaagttctggtactcttaaagcaactcctttccttggccaaggcaagggtgccaatgccaatgctcttagggatgttgtctccatgggaactgggaagtacaccatgggcaatgatttgtggtatggaccagacagagtgaaatacttgggacccttctcagctcagaccccttcatacttgaaaggagaattc

SEQ ID NO: 36038 - DNA, 250 bp, Glycine max
  unsure (1)..(250): unsure at all n locations; Clone ID: 701110037H1
gnataaatcactgtatccagtgttattgtctaatggaaacctagctgaacaaggtgacttagaggatggcaggcactatgctgtttgggaggaccccttcaagaaaccttcttatctgtttgcctgnnttgctgggcaattgcagagcagagatgacacatttatcacccattcagggcggatggtgtccctaggatatggacacctgcagatgatgtacctaagactgtacatgctatgtattctctga

SEQ ID NO: 36039 - DNA, 249 bp, Glycine max
  Clone ID: 701110038H1
gcaggaattcacatttaccatccggaggggtgttggaactgcagattgtgttagtgtgaactatgacgatttcgtcaatgatgtggatgtgggggacatgcttcttgttgatggtggtatgatgtcttggtggttaagtctaagacagaggattctgtgaaatgtgaagttgttgatggaggagagctcaagtcaaggagacatttgaatgttagaggaaaaagtgcaacacttcctccatcactgaga

SEQ ID NO: 36040 - DNA, 253 bp, Glycine max
  unsure (1)..(253): unsure at all n locations; Clone ID: 701110039H1
ttaaactacatagaaaaataaaaccaaacctttcttcctactactcccattcccacatttcgacaacatngacgaggnccttcgacatgccgacggcggaggcaatgggcgaggacttcgacttcgccggcgccaccggngcgacctcgacggcagcagcagcaaccccatcttgaaggtcggcgaggagaaggagattggaaaanagggtttgaagaagaaatacttaaagaaggtgaaggatgggacactc

SEQ ID NO: 36041 - DNA, 255 bp, Glycine max
  Clone ID: 701110040H1
gggagtgtagggcagattgcgtagaatcggaagatggaagaggaagagcacgaggtgtacggaggagagatccctgacgagggagagatggaaggagacattgacatgtccgccgccgacgatgacgccgccgtcaaggagctcgacgagatgaagcgccgattgaaggaaatggaagaggaagccgcagcgctttcgcgagatgcaagccaaggtcgataaggagattggcagcttcaagatgaccgctattca

SEQ ID NO: 36042 - DNA, 258 bp, Glycine max
  Clone ID: 701110041H1
caactacaactcgcagcctcaggcttcgtacaaagttgcagttcttggtgctgctggagggataggtcagccactcgcgcttctcatcaagatgtcgcctctagtttccgacctgcatctctatgatattgcgaatgtcaagggagttgctgctgatatcagtcactgcaacaccccctcacaagtcagggatttcactggagcttctgagttggcgaattgtttgaaggatgtgaatgttgttgtcatacccgccgg

SEQ ID NO: 36043 - DNA, 256 bp, Glycine max
  Clone ID: 701110042H1
cagcttgaacacaccgcgtttcggagagagacgtcgcaatggggaggaggcctgcaaggtgttatcggcagataaaaaacaagccataccccaaatcacgcttttgccgtggtgttcctgatcctaagatcagaatttatgatgttggtatgaagaagaaaggtgttgatgagtttccctctgtgttcatctggttagctgggaaaaagaaaatgtttcaagtgaagcattggaagctgctagattgcatgcaaca

SEQ ID NO: 36044 - DNA, 261 bp, Glycine max
  unsure (1)..(261): unsure at all n locations; Clone ID: 701110043H1
cttttagcaagttaacaacacttttgtcttcgttccattatctagttctcanttctcttcaccctttgcctctgaaagaaatgggtagtcttgaagcggaaagaacaacagtaggattggcagcaagagacccttcagggattctctccccatacacctacaatctaagaaacacaggccctgatgatgtttacattaaagttcactactgtggaatttgccatctgatctccaccagattaaaaatgatcttggcatgtc

SEQ ID NO: 36045 - DNA, 266 bp, Glycine max
  Clone ID: 701110045H1
gttgacaaaaagataaccaatgcaagggatcttatcaacatactggaggatgctattagaagtggataccctatattaattattgctgaggatattgaacaagaagctttagcaactcttgtggtgaacaaacttagaggatcactgaaaattgcagcactcaaggcccctgggtttggagatcgcaagagccagtaccttgatgatattgccatctgactggaggtatgtaatcagagaagaggttggcctactttggacaaagc

SEQ ID NO: 36046 - DNA, 231 bp, Glycine max
  unsure (1)..(231): unsure at all n locations; Clone ID: 701110047H1
ctctctcccgaattattgttacgtncnacccttttacttaanattccctgtntccggtattcgctccctttttttctgcattctggttttacttagatctnctgtnccgcaccagatctggtgcagggtgagagggntgggttcataattttgtatcaatcttcctctgagcggtangcgtggggataccagagtctttcgggaagcaagagagggttctctccgttttca

SEQ ID NO: 36047 - DNA, 275 bp, Glycine max
  unsure (1)..(275): unsure at all n locations; Clone ID: 701110048H1
aatcaatcacatttcaaaggcatgttttttcaacaaagttcattctacccacgagtcgattaaaacaaacccagacgctaattctcccttctctatccccgcacnnnnnnnnnnnnnnnnnnncatttatccctcagtggaaacaacagagaatctcatttgggaagagccaaacacgactacagaagaagccatggaaaacgttctggtcacggtcccgggtgcgatctgcatctgatagaaaggatccagcgtgcaccttgttcgggcgacta

SEQ ID NO: 36048 - DNA, 256 bp, Glycine max
  Clone ID: 701110051H1
ctagtcctgttatttctcagcgcgtaaagcatggctttgttggtggagaaaaccacgagtggtcgcgagtacaaggtcaaggacctttcccaggccgacttcggccgcctcgagatcgagctggccgaggttgagatgcccggcctcatggcctgtcggaccgagttcggcccctcccagcccttcaagggggcccgcatcaccggctccctccacatgaccatccagaccgccgttctcattgagaccctcaccg

SEQ ID NO: 36049 - DNA, 254 bp, Glycine max
  unsure (1)..(254): unsure at all n locations; Clone ID: 701110052H1
taagactatagataagtnatttctnacgtgacacatacttaattatgtgtcatataaaaatctgctaacaccatgaataaggtagtgattgaggaccacttaattaagtatgtgtcacgtaaaaattagttaagactatagatangtaatgatttanaattacctaataatttttcgtgtttgtgtgttttattttcaggtcaaattttaccaatccaaattccaaaataaaatgtattttggataanataagg

SEQ ID NO: 36050 - DNA, 251 bp, Glycine max
  unsure (1)..(251): unsure at all n locations; Clone ID: 701110053H1
cataatcaaggccttaggctttagcaacaaatgcgaccttgccttggccgtcttccactgggttcgaaccancaactccaacaccaaccttttcagctcttctgcaatccccgttatcatcaaaattctcggcaaagctggtcgggtctcatccgcngcctctttgctcctcgccctccaaaacgacggcgttcatatngacgtctatgcctacacttgtctgataaatgcctattccagtagcggccggt

SEQ ID NO: 36051 - DNA, 254 bp, Glycine max
  unsure (1)..(254): unsure at all n locations; Clone ID: 701110055H1
caaatgattgagaaataacaagaggggaggagtaggagctaaattttatgcataaganaacaatagctggccacaagataagtagacaagatagcagggaaaaaatcaaacatatacttcagcaattagttccagatttgcacaacaattatggcggcagttcctcatccactccatttttgggaatcagagaagaaagccctcagattacaacacaccatcaaccctccacagtttctccaaccacagcgcct

SEQ ID NO: 36052 - DNA, 256 bp, Glycine max
  unsure (1)..(256): unsure at all n locations; Clone ID: 701110056H1
tgcttcaccttctgctctagaaaattcagtgctgaaacatggcttcggctactctctctgtagccaaaccagcccttcaggcaaatgggaaaggcttctctgaattctctggcctccgaagctcatcaggcttccttcccttttctagaaaatctcagaggatttccattctgtcattgcctccagacctatgcagttgncaagcagtggaggatacaagaagggtgtgacagaagcaaaatcgaaggttgccatt

SEQ ID NO: 36053 - DNA, 258 bp, Glycine max
  Clone ID: 701110057H1
ccaaaattaccagtcctcattgagcatctaaccatggctgctcctcttcaattcttctttctcttcaccctcactctcttctcatcattctccgagcaatcccacatcgaactaccctcaaacaacaacaaccctaaccctaaccctttacaaaaactgtccaatctccacttctactaccacgacataagagacaacgaaaaccccaccattgtgcaaatcgtggacaccccaaagaagttccgaagggttcgggtc

SEQ ID NO: 36054 - DNA, 263 bp, Glycine max
  unsure (1)..(263): unsure at all n locations; Clone ID: 701110059H1
ctgagtcggtatcaacgagtgaccgagtcgaaaagcgagtcaccactccccgcgctgcatggaccctctcgaagctttggtcgcccaaatccaagggctatcgagctctcccggcgacctcactcgcctccacactgttctaaagcnagccgatgactcgcttcgatccgagtcaactcgcctcgctccgattctcacacagctcgacccctccattcactccctcgggtttctctacatcctagaagcttccatgaccggtc

SEQ ID NO: 36055 - DNA, 265 bp, Glycine max
  unsure (1)..(265): unsure at all n locations; Clone ID: 701110060H1
gaagaatactactaactgtgttgtaatacctccagtggagaacaagatgaatccatggaacatgagancttccaagttactctctcaacaacttgcttatncctccttatcgcttggtagaagagattccaaacatgggaaattccagttgtgtgagcaaggagccaagaggttcacagatgacaatctttatggtggccaagttctgtctggatgatattcaagctgacaaagccaaggacatcatgtctttgccggcaaagga

SEQ ID NO: 36056 - DNA, 268 bp, Glycine max
  unsure (1)..(268): unsure at all n locations; Clone ID: 701110061H1
tggagttccatttgagttccacagtgctgctatgtgtggaagtgagcttgaactagaaaaccttgtaattcaacccggggaagctctagttgtgaacttcccttttgttttgcaccacatgccagatgagagtgtgagcacagagaaccatagggacaggctattgagacnngtcaaaagcttgtcacccaaggttgtgacccttgttgagcaagatccaacaccaacacttctcccttttccaaaggtttgttgagaccttgagtta

SEQ ID NO: 36057 - DNA, 272 bp, Glycine max
  Clone ID: 701110062H1
aaaagaatagagaagagagtgaggtttggtggtgtggtttagtgtcaaaatggcggcgagtagaagcactttacctctgatgaagtacttgagagtgcgcgtggacgctcttccccgcaacactcccttgaccctcgcttccaacttgttgattcgccgcttctccgaagaggttaggggttgttttctcgacaagtccgaggtcacagatcgcgtcattcctgcgtcaaaaacttccagaaagtcgatccttctaaggttaaccctaatgc

SEQ ID NO: 36058 - DNA, 274 bp, Glycine max
  unsure (1)..(274): unsure at all n locations; Clone ID: 701110063H1
gtggattcgaaaaanatgaaggtttggagancggtggtgagtttgatgttagtggggttactgcccgtgtcaacaatgggttcgattcgtggtggagaagaacagcctgagagtgacatcgccggacaaaataagagggacacacgacagtgccattggcaacttcggaatacctcaatacggtggtagcatggccgggaacgtatttaccctaaggataacaaaaagggttgcaaagagttcgatgagttcgggatttcctcaantcaacccc

SEQ ID NO: 36059 - DNA, 252 bp, Glycine max
  Clone ID: 701110067H1
agcaaaagcaagaagaactagtctaagcagaaatggcctcttcagtgatggcatctgtggccctcaaacctgcccctttcactgttgagaagtcctcagttagaggccttccctccctctcaaggaactcctcttcattcagagttgtggccagtggtggcaagaagatcaagactgacaagccttatggaataatggtggcatggcttgagggaaggagttgatgcatctggcaggaaaggaaagggaaag

SEQ ID NO: 36060 - DNA, 251 bp, Glycine max
  unsure (1)..(251): unsure at all n locations; Clone ID: 701110068H1
accggcgagtccatctcgcgccagntacgtagccgctccggccacngcctttggttccctcactttctcgtccttctncttctcagaaatatgccttctcaaaaagttgaaacgggtcatcaagacacggtccatgatgttgcaatggattactatggtaanaggctggccacggcttcatcagatcacacaattaagataattggggtgagtaatacggcctctcagcatctcgcaacattgactggtca

SEQ ID NO: 36061 - DNA, 249 bp, Glycine max
  unsure (1)..(249): unsure at all n locations; Clone ID: 701110069H1
ttctctttgtagtattttggactgaaagaagaacaagtacctctaattatcattcaacacaatgacgggantnnagttttttaaacccaatttggaagctgatcacattccaacttggttgaaggcgtacaaggatggtaatgttgcaccatttgtgaagtctgaacccattcctgaagctaacgatgaacctgttaaagtggtagttgggaacagtcttgaggacattgttttcaaatctgggaagaa

SEQ ID NO: 36062 - DNA, 194 bp, Glycine max
  Clone ID: 701110070H1
ccacttttcactgaacacttattactcactccttcatggccacttcgctctctttctccatttctcccaaaaccactgccacaacctcagccttccgattcaaagtctccgccatggctaccaccatcgccgccccttctaccaaggtggctcccgccgtcattgtcggcggcggaagagtgggtagggccttg

SEQ ID NO: 36063 - DNA, 250 bp, Glycine max
  unsure (1)..(250): unsure at all n locations; Clone ID: 701110071H1
tgactagtgcggcgcgctcctattatcaccgtanacggcggaggtggcggtggtggtgtagacacggcgtgacggcgatctcttgagataaatgttggttgaaagaggaanaagaagaagagttgtattgtagaatgagccaaccaacggtgatacttgccactgcgagctatgatcacactattgcgtttttgggaggccaagagtggccgttgctaccgcaccatccaatatcctgattcgcaatnaa

SEQ ID NO: 36064 - DNA, 253 bp, Glycine max
  Clone ID: 701110073H1
ggtcgcttggctatgttctccatgtttggtttctttgttcaggctattgtcactggcaagggccctattcagaacctttacgaccacgttgctgatcctgttgccaacaatgcttgggcttatgccactaactttgtccctggacaatgaggatgcctacatgcaatgcaatcttctgctcccttttgcagttccctgtgtttaactccattttcactaatgtaactacacctgtgtagcagaaaaatctgta

SEQ ID NO: 36065 - DNA, 254 bp, Glycine max
  unsure (1)..(254): unsure at all n locations; Clone ID: 701110074H1
tctctctttaccttcttaacgcaccaagcgaaggnanaagcgctttctaacttaagtgatggcgaacgcagctgaagtttcagccttgaaccgcatcaaactgcatcttttgggtgaactctctccactggccactcccctaaactattttgatgaatcaaaccctagcccctctgaatcttccaattcccaatctcttctgtttctcttaaccactacttcactgacctcttcgaattcgatccaaaccccaa

SEQ ID NO: 36066 - DNA, 261 bp, Glycine max
  unsure (1)..(261): unsure at all n locations; Clone ID: 701110075H1
gaagagagaaaaaccatggcaataacactcaacaatggcttcaagatgcctatncattggattgggcgtgtggcgcatggaaggaaacgaaatcagggacctaattctncaattccatncaaaantggttctcngccattttgattgtgctgcctgactacaaanacgangcagnagttggngatgcgcttaaggaggctttgatagtggcntgctgaagcanagaggatcncttcattacaccaagctttggaattnggt

SEQ ID NO: 36067 - DNA, 262 bp, Glycine max
  unsure (1)..(262): unsure at all n locations; Clone ID: 701110076H1
aagttaaaagccttagccttccctacaactccaaacannnaagacatcatcatccatggctgcctccgtctccactgtcggagctgtcaacagagctcttttgaacctgaatggttctggagctggagcttcagctcccagttcagccttctttgggaccagcttgaagaaggttattgcctcaagggtccccaacagcaaggtttccggtggaagcttcaagattgttgctgtagaagagaagaaagagttgaagagaccc

SEQ ID NO: 36068 - DNA, 112 bp, Glycine max
  unsure (1)..(112): unsure at all n locations; Clone ID: 701110078H1
ggagaaagagaaagaaaaagaaagagagagcagnatttccattgaccgcncattgnaagctttgcttncttcncnntctgctcactcccacttcgtanacgaaattnccnca

SEQ ID NO: 36069 - DNA, 249 bp, Glycine max
  unsure (1)..(249): unsure at all n locations; Clone ID: 701110083H1
caggtcacttgncccagnatntagtgncatgtacctnggttctgtggttggcttggcattcctcaccattgctaatccaaaaatttggttggccatcagngttttactcctttggatctcttggaagtatctggtttgccttgtggttgagaaaggcatatagtccccaaaagatgaccctgatctggggtagagganaaaaggctcatatggaaggcaatgtatcaaatgcacctgtttcttccatnc

SEQ ID NO: 36070 - DNA, 247 bp, Glycine max
  unsure (1)..(247): unsure at all n locations; Clone ID: 701110084H1
gtagtgctttgctgtccgagagtaaagagtaagcctctttctcactctctaatctatttgtgaactaggttttggttgcagagacatgggagaaaggattccgtgtgggagtggcatgtatttccccttccctcctccgccatctcccattcgccnnnnnnnnnnnnnnnnagatcgcgataggtatttggccgaactactcgctgagaggcaaaagttggtaccctttctccaagttcttccacaa

SEQ ID NO: 36071 - DNA, 228 bp, Glycine max
  unsure (1)..(228): unsure at all n locations; Clone ID: 701110085H1
cttagtatatatttcattgatacaantaccctaacactgtactggatagccatggaacaacaagtagccacaacaactgaaggacaatccataagatgtaaagcggcaatttgtcgcaaagcaggtgaaccactgagtattgaggagatcattgtggcgccaccaatgcctggtgaagctcgcattcgtattatatgctcctctctctgtcaaaccgatatcagtttt

SEQ ID NO: 36072 - DNA, 214 bp, Glycine max
  unsure (1)..(214): unsure at all n locations; Clone ID: 701110086H1
catgaaaaatagcaaggttcnccgatttgttatcaganncnaaacatcaacaaaatccaaattnnccgtnnncacggtggcgctggatgtaagaatgggaaatcgacgcttcactcaggtcgcaaccagcgacgacgaggacgaagcgtcgcnggccnggcgccttcctcccaagcagcaatcgtccgtcagtgcctcngaannaaaactgttc

SEQ ID NO: 36073 - DNA, 249 bp, Glycine max
  unsure (1)..(249): unsure at all n locations; Clone ID: 701110087H1
acctttgttcactcttcttctcttgcggctagggttttagcgcanttcttctagatttaaggaagatgggtaaggaaaaggtttcacatcagtattgtggtcattggccatgtcgactctgggaaatccactaccactggtcacctgatttacaagcttggaggcattgacaagcgtgttattgagaggtttgagaaggaagctgctgagatgaacaagaggtcttcaagtatgcctgggtgctggaca

SEQ ID NO: 36074 - DNA, 251 bp, Glycine max
  Clone ID: 701110088H1
caggtactgcgtttcggaagcagacacagatggctcgtacgaagcaaaccgctcgtaagtccacaggaggaaaggctcctaggaagcagcttgcaaccaaggctgcacgtaagtctgcaccaactactggtggtgtgaagaagccccaccgttatcgtcctggtaccgttgctcttcgtgaaattaggaaataccagaagagtactgagcttttgatccggaagctccccttccagaggctggttcgtgaa

SEQ ID NO: 36075 - DNA, 253 bp, Glycine max
  unsure (1)..(253): unsure at all n locations; Clone ID: 701110089H1
gtgtggttcaaggccggtgcacagatcttctcanagggaggncttgactacttgggcaacccaaacctgatccntgctcanancatccttgctatctgggctgttcaggttgtgctcatggggtnngttgaaggttacagngttggtggaggaccacttggtgaaggacttnacccaatctaccctggtggtgnttttgaccctcttggnctggctgatgaccctgatgcattcgcngagttgaaggtcaagg

SEQ ID NO: 36076 - DNA, 257 bp, Glycine max
  unsure (1)..(257): unsure at all n locations; Clone ID: 701110091H1
tacaattcttctaagctctactaaaaaaagatacatagaaacaatcgaaattatttattattattaaagcaacatgnttttgtcatggacaaaagggagagtgttccggcgtgccagaaagggtaaggagttgaaatattctggtggcgacatggagatagagattgcgatccccacccacttccggtgcccggtaaccttggacatgatgaaggaccccgtgaccgtttccagggcataacctatgaccgcgacac

SEQ ID NO: 36077 - DNA, 265 bp, Glycine max
  unsure (1)..(265): unsure at all n locations; Clone ID: 701110092H1
ggcaactcgaagactttcattgctcctctctcgctctctatcttccacttcttttcaagctnccttctactacttcactcactagggagaaactctggcaagtggggaaactttaacagattcagcactgcagcagcagttgaggatttaatcactccacaagttccaataacatacactantacatctgataaatggacaatttgtggatgctgcttcagggaaaacttttccaacatatgacccacgcacaggagaagtgatg

SEQ ID NO: 36078 - DNA, 228 bp, Glycine max
  unsure (1)..(228): unsure at all n locations; Clone ID: 701110093H1
gggctgtgctagaaaagtatgcttctttgctcacaaacctgaaganctacgccctgtgtatgcttccactgggtcggctatgnccatcaccaaaatcctattcagctagtggacttgacatgacagtgangagtccattggctcttagttccacacaacatacgaccaanagnnnngggganngctnatgtcgcnnnnggcagcnnntnnnnnccnaggngngggagc

SEQ ID NO: 36079 - DNA, 270 bp, Glycine max
  Clone ID: 701110095H1
gtgcctgataacccataaccgaccgcaccaccgttttcctttgctttgcgttctacaatgtcgaaaacctcagagattattacatgcaaagctgctatttgctggggaataggaaaacctgtgactgtggaagagatacaagtagaccctcccaaagccaccgaagttcgagttaagatgctttgtgccagtatatgctccacagacatctctagcacaaaaggattcccacataccattttcctatagcacttggacacgaagagttgg

SEQ ID NO: 36080 - DNA, 253 bp, Glycine max
  unsure (1)..(253): unsure at all n locations; Clone ID: 701110096H1
ctcataacacaaagcacaaagcaaanctcatccttgagttaanaaatggcagcagcttcttncatggctctctcatccccatccttggctggcaaggccgtgaagctgggcccatcagccccagaagtgggaagggtgagcatgaggaagaccgtcaccaagcaggtctcctcaggaagcccatggtacggcccagaccgagtcaagtacttgggcccattctctggcgagcccccgtcctacctaaccggtg

SEQ ID NO: 36081 - DNA, 272 bp, Glycine max
  unsure (1)..(272): unsure at all n locations; Clone ID: 701110101H1
ctcataaattccgattttctccctggaaaaatggcagcctctgccggcggccagataactctctcgtacaaccgtgcagttacatggagtggcctgtagtaggaattggaagctagtgaagttctgtaatggggaagtcatgggacgtaagcttgtgttaaaaagtgcttatggtggcagcataaggatgttaggnnnnnnnnnnnnnnnnnnnntatatgcatgtctctccacagctgacgttctatgaatccaagttgagagactagata

SEQ ID NO: 36082 - DNA, 276 bp, Glycine max
  Clone ID: 701110102H1
tactaacaggcaattgcaaatctcgacacctgcagtgttaattaacttctctgatcaacaaagacaacagatagcaaattgtgaaaaaaacatctcacgcatcgctactggctgcaactcagatagttcaacacctagtatgcaaagatgtatcgtgtctccaactacagtccaatcaaaagaacctgaacttgcaacctcacactcccagccagggcattctctcccaattcctgtaaagggtgtaaggttcaatgatctatgcacaacctatgg

SEQ ID NO: 36083 - DNA, 274 bp, Glycine max
  Clone ID: 701110103H1
ctctgaacgatgaaatgaaatggagttccaagataagcgtttatctctgagatcgagcttgacgttcagcgagacgctgtgcgcagtgttcattccgttcataggaatagtcgaagctttggttttcacattcactagttgcttcgatttccaatctcccaggaataagaagaaacattcttctaccttcgacgacattctcaccctcgccgaggattctccatttagtattaatgaaatcgaggccttgcgtgagttgttcaagaattgagta

SEQ ID NO: 36084 - DNA, 272 bp, Glycine max
  Clone ID: 701110104H1
ctctgaagcctttggttccaagttttccatgttttgccaatatttacatgtctctcatggagaagccgcatgttgattttggactaaaactgcttggagctgatgcaatgtctattcctggcctttataggattgtccaggaaatcattaaagaccaagtcgcaaacatgtatctgtggccaaaggcttagaggtgcaaataatggatccaacaaaggccatgaaagttccagttggaatccttcatgtgaaagttgtgagggcagagaagc

SEQ ID NO: 36085 - DNA, 270 bp, Glycine max
  Clone ID: 701110105H1
ctctgaacgatgaaatgaaatggagttccaagataagcgtttatctctgagatcgagcttgacgttcagcgagacgctgtgcgcagtgttcattccgttcataggaatagtcgaagctttggttttcacattcactagttgcttcgatttccaatctcccaggaataagaagaaacattcttctaccttcgacgacattctcaccctcgccgaggattctccatttagtattaatgaaatcgaggcttgcgtgagttgttcagaagttga

SEQ ID NO: 36086 - DNA, 271 bp, Glycine max
  unsure (1)..(271): unsure at all n locations; Clone ID: 701110106H1
cacccaccaccaaccgtgactcaaagcaccataaggcaacaatgattgatgaccatcagttctttttgaatcccgtgacattcaagtggctataatcataaggaagcttggaggtacttctagtctttagaaggaaacaggcattaatatttattgtataattattgcggggattggtcatttaatttggatatgatggagttctgtgctgaaagttcccattcgnatnnncnaacacactttgaagcattctaaatctgcagatgaagtg

SEQ ID NO: 36087 - DNA, 269 bp, Glycine max
  Clone ID: 701110107H1
cgcgcaggcagatgaggaggaagggaggttgctcgaggacagagatgacaacaagaggaacgaacagcagacttaacttttatttatttttaatcgttccctgttttattttacacagattcaagaaaggaaaaaaacaaacaagaggtttggtttggttttcgaggcaaatatggaaatgtcatcgtcctctctgggcatattgccggttcggtattgtttttttagttgctagatcttcttcacgttgccaatgcggtgggtagtta

SEQ ID NO: 36088 - DNA, 267 bp, Glycine max
  unsure (1)..(267): unsure at all n locations; Clone ID: 701110108H1
cccagtccaagcagcctccaattcgtgccactctcttcaaaatggccgttaccttctcaaatctaccacacagaatcaggtctcaagtccctcgacgacttcctctctgggaaggtctacgtttctggggatcagttcacaaaggacgacatcaaagtgtatggtgctgttttggagnagccaggtgactcttttcccaatgctgccaagtggtagaggttgtctcatctcagcttgctgcaagttccccggcaatgctcaggggtg

SEQ ID NO: 36089 - DNA, 266 bp, Glycine max
  unsure (1)..(266): unsure at all n locations; Clone ID: 701110109H1
tgcaaacccttgtccgagcaagaggtaagggtcttgtgtgataaggcaaaaganattttgatggaagagagcaatgtccagcctgtgaaaagtcctgtnacaatttgtggtgatattcatgggcaattccatgatcttgcagagctttttcgcattggagggaagtgtccagatacaaattacttgtttatgggagattatgttgatcgtggctattattctgttganactgttagcttttngttgccctaaagtgcgttatcgtc

SEQ ID NO: 36090 - DNA, 266 bp, Glycine max
  unsure (1)..(266): unsure at all n locations; Clone ID: 701110110H1
tctcattctattggctgaacaacatcgatccaattctgattttgcaatatagtaataaaaaaacgaatcaacgaacaaagcaaaatcaacaatgagaaactgaaaaacagtgaaaaccatcatcaccctgtaccttacgcacctctccataacttccatcttcgccgaatcacagcttccaccaccatcaccncngccgatcaccgccgctacgacaaccgtgaaggcaagatccttggncgtttgnttcttgatatatnnctggt

SEQ ID NO: 36091 - DNA, 266 bp, Glycine max
  unsure (1)..(266): unsure at all n locations; Clone ID: 701110111H1
gttcaacatgaactgttatctgtatatgcaaaccaactccttgaaaaggagcattctggatgtcatgcattactaagagatgacaaggttgaagacttgtcaaggatgttcaggctcttttctaaaataccccgaggtttagatcctgtttccagtatatttaagcagcatgtgaccgctgaaggcatggcattagtgaagttggctgnagatgcagtgagtaccaagaaggcggagaaaaaggatattgttggtttacaagagca

SEQ ID NO: 36092 - DNA, 268 bp, Glycine max
  Clone ID: 701110112H1
gccacctctataattctcttccactgtcttgtgttctcctgcaagcctgcaaccacaaaaaccaaatagtttttttggtcaaactcaaagcttttaacttaacagaagcaagaatggtaaaacggagttaagcaagacaaaggaagaaagaatggtgagagagcataacattaacagtggatggccaccaataggggccccactactgaacgtgcagagagatgagtatgatcagcttggagcagcttcgatagctctgtgaatgctg

SEQ ID NO: 36093 - DNA, 270 bp, Glycine max
  unsure (1)..(270): unsure at all n locations; Clone ID: 701110114H1
gcgagaaatggcgatggcaatggcgcttcgcaggctttcatccttcaattgacaagcctctgcgccctctcttcaatgccggttccctctactacaagtcgtctttgcctgatgaagctgtttacgacaaggagcgacccggagttacatggccgaagcagttgaatgctccacttgaggtcgtggatcctgagattgctgatattattgagcttgagaaagctaggcaatggnaggggctagaattgatacgtcagagatttcactctg

SEQ ID NO: 36094 - DNA, 269 bp, Glycine max
  unsure (1)..(269): unsure at all n locations; Clone ID: 701110115H1
tcgagataactagaaacagtgtgatgaaaatganggtccttgttttcttcgttgctacaattttggtagcatggcaatgccatgcgtacgatatgttccctctccgaatgaacactggctatggtgcccgtactccggagtganatgcgcaagttggaggcttgctgtggaagcacaccacntcttggcttgagaccaatcctggagaatgcggtgnagccaccaanggattncncccnggcggaccatatagttnngctnccaaacnt

SEQ ID NO: 36095 - DNA, 281 bp, Glycine max
  unsure (1)..(281): unsure at all n locations; Clone ID: 701110117H1
gnagaatcactnccttatcnatttcnacanaanatcanagtnnaaaaacaacgctctctncttncagnctnccattctacgntctcccaacngcnagtctctgacncgaagagcgaaccataatggaagagtaaattaccggaaaccgaataaccgtttctccgtgaaagcctccgccaaagagattgcctttgaccagcattcccgntctgctatgcaggccggcattgacaagctcgccgacgctgttgggctcatcttgggcccagagggaggaatgt

SEQ ID NO: 36096 - DNA, 271 bp, Glycine max
  unsure (1)..(271): unsure at all n locations; Clone ID: 701110118H1
gcttccagggcttttctgattttgtggangaaatgttgtcccatatggctcaagtgaggcgagaggtaatgcttcttatagaattgaatgaaaaattatttatgcttctaatatggttaaggtaggaggaaaaaggntgacggntcccccttgctaaaaaaaaataactttctagcnaattaataattacatactaacatttgnttttgaaaagaaacttagttgnttgaatatgacttgacccttaactaaggnttggggtccttccgat

SEQ ID NO: 36097 - DNA, 254 bp, Glycine max
  unsure (1)..(254): unsure at all n locations; Clone ID: 701110119H1
ctaattctctactctctctcacttactctctatcacatttntacttacaagatggcagcaacatcagcatgccttgtagggaatggtttatctacacggggtaatagaataactcttaagaaggacttcaatggaagaagatatctctactcatcttggagattttcattattgaacaacaataaggcatcaaaagcattttccataaaggcatctttggagcaaaggcaagaagaagggagaagggggtttct

SEQ ID NO: 36098 - DNA, 273 bp, Glycine max
  unsure (1)..(273): unsure at all n locations; Clone ID: 701110120H1
gttcaactcaactaaactatgtcttccttatccctatatgccaacctctcctctctaccatcctccctcaccattcgttcttcttcatccaaagatacctctttgaaacaggattggnggacaaagtccaaacctatcccaccaggtggcacataccctgcaaaagatcattgcagtcgttgtgggttgtgtgatacttactatattgcccatgtcaagaatgcatgtgctttcttgggagatggatgtctaagatgaaagattggacctgtt

SEQ ID NO: 36099 - DNA, 272 bp, Glycine max
  unsure (1)..(272): unsure at all n locations; Clone ID: 701110121H1
catttgcaaagtgttatttttcttttttttctcatttgcattgcaaattgcaatggcttccaacaaggttattgccaccatcatggtgctttctctccttgcctactcaacatcattcaccaatgcatgtggcacatgccacccaaaacctannnnnnnnnnnnnnnnnnnnnnnnnatcaggaaagtgccctaaggacacattgaagctaggggtgtgtgcagatattctaggtcttgttactgttgttgttggctcccctgtctccagca

SEQ ID NO: 36100 - DNA, 269 bp, Glycine max
  unsure (1)..(269): unsure at all n locations; Clone ID: 701110122H1
gtttatgtgtagaatganaggttcatgtcttcttctcacgtcctctttcaccggaatcaggacaagcaaagagcttcggcatatgctgtcactgtgtgagttgaaaagcataacatgcttctcagtttgtaatcaaaagcaaaaatacaatcaaaagctttacattattcccgttagaactgtttgtgttcggttctgcatctcaagatcctcagttgggtcagtggaattgagtgggacaggcacacacagtgatgcttattcaggat

SEQ ID NO: 36101 - DNA, 269 bp, Glycine max
  unsure (1)..(269): unsure at all n locations; Clone ID: 701110123H1
attagctattaatcttcagttgacatgcacatccaaatgtcttctttcctcttagcttcgcttgcacttttgttttgcatctcctccttggagaagagctttgcctttcaagcaacaaaggaaagcaacaatcttcgtcaatatcattttgttcacctcaactctctatttccatcatcttcttgcagctcttctgccaaaggtcntaaaaggaaagcatcattagaagtggtgcacaaacatggcccatgctcccaataaatcatagt

SEQ ID NO: 36102 - DNA, 265 bp, Glycine max
  unsure (1)..(265): unsure at all n locations; Clone ID: 701110125H1
cttatcgctgtggttttcatcgtcttccttctcttatatttctntntnttatngncttcgcngcacgcngaaacaatggccggaaaagganagggnccngcnatcggaatcnatcncggaaccaccnactcttgtgtcggtgtgnggcaacatgaccgagttgaaatcatngccaangaccaagggaactcnccgacgccgnctnangnnggcttcatganaccgagngtctcatcggtgagcggctaanaaccaagtcgccatg

SEQ ID NO: 36103 - DNA, 245 bp, Glycine max
  unsure (1)..(245): unsure at all n locations; Clone ID: 701110126H1
agactcaggcgctgctgcccttcantccttcagcaatggnntacgtgaagtcacagaaatcaaaagcctacttcaagaggtatcaagtcaagttcaagagaagaagagagggaaaaaccgattaccgtgccaggattcggttgattaatcaggacaagaacaaatataacaccccgaaatatcgctttgttgttcgtttcagcaacaaagacttgttgcacaaataatatctgctagcattgctg

SEQ ID NO: 36104 - DNA, 236 bp, Glycine max
  unsure (1)..(236): unsure at all n locations; Clone ID: 701110128H1
cggcgtttgtaaaatanntctttctctctctntgctctggcctcataccaanttaccgganccgctatatcatgttggagccaattgtcgctgtcacgtttaattttcatcattactaagttagtttaatagactctgtgctccattcatcaaatttcatatttatataggaacaaaacacactcctctccgttcttcccattcctcaccccattgtcgntcccaaaccctacatt

SEQ ID NO: 36105 - DNA, 269 bp, Glycine max
  unsure (1)..(269): unsure at all n locations; Clone ID: 701110129H1
cgaacactgaatcgtgattcgcagtgtatgacgagcgcttcggagctatttcactccagaaggcatcgattgggacgaatgctctcgatctagggctcgacaccgaactcaacgccgccgattctctccgccgccactaccacctccgccgcctccgtcaccacccggagcgtgcatctgatagaattgatgggaggtatcggcggtcttttcgcaagcgcagagcgtttgattctgnagaaatgtgagagtagtcttagaggagtgac

SEQ ID NO: 36106 - DNA, 264 bp, Glycine max
  unsure (1)..(264): unsure at all n locations; Clone ID: 701110130H1
gagaaaatgtctctgattccaagtttcttcggtggccgaaggagcagtgttttcgaccctttctccctacgatgtgtgggaccccttcaaggattttccatttcccagttctctttctgctgaaaattcagcgtttgtgagcacacgagtggattggaaggagacaccagaagcacagtgttccaagtgatattnccgggctgnagnaggaggnagtgnagtggagatccagatgganagtcttcaatagcggagagaggagtt

SEQ ID NO: 36107 - DNA, 267 bp, Glycine max
  unsure (1)..(267): unsure at all n locations; Clone ID: 701110131H1
ttcaaacttgaagcattgcattctgctatttaattccactacgtacacgcacnttctccttcaaagacaacaatggcaccaacagccaagactctgacttacctggcccaggagaaaaccctagaatcgagcttcgttcgggacgaggaggagcgtcccaaggttgcctacaacgnattcagcgacgagatccccgtgattctcttgccggntcgacgaggtggatggngcagagagagtttgtgagagtgtggaggctgcganaat

SEQ ID NO: 36108 - DNA, 266 bp, Glycine max
  unsure (1)..(266): unsure at all n locations; Clone ID: 701110132H1
gggcggtgaagtgcagtacttcaatccccttttctctcttctccttttatttcatcntctcttcgttcctttcttcttctccaaagttttcaattttcacacttttcgagtaancacatcttttcaatggcgtcccaaattacccgtgagtggtctggaatcaatacattcgcacctgctacccagatnagttgcttgactctgggganaattaaacnagagatgtgnactcttaacatactgtgatggganaaggtgtgtggaaa

SEQ ID NO: 36109 - DNA, 273 bp, Glycine max
  unsure (1)..(273): unsure at all n locations; Clone ID: 701110133H1
ctcataaattccgattttctccctggaaaaatggcagcctctgccggcggccagataactctctcgtcaaccgtgcagttacatggagtggcctgtagtaggaattggaagctagtgaagttctgtaatggggaagtcatgggacgtaagcttgtgttaaaaagtgcttatggtggcagcactaaggatgttaggnnnnnnnnnnnnnnnnnnnntatatgcatgtctctcacagctgacgtttctactgaatccaagttgagagacctagat

SEQ ID NO: 36110 - DNA, 270 bp, Glycine max
  Clone ID: 701110134H1
gcaaaactcagatgcaaaaagtgtggtggaacttacaaatggctcatctgaagatggtaaagagacatctaacagtgatgctcctgagaacaatcctcagtatactactgtttatgtgggtaaccttgctccagaggtaactcaacttgatctccatcgccacttccatgctcttggggctggagtgatggaggaggttcgggtccagcgtgataaagggtttggttttgtgaggtacagtactcatgctgaagcagctctggctattca

SEQ ID NO: 36111 - DNA, 271 bp, Glycine max
  Clone ID: 701110135H1
gtcaatttcgtacactcgaacatctccaagaacagccgccagccatacgccgtcagtcgtcgcgctggtcaccagacctccgccgaatcctggggtaccggccgagccgtctcccgtatcccccgtgttcccggcggcggaacccaccgcgccggccaaggagcctttggaaacatgtgccgcggcggacgcatgttcgccccgaccaagatctggcgccgctggcataggaagatcaacgtgaaccagaagcgctacgccgtcgtctccg

SEQ ID NO: 36112 - DNA, 267 bp, Glycine max
  Clone ID: 701110136H1
gataactagaaacagtgtgatgaaaatgaaggtccttgttttcttcgttgctacaattttggtagcatggcaatgccatgcgtacgatatgttccctctccgaatgaacactggctatggtgcccgtactccggaggtgaaatgcgcaagttggaggcttgctgtggaagcacacaacatctttggctttgagaccattcctgaagagtgcgttgaagcaacaaaggaatacatccatggcgaacaatatagatcagatccaaaaca

SEQ ID NO: 36113 - DNA, 269 bp, Glycine max
  unsure (1)..(269): unsure at all n locations; Clone ID: 701110137H1
agctaccaacatgaccacttatgcaacccagtgtctatcctcatctgatagcatacaatagtctctgactncacttcctatcattttcttcctgcttgaacaaccaaagagtgaaaacactttcatggagaccaacttagattattccaagatgctctttttactcctccttggttccacttcattgattttcanctacacacttggcttctgcagccactcccaagctcaacatcaagaggtgaaggcattanaggnnataggagcna

SEQ ID NO: 36114 - DNA, 267 bp, Glycine max
  Clone ID: 701110138H1
tgaagaggcagacagtgaatgccatgaaacacatgcagctgttagtgcgagttcaatgtcagattcagtctcgaaggatccagatgttggaaaaccaggcacgatatcaagctgatttcaagaatgataaggatgcagccagtatcttgggcaaactcacttctgaagcaggaaatgaagagtgggatgatagcttactgaccaaagaggaagtagaggcaagattgcagaggaaggtggaagcaatcatcaaaagagaaagagcaa

SEQ ID NO: 36115 - DNA, 265 bp, Glycine max
  Clone ID: 701110139H1
ccaaaatcagcacttagaagaatttaacggaagattagtaaaaaagaaaagagagagagcgtgaaggtcgggggatagggtttgccttgactcacgttggcaaattttccttttgcttcttcttgtccaaaccgaatcatttatttttggattcaactttctttctctcggcgcggtgttattagcgattggaacagtgcgagcgctgccggaagaagaagtgctggagctcaagttccgtctctacgatggatccgacatcgga

SEQ ID NO: 36116 - DNA, 266 bp, Glycine max
  Clone ID: 701110140H1
gctgtgagtagtgagagggaggaagacatagacataaagaaggagaagtgaagtgatgaatgccccagatcgttacgagcgtttcgttgtccctgaaggcaccaaaaaggtttcttatgagagggacacaaagatcatcaatgccgcgtccttcaccatcgagagagaggagcacactatcggcaacatcctccgcatgcagcttcacagagaccccaatgtgttgtttgccggatacaagcttcctcaccctcttcaatacaaaa

SEQ ID NO: 36117 - DNA, 264 bp, Glycine max
  unsure (1)..(264): unsure at all n locations; Clone ID: 701110141H1
gcaaaatttaaggaattggctccatatgatcctgactggtattatgttagggctgcctcaatggcaagaaagatttatttgagaggcggtcttggtgttggggctttccagaggatctatggtggaagcaagagaaatggaagccgtcccccacatttctgcaagagcagtggggctattgcaagntccattctgcaacaattgcaaaacatgagcattgttgagattgatacaaaaggaggtaggaaaatcacatctagtggt

SEQ ID NO: 36118 - DNA, 261 bp, Glycine max
  Clone ID: 701110142H1
caagtcaaccggaaagtatcatacatgaagcagatattgttattgcagcagcaggacagccgatgatgatcaagggaaattggatcaaaccaggagctgcagtcatagatgttggcacaaatgctgttgatgacccaacaaagaagtcgggttacaggcttgttggagatgtagattttgaggaagcatctaaagttgctggttggattactcctgttcctggtggtgtaggtccaatgacagtgacaatgttgctgaaga

SEQ ID NO: 36119 - DNA, 263 bp, Glycine max
  Clone ID: 701110143H1
cacaacttcgcttattaaatctcttcttccaattccttactttcattcattcccaggctgagatggcagcggcaccagcagctaccttcactattggaaccaccggttccctaggccaaagaggaaactcgcttcctcaattaaagtcttctgggttgaaattcaactcccagaatcatttgaagagcttctgcggcctcaaggccatgtcatccgtgagatgtgagtcagaatcgtctttcttggttaacaaaatggtgctg

SEQ ID NO: 36120 - DNA, 264 bp, Glycine max
  Clone ID: 701110144H1
gaagtcttgcccttctctcttcaactccaaacacaagacatcatcatccatggctgcctccgtctccactgtcggagctgtcaacagagctcttttgaacctgaatgggtctggacctggggtttcagctcccagttcatccttctttgggagcagcttgaagaaggttattggctcaagggtccccaacacaaagatttcctctggaagcttcaagattgttgctgtagaagagaagaaagagattgaagagacccagcagac

SEQ ID NO: 36121 - DNA, 195 bp, Glycine max
  unsure (1)..(195): unsure at all n locations; Clone ID: 701110145H1
atatatatctatcatttttctaattttctgccatttttnttagtttcctatactataatatagnntagcatatgaaaaagaanaaaaagattctaaaganatataactaatattctttagacnnatccaanagatattaaattccaatnatttnagatagaacanagattanacggnggattgnatgcgagatct

SEQ ID NO: 36122 - DNA, 265 bp, Glycine max
  unsure (1)..(265): unsure at all n locations; Clone ID: 701110146H1
cggatattgtctgctctaaaacagtttttggatgctgaatctattatcaatactgctttggatcaaactggaaaatgggatcaaggtgatttgttgcgaacaaaagctaaacttcaaattgcacagggccagttaaggaatgcaattgagacatatacgcagttgcttgctgttcntcaaatccagagtaaaggtttggttctgggnagaagctataccaggaaaacagagatcgtgctaggaacttggnagtggaaatatggct

SEQ ID NO: 36123 - DNA, 269 bp, Glycine max
  unsure (1)..(269): unsure at all n locations; Clone ID: 701110148H1
cagagagcgcgtcttaataaacgctcntctctgaaaacccccatttctttnactnctntcttcttctcttncgcttcttcgatcttcgatcttcgnccgctgaaaatgagagagtgcatttcaatccacatcggccangccgggattcnggttggaaagcctgctgggagctttatgcctcgaacacggcattcagcctgatgggcanatgccnagtgaccagnncgntggtggaagtgatgatgtttcaacacctcttcnntnaaang

SEQ ID NO: 36124 - DNA, 205 bp, Glycine max
  Clone ID: 701110149H1
tctcttcgctcttcgatcctcgtccgggggctgctccgaataccaccaccaccacgcgccgatggccacgataggaggcttacgcgactcccaaggctctcagaacagcgtccaaaccgaggccctcgctcgattcgccgtcgatgaacacaacaagaagcagggtggtgaggacacaggaacaggttgttgcgggaaccctgca

SEQ ID NO: 36125 - DNA, 267 bp, Glycine max
  Clone ID: 701110150H1
gtttctattaagcagaaggatcggtctgctatgagtgttgggccgggaatggatttgccgatcatgcatgacagtgatcgctatgagcttgtgcgtgacattggttctggcaacttcggtgtagccaggcttatgagggacaagcacaccgaggaacttgttgctgttaagtatattgagagaggtgaaaagatagatgaaaatgtacaaagggaaattataaatcacagatcactgaggcatcctaacattgtcaggttcaaggag

SEQ ID NO: 36126 - DNA, 250 bp, Glycine max
  unsure (1)..(250): unsure at all n locations; Clone ID: 701110151H1
ttcagcagtcgttacagagactccataacccgaaaatgcctttacaagaggtnacgttgagattggaagggttgctcagatcaactatggcaaagagtatgggaggctcgtggttattgtcgatgtcattgaccagaatagggctcttgttgatgctcctgacatggtgaggtcccaagtgaacttcaagaggctatcactcactgacatcaagatcgatattaagaggatccccaagaagaaggatctc

SEQ ID NO: 36127 - DNA, 266 bp, Glycine max
  Clone ID: 701110152H1
gtttgttgtaggaagaggaatcttgagaaatggcaggggacagcaagagcaagattctgttcatcggagggactggttacatcggaaaattcatcgtggaagccagcgccaaagctggccacccaactttccttttggtgagggagtccactctctccaaccccgcaaaatcacccctcatcgacaatttcaaaggcctcggtgtcaatcttgttttaggagatctatacgatcaccaaagtttggtgagtgctataaagcaggtc

SEQ ID NO: 36128 - DNA, 261 bp, Glycine max
  unsure (1)..(261): unsure at all n locations; Clone ID: 701110153H1
ctttcgcattctcaatacccttttgatttgtgaaaggaaagcaaacatggttganccangtccaacaccctacaatccatggacaaggttgctggtnancnccatctncgctctggtctttcatctggtattagaagttatgatggagcctaccgccacccagctatgtaccaaagaccctcttttggganntactntaatgctgcatgcagnntctgtgatgcccacatgcaaagctaccaggatttgtctgctatgcaa

SEQ ID NO: 36129 - DNA, 264 bp, Glycine max
  Clone ID: 701110154H1
ctcgcacaaaaattagtttctacttccgagctgcaaaatgagtgctcacatggagacggagctcacaaccgaccaaaacggcgctgcttaccaacactcacttcccgttcccgaggacaaagttcttgtccctgtcgaggtaaccctaaaaccttcaagcacagctaaaatcgacgatgttcgttccgccgttgaggggatgttggaaaagaggagtttgagctataacgatggaccggttccagtgcctcttgatgatgcgtt

SEQ ID NO: 36130 - DNA, 261 bp, Glycine max
  Clone ID: 701110155H1
gaaaattaagcaaataacaagaaagaaacaatgaacgacttgttctccggttccttctacccgcttccgcagcgaccagtcctccccggaccgccaccacgacatcgagatgggcgccaccgcctccggcggcggtcgcggcggcgaggtgaaccttgacaagttcttcgaggacgtggaaggcgtgaaggaggaactaaaggagttggaaggtttggctcagagtctaaggagcagccagagcagagcaagacgctgcac

SEQ ID NO: 36131 - DNA, 260 bp, Glycine max
  unsure (1)..(260): unsure at all n locations; Clone ID: 701110156H1
caaaaaccgtacaacaaggttgtttttgttttgttttgtgttttctctctaatcattcgaatggccaaagaaggacctaactgggacgggttgctgaaatggagcattgctcactccgatgggactagccctactcgcaatttaagtgaggaggatcgaaaatggtttatggnagcgatgcaagcacagaccattgatgttgtaaaacgtatganagagatcacacttgtgatgcaaatccagaacaagtattganagac

SEQ ID NO: 36132 - DNA, 220 bp, Glycine max
  Clone ID: 701110157H1
tcttagatctcttctttctctacgccgcacgccgaaaccatggccggaaaaggagagggtcctgctatcggaatcgatctcggaaccacctactcttgcgtcggtgtgtggcaacatgaccgcgttgaaatcatcgccaacgaccaagggaacagaaccacgccgtcttacgtcggattcatgacaccgagcgtctcatcggtgatgcggccaagaatca

SEQ ID NO: 36133 - DNA, 259 bp, Glycine max
  unsure (1)..(259): unsure at all n locations; Clone ID: 701110158H1
ggtcgttcaagatttttaacctgaaatcttcacttcacatctctctatcctctacattctcatcaccaacaagtgtttctgtaaccatggcatccaccactctatcccctacaaccccttctcagctatgctcaggaaaaagtgggattttcagttcctcacaggcacttcttgtgaagccagtgaagaggcagatgatggggaagagcaagggnttgagaattgctgccaagccaccagcatttccgctgatagagtc

SEQ ID NO: 36134 - DNA, 257 bp, Glycine max
  unsure (1)..(257): unsure at all n locations; Clone ID: 701110159H1
gtaactccaactccaagtcacattggtgacaaagttagaaacaaggagaaaganagaagatggcaggaaagaaaatcccagatgtgttgctgaattcaggacacaaaatgccagttataggcatgggaacttcagtggagaatcgtccatcaaatgagacccttgcttctatctatgttgaagccattgaggtgggttaccgtcattttgacatgctgcagtgtatggaacagaggnagccataggctagcgtggcc

SEQ ID NO: 36135 - DNA, 241 bp, Glycine max
  unsure (1)..(241): unsure at all n locations; Clone ID: 701110160H1
cttgctgatgcgcaccactctctcanttgttctttctcggatncagtgtctctactttgacantggtgctgtcagcattgacctcagcttgagcagtaaaacatcatcagcactactacggtaccatggctgtgctgcaatctttcgtttcggtccacccagattctcattccccatacagaacctcccttacggagtcttcaagccccaatccgcttcgcctctcgncccggcgtcggca

SEQ ID NO: 36136 - DNA, 262 bp, Glycine max
  unsure (1)..(262): unsure at all n locations; Clone ID: 701110161H1
aaaacatagaattgttgaaggaacaaaacgtgtgtgtctgtcttacaaggtttagtagtgactatggagcagagcattggtggacaatctagcatacaatgcatatttctacgcaaggactgcttctcctacaaagctcgcgtctcttccaacttctccttccgagatgccctttggtcacaaccgttggtttcgccagttgtcggttttccngtttgcnactatgtcaagggtgaaaaagggtttctccaaaaacatggct

SEQ ID NO: 36137 - DNA, 199 bp, Glycine max
  unsure (1)..(199): unsure at all n locations; Clone ID: 701110162H1
cgcttccgccaccgtctccgccgcgaatgcncaccgtctccggccactgctctccanctgttgaaatgaatggngtgcagaacagaagggttcacnatgttgagaanacttttccaggatgctgggcagagtggtgatctctttgatttgnccgggggtgtaatggaaaacagctantcacagacaggctcatcgcgtg

SEQ ID NO: 36138 - DNA, 258 bp, Glycine max
  unsure (1)..(258): unsure at all n locations; Clone ID: 701110163H1
agagaatggctcaagcaatggcatcaatgactagcttacgtggttcctctcaggctgtgttggaaggtagccttggctccacacgcttgaatgtggggagtggaagcagggtggcctcagtcacacgtgcagggttcacagttagagcacagcaacaacaagtgnntggtggtgaggtacaagtagcgtagggcagtgctttcattgttgctgtggtttgacactggtcttttgttcaactgtgttgctgatgccaac

SEQ ID NO: 36139 - DNA, 266 bp, Glycine max
  unsure (1)..(266): unsure at all n locations; Clone ID: 701110165H1
gcntaatcgaactattcagattctaaaaaancngttggtggtgggctggagcaatcggtgctgccaagaagaaattcgaggaagaggaaccgccgcgaagttaccagagcgtgggcctggtgatcggcgtgacgggcatcgtgggcaacagcctcgccgagatcctccctctcgccgacacccccgccggtccatggaaggtctacggcgtcgcacgccgcccccgtccgccgtggaagccgaccaccctgtcgagtacatccatg

SEQ ID NO: 36140 - DNA, 255 bp, Glycine max
  unsure (1)..(255): unsure at all n locations; Clone ID: 701110166H1
caatttaccagctatacttgttccttttgaaggttagaagtgctacaatacanacaatggcagctactcaggaagatgtgaagcttttgggtattgtgggaagcccatttgtgtgcagggtccagattgcccttaagttgaagggagttgaatacaaatttttggaagaaaatttgggcaacaagagtgatttgcttctcaaatacaaccctgttcacaagaaggttccagtgtttgttcacaatgagaagccca

SEQ ID NO: 36141 - DNA, 263 bp, Glycine max
  unsure (1)..(263): unsure at all n locations; Clone ID: 701110167H1
aaattganatggtgacaatgaggcatcaacttaactttaagaagaacaaggttgatgactatcccattaagaagcagaatccatatgtaccaaataatctatcagcacttcttgctaatgctaatgcaactaataatgagggattgccagaggagtcaatttctatttcaaagtcgcttataggtgggagtatgaatgcgtgcaaaatgagaatcttaaatttttgtgtgcctgagcgtgtagttcaaggaagtattgttact

SEQ ID NO: 36142 - DNA, 257 bp, Glycine max
  Clone ID: 701110168H1
ggcagaaagcaagctcatcctagagttttaaaaatggcagcagcctacctccatggctctctcttccccatccttggctggcaaggccgtgaagctgggcccatcagcccccgaagtcgggagggtcagcatgaggaagaccgtcaccaagcaggcctcctccggaagcccatggtacggcccagaccgcgtcaagtattgggcccattctctggcgagcccccgtctactacatggcgattcccaggtgataggtg

SEQ ID NO: 36143 - DNA, 259 bp, Glycine max
  unsure (1)..(259): unsure at all n locations; Clone ID: 701110169H1
gcttgttgaggaaggngtggtctcagtgctttgaagagaggaattcgatttgggtttgtagattcaagaggtcctcgtgaactttatggaaaaggcagtacgatttgatggggatttgaatcaagttgaaatcaagtatcattagaagttgagaatgtgaatgggattcaattacaaacagttctggaggcaatggatgtagttggtatctagagtcatgggcttgctaaagttgctgatttgatgaccagtatgtcat

SEQ ID NO: 36144 - DNA, 201 bp, Glycine max
  unsure (1)..(201): unsure at all n locations; Clone ID: 701110170H1
tggagctgtgcactcgaaccttcacaagtttctttcttttcaacccttcttcctcttcaaaccccctgtttctncgtgctaatgccaacgctaaaacacccttcaaattcaattcccttaaactctcatctttcccccctcatattcacctcttccaaccctttctctctcctcacacttcttctcccttcacactctcag

SEQ ID NO: 36145 - DNA, 261 bp, Glycine max
  unsure (1)..(261): unsure at all n locations; Clone ID: 701110171H1
gcttaagatcacccaagagagaacctaagacacacaacacaacacaaacacacagagttagaggagaaatcatcatggcatcagcagcatctgggtttgtgttgtcacttaatgttgcagctgccaccacaaactcaagggtggtcatgttcaacacaaagaacaacgcttctaggcttgttgtaagggcttcagatgagcctgcagcnccggcacccgccaccgccacacccccagctgaagctgaagctaaaccaaagc

SEQ ID NO: 36146 - DNA, 258 bp, Glycine max
  unsure (1)..(258): unsure at all n locations; Clone ID: 701110172H1
ggcaactggaagtgtaacgnaacaaaagactcaatcagcaagcttgttgctgacttgaacaatgcaaaattggagcctgatgttgatgttgtcgttgcacctcccttcctctacatcgatcaagtgaaaaactcactcactgagcggattgaaatatctgcccagaattcttgggttggaaaaggtggtgcttttactggagaaatcagcgcggaacaactaanagatcttggatgcnagtgggttgttcttggacat

SEQ ID NO: 36147 - DNA, 255 bp, Glycine max
  unsure (1)..(255): unsure at all n locations; Clone ID: 701110174H1
tgattcgagananttgaacaattggggtgtgaaatggttctttttttcgctttgattctcctcgggtttcttcttggggtggtggcggttgtggctgccgaagctcttgggtttttgtgggtaataaaacgattgcaaagcaagatcagcaaagaccaagcgaaaatcgcgtcgaaaacgcaactgggtggtgctcaaagtgatcatccccaacaacaattgctaaaaaaggagggtgtggtttgggttttggag

SEQ ID NO: 36148 - DNA, 260 bp, Glycine max
  unsure (1)..(260): unsure at all n locations; Clone ID: 701110175H1
tctgaatgtgctcgttgtttagaaaaccctaatctgattcaattccagcatggcttcaaaaacaaaagctgcgcccttctcctctggacgagccacccaccgcttcctcttccgattccgaggnnnnnnnnnnnnnnnnnnnnnnnnnnnnntcctctcagcaacacgaagaagaggaagaagaagtttcctccggagaagaagaggaagcttcctccgaagaagaggaagacgaaaatctncccccaccaaccatctcc

SEQ ID NO: 36149 - DNA, 252 bp, Glycine max
  unsure (1)..(252): unsure at all n locations; Clone ID: 701110176H1
aaagtggaaggcgagcagggggctccaatacatgttgttctgattgatgccaatagtggaagcattgtaacatctggacctgaatcctgtgttaaacttgatgttgttgtccttgaaggtgattttaacaatgaagatgatgaagattggactcaggaggattttgaaagccatgtggtaaaagaacgtgaagganagagacctttgttaactggggactgcnatgacatcaaggaaggagttgggacttag

SEQ ID NO: 36150 - DNA, 260 bp, Glycine max
  unsure (1)..(260): unsure at all n locations; Clone ID: 701110177H1
atccctcactaggagctcttctccattggttcttccatctgcatgcacacacttgcatagttttggaaaccaagaatttttgaagggtagcatcaacaagaagttctgaaaatggagatcaccaatgtcagcgagtatgaagctattgcanagcagaagttgccanagatggtgtttgactactacgcatctggtgcagaggaccagtggactctgcaggagaacagaaatgccttttccagaattttgtttcggccagt

SEQ ID NO: 36151 - DNA, 258 bp, Glycine max
  unsure (1)..(258): unsure at all n locations; Clone ID: 701110178H1
ttaacaaccatatctatctattgagaaacatgaagaaggtttcacccttggcattttccattctctttttggccttcaccatagaaccctttattggcattgctgcagcagcaccagaagcagtgcttgacacctcaggccagaagctgagaacaggtgtccagtactacttctgccagtgttcagagggcaaaggtggaggctaacagttcagcagtggcaacaacacatgccccctctttgtggtgcanagaagtt

SEQ ID NO: 36152 - DNA, 203 bp, Glycine max
  Clone ID: 701110179H1
gttttcccatcactcccatcgcttcaaaaccctaacttgagccaacccaatttcttcaatttccgcttaccgtcgctactgtcaccgtcccctcgtcaaaagcactgcaacttttcaccgtagaatcctctgcaaagccttcagagattctggcgaggacttcagggcggtgctcaagtccgacgacggtggtggcaacggcg

SEQ ID NO: 36153 - DNA, 113 bp, Glycine max
  unsure (1)..(113): unsure at all n locations; Clone ID: 701110180H1
tataaatcccacaaaacaaagaannncntaaatccttcaaaaggggaaaggtagctagaggaaaagtaactncacacaacanatcantncntaagagaattggatttaagctc

SEQ ID NO: 36154 - DNA, 144 bp, Glycine max
  Clone ID: 701110181H1
tttgaaagcaaaaatgacactctccaaagcattttatgcaataatagccattgcactgtccttgtcaatgccattaattagagcaagcaaagaagaattatgtattatactttaatttcaaatatatcatgtgatcatgccccc

SEQ ID NO: 36155 - DNA, 263 bp, Glycine max
  Clone ID: 701110182H1
ctcaacttctgctcttccaactcctacaacgcttttctctgcactcatgggcaaggtcaagatcggaatcaacggatttggaagaattggccgtttggttgccagagtcgctctgcaaagagacgatgttgaactcgttgccgttaacgaccctttcattaccaccgattacatgacatacatgtttaaatacgacagtgttcacggacactggaagcatcacgatgtcaccgttaaggacgagaagacccttctcttcggtg

SEQ ID NO: 36156 - DNA, 262 bp, Glycine max
  Clone ID: 701110183H1
cacacacttttttcaaggcataggattggtgaggcaaacttgaattgaagtgaagaaggagatggctgcaacctcttccttgtgctcatcgaccctccaatcccagatcaatggattcttccttcacaaaacctctctttcccatactccttccctcactttctccaggaggaaaatttcaaccacagtgaaggctacatctcgagtcgacaagttttcaaaaagcgatatcattgtctctccgtccattctttctgcaaat

SEQ ID NO: 36157 - DNA, 262 bp, Glycine max
  Clone ID: 701110184H1
cacaattgtagttttattttttctttctaagttaaattttttattgatcacaagcatgaaaatcgaggtattggagcttctgaaaaacaattatgcagcaagaaacattcccaaaggggtgttcctactaccattcacttttctggtggtggtgatactacttctgatcacaaacttaaacgaatcatattcttatctatatggaagcagcgtggaaagcacagaaaactttagctgcaacatattttcaggaaattgggtg

SEQ ID NO: 36158 - DNA, 258 bp, Glycine max
  unsure (1)..(258): unsure at all n locations; Clone ID: 701110186H1
ttcttctcttgcggctagggttttagcgcanttcttctagatttaaggaagatgggtaaggaaaaggttcacatcagtattgtggtcattggccatgtcgactctgggaaatccactaccactggtcacctgatttacaagcttggaggcattgacaagcgtgttattgagaggtttgagaaggaagctgctgagatgaacaagaggtctttcaagtatgcctgggtgctggacaaacttaaggctgagcgtgaaaga

SEQ ID NO: 36159 - DNA, 258 bp, Glycine max
  Clone ID: 701110187H1
tattatcatccgcagctgcttttattcgcaccgcaaacagtgagccatggccgtcggaaagaacaagcgcatctccaaggggaagaagggtggcaagaagaaggcagctgatccctttgccaagaaggattggtatgacattaaggctccttctgtttttcaagtgaaaaatgttggcaaaaccctcgtctctcgtactcagggtaccaagattgcttctgaaggactcaagcatagagtgtttgaggtctccttggc

SEQ ID NO: 36160 - DNA, 255 bp, Glycine max
  unsure (1)..(255): unsure at all n locations; Clone ID: 701110188H1
ctcttcttctcttgcggctanggttttagcgcanttcttctagatttanggnagatgggtaaggaaaaggttcacntcagtattgtggtcattggccatgtcgactctgggaaatccactaccactggtcacctgatttacaagcttggaggcattgacaagcgtgttattgagaggtttgagnaggaagctgctgagatgaacaagaggtctttcaagtatgcctgggtgctggncaaattaaggctgagcgtg

SEQ ID NO: 36161 - DNA, 256 bp, Glycine max
  unsure (1)..(256): unsure at all n locations; Clone ID: 701110189H1
cgttctgaaatttccttcacatccaacccactttccttttctctctccctctcttannnnnnnnnnnnnnnnnnnnnnnnnncgctctctctctcccccttctcctttcttcctctgcaaccaaaatctgaatcttagggcaccaacacctttgatccaatgggttcggttgccgcagaagaactgaacttagatttaagatcctccttcgtccccaaaaccatcaccgatttcctccgccacctctccgccaaca

SEQ ID NO: 36162 - DNA, 254 bp, Glycine max
  unsure (1)..(254): unsure at all n locations; Clone ID: 701110190H1
ctttcagaggtgtcgacaacagtatgtattacatgttagcacccaagggggagttctataactattcaggatgtgggaacacgttcaattgcaaccatccagttgtgcgacaatttatagttgactgcttaagatattgggtaacaganatgcacgtggatggttttcgctttgatcttgcttctattatgaccaggagtagcagtctctgggatggagctaatgtatttggtgctccaatagaaggtgattgt

SEQ ID NO: 36163 - DNA, 256 bp, Glycine max
  Clone ID: 701110192H1
ggaggctcatttgatgcagaacttgagaaaggcttatgagggaacattcatgtgtagtggtggctttactaggaagttgggaatggaagctgtagctgaaggccatgctgacttggtatcctatggtcgacttttcatctccaatccagacttggttttaaggcttaagcttaatgcacctcttaccaagtataacaggaagacattttacacccaggatcctgttataggatacacagattatcctttcctaagc

SEQ ID NO: 36164 - DNA, 51 bp, Glycine max
  unsure (1)..(51): unsure at all n locations; Clone ID: 701110193H1
ctannntttgtgtccntngngaaaaactctgttgattatagtcctatgcct

SEQ ID NO: 36165 - DNA, 268 bp, Glycine max
  unsure (1)..(268): unsure at all n locations; Clone ID: 701110194H1
gaatttcctgtttacgatctcattacaattttgcaactttcaaagcttattagctaaagtaacatcaaaagatgtcattgattccaagtattttcggtggcccaaggagcaacgtgttcgatccattctcactcgatatgtggggatcccttcaagggatttccagttccccantncctncnggtttcngnnggaaaattccggcattggggaacacncgggtggattgnaaggngacccaagaggcacncgtgctcaaggctgatat

SEQ ID NO: 36166 - DNA, 262 bp, Glycine max
  unsure (1)..(262): unsure at all n locations; Clone ID: 701110195H1
gaagaatnactnnnttatcgattnngacagaacannanagnttgaaanaacgntntctcttcagcgtccattctacgctctcccaacgggcagtntctgagccgaagagngaaccataatggaagagtaaattaccggaaancgaataaacgnttctccgtnaaaggcnncggnaaagagatgcctttgaacaagnatnccggtntggtaagganggcgggaatgaanaagttggcgaggtgttgggttnatnttgggccaa

SEQ ID NO: 36167 - DNA, 271 bp, Glycine max
  unsure (1)..(271): unsure at all n locations; Clone ID: 701110201H1
cnatagataagccttcctctctgcagagtgcagagctttctctccccgttgcttcattcattctcaacaacaaaccaatctttcttagaaaatgagggggggcttgtggcaacttgggcaatcgatcactcgccgtcttgcccatggagataagaaggctgttgctcgtcgatgttttgcctcagaagctgagctgaaaaagacagtgtttcatgacttccatgttgctcaggtgggaagatggttccattgtgggtgaagcanccaatcc

SEQ ID NO: 36168 - DNA, 272 bp, Glycine max
  unsure (1)..(272): unsure at all n locations; Clone ID: 701110202H1
tttcttacaagggctctactctactgcttcaccttctgctcctagaaaattcantggngatacatggcttcggctactctctctgtagccaaaccagcccttcaggcaaatgggaaaggcttctctgnattctctggcctccgnngctcatcnggcttccttccctnttctagaaaatcntcagaggatttccattctgtcattgncttccagacntatgcagttggaagcagtngaggatanaagcagggtgtgacagangcnaaactgnc

SEQ ID NO: 36169 - DNA, 209 bp, Glycine max
  unsure (1)..(209): unsure at all n locations; Clone ID: 701110203H1
caattggcttgctttgtagattgacnctacaatcaccttcccnggattttatcaatttgatnccatgaacatattagtatccattggtaatccgttttaattattantaattactancncctttttttngnggccntntanattncgcncngagnanagtnngtccncacannggtggngccggtggcagccanncctcncgtccaatg

SEQ ID NO: 36170 - DNA, 262 bp, Glycine max
  unsure (1)..(262): unsure at all n locations; Clone ID: 701110204H1
gggaagtatttgatgaggcgtgtgccatggtgaataaactcgtagaccattctttgtttgtgggttatgattaccctacaaaaatgcatggtctggtgaggaacatggcatgccatatcttgaatgagagtaacaattacatggtgaaatgtgaaggaaatttgagtgagatacctgacgtganggnntggnangtgnattngnaggaattccttggggggnaacangtatanagnaatcccagnaggcntatcnccnnatg

SEQ ID NO: 36171 - DNA, 232 bp, Glycine max
  Clone ID: 701110205H1
aggcgttctactgtggaaaaaaggtgattttgaagatgaactgttatggtcttcagcagaacgcctttgcagcctgtgaagagatgagaggctctgtgaatttcgttgatcagaaggagcctgtcatttgccctaagccgcgccgagttggggttgcatctaacatgcctacgaggcatttcagatggcatttcaatccacaggctgagggttctgacacaaaagctggggc

SEQ ID NO: 36172 - DNA, 261 bp, Glycine max
  unsure (1)..(261): unsure at all n locations; Clone ID: 701110206H1
gntgctaccatcatcaccacatgcaagctctcactgcttttgagtcttctctcagtttcacttttgctgggtgtgaggtctgatacccttcagaatgtaggcgcaattccccccacatgcaagcgcatagagtgtcccagctatgatgtcattcacgtaggcaacggctacgaaatcgtcgctataattcacccgtttggatttcaaacagccccattcaggacatttctctcgttgaagccacagaacggttcaggaggt

SEQ ID NO: 36173 - DNA, 260 bp, Glycine max
  unsure (1)..(260): unsure at all n locations; Clone ID: 701110207H1
anaatggcatcattcaccatgacagcttccatccttggcggcccagccgtcaccaaccggttggcagtagcaacgcagaggagatcactcgtagtgaatgctgccaaagctgttgaagcggaaaaggtcagttatgacaatgacatggatggtagcaatggaaggaggaacttgatgttccgccgcggggnggcggntgcctgttcccctgtnnntgganggcagtgccatttccccaaacggggcccccannccaaaat

SEQ ID NO: 36174 - DNA, 266 bp, Glycine max
  unsure (1)..(266): unsure at all n locations; Clone ID: 701110208H1
ttcaaactcaaaccctaacaaacaaaaaccatgtatcgttttttctcttccattcgccatggccgtggatcttccctcgcatctcttctcgcgccgaaacctgcacttccattcaacgccgctctacgacctcgccgtttacctcaaaacgacgggcatgttagaggattttctagctcgaatttagattngaggaggcttattgtgaaccagaatgtgaatgcagatgcanatgctcatccagattctatgcaggatatanagaa

SEQ ID NO: 36175 - DNA, 245 bp, Glycine max
  unsure (1)..(245): unsure at all n locations; Clone ID: 701110210H1
ctgcaaagaaacagctggaagctgctccggtcactgcatgtgctggagcatatgcttaagctggaagttctagtgggcattaaagagtttgtttcanggtgtgggttggttccctacgcagacatggcagtanggtgctcgatgaacaagatttggttccccttctgaagttctgttgtaactgacagatacattatatttcaatatggaagcttacatattttctcgaaggcaaaanaaaancg

SEQ ID NO: 36176 - DNA, 266 bp, Glycine max
  unsure (1)..(266): unsure at all n locations; Clone ID: 701110211H1
cncaaaatcaattatattcactttaaaattaatttttaaaattttaaaacttatgcaaacaacaaatgtaaaagtttttgcccaataccaaaacaaaatgtaatgtagaaaaacaaatgtaaagttttcancctgtatcaagattttgtgatatcccgtcgaatttattttaattcaataagagatatntcaattgttattcaaaggaacacttatttttaagacaaaactccaaagataacatgttcataaattaggtgaacccg

SEQ ID NO: 36177 - DNA, 266 bp, Glycine max
  Clone ID: 701110212H1
agcatatctctctattcctttttattagcacccctcacattaccttgtgtcaccaactactttgactcctttaccataccattacaataattatcaaacctaaccagtaaaaatggtgaccgtggaggaaatccgcaacgctcagcgttcccatggacccgccaccatcttggccttcggcaccgccacgccgtccaactgcgtctcccaagccgattaccctgactactacttccgcattaccaacagcgaacacatgactgatc

SEQ ID NO: 36178 - DNA, 266 bp, Glycine max
  unsure (1)..(266): unsure at all n locations; Clone ID: 701110213H1
cngcagccacagttggtgcttgccgagaagctattccttctccgacaacccgttcaagacattgacaaggttcgctacaaggaggatgttttcactcacatcaaggaaaacgagatggtccctttgtacgagaccctagtcgccgattccgtgttggacttggatcgtgcccttttggacttcatgcgcgctaaaattgaagacgagctcaccaagctcgacgaaaagattgctgatgctgaggaaaacttaggagagagtgaatt

SEQ ID NO: 36179 - DNA, 271 bp, Glycine max
  unsure (1)..(271): unsure at all n locations; Clone ID: 701110214H1
gttatccctcacaaaccgccggctgtctcaggtaaacagaaagtgaaaatgaagagaatgatagccttggggtttgagggttcagcgaacaagattggtgttggggtagtgaccttagatggcacaattctttcnnacccacggcacacatacatcactcctcctggccaaggctttcttcccagagagacagcacagcaccacctccaacacgttcttccccttatcaaatccgctttggaaactgcacaaatcactccacatgacattg

SEQ ID NO: 36180 - DNA, 277 bp, Glycine max
  unsure (1)..(277): unsure at all n locations; Clone ID: 701110216H1
gtcaaactcgtcgtggacccctctcgtctccattcccatttccccttctcttctcaatcaacaacatcactccaaaaccctacttctctctccgattcccatgnccccttcctcctaatcncccnnnccnctccgatttctattctcaccccccctatggaatccaccggcatcacngtttcccccgattccgaaaacgncacnnccaacacgcgagtgaacggctacgncgtttanactngccgcaagagcaccctctnanctcattccggtaatg

SEQ ID NO: 36181 - DNA, 268 bp, Glycine max
  unsure (1)..(268): unsure at all n locations; Clone ID: 701110217H1
anaatttcagtaccatagtccaacaaagtctattctactatccatcattgtctgccacatcttcccttagtactagaaatgaggctacaacaactcaacttgttctttctgttgctttgtgttgccaaagcaaacgggtctctgctcccattcatggatcctcctccaatcactctcttggctgatctctggtccgatcgcttcccggacccgtttcgcgtgctggaacatatccgtgtggggntnacaaagatgnngcatccaggcc

SEQ ID NO: 36182 - DNA, 261 bp, Glycine max
  unsure (1)..(261): unsure at all n locations; Clone ID: 701110218H1
cngaagcagaccaaggctgagaagaagatcgcttacgatgcgaantgtgcgacctaatggaggagtacggccagatcctcgttgtgaactccgataacgtgggatcgaaccagctccagaacattcgcaagggtctccgtggcgactccgtcgtcctcatggggaagaacaccatgatgaagcgctcagtcaggatgcacgctgagaaaaccggaaacaagcctatctcaacttatcccgctcttgttggcatgtgggttg

SEQ ID NO: 36183 - DNA, 265 bp, Glycine max
  unsure (1)..(265): unsure at all n locations; Clone ID: 701110219H1
ttatcaccaatcccaacagaaaccgcgaganaattccccagaaatctcaacacaggagaagaagaaaaaccaaacacagtttatcaatcaaatctttttggaacatagcacaacaattttcagctctgtacaacgttggatttggttcagttatcgtgtgaggaatattagagcatagaaacatggtggctgaagcagaggttgtgtgtcaacaaaacgtgggtgtgttggatgtgaagcattttccaaataaggtagcgatgtt

SEQ ID NO: 36184 - DNA, 263 bp, Glycine max
  unsure (1)..(263): unsure at all n locations; Clone ID: 701110220H1
aactcaaaaccctaacaaaccaaaaacagttgctgccatattcaccaatggctttctccaaggcaatgtttctncgccgccgtaatgtcggtgctcgtcgccgtcatctccgccgccgaagctccagctccgagccctacgtctcccgccgccgccgtttcgccgtccttcgtcgccggtgttctcgccgccggagccgctcttgcgttcggatctgctctgcggatctgaacgtagctcatggatttctcgtttacatgcgt

SEQ ID NO: 36185 - DNA, 264 bp, Glycine max
  Clone ID: 701110221H1
ttgttattacctctttccaaagtccaaattttctagttccaccaaaccaaaccaaaccaaaatggcagcagccttcagcctcatccatgatatcaacaccagccttatctccaaccatccaaaagcaccatcatttgaagccatccaacgtgtgcttccaaggtcttagacccctcgcaaggttcaccaaagcctcatcaaccaaagtgagcaccaccaccaaaagggttattccaaagggtggtgttagagctgaatcaatca

SEQ ID NO: 36186 - DNA, 260 bp, Glycine max
  unsure (1)..(260): unsure at all n locations; Clone ID: 701110222H1
gngataactagaaacagtgtgatgaaaatgaaggtccttgttttcttcgttgctacaattttggtagcatggcaatgccatgcgtacgatatgttccctctccgaatgaacactggctatggtgcccgtactccggaggtgaaatncgcaagttggaggcttcctgtggaagcacacnacatctttgggcttgagaccatccngaagagtgcgttgaagcaaccaaggnatacatccatggcgaacatatagtccgncnc

SEQ ID NO: 36187 - DNA, 263 bp, Glycine max
  unsure (1)..(263): unsure at all n locations; Clone ID: 701110223H1
gtggaatgaagggtggtagcaaggttgttgttcagccccatagacatgacggtattttcattgccaagggtaaagaagatgctctcgttaccaagaatcttgttcccggtgaagctgtttacaatgagaaaaggattactgttcagaatgaagatggtaccaaagaggagtacagagtttggaatccttccgatccaagttggctgctgccatccttggtggngttnacannatanggnttannccgggnnccagngcctttc

SEQ ID NO: 36188 - DNA, 267 bp, Glycine max
  unsure (1)..(267): unsure at all n locations; Clone ID: 701110224H1
gtcttttgttttggttttaattccacctcatattttatangtgttccaaacttcttcttggaatgtcccttccttaatacccctcaaagaaaagccaccttaacatctcttctctgaaaattctctttagagagatagagagaggaagaaagaatggcagcttgcactgtctactcaacacaatctctgagcacaaattgctccatctcaaccccatcanagacgcaactcagttttttccaccaaaagcaggtagttttctggagg

SEQ ID NO: 36189 - DNA, 263 bp, Glycine max
  Clone ID: 701110225H1
ctttttttctcttttcctatttccattttctcggcaaccaaacattccaatcaattaactcgtattttatattattatttttaattcgcggtaggaattcgttttctctgatcgggatctggaagggaagcgaatcgacatgggtttcttggtgacgacgctgatcttcgtagtgatcggaatcatcgcgtgcctctgcaccagaatttgctgcaacagaggaccttctaccaatctatttcaccttactttggtaatactgc

SEQ ID NO: 36190 - DNA, 263 bp, Glycine max
  Clone ID: 701110226H1
ctcccctttgccgctgttgttgttgctgcaccaccgaacaacttcccctgtaaatcgcgtttcgtttgtgcaaggttttaaaagatggctgatgctgaggacattcaacctcttgttgttgataatggaactggaatggtcaaggctggttttgcaggtgatgatgctcctagggccgtgttccccagcattattgggagaccacgccatactggtgtaatggttgggatgggtcagaaggatgcttacgtgggtgatgaagc

SEQ ID NO: 36191 - DNA, 265 bp, Glycine max
  Clone ID: 701110227H1
ctgccatcgataacatatcacacttgagacagttatctgtatctacgcaagagaagaatagaaaatggatatcaggttgatggatttggactctccattgttcaacactctgcaccgaatcatggatctgacagaggacgcagagaagaacttgaacgctccgacgcggacatacgtgcgcgacgcgaaggcaatggctgcgactcctgcggacgtgaaggagtaccctaactactacgtgttcgtgatcgacatgccaggcctg

SEQ ID NO: 36192 - DNA, 263 bp, Glycine max
  Clone ID: 701110228H1
gttttgtattgctcctcttctcaggtacacttacaggttggagcatgtgctgtctaacgattcttacatatggagcaagaagtattcgtttaaggcatccccatatcctggccaaaactctttgcaacgtgttatcatatttggtgacacgggaaaggttgagcgtgatggttcaaatggataggctgttatcaacatggttctctcaacaccacagaccaactcatcaaggatctggacaatatgacatgttttccatatag

SEQ ID NO: 36193 - DNA, 267 bp, Glycine max
  unsure (1)..(267): unsure at all n locations; Clone ID: 701110229H1
ctttcaaagatggaagaggagacatttgaaaaaccattgttgaagnnacagtatcatgagaactgtcctggttgtaaggtggatcaagccaaggagctcaaaaaggatgtttcctttagaaacctttcttatatatggttggcagtgttatgtggcacattgcctgtggcatcactctttcccttgtttatttcatggtgaaggattttaatattgcagaaacagaggaagacataagtacctatgctggatatgtgggatcagcaa

SEQ ID NO: 36194 - DNA, 271 bp, Glycine max
  unsure (1)..(271): unsure at all n locations; Clone ID: 701110231H1
ctcttccttttctcttctntgtctaaggggtgccctgagatcacattgaacaatggtgaaggctgtggccgttcttggcagcagtgagggtgtcactggaactattcacttcgttcaggagggaagtggtccaaccaccgtaactggatctctgctggtctaagcctggtctccatggtttccatgtccatgccttgggggacactaccaatggttgcctctcaactggatcacattcaatcctaataacaaggagcatggtgcccctgag

SEQ ID NO: 36195 - DNA, 271 bp, Glycine max
  unsure (1)..(271): unsure at all n locations; Clone ID: 701110232H1
gtgaccatngcggctgcgtttacaagtacaagtgcaacactgagactgtcaaatgttggagagagcagaggtttgcagctgcgtaagtgtaaccctaatcctantaagctgaaggttatgggggggtttgnaggttgttctggagtggcagtgggtgtgagagaaagaaaaggaattggaagggttagggttcgggttcgggcgagttcttcgtcggacgaggcatnatgcgcatcaaaagtgactcagaaatatcttgacgtcatattgg

SEQ ID NO: 36196 - DNA, 269 bp, Glycine max
  unsure (1)..(269): unsure at all n locations; Clone ID: 701110233H1
ttagatgttggtttctcaatcgaagcatattaaagtatctttggnagaaagagggatgcttganttagttttgaagaattgcagaatatgggggtatgaagcatgttctgtactagatgatgctcaatgcttattggataattcttgcatganataaacagtggtttaacttgtaaagtggaagatttgattgcaagantccaatctgccatagcatcnggtgtatcacttggttttgactcaatgagtttcaaaactccaagcatcnt

SEQ ID NO: 36197 - DNA, 269 bp, Glycine max
  unsure (1)..(269): unsure at all n locations; Clone ID: 701110234H1
gtgaaaaagattttgaattttaattgaacacttaagattgcaggcagtgacgtagtttcccctgtaacgttgtgaactccgtttctcatgcttttttgtccctcatcggatctcgccttctttctcttcccttcaagcaagggtcagtccattcctgggtttactttttttattttgtgatatcttttgttgaggaggtggattgagtttaaggatttagttaagggagacagtttagaggacaaaattttgtagggtaggtancaaga

SEQ ID NO: 36198 - DNA, 241 bp, Glycine max
  unsure (1)..(241): unsure at all n locations; Clone ID: 701110235H1
ccaaaacagaaacaccagaggccgantaaaaggttctacttannacaagccatggacatcaaactagaaagtgatgattctcagaatgaggagaatgaagaaaggctaccactcctgagaaatagtgaggtgccagangcagagaggatncngntncagaangcctnagccncnttncagngccncgcanntggggnaccnnttaccnntggnncatccntgcnttccaattctgtcccca

SEQ ID NO: 36199 - DNA, 256 bp, Glycine max
  unsure (1)..(256): unsure at all n locations; Clone ID: 701110236H1
aagaagcacanagagaagcattagcactaggagcagcaacaactagtctcagctgaaatggcctcttcagtgatggcatctgtggccctcaaacctgcccctttcactgttgagaagtcctcagtgagaggccttccctctctctcaaggaactcttcttcattcagagtngtggccagtggtggcaagaagntnaangtgacaccncttgnggtaatngtggnnacagtntnnggggtgggngnngcgctngggg

SEQ ID NO: 36200 - DNA, 262 bp, Glycine max
  unsure (1)..(262): unsure at all n locations; Clone ID: 701110237H1
ggaaattggttgtgcatactctcatggtgggcacatgttaaaagccagttgtcttgtatttgtggaggaggataggaatgtaattaacatagagagaaagatttgaccaatgttcaatctctccactgtcattaaaaggagtcaaggatgctggatatgagaaaatgacagttgtgcaggaggctactcttccagtaattctcaaaggtaaggntgtccttgccaaggccaagacaggcaccggaaaaacagtagccttttg

SEQ ID NO: 36201 - DNA, 251 bp, Glycine max
  unsure (1)..(251): unsure at all n locations; Clone ID: 701110240H1
cagttataaggctgacagattttggtgtagaaggagctgatgcgaaaaacatcntttatttgagggaggttgatgatgctgacaaattgtatgaggcaatcaaggcaaagaagaatgggaaagctgtggttgttgggggaggatacattggtctggagcttagtgcagtgttgaaactcaacaatattgatgttaccatggtctacccggagcctggtgtatgccacgactttttacggcggtatagctga

SEQ ID NO: 36202 - DNA, 263 bp, Glycine max
  unsure (1)..(263): unsure at all n locations; Clone ID: 701110242H1
ctacgacatcgttaatgttttagagagtgtcggtgtgctaaccaganaagctaagaatcagtatacttggaaaggattttgtgcaattcctgctgccttacaagaacttaaggatgaaggtttgaaggagaatcctggatcatttgatgactccaatgacaatgcaaaagtgtctgatgatgaggaggaggaagaagaaacatttcctaatattaacattgggagtcagagtgagaaggaaaatcctgattacactgctactg

SEQ ID NO: 36203 - DNA, 261 bp, Glycine max
  Clone ID: 701110243H1
atctggtcttactgtgtggtgactgtgctctgctctcatctcattcatattcatttcaatggcaactcaaggtcaagtcattacctgcaaagctgcggtggcctgggaacccaacaagcccttaaccgtccaagacgttcaggttgctccgcctcaggccggcgaggtccgtgtccaaatcctcttcaccgctctctgccacaccgatgcttacacttggggcggcaaggatcccgaagtctcttcccctgtattctcggc

SEQ ID NO: 36204 - DNA, 264 bp, Glycine max
  Clone ID: 701110244H1
ttcagatcctgttatcagtaggtcattcaaaaagcgtaacaaaaattttgggaataggcatccattcagggaaaatgaatctcaagcctttgaaacgctgaaaacttacagtgatgccaccacagataaagaattttatttcaagtttgatagaaggcgccctggcttggcttcagcccctcgaacacctttagatatgagtcaaagactacgggcaaaccaatcttttactggagatcctggtgttggcaggggaagaggcag

SEQ ID NO: 36205 - DNA, 169 bp, Glycine max
  unsure (1)..(169): unsure at all n locations; Clone ID: 701110245H1
attcatcatatcatagctaaaaaantacaggagagagaaanntgaaaaaatacctttttttacagagagagaaagagaaggtagccctagaaaaatatgcaaccagataaggacttttgcagctgagacactgcaaaaagagttattatattgagagaganaagaaaga

SEQ ID NO: 36206 - DNA, 270 bp, Glycine max
  Clone ID: 701110246H1
ctcaggcaaatgaaatgctgcatcacaaggcaaacctgggtatctttcctatcacactggtcaaagtttagaaaagatcaaccaggatacagactgtgattttttcatgaaagcgaaagaagccaaagaatatggattcatagatggtgccatcatgaacccttctcaaagctctccagccattgccggctgcagtggaaggtaaagatcgggatagcatttgaacttgagactactgcttactgttaaataacaatgatctttgggttg

SEQ ID NO: 36207 - DNA, 271 bp, Glycine max
  unsure (1)..(271): unsure at all n locations; Clone ID: 701110247H1
cncatttcacttttttcacttaccagtcaaatctaaagctttcctaggttctgctaagaagaaagaaaacttcttcacttgtaagataacttttattttatcaccaccccatctccgtgtaatgttatgcagccttcgccacatttatttccaacatcannatcacatctttagtgtgaaaaatgttggaaaatttggaatactagtcactcatctgcttgtaactgaagagtctaatgttgtgagaaatttccccatttttttattataa

SEQ ID NO: 36208 - DNA, 270 bp, Glycine max
  unsure (1)..(270): unsure at all n locations; Clone ID: 701110249H1
ttgaccttccccacttctgatcaaaatcaaaccgcgaaaaccctaaaacactacatttgagaaaaganaaaaaaatgcattccgtgcattcctcagcacnttnacttgggttnttccctaaaccccaaggcgtgnaattctcncctacgcaatttgaggntccgtgctgnntcaaccanacataatcacatacaagctgcncnanttttnctgcccgaaggaccatgnaaccannttcctggtggagntactgctgcggnnggatcacnc

SEQ ID NO: 36209 - DNA, 263 bp, Glycine max
  unsure (1)..(263): unsure at all n locations; Clone ID: 701110250H1
gttgatcgagataactagaaacagtgtgatgaaaatgaaggtccttgttttcttcgttgctacaattttggtagcatggcaatgccatgcgtacgatatgttccctctccgaatgaacactggctatggtgcccgtactccggaggtgaaatgcgcaagttggaggcttgctgtggaagcacacaacatcttnggctttgagaccattcctnaagagtgcgttgaagcaacaanggaatacatccaggcgaacaatatagatc

SEQ ID NO: 36210 - DNA, 259 bp, Glycine max
  unsure (1)..(259): unsure at all n locations; Clone ID: 701110251H1
gtctcctttatatattgcggagacttgcccatcacaaatccgtgggacattagtatcattaaaagaactcttcattgtccttgggattctgcttggttattttgtgggaagcttctgattgagacagttggaggatggcggttcatgtacggatttagtgctccagttgctgtattaatggggctggaatgtggactctccccaattctccacggtggttgcttctcagaccatnccaaggaaaaggtnttnacaannt

SEQ ID NO: 36211 - DNA, 262 bp, Glycine max
  unsure (1)..(262): unsure at all n locations; Clone ID: 701110253H1
ggaagaagaaaaagaaaatacacttttnactgagttgatatcatcactaagaaaaaagtgtactaattcctgaagtccccatttcaagctttcaaccattttgctctttcattcctcttatcttctcttagagattaatttgaaaacagaagttcctttggcttttntcatnttttgtgtttttggttttgtacatgatcaatggcttctttagtgtctctccatttaccttacccaattcnaaggttgatnantctcttcc

SEQ ID NO: 36212 - DNA, 263 bp, Glycine max
  unsure (1)..(263): unsure at all n locations; Clone ID: 701110254H1
cttttttctttcttccaaagacatttctaaagtcccaagcactttctccatcacccataggcaccattagccaccacaaaccatcgttgttctccattgaaaccccacatcgagaggaactcttcaaccgaagcggaatcttccaacttggcttgcggttccggtagagaacgaaaaccctaatctgactttcgttttctttcgagaggctnttgtgaattcnnggncaagggcaaaagggaatttcnaangccgnccccggg

SEQ ID NO: 36213 - DNA, 264 bp, Glycine max
  Clone ID: 701110255H1
tttcttcgcccaacacagcaaaaccctaatttccaactccgatttcgtttctccttccgaaaacaccctaatttccccttcgctcttccccatgaccaccgcgtagtttgcttcccccactccgaaaatgtcgctccagggaagcgaccgccgcgatgcaccatcttcgggcagcgccggcggaaacggcgccgtggcggcggcagggcgagcctgaggctgcggctgaaccctaacaaggagcacaagcccgacgggtacgag

SEQ ID NO: 36214 - DNA, 264 bp, Glycine max
  Clone ID: 701110256H1
gatctttctatcatgatgttgcccagcttcagggtcttgcaaaaagtttgcacaaagattgcattgctaaaatggaaccatctaagtgtctctttccatcagaaattgctaaaaacataaagactccactgttccttgttcatccagcttatgatttctggcagatacgcaatattttggtgcctcaaggatcagatcctgatggtcactggcaaaggtgcagactggacattcgcagttgtaagctaatatgattgataaact

SEQ ID NO: 36215 - DNA, 262 bp, Glycine max
  unsure (1)..(262): unsure at all n locations; Clone ID: 701110257H1
ggatggtggatttccattgccaaaggatggatatatggccccagaaatcaattcatttggccactccttcagagaatatgatgctgaaagtgagaggcaaaaaggtgtggaggaattttataggttgcaacacatcaaccagacntatgactttgtgaagagaatgcgggaggaatatgggaaattggacaaagctgaaatgggcatttgggaatgttgtgagctgctgaatgnattggtagatgagagcgatcctgattgg

SEQ ID NO: 36216 - DNA, 263 bp, Glycine max
  unsure (1)..(263): unsure at all n locations; Clone ID: 701110258H1
ctctctttctctctttaatcttaaaccccgttacgacgtcgtacggcttgggctctttctccctctacccgaaccgaacaacaatcgtgaaaaaaaaaaaacagaataccttcatnnnnnnnnnnnnnnnnnnnnnnnnntgcaacgcgttttattctctcncttataatatatttctccactcgggctctcttactcgccggcgattgtttcagatcaatcgccgacgccgtccaattcactcgctctccgnggcgttcagt

SEQ ID NO: 36217 - DNA, 262 bp, Glycine max
  Clone ID: 701110259H1
gttctgcttcgcgtggaccaacaagaagtgtaagttttcattcaatggccagcgctcagctctcagcaatatcttcgtcgatctctacggcgtcgtttgaagggcttcgaccttcggctgttcagtttgcttccgcgggcagaattagaattggcaatctctcccaaaggtctttccggggcttggttgtcaaagccgccaccgttgttgcccccaaatacaccgcgattaagcctctgggagacagagtgctgataaaaat

SEQ ID NO: 36218 - DNA, 195 bp, Glycine max
  Clone ID: 701110260H1
gcaaccaaatggcaccttctaccaccgtacctaacggtaccctcccctccggttccgtcaccggacgcttagcctctgtctacagtgaggtccaaaagacgcgcgtggaccacgcgctccctctcccctctgtcctcaagcatcccttcaccattctccacggtcctccaagctccgccgccggaaatccagacg

SEQ ID NO: 36219 - DNA, 263 bp, Glycine max
  unsure (1)..(263): unsure at all n locations; Clone ID: 701110261H1
cncatatagaaaattgactgtgacgttgctgaagctgattggtaaagtattgaatcctgtgcatacatcctcacttatcctcttcctgcgactctcttctcattggttctccgtattctccctcaatcctatncaccttttcttctttcatttcccaccccattctataatcaatcaatggcaatggcttcttcaatccctaatgcgcctctgcgttcaattctcagagctacgttggtctcagagcgccatgaggacttcaa

SEQ ID NO: 36220 - DNA, 270 bp, Glycine max
  Clone ID: 701110262H1
ctacaatggctgcttcaacaatgactctctcttcatcatcattggctggccaagctatcaagcttgccccctccacccctgagcttggtgttggaagggttagcatgaggaaaacagcctccaagactgtttcctcaggaagcccatggtacggcccagaccgtgtcaagtacttgggcccattctctggtgagcccccatcctatctcactggtgaattcccaggtgactatggttgggacactgctgggctttctgctgacccagaga

SEQ ID NO: 36221 - DNA, 272 bp, Glycine max
  unsure (1)..(272): unsure at all n locations; Clone ID: 701110263H1
cnctaaacgactctatctctcttcgttttgttcttccttgcgctcctcctcgttcgttcgttctccctcgcgtagatcggcaatggcggagaccgagacgtttgctttccaggctgagatcaaccagctcctcagtctcatcatcaacaccttctactccaacaaggaaatcttccttcgtgaatcatcagcaacgcctctgatgctttggacaagatagatttgagagtttgacggacaagagcaagctcgatgctcagccagagttgttc

SEQ ID NO: 36222 - DNA, 277 bp, Glycine max
  unsure (1)..(277): unsure at all n locations; Clone ID: 701110264H1
ctagtttatcgtgaggngaatatgaagttgtttgttttctttgttgctgcagtagttttggtagcgtggccatgccatggcgcaggctaccaaaggttccctctccgaatgaaaactggctatggtgagcgttcttcggaggtaaaatgcgcaagttttaggcttgctgtggaagcacacaacatccgagcncttaaaaccattcctgcagagtgcgtggaacccacaaagnctacattaatggcggacaattagatcagactctaaaacagtaacc

SEQ ID NO: 36223 - DNA, 263 bp, Glycine max
  unsure (1)..(263): unsure at all n locations; Clone ID: 701110265H1
ttgaccttccccacntctgatgannattaaaccgngaaaacnctaaaanactacatttgaganaagantanaaaatgnnttcgtgcattcctcagtnccttnacttgggntcttccctaaaccccaaggcgngtaattctctcctaggcaatttnaggctccgtgctgtttcaancacngataatnngatagaanntgctccagttttgctncgcgnngnnncatggaaccagattcnggtggattatgctgcggacgganca

SEQ ID NO: 36224 - DNA, 264 bp, Glycine max
  unsure (1)..(264): unsure at all n locations; Clone ID: 701110266H1
gttctccacatcctcagccaaagcaacctcctacaacgtggtggacttcggggccaaacccgacggcgcgacggacgcaaccgcggcattcctaagcgcgtggaacaaagcttgtagttcgaacaaacccgcaggcattcacgtgccgcaanggaggttcctgatagcacgtgccgttacgttccatgggcaatgtgcgaaccgtgctatctccataaccattcgtggaacttggtggctcttcccaatacacgttcgtgggga

SEQ ID NO: 36225 - DNA, 234 bp, Glycine max
  unsure (1)..(234): unsure at all n locations; Clone ID: 701110267H1
aaaaatgggaagaagattgctgcaantgtgccaaatgatggntgcttaaattacattgaanngaatgatgaagtcttgatagctggatttggacgaaagggtcatgccgtgggtgatattcctggantcagattcaaggtcgtnaaggtttcnggtgtgtctctcnggcnctctncgaggagaagaggagncnccgncgtnttantctgtnngangcgtcctagtattcnaaaa

SEQ ID NO: 36226 - DNA, 258 bp, Glycine max
  unsure (1)..(258): unsure at all n locations; Clone ID: 701110268H1
tnagaggccaattctttcgccgcttcttctctctttccaacgcttccccctgtggtgttctcgtgttgctggtaacaatatggttgttgacgctttgaatgaggatttgagaatcaacggagcagttgaaccgttgcctgaggactttgatgcaacagctgtaatcatagatcccgtgcctttggcagttgtagacaatggcattgtcaaggaggaggcgcagatcattaaaggnaaagaganaagaganatatacgg

SEQ ID NO: 36227 - DNA, 256 bp, Glycine max
  unsure (1)..(256): unsure at all n locations; Clone ID: 701110269H1
gtttaagactaaggaaacaagggggaagaattgaggaagaggaggagtaacaaaacaagtatgtcagaatcaaacgcaattgcaaatggtttggctggtgcaggtggtggaattattgctcaaatcataacttatcctcttcaaacggtaaacacgcgccagcaaactgagagaacactcaagaggaacaagcaaagtttgccctccaatcaaccactgctccgggcactcttcttcagtcttccagncattggaa

SEQ ID NO: 36228 - DNA, 258 bp, Glycine max
  unsure (1)..(258): unsure at all n locations; Clone ID: 701110270H1
gnaagagagaattcgtaaaccctaatttcggaaagatcggcgatgactgcctccaaggatcgcgagancttcgtctacatcgccaaactcgccgagcaggccgagcgttacgaagagatggtggaatcaatgaagaacgttgcgaatctcgacgttgaactgacggtggaggngcggaatttgctttctgttgggtccagatgtgattggtgccccanaggtcccgggaggtcctgnnctccattggaccaaggnaaa

SEQ ID NO: 36229 - DNA, 258 bp, Glycine max
  unsure (1)..(258): unsure at all n locations; Clone ID: 701110271H1
cgcaattttcatttttctctctcccttagtcaaagggattcatcgttcttcttcccaggttatttagaaaagcaaaatggtgaagatttgctgcattggtgctggatatgtggggggtcctactatggcagtcattgcacttaagtgcccatccattgaagncgctgttgttganatcncnnnatcccgnattgcagnctggancagcnaccancttnnatcnntgaaccggccttgatggtgttcngaagcaatgcc

SEQ ID NO: 36230 - DNA, 263 bp, Glycine max
  unsure (1)..(263): unsure at all n locations; Clone ID: 701110272H1
ctttccaccaccccttttcttnccttcactgcaaaaaatgcttctacnagaatccctcctcccacatcattctcttacagcaagcaacgtagtaacagggatcccaggaaggttgtctgcgcctgcatcgctcctccttcaaaacttcaagagccaggactcttccgccattcatttcaatggttcgtccaaatcagagcaattgancactgcgcgggatcatgaggatgattctgatgttcttattgngtgtagagacgtgt

SEQ ID NO: 36231 - DNA, 260 bp, Glycine max
  unsure (1)..(260): unsure at all n locations; Clone ID: 701110273H1
cnacttacggctaaattctcaaagatttaaactttgtctcagagtttccaaattcanccaaccccagagagaaaatgtctctaatcccaaatttcttcggtggcagaaggagcaacgttttcgatcctttttccctcgacgtctgggaccccttncaaggattttcctttcccaaacactctttcttcagcttcctttcctgaatttctcgggaaaattctgcatcgtgagcactcgtgtggatggaaggagaccccaga

SEQ ID NO: 36232 - DNA, 260 bp, Glycine max
  Clone ID: 701110274H1
gttatggatcgctgttgaatactttttatgagcttgagggagattatgaggagcattacaagaaggccatgggaactaaaagttggagtgttggaccagtttccttttgggtgaaccaagatgctttggataaggccgatagagggcatgccaaagaagagcaaggggaaggagaagaagggtggctcacatggcttgattccaagacagagaactctgttctctatgtgagttttgggagcatgaacaagttccctact

SEQ ID NO: 36233 - DNA, 250 bp, Glycine max
  unsure (1)..(250): unsure at all n locations; Clone ID: 701110275H1
atacatttcgtgtttcgccacaaagacttcattttttcacactccttttcttcntctttttctcccgaaannnnnnnnnnnnnnnnnnnnnnnnnnntggccttttgaagcttccgaggtggcaaagatgaactgatcccaaaatatataactcaagttttacaattcaagccaacatgaatcctgtaataccatgctctattggcaatgtttcaattattcctgtattcatctattcaacaaggaagaa

SEQ ID NO: 36234 - DNA, 260 bp, Glycine max
  unsure (1)..(260): unsure at all n locations; Clone ID: 701110276H1
gnaacagcgaaagtgaaataccactacttttaacgttattttacttattccgtgaatcggaagcggggcactgcccctctttttggacccaaggtcggcttcggccggtcgatccgggcggaagacattgtcaggtggggagtttggctggggcggcacatctgttaaaagataacgcaggtgtcctaagatgagctcaacgagaacagaaatctcgtgtggaacaaaagggtaaaagctcgtttgattctgatttccag

SEQ ID NO: 36235 - DNA, 260 bp, Glycine max
  Clone ID: 701110277H1
gaaccggaggcagggagtatccttatagacaacattaatatttcatcaattggtcttcatgatcttagaagtcatttgagtatcataccacaagatccaaccttatttgaaggcaccattcgaggcaatcttgatcctcttgatgagcactctgataaagagatttgggaggcccttgataagtcacaacttggagatataatccgtgagacagagcgaaagttgatatgccagtgctggagaatggagataattggagt

SEQ ID NO: 36236 - DNA, 268 bp, Glycine max
  unsure (1)..(268): unsure at all n locations; Clone ID: 701110278H1
anacactcataacacaaagcacaaagcaaagctcatccttgagttaaaaaatggcagcagcttcttccatggctctctcatccccatccttggctggcaaggccgtgaagctgggcccatcagccccagaagtgggaagggtgagcatgaggaagaccgtcaccaagcaggtctcctcaggaagcccatggtacggcccagaccgagtcaagtacttgggcccattctctggcgagcccccgtcctacctaaccggtgagttcccagg

SEQ ID NO: 36237 - DNA, 241 bp, Glycine max
  unsure (1)..(241): unsure at all n locations; Clone ID: 701110279H1
cgcttcccaatcaaacccaccacccatctgaatcaatccagggatccccttcttctggtgggatagcttgatnctgatgcaaggncnaaggangactattggatcatttccagcaattgtnagtatgatgcaagggcccagttctagtggcactgatatgagtcatcagtcttcctgaatcatgtgcaaaatgcagtagattccggttgtcagattacagggatcttctggtgagactgca

SEQ ID NO: 36238 - DNA, 273 bp, Glycine max
  Clone ID: 701110280H1
aatcaaccttcccaattttcatgaccaataacgccccattttccctctccacaagacctcttagacccatcctgaaggtttccgtgaaacccccacctccagatttcgattacaggcgagagatatcggaggagtcaagagccgccatagccgaatctcacccggagttgcttgacctggctgacaatgggagcttggttttggttcagaagaagaggttcggtcctgtcccttcttggaggaccgaattcgtcgaacctgaatccattggtt

SEQ ID NO: 36239 - DNA, 263 bp, Glycine max
  unsure (1)..(263): unsure at all n locations; Clone ID: 701110281H1
aaacaccactttctcccaaaactcatctagattcttctctcttcaccattccagatgaagaagtccgtcctnnnnnnnnnnnnnnnnnnnnnnnnnnnnnnnnnnncggcatctctctcctcttcttcccatcaggatgagagaagccgtgagaactcttcgtcgcagaattcatcttctacggagaaattcgctcccagattgatggattgcgcttcatgaaaccctcgtaactgcccatagatgatgatatcgaggttccc

SEQ ID NO: 36240 - DNA, 260 bp, Glycine max
  unsure (1)..(260): unsure at all n locations; Clone ID: 701110282H1
tgaaaatcaacattttttttctatcaattcacacgacaaaatttagcagagttcaaaacaccaaccaagtaaagtaaagaagggaagatgtcactgataccaagtttcttcggtggtcgaaggagcaatgttttcgnccctttctcgctcgnngtatgggncnnctangaggtttcgtcccccnctnctgnagatcagcancttgcanaaacacnnggtggattgggannccaccnnagcacngntcaaggctganattc

SEQ ID NO: 36241 - DNA, 260 bp, Glycine max
  Clone ID: 701110283H1
ctatcttctctcttgtcttgattccattcaatttaaacctcagggcgtggcaagtttcaacctttttcgagcacccattaacattaacatggccattccctacccccatttcatcgccaccgagaaagccgccatggacgccggcctcctccacccctcctccccctcctccgtcatcctcacccaagacgacctcaagaaaatcgccgcctacaaggcgtcgagtacgtcgagtccggcatggtcctcggcctcggcac

SEQ ID NO: 36242 - DNA, 259 bp, Glycine max
  unsure (1)..(259): unsure at all n locations; Clone ID: 701110284H1
attcgctctgtgcagtttcctcgctctcttttctgcaattttcttttttgttcgttctctgcggttatctttttgagcttcaatggcggacgctgaaaccttcgctttccaggctgagatcaaccagcttctcagcctcatcatcaacaccttctacagcaacaaggagannttcttgcgtgaactcatcagcaacgcttctgatgctttggataagattcgatttgagagtttaaccgacaagagcaagctcgatgct

SEQ ID NO: 36243 - DNA, 257 bp, Glycine max
  unsure (1)..(257): unsure at all n locations; Clone ID: 701110285H1
cntgaagctaacgaaccaaccataaaccctatctatggccaccctcgacccaatccaaaacggcgtctcttcggacaatccagccgccgaaccgtcctccacccccgccgaagaccnnnnnnnnnnnnnnnnnnnnnnnnagaagcggtggccggggtggctggccactgcgttttccgcctaatcgtgcggtgctcaaggtcggtagcatcatcggccgcaagggggagtcatcaagaagactgcgaggaaacgaa

SEQ ID NO: 36244 - DNA, 255 bp, Glycine max
  unsure (1)..(255): unsure at all n locations; Clone ID: 701110286H1
gtgttgttacgttgtatacgacgtcgcttctggctgattgttatcgctgtggtgaccctgttaccgggaagagaaactatactttcatggatgcagttcaatccattctcggtgggtattatgatgcattttgtggggtagttcagtactcaaatctttacggaaccgccgtangatacacaattgcagcttcctattagcagaggncattaaaaggnccacngttcnatnttcngggganaaagccctgnnggg

SEQ ID NO: 36245 - DNA, 261 bp, Glycine max
  Clone ID: 701110287H1
cgtgcctctagggttatcatatctccatttccatttcctctctctcagtttccaagaatcttaagctatgggaaagtcttacccaaccgtgagcgctgattaccagaaggccgttgagaaggcgaagaagaagctcagaggcttcatcgctgagaagagatgcgctcctctaatgctccgtttggcatggcactctgctggaacttacgacgtgagctcgaagaccggtggtcccttcggaaccataaagcacccctccga

SEQ ID NO: 36246 - DNA, 261 bp, Glycine max
  unsure (1)..(261): unsure at all n locations; Clone ID: 701110288H1
tcgagataactagaaacagtgtgntgaaaatgnaggtccttgttttcttcgttgctacaattttggtagcatggcnatgccatgcgnacgatatgttccctctccgaatgaacactggctatggtgcccgtactccggaggtgaaatgcgcaagttggaggcttgctgtggaagcacacaacatctttggctttnagaccattcctgangagtgcgttgaagcaacaaaggnatacatccatggcgaacaatatagatcag

SEQ ID NO: 36247 - DNA, 259 bp, Glycine max
  unsure (1)..(259): unsure at all n locations; Clone ID: 701110289H1
ctttcccttcccaacaacaacaagaanatgccttctgcagaagcttcctccgaaaccatttgtgtcaccggcgctggtggcttcatcgcctcttggatggtcaaactcctcttggaaaaaggctacactgtccgaggaaccctcagaaatccagatgatcccaagaacgggcacttgaaggagtttgaaggagcctccgagaggttaactctgcataaggttgacctccttcatcttgactccgttagatcagttataa

SEQ ID NO: 36248 - DNA, 256 bp, Glycine max
  Clone ID: 701110290H1
gttgggttgagttgggtttggattggatttctaatctaatctatacctttctttttcctatgcttttaaggcacaaatccttctcccttctctcttctttcttcttcttctcctgacccttattattattcctgccctaccctttaggcaagggaaggaagaaagaataactatattattatctttattgtaatctatctttttattataattataattataattattgttgttattattcctaaatatggattcg

SEQ ID NO: 36249 - DNA, 238 bp, Glycine max
  unsure (1)..(238): unsure at all n locations; Clone ID: 701110292H1
gccaattcttattctttttctctctntctctctgcttgcggangcttcacaagccaaatctancttgtctctgttttctccgatctagtactactatcaatggccggaaaaggagatggtctgctatcggaatcgatctcggcaccacctactcctgcgtcggagtgtggcagcacgaccgtgtcgaaatcatcgccaatgaccagggtaacagaaccagccgtcttacgtcgctttc

SEQ ID NO: 36250 - DNA, 262 bp, Glycine max
  unsure (1)..(262): unsure at all n locations; Clone ID: 701110293H1
caatttcgcttttcccttcaaacttccaagttccaattcaactgctgatccttaaattcatttgcatattcagtnctttgaattattccacnttcttcaaatcattccaattccacaaccaacgaagannnanncatcaacacaacacaacaatgtcaaaaacaacaacttcttccgaacaaactgcacgaaaccgtttggccaccctcgcagctcattgctccctccgacgccacctccgcgcgcgatcntccacncccac

SEQ ID NO: 36251 - DNA, 264 bp, Glycine max
  Clone ID: 701110294H1
caccgtcgcaccttccctgaggcttctcttgtctgtcgcgagtgaccatggtgagggtagtgtgctgaacgatgctctgaagagcatgtacaatgctgagaaaaggggaaagcgccaagtcatgattcggccatcctccaaagtcattatcatcttccttttggtgatgcagaagcacggatacattggagagtttgagtatgttgatgaccacagggctggtaaaatcgtggttgaattgaacggtagactgaacaagtgtgg

SEQ ID NO: 36252 - DNA, 271 bp, Glycine max
  unsure (1)..(271): unsure at all n locations; Clone ID: 701110295H1
cnacagagcaaaaagctccaccaaatggcgggttacagagcngacgacgactacgactacctcttcaaggtggtcctcatcggcgactccggcgtgggcaagtccaacctcctctcgcgcttcaccaagaacgagttcaacctggagtccaagtccaccattggcgtcgagttcgccacccgcaccttgaacgtcgattccaaagtcatcaaggcccagatctgggataccgcaggccaagaaaggtatcgtgcgatcaccatgttactat

SEQ ID NO: 36253 - DNA, 267 bp, Glycine max
  unsure (1)..(267): unsure at all n locations; Clone ID: 701110296H1
gtcctgcaaaggtatcctattatttggtccccctggaactggtaaaacaatgcttgcaaaggcaattgctactgaagctggtgctaacttcancaacatttcnatgtcaagtatcactctaagtggtttggtgagggtgagaaatatgtgaaagctggnttctctctggcgatnaaatttccactancgttaaantgttgatgaggtgacagcagntgggtcgngggaaaacccaggagagctgaggcatgcgcagaagattatnaa

SEQ ID NO: 36254 - DNA, 252 bp, Glycine max
  unsure (1)..(252): unsure at all n locations; Clone ID: 701110303H1
tgacgatggcgatgacggcgtcgcagttgcggtgcggttggggtcggaggtcaacgccgaatcagcagcagcaacgacgtcgtatggttccggtggtgtgttccatcgctatagagaacgcgaagaacnaagagagagcgaaactgaagaagctcttcgatgaagcgtacgagaggngccgcantgctcccaccgnaggcgtttccttcactctccaacaattcaccgacgctctcgacaagtacgtttcac

SEQ ID NO: 36255 - DNA, 260 bp, Glycine max
  unsure (1)..(260): unsure at all n locations; Clone ID: 701110307H1
gcagatatctttcgaccttgcttcacaccattcaacgaaacngcactcactgtgctctctagaaccctaacttttgtgctaaaaccctaaaccacgtcgaatcgatgattgaaccatacaacaagctggttaaactagcggcgagggctttttacgatgatcttaccagcaaaggagataatcagcccaaaacgggaaggagtgataacaggggaatagctgtggtggttcttgacgcgctcacgagacgacaatgggtt

SEQ ID NO: 36256 - DNA, 240 bp, Glycine max
  unsure (1)..(240): unsure at all n locations; Clone ID: 701110309H1
ctccatgaaggtgaatgaggagacctagtgatggggatgacnaatagggtccccaagggacngggggagaaaaatgtgggggtggttgagagcaaattggtgtgcacccttgaggagctttacaaagggtgcaagaagaagttgaagatctcaaggactgttcctcacgaattcgggaaaatgaagactgtggaagaggtcttgaaaattgacatcaaacctggttggaaaagaggcaca

SEQ ID NO: 36257 - DNA, 258 bp, Glycine max
  Clone ID: 701110311H1
tttgaacagaaatttcagaatgcagatccattggcacttcgcctattacaaaggcttttagcatttgatccaaaggatcgaccaactgctcaagaggcactggctgatcccttctttaagggtttgtccaaagttgagagagaaccttcttgtcagccaacttcaaaattagaatttgagtttgagaggagacgagtgacaaaagatgatgttagggaactaatatatcgggaaatactggaatatcatccccagttg

SEQ ID NO: 36258 - DNA, 254 bp, Glycine max
  unsure (1)..(254): unsure at all n locations; Clone ID: 701110312H1
cttagtttcgaaagcatggcttccctggcggcttccaccgcggctatgtcagaaatccttggaaaccccgttaacctcagatgcgcaaccaggtctgctccatcaccaactacacctgccaccttcaagaccgtcgcacttttctccaagaagaagccagctccacctccaaagaaaaagcntgcggntgtntcccggcnattgggannncccnaagnggtnnggcctnnaanaggntttttgccggggggttt

SEQ ID NO: 36259 - DNA, 257 bp, Glycine max
  unsure (1)..(257): unsure at all n locations; Clone ID: 701110313H1
aatttttcaacggtgttagttcatctccacttttcttcaacaccatccttctctntctttttatttttatatttttgtccaattgttcgattcttttggtgttccagggagatcgattgataccgtcccgttgattttccaattcgacgaataagggtatcacatctcttaatcaaccatgtttacccgaatttttggtaaactaaaaccggaagtcnatantctaaccgctttagacgagttaaatgacaaacttg

SEQ ID NO: 36260 - DNA, 259 bp, Glycine max
  unsure (1)..(259): unsure at all n locations; Clone ID: 701110314H1
ctctctttcaccacttgaagattctccttttcaaatttcaacctttttcccccaaaactaacaaacccctcttcttctcaatcnttgcatggctcttcactgattctataataataatttcagattcgtttttcgttttttgttaccatggagttgatttcagggtctaccagaggacgtagcccgagacnctttgattagggttccctatgatcaattcccggcggttgttcagtctgcaaaggttggagcgcggagt

SEQ ID NO: 36261 - DNA, 256 bp, Glycine max
  unsure (1)..(256): unsure at all n locations; Clone ID: 701110315H1
agactgagcaatggtgaacctgagaagcccttgatagttcatgttggacggcttggagttgagaagagtttagattttctcncaagtctcatggataggcttcctgaagcacgaattgcctttatcggagatggaccttacagagaggaactagagaaaatgtttgaaggcatgccagcagtgttcacaggaatnttaggaggggaagnactatcnnannantnnactngnggngtcgttctgntgccgtcgtnat

SEQ ID NO: 36262 - DNA, 82 bp, Glycine max
  unsure (1)..(82): unsure at all n locations; Clone ID: 701110316H1
agagngagnagtttnaganagagagagaggggtttgggattggagggattgaagntgngtgtattngtnttntggtttggat

SEQ ID NO: 36263 - DNA, 253 bp, Glycine max
  unsure (1)..(253): unsure at all n locations; Clone ID: 701110317H1
gttttctcccatccctctcgcgcnctctctctcccantggaatcctccgctgccattcgatcttttcactatcccataggcactatgtcccatgtncgagcctcccttgagaagcaggctgtagttcccattcataatgccggatggaactctaaaagtaggcttttcatccagcatttggcatatggtcacaagcacattaattcccacacgaagggganaannacataatttcatgtggaaaaacagctgc

SEQ ID NO: 36264 - DNA, 252 bp, Glycine max
  unsure (1)..(252): unsure at all n locations; Clone ID: 701110318H1
gacaagcccataatgcattcaccatatcttttgggaatttatgcttcagagggatggttcatgaggctgatggaagctagtaagcaatttgtgactaaggacccaaagaaggcccacctattttacctacctttcagttctcggatgctagaggaaactttgtacgtacccaattcccatagttctaggaacctgattcagtatcgnaaaattatgtagacatgattgccgggaaacatcgtttctggaaca

SEQ ID NO: 36265 - DNA, 86 bp, Glycine max
  unsure (1)..(86): unsure at all n locations; Clone ID: 701110319H1
antcaacgctttgggtttttctcttggcngcaacttttggtctctccgcagaatctcgttccaattggagttcatcctctaaaggg

SEQ ID NO: 36266 - DNA, 261 bp, Glycine max
  unsure (1)..(261): unsure at all n locations; Clone ID: 701110320H1
cgtgaagcntttttnttctttttctgnccacagtcctcctcccaatccccannatnnacncctncctcctcgtcgaaactctccgaccccatctccgaattcgcctccggcatcgtaccatgtaacgcctcgccggtacagttcagtttctttcctcccctaaccctaatnttngcgtttnctaatttnngcgcagttctctntgnaagacatgcgcgntnngnngcttnttccgtacatggctnanggcgncantntcat

SEQ ID NO: 36267 - DNA, 257 bp, Glycine max
  unsure (1)..(257): unsure at all n locations; Clone ID: 701110321H1
gaaatgccttcaagaagatgaaaaatctgaaaacacttattatccagagtgattgtntttccaagggtcccagacatcttcctaatactttaagagtattggaatggtggagatgtccctcacaggaatggccacgtaattttaacccaaagcaacttgctatatgcaagttaccacatagtagcttnacgtcactcgggttggccccattatttaataagaggctcgtgaatttgacaaggttaactttggacgag

SEQ ID NO: 36268 - DNA, 259 bp, Glycine max
  unsure (1)..(259): unsure at all n locations; Clone ID: 701110322H1
cccaattcttccccctccacccacccagcatatctctctattccnatttattagcacccctcacattaccttgtgtcaccaactactttgactcctttaccataccattacaataattatcaaacctaaccagtaaaaatggtgaccgtggaggaaatccgcaacgctcagcgttcccatggacccgccaccatcttggccttcggcaccgccacgccgtccaactgcgtctcccaagccgattaccctgactactatt

SEQ ID NO: 36269 - DNA, 258 bp, Glycine max
  unsure (1)..(258): unsure at all n locations; Clone ID: 701110323H1
ggaatgggctgcagttcctggtggccaagcaacctacctaggcaacccagttccatggggcaccctacccaccattctggccattgaattccttgctatttccttcgtggagcaccaaaggagnatggagaaggaccctgaaaagaagaaataccctggtggtgcttttgatcctttgggatactctaaggaccctaaaacattccacgaatacaaagtcaaagaattaaaaatggacgtcttgctttgttggctttt

SEQ ID NO: 36270 - DNA, 240 bp, Glycine max
  unsure (1)..(240): unsure at all n locations; Clone ID: 701110325H1
ttcatcgctttccaccaggcacaccagattnctgctccttccttctctctatccaaatttacattctttcgatcaaacccgcaacacccacctcaccaaaaccctacgcaacccatccatgacgcttggcttaggaggatccagtgtcgtggttcctaggaacttcagattgctggaggagcttgaacgtggagaaaaaggaattggagatggcacagttagctatggaatggatgatgg

SEQ ID NO: 36271 - DNA, 266 bp, Glycine max
  unsure (1)..(266): unsure at all n locations; Clone ID: 701110328H1
tgaaccgttgaagctcttcttttgccttgcaacaatttcaagtaacctctgccactgatcacaaacccagtaatggttttntctgctgtgttcactcccactctcaaccttggccatttcatccagcanatactgttgtagaagaagaacatcatctaccacaagaagagttgttaacagtgagagctagctccaacggggaaggatgaatccagggacaaagatgttcagcattncaacccttttgggttggcnattggncaacc

SEQ ID NO: 36272 - DNA, 256 bp, Glycine max
  unsure (1)..(256): unsure at all n locations; Clone ID: 701110330H1
ctaaattctgcaaaganaccaatttcacggctcagagttcccaaattccccccaagagataaaatgtctctaatcncaaacttcttcggtggccggagaaacaatgtgttcgatcctttctcactggacgtgtgggatcccttcaaggattttcctttcccanatacgctttcttcagcttccttccctgaattttctcgggaaaattcagcatttgtgagcacccgtgtggactggaangagancccagaggcgc

SEQ ID NO: 36273 - DNA, 125 bp, Glycine max
  unsure (1)..(125): unsure at all n locations; Clone ID: 701110334H1
atcaagtccaagaaccaacctaccttttgcaatctcaattcantggcgtcctctctcattgcgaangcttgcctctnctcttcnctcctctccaggtccctccttcgccccgccgcttccgcttc

SEQ ID NO: 36274 - DNA, 253 bp, Glycine max
  unsure (1)..(253): unsure at all n locations; Clone ID: 701110337H1
cgaacaggccaatatcctcaggtgaccatactggcaggcaaaccataactgggagccgtccatctggtgctcacngagttcaaccagtgtatgacaccaaacaagcaacttatacgcatggtggctctataagaggccgtgatgatcctctgcggaactttgagctcctcaatatcaggaagtaattaagtaaaggttgtntcttntgttgttatattctgaattatgacactcctgagatgcaagatcacct

SEQ ID NO: 36275 - DNA, 258 bp, Glycine max
  unsure (1)..(258): unsure at all n locations; Clone ID: 701110338H1
gcacaatttctctgagtngttttgtgagataatagcacatagcataacaagggaaggagtattaacaaccgcaaacctgaagagaaaaagagcagcagaagaagaaacaccaacgatgggtgtggattactacaagatcttgcaggttgataggngcgccaaagacgatgacttgaagaaggcttataggaaacttgctatgaaatggcaccctgataagaaccccaacaacaagaaagaagctgaagctaagtttaa

SEQ ID NO: 36276 - DNA, 259 bp, Glycine max
  unsure (1)..(259): unsure at all n locations; Clone ID: 701110341H1
gcttctcatgcgagaaacaactttgagaagcgaaatcgcccacncttgatccctttcgaccgtcatcggatctttcngcggccaccgtctaccgcacttcgttgccgtcatcggcgccgganttctgaatcttaatgaagttgtgaagtgatgatgagtggaagagctatccaataacatgacatgaattccaaaattttctatacttganaattaagccagcttaaacnatacaaggntgtttcgttgtnttatggac

SEQ ID NO: 36277 - DNA, 258 bp, Glycine max
  Clone ID: 701110343H1
taaccatcaagtttcagttccaaacaaaacccatcaaagtctttctccctcagtgatcatatattcattcagttctatacaaaatcctcaaaaactcttcctctctgccatgaccatggaatacagaaccttagaactcaacatcatatccgcaaaggacatcaagaatgttaatctcttctccaagatggacgtatacgccgccgtttcgctctccggtgaccctctccaccctcagggcgccaccacccacgtcca

SEQ ID NO: 36278 - DNA, 257 bp, Glycine max
  unsure (1)..(257): unsure at all n locations; Clone ID: 701110344H1
gaaaaagaggattggagggtcgccacgtttagcaacaaccaaaccctctctactctttcttcttctcttcgctagggttttagcttcttcctcttcacttcgttcttctggcctctacaatgagcaacgacaaggacaccttcaacgtcgctgatctcacttccgctctcaacgaggncantagagcagacctggtnaatgtctaaagggaagttacagttttnggcnggncagnatggggttntcnaaagggtnnc

SEQ ID NO: 36279 - DNA, 257 bp, Glycine max
  unsure (1)..(257): unsure at all n locations; Clone ID: 701110345H1
aacaaacttggagccataggaaatgtgatatttgttctttgcagatttatcataatgcatcttccaatgcgatttggagaggtcatgaaaggttgatctttgaccctgcaattaataattcaagttttatagcctgaattggcatcatggcaaatatccttggaagttgactccaaaggtggcaaccacgatgtcttacatctgtagttctgtttctcntggccgaaatgacacaagtacaattggggtttccgggg

SEQ ID NO: 36280 - DNA, 193 bp, Glycine max
  unsure (1)..(193): unsure at all n locations; Clone ID: 701110346H1
atggctttgcccaatcagnaaaccgtggattaccctagtttcaaactcgtncattcgtcggtgacggcggtacaggaaagatcaacgtttcgtgaaaaggccatcttaccggtgaattcgagaaaaaaatacgagncgaccattggngtggaggttcacccattggatttcttcacaaactggcggaaagatt

SEQ ID NO: 36281 - DNA, 257 bp, Glycine max
  Clone ID: 701110347H1
aaaagatgtggctttgaaggttttgcaaaacaaggtgtcaactgtccctatcatacattcttcttcagaggatggttcatatcctcaactgctacatcttgcttccctatccggaatactaaaaggtatatgcaggcatttaaagcactccttgagttctttgcccattcttcaacttccagtggcttcaatacctttgggtacatggatgcctagagttggggaaccaaatggtcggccactagcaatgttgatgc

SEQ ID NO: 36282 - DNA, 255 bp, Glycine max
  unsure (1)..(255): unsure at all n locations; Clone ID: 701110348H1
ctctctttctctagtcctgttatttctcngcgcgtaaagcatggctttgttggtggagaaaaccangagtggtcgcgagtacaaggtcaaggacgcttcccaggccgacttcggccgcctcgagatcgagctggccgnggttgagatgcccggcctcatggcctgtcggaccgagttcggcccctcccagcccttcaagggggcccgcatcaccggctccctccacatnacanncgacngcancgttctcattga

SEQ ID NO: 36283 - DNA, 254 bp, Glycine max
  unsure (1)..(254): unsure at all n locations; Clone ID: 701110349H1
gtattgatggatatagtacaaagtaaanctatataacannngaaccaataaatganttgaaaaaacacacataataatccaaaaggggagactatagatattatgtgtgttttttcaattcatttattgttcaggtgttatataggtttacttngtncaattgagtattgatggatatngtctttttnaaggtttatgtcggatggnttaggttgtanagattnnncngnttgggntaggggtcctaattttnt

SEQ ID NO: 36284 - DNA, 257 bp, Glycine max
  unsure (1)..(257): unsure at all n locations; Clone ID: 701110350H1
gtcaaaatgaatttcgaagagaggcacaaaaatctttctaaagggacatgccatctatcatgagaaatcaatgaccattttgttctgatttcagaagttatatctcctgatgttctgtctattttgacgacactaactataatatataatgtgcttgaataatgaatcacatttgaagatgaagacgatgatganattgaattggctgaatcattgcaattcaacttcgacacaataaaagttgccnacaaataact

SEQ ID NO: 36285 - DNA, 127 bp, Glycine max
  unsure (1)..(127): unsure at all n locations; Clone ID: 701110351H1
ctcaactttnccttngatctcattctcaggtgttgttgaagcnncctgngttggcttggcatnccctgcaagttcctgctgtagcagattccaaggtgantgtancacgttaaagtttgctttcatg

SEQ ID NO: 36286 - DNA, 256 bp, Glycine max
  unsure (1)..(256): unsure at all n locations; Clone ID: 701110353H1
tggaaaactctctctagtttccagnggagcaactctancatatctttagcctcctcttatatatttcggaagttggtttctgctggaaattttgcaaacaaattcatatactgaaaggactttatgactagggagttctatacaaccagantcngcnatggatctgagcactattgaattggcgaagggataatgangcttaanggtttattcacagggagcacgagaagctccagagaactctttacatcattat

SEQ ID NO: 36287 - DNA, 257 bp, Glycine max
  unsure (1)..(257): unsure at all n locations; Clone ID: 701110354H1
cagcgcaaaagctgcaactccgcttctcatattagaattcagacaaagcctcatccttcatagttcagatccattcttgctctgtattttgtntttcttttaaatttttctttaaatttctcaattgatcaaagatcttcagcaaaccggtcaagtttgtgtagtttggccagatgggaggtgggtttagagtgctacacttagttagaccttttctctcgttcctacctgaagttcagactgctgataggaaagtg

SEQ ID NO: 36288 - DNA, 263 bp, Glycine max
  unsure (1)..(263): unsure at all n locations; Clone ID: 701110357H1
gcanctgnccatcgaacatttncatgaagaatgagaagaaacncaaggcatttggcaggtattcttgacctaaattcatgcatgaacgaggatgagaatatgccaattgatattgatttacnagcacctgtaagtcccagaaaacaaggagtgtnctcnacccagaggagatctgatgaaaaccagnttgagatgctcttgnaattggcagggcaggagcaggngccagaaccgggaaccaggnagcaggatccgggagnacc

SEQ ID NO: 36289 - DNA, 257 bp, Glycine max
  unsure (1)..(257): unsure at all n locations; Clone ID: 701110358H1
caacactattcttcttcgcagcaatggcgcgagtggatcnggacgggaaccccatgaaggcacttacgatctgcatgatcggcgctggcggcttcataggctcgcatctctgcgagaagctcatgtccgaaacccctcacaccgtcctcgnncctcgatacctacaacgacaagatcaaacacctcctcgaaccctccgattccccctgggccggccgcatcaccttccaccgcctcaacatcaaacacgactctcg

SEQ ID NO: 36290 - DNA, 266 bp, Glycine max
  unsure (1)..(266): unsure at all n locations; Clone ID: 701110359H1
ggcaatcactgaatctcnttctctatctgaatctntttggattattactggattttgcttnnttggctgtattgatacttgttcatttctttggagaaagccctatacaatccttggagaagggaagaaaaggagagtactggtaacattggaagggaacaancaatacagagccagaggaaganacaaattcaagatgnngggattttcaaggacaagtnggtccannccaccaggaggtncanaccnccctttttnnttngant

SEQ ID NO: 36291 - DNA, 258 bp, Glycine max
  unsure (1)..(258): unsure at all n locations; Clone ID: 701110360H1
cacaatcagtctgagattcgccaccgaaaaacctctcaccatggtttctcgccatttggtttcgctcttcctctgtttcctctgtttcgagatctctgtttcatcaattcgattgcccggtttggaccaagacgccaaggccacgcatggatcggtgcttaggttgaacagaggaggctcttcagtgaagtttgatccaacacgggtcantcagctctcgtggagtcccagggcttttctctacaagggctttttatc

SEQ ID NO: 36292 - DNA, 258 bp, Glycine max
  unsure (1)..(258): unsure at all n locations; Clone ID: 701110361H1
cactaggctcacgattcatccaaactgaaatggcggcagtagtatcagcatcttctcatctantgtttgttcttcgttcacnaccattatcatcatcaccctcttttatttctcttctcaaacctcttcttgtttcttccccctatgctgtatctacaccccttcggcatatccaagttccaccgcttngaaaacctctcttctctacttcctcttccccctcccttaccgtttctcaagatagtgangaattggaag

SEQ ID NO: 36293 - DNA, 254 bp, Glycine max
  unsure (1)..(254): unsure at all n locations; Clone ID: 701110362H1
cttccacttctgattcagaaactcttaggcattccacattctcaaccccgaaccctaagagcagagcgaaaatgacaaccaccttcgcgaccgtcgcaggactcggtggcgcattactgtcatcctcctcatctcgtctcacctcagggtttgtgaaatccccagtgattgctaggaatcccttgaggcaagctgtggcaatgggaatgggaggattanatgctttgagaggattggctgcgggcagattacat

SEQ ID NO: 36294 - DNA, 123 bp, Glycine max
  Clone ID: 701110363H1
ggtagttgcatatttggcatcaacaatcaacaatcaacaatcacaaatagaaactcactctttcgaaaaaaccagaatttgaatatgacgttagggtttgagggttatagttataccacaaca

SEQ ID NO: 36295 - DNA, 259 bp, Glycine max
  unsure (1)..(259): unsure at all n locations; Clone ID: 701110364H1
gcttcaaacagcagggaactctagcagttccttgtcggcctcaagaattacagaaaatcttagatggttggagagtgataccggacaacatcaaaggtncaggancggangctttattttcccaagttcctatgatctatatgaggttttaacttctatagtaaagtttcttttcctnctnctttngggttnaagacgggnnctntgtntaagaagnccccccnaagtgnganncntngncccnnngccccgntngnnt

SEQ ID NO: 36296 - DNA, 256 bp, Glycine max
  unsure (1)..(256): unsure at all n locations; Clone ID: 701110365H1
ctggttgattcggatctagagtcttcagtttctcctcgttgtncttcgctttcctgttttcaatttcgattctttcgtnaatttaataagatgtttgggagggcaccgaagaagagcgataatacgaggtactacgaaatcctcggcgtctccaagaacgcttcgcaggatgatctgaaganggcttacaagaaagccgccattaagaatcaccccgacaagggcggtgatcccganagtttaangattnggngcc

SEQ ID NO: 36297 - DNA, 257 bp, Glycine max
  unsure (1)..(257): unsure at all n locations; Clone ID: 701110366H1
aagtctacttccttcctcttgcagagtttgccggttccattctctctatacccactcacctgctcattcgttctggnnnnnnnnnnnnnnnnnnnnnnnnattccttcttctttctcttccaattccaaatcacgatccttggttttccctctctagaaccttcctttttcctctttccgtgtctgncctgtctgtctctctctcccccatggcttccgatctcgaagcaaaagccaaagaggccttcgtcgaagac

SEQ ID NO: 36298 - DNA, 256 bp, Glycine max
  unsure (1)..(256): unsure at all n locations; Clone ID: 701110367H1
gccatgctcccaactaaatgatcatgatggcaaagctaagtctanaagcaccacncagtgacattctncaaccaagacaaagaaagggtgaagtacattaactcaaggctctctaagaacttgggccaagatantagtgttgaggaattggactcagctaccctaccagccaaatctggtagccttattgggtctggaaattactttgtggttgtgggncttgggacacccaagagggacttgtcactcattttng

SEQ ID NO: 36299 - DNA, 254 bp, Glycine max
  unsure (1)..(254): unsure at all n locations; Clone ID: 701110368H1
aaaaaaaaagaaggctgacaatggaaatattttatctcctttgctctatcgtctccacttccctcacctctcttcttctctcccttgtccttccctttcacacgctactgcagcggtggaattcctcacgcgccgcttcttccttctccgatgacgaagctgaacccatatctctctacgaaggcacagtttggcaccaacgtcgccacccagtcnaaccaattcttcaataccanggncngcaatgngctnnt

SEQ ID NO: 36300 - DNA, 124 bp, Glycine max
  Clone ID: 701110369H1
gttgcccgtttaaactttagataagttttttaaaaaaatattttttcttgaccattattttaatttttatattttcctggattgtaaacatggatggctaatagagaaaataatgattcttccc

SEQ ID NO: 36301 - DNA, 310 bp, Glycine max
  unsure (1)..(310): unsure at all n locations; Clone ID: 701110370H1
caaagangcgtcttcataaacgcctttattctccgtttccgtttccttcccggaattcgattttnccatctctgaaaatgagagagtgcatctcgattccacattggtcaggnccggtattccaggttcgggaanatgncttgcctgggaagctctaactgtnttggaggcacgggcattcggngncccggatnggggcaaaatngnccaaagttgancanaaaaccagtttgggccggnagggtggatngaatggctttttcaaaacacttngcctttccaagttgnaggantcgggtggnttgggaaa

SEQ ID NO: 36302 - DNA, 101 bp, Glycine max
  unsure (1)..(101): unsure at all n locations; Clone ID: 701110371H1
ggcgaatgaaccattctcttnctctcccgatccgaaacccatcacttgctaacacctgcagatctccctctctcaacctcactccacacaacanacgaaaa

SEQ ID NO: 36303 - DNA, 258 bp, Glycine max
  unsure (1)..(258): unsure at all n locations; Clone ID: 701110372H1
caagtaaccctatactgttacagcattatggcaccatagctnaattatatatagagcattggtgacacccttcttggcacaaaacagaacataaaaaccatggtgtcaccaatctcacttattgtcctcttgttattagtttctttagccagattcagcttcagttcaagaaagttttgtccaatgtctcaacttgaattcggacaaaacatttccattttnctcatcaatctacantgcaagcancccttcattcnc

SEQ ID NO: 36304 - DNA, 62 bp, Glycine max
  unsure (1)..(62): unsure at all n locations; Clone ID: 701110374H1
tttctccacaagaagcnacacnanacctcncgttncctttctcngctgccacactntctgct

SEQ ID NO: 36305 - DNA, 262 bp, Glycine max
  unsure (1)..(262): unsure at all n locations; Clone ID: 701110375H1
taggtgctgaatatncagtgttgaaaagaaagtacgtagaggagtcctctgagcgtangcggnctttacnatgaagtgattgaactaaagggaaatatcagagttttctgtagatgcagaccantaaatganagtgaaattgcaaatggntgcaggcagtancctgttgtgcaattttgagtccatcttctgntgagctccaagtncatttgcgcggattnttcaaaaaaggcacttcaaattngattatgtattcagacct

SEQ ID NO: 36306 - DNA, 246 bp, Glycine max
  Clone ID: 701110376H1
cgcaagggcagggggaagacccagagtaaagcgtacacacactgtgaaagctgttatcaaagaggctagggatatacttggggaatctgctgaagcattacctggggaatctgtggatgatcatgagactgagtttccaaatggaaatgctgaggattctgccaatgtgaattctgaaagtcagaaaccatacaatagaagaataccagcgaatgtcaggaagcgtaaccgggttcaacatcatcc

SEQ ID NO: 36307 - DNA, 255 bp, Glycine max
  unsure (1)..(255): unsure at all n locations; Clone ID: 701110377H1
aaagaaatcaacacacacaaacacaacaacatatggaggtgctaagggtgcaaaccatagcttccaaatccaaagatgctgccatcccagccatgtttgttagggcagagacagagcaaccaggcatcacaaccgttcaaggggtgaaccttgaggtgccaattattgattttagtgacccagatgaagggaaagtggtgcatgagattttggaggcaagtagggactggggcatgttccaaattgtgancctgc

SEQ ID NO: 36308 - DNA, 254 bp, Glycine max
  unsure (1)..(254): unsure at all n locations; Clone ID: 701110378H1
ctaaattctcaaagacaccaatttcattgntcagagttcccaaattccccccaagagataaaatgtctctaatcccaaacttcttcggtggccggagaaacaatgtgttcgatcctttctcactggacgtgtgggatcccttcaaggattttcctttcccaaatacgctttcttcagcttccttccctgaattttctcgggaaaattcagcatttgtgagcacccgtgtggactggaaggagaccccagaggcg

SEQ ID NO: 36309 - DNA, 255 bp, Glycine max
  unsure (1)..(255): unsure at all n locations; Clone ID: 701110380H1
cagtctctcccacacacccttcttcnggngctgagttgtttgtaatacagcaagatgaatccatggaacatgagaacttccaagttactctctcaacaagtttcttatnctccttatctctttgtagaagagattccaaacatgggaaattccagtgttgtgaccaaggatgctagaggttcacanctgacaatcttctatggtggccaagttcttgtcttcgatgatattcaagcnagaaaagccaaggacatt

SEQ ID NO: 36310 - DNA, 256 bp, Glycine max
  unsure (1)..(256): unsure at all n locations; Clone ID: 701110382H1
tgacgatggcgatgacggcgtcgcagttgcggtgcggttgggggtgnaggccaacgccgaattcagcagcagcaacgacgtcgnatggttccggtggtgtgttccatcgctatagagaacgcgaagaacaaagagagagcgaaactgaagaagctcttcgatgaagcgtacgagaggtgccgcactgntcccaccganggcgtttccttcactctccaacaattcaccgangctctcgacaagtacgacttcaacg

SEQ ID NO: 36311 - DNA, 256 bp, Glycine max
  unsure (1)..(256): unsure at all n locations; Clone ID: 701110385H1
tggaaaactctctctagtttccagnggagcaactctancatatctttagcctcctcttatatatttnggaagttggtttctgctggaaattttgcaaacaaattcatatactgaaaggactttatgactagggagttctatacaacnagantcngccatggatctgagcactattgaattggcgaagggntaatgaagctnaatggtntattcanagggagcacgagaagctccagagnactnctttacatnatta

SEQ ID NO: 36312 - DNA, 254 bp, Glycine max
  unsure (1)..(254): unsure at all n locations; Clone ID: 701110386H1
cagcgcaaaagctgcaactccgcttctcatattagnattcagacaaagccttcatccttcatagttcagatccattcttgctctgtattntgtttttcttttaaatttctctttaaatttctcaattgatcaaagatcttcagcaaaccggtcaagtttgtgtagtttggccagatgggaggtgggnttagagtgctacacttagttagacttttctctcgttccaactggagttcagactgctgataggaaag

SEQ ID NO: 36313 - DNA, 120 bp, Glycine max
  unsure (1)..(120): unsure at all n locations; Clone ID: 701110390H1
gtagtgggcgggggaatatggatggggaactacacanaatgttatttccgttcccaggtcaggggcacttgataccaatgagtgatatggcgagagcatttaatggaagaggggtgagga

SEQ ID NO: 36314 - DNA, 253 bp, Glycine max
  unsure (1)..(253): unsure at all n locations; Clone ID: 701110391H1
gcaattgcatcaacaacaaattgaaaggatgtcgatcttcgagtacaacggnagcgccgtnntggctatggtcggcaagaactgcttcgccattgccagcnaccgangactcggcgttcagctcnaaaccatagccacggntttccaangcatttccaagattcacgacaagctcttcatcgctccctctggctcncnanggatgctcaaaantngtatcgcgtcttgtttncnggcacaantntannggntt

SEQ ID NO: 36315 - DNA, 197 bp, Glycine max
  unsure (1)..(197): unsure at all n locations; Clone ID: 701110392H1
ggcggcngcggcggcagtnacggtgctactcccacctaggattccgaccgccaccaacgttacccgcngctctgctttgccttctctgcctcntcgcggcaccaacactaaaaccactttgctcttatcttccctcaaccacttctcagtgtcccgaaaatcttctctncttcagaccagagcttcttcagagggaa

SEQ ID NO: 36316 - DNA, 95 bp, Glycine max
  unsure (1)..(95): unsure at all n locations; Clone ID: 701110393H1
cttttgttcanccacatattcaatggnttcctctncttctacttcttcnanccatttacatcctttactccatcacaacagacgncctnantcnc

SEQ ID NO: 36317 - DNA, 227 bp, Glycine max
  unsure (1)..(227): unsure at all n locations; Clone ID: 701110394H1
ctttcttcnatcttcttcnctttngacgtcattatcctaaaaaattgcagattttcacatnccaaacaacatgaaggaagggttcatgtgtctgtcggtgcncntttgtgnnacttttnatgtctccttctctattatcgacggtntagntganaanggcaagtntgagtngggtnnaaannantcngnnctaanaggaagagtggtggtgggngggagnnactcga

SEQ ID NO: 36318 - DNA, 254 bp, Glycine max
  unsure (1)..(254): unsure at all n locations; Clone ID: 701110395H1
ttaagaacttggctttgcttccttcaaagtgaggtntctaagtttcactttctttgcatagggcaacctcntttctctgtgantctgagtantcgtatngtgttattattatntcnaattntctcttatnaggncattgaatatgtntccgtcgttggatcttccctcccaagggtggctnnagttntnatctatgccgaagaaacgcaatgcttcaaaacaagggcttnanagctnaanctttcnnaaaacgg

SEQ ID NO: 36319 - DNA, 256 bp, Glycine max
  unsure (1)..(256): unsure at all n locations; Clone ID: 701110396H1
caccaatggacgactctcacaacaggaagcgacttcgccaccactccccaaagcacccccgactttgttctaactcctccgacactcacccacttgactcgccccagtttcaactctcccgcgtcgacccggaccttctcaacatgntnantgatgcnganaaggtcacggagcgtgaccctaccatgcagggtcttgactctgttattaagagtttcgaggaagaaatactttctccgcttccgaacccgaatct

SEQ ID NO: 36320 - DNA, 257 bp, Glycine max
  Clone ID: 701110401H1
gcgagagtgaagaaatggcgcaagacttggcattggatttggaggagcttcgccgcctccacagcatcgccaaaagacctcgaaccctctctcttctctcctccgaaattcgtaacctcgaaaagttatcgtcagaggaagcttctgcgcagattccggcgccgatttcgaccggaactaaagtggcgccttcacctgcgctgaagtatgcggcactcgcgtcgttcagttgggaccaggatagtgacaaagttaag

SEQ ID NO: 36321 - DNA, 267 bp, Glycine max
  unsure (1)..(267): unsure at all n locations; Clone ID: 701110402H1
gccaaaacggtaacccccgacgccgtttcgacgctcctgcgcaaacccttcccccgattccacatccggattctcccnncncatcgtcgttcaagtcctcgatcttaaggngacaggcaataaatacatgtttactgctaatgatggaaaaacgaaactgaaagctatgattccttcggatatgcgctctcaggtgctctccggggctattcaaaacctaggtcttattcgcgtccttgattacactgtcaacgatatcccnaataa

SEQ ID NO: 36322 - DNA, 205 bp, Glycine max
  Clone ID: 701110403H1
agagttgtcacccattgctgagaggaggtaggagaagagaggagaaaggttacaaccatggcttatccaccactcagatgcatgtcatggctgccatatgtgatgccctcattccttccctcccactcaacaaggacacttcacaagaccaagctctctcagacttctacaatacctctgcttctcagctcccttttcctgatga

SEQ ID NO: 36323 - DNA, 251 bp, Glycine max
  unsure (1)..(251): unsure at all n locations; Clone ID: 701110404H1
tggagtttggagcgactgaactaatcattaatttgcactncgctgtttcagcttcatcacccttcttttgcatcatttatatctcttgagaaatggcacaagaaacctttctattcacatctgaatctgtaaacnagggtcaccccgacaagctgtncnaccagatctctgatgcagtacttgatgcgngcctgancaggaccctgacagcaaggttgcctgtgagacatgcaccaagncccaacatggtc

SEQ ID NO: 36324 - DNA, 190 bp, Glycine max
  Clone ID: 701110405H1
atttcagtcagacattggctctgtacatagggttatattatcgatgcactgtatttgtattcaaattccaaatggcgaacatatttgattgctgttagttttcaaggttctgtagattatgtgacaatgcagcagcaatatttggatttgtcccatattcacatgctattttaatttgcttacaatgtgg

SEQ ID NO: 36325 - DNA, 258 bp, Glycine max
  Clone ID: 701110406H1
cgcctttctctctcttctttttactctctctctgtctctctctacgctttctcgttcgagatccctcaagggatccactaactgaaggagaaatggggttgacattcaccaagcttttcagccggcttttcgccaagaaggaaatgcgaattctgatggtgggtctcgatgcagctggtaagaccaccatcctgtacaagctcaaacttggagagatcgttaccacaattcccaccattgggttcaatgtggagactg

SEQ ID NO: 36326 - DNA, 252 bp, Glycine max
  unsure (1)..(252): unsure at all n locations; Clone ID: 701110407H1
cttccagtgaaagaaaggcagcgatggaagaagactttcgacatccccggcggcgaanaaatggatctcggcgaagacgaggtcggcgaggaganggagatcggctctggcggcctcaagaagaagctcctcaaggaaggtcaaggctgggaaacccccgaagtcggtgacgaagtccaagttcattacacggggactttgctcgacgggactaagttcgattcgagccgcgacagggattctcccttcagc

SEQ ID NO: 36327 - DNA, 261 bp, Glycine max
  unsure (1)..(261): unsure at all n locations; Clone ID: 701110408H1
ttagactcctctcctcactcacctacttagtgtttgaagtcttttagttctacgggtcctcttttatcctaactngcaacacccatttgtaataggctactttattttttaaactcttttaaaaaagttaacctagcttttctttgnatcctctgactgtcttccancggtcancgcaaaccannancgacctncgntcgnctgttantggtggncgatttacangnnatgtnatgtaanangttggggtcctnntgnngt

SEQ ID NO: 36328 - DNA, 258 bp, Glycine max
  Clone ID: 701110409H1
cgaaaaggaatcccaatggctttggggctcttggcgatgatcctcttcttcattgcttcctcttcctctcacctcgttcgcgcttccgatgacgccgacgacgcgatcttctacgagtcgttcgacgaggattttgatggacggtggattgtatccgacaaggaggattacaatggtgtctggaagcatgccaagagtgatgggcatgatgattatggacttcttgttagtgaacaagccaggaaatatgctatagtc

SEQ ID NO: 36329 - DNA, 260 bp, Glycine max
  Clone ID: 701110410H1
ctggtgaagatgctatgcagaaaagcattgatgggtatcttgtgaagccaaaagttagacatattcaaggtaatgggatcagaggtgagggccacattcgtcatttaaacaagtcaacaaactctgaagtcaactccctggcaaaaaccaacactggcatgcctgctttgaaacgctctgcgtttggtaggtccactacagttactgcattcaccaagagccaaacttctgaggcatcgttacccgttgatcaggtgtca

SEQ ID NO: 36330 - DNA, 260 bp, Glycine max
  Clone ID: 701110411H1
ttcaccacttcatatccaaaagcctcatgttgtatgtgtaccattcccagcacaaggccatgtaaacccctttatgcaactagccaaactccttcattgtgtgggtttccacataacctttgtgaacactgagttcaaccacaaccgttttgttaagtaccatggaccagactttgttaagggtctccctgatttcaaatttgagaccatacccgatggcttgccgccttcggataaggatgcaactcaggatgttccag

SEQ ID NO: 36331 - DNA, 258 bp, Glycine max
  Clone ID: 701110412H1
cctctgcaagcttgttacttggctttgtttgattgattgccccaatggccgcgtgtggctatatatctgctgccaacttcaatcatcttgttggcgccagaaacttatccaaattcagttcttcggatgccacaatttcgttatcatttggcgggagcgattcaatgggtcttagtttgcgacccgctccaattcgtgctcctaagaggaaccatttctctcccttgcgtgtcgtttgcgtcgattatcctcgaccgg

SEQ ID NO: 36332 - DNA, 262 bp, Glycine max
  unsure (1)..(262): unsure at all n locations; Clone ID: 701110413H1
cnggggccgatcaaaaccatagtggtgatagtgatggagaaccgctccttcgaccacgtcctcggctggctcaaatcctcccggcccgacatcgacggtctcaccggcagcgaatccaaccctctctccgtctcctccccctcctccgccacaatccccgtcactgacgacgccctcttcatcgacgccgaccccggccactccttccaggccattcgcgagcaaatcttcggttccaacgacacctctgcagtccctcccc

SEQ ID NO: 36333 - DNA, 263 bp, Glycine max
  unsure (1)..(263): unsure at all n locations; Clone ID: 701110414H1
ttagggacagcacttgcaattgcttcccttttgaacaggacactggtcatgcctccactatggtgcagaattgataggttatggtttccccatcctggtgttttggacgggtctataactagacaaccttttctctgtcctttggatcatgtatttgaggtaaatgtcatgttgaaagaactcccagaggaagagtttggnnctggagtagatattagggagtactcaatacttgataatccctcgctcncctcagaggtgaa

SEQ ID NO: 36334 - DNA, 264 bp, Glycine max
  unsure (1)..(264): unsure at all n locations; Clone ID: 701110415H1
gttcttcttattctccactaatagcttcttcttcggctacttgagaccttgctgcaaaggttctctcttagcttagtaacaatgggtttgaaagcactttttgtttggtgcattatatggttaggtttagcacatttgtcccttggaggaagagtnaggcactacaagtttgatgtggagtacatgatcagaaagccagattgcttggaacacgtngtnatgggaatcaacggccagtttccaggcccaactattngggcnnac

SEQ ID NO: 36335 - DNA, 266 bp, Glycine max
  unsure (1)..(266): unsure at all n locations; Clone ID: 701110416H1
cattcacccagcggttccggacagatgaagtgaaagcaatatggagagaagcaaatctggcaaaattgaatgggcttgcagagaagagcacttgatttgtcattcttgaggtgcagtcctattcttgggctgttgggcactcaattaagcctttagtgtanaatatttagcgtgtttttgggngagttcctgcacnaattatttnntntgttagaatgtttttnatntgnanaattcatgtntggnngttngtgttttanaattgg

SEQ ID NO: 36336 - DNA, 266 bp, Glycine max
  unsure (1)..(266): unsure at all n locations; Clone ID: 701110417H1
gtggaaannaagcgtttagatttanaagaacagaagatgcagcttcgtcgatcttgcttcttctttgcatacattttgcatcgcgttagggtttgcagattttcaatttcccttcttttcgctacctttctcgcatagaatctcgcaattcctccgttgttccgtttccgcaactcatcgattcgaaagttattgcttcacaaggaggtagagcatgtaataaaggaaaaaaatggaggtcgaggtgccaatctcgctgatttgaa

SEQ ID NO: 36337 - DNA, 263 bp, Glycine max
  Clone ID: 701110418H1
ctgtgttgaaggtaaaccatgggaatctagtgaagttggagggattttgcatagacccagaagaagcaaattgctatctagtctatgaatatgtagagaatggatctctatactcatggctgcatgagggcaaaaaagaaaagttgagctggaaaataaggctaagaatagccattgacattgccaatggtctccaatacatccacgagcacacaaggccacgggttgtgcacaaagacatcaagagcagcaacattctcttg

SEQ ID NO: 36338 - DNA, 261 bp, Glycine max
  Clone ID: 701110419H1
caaacacaccacagcaccaaactagttggctcaattctctttgaatggctttggaggctttgaattcaccaacagcagccaccactcccttccgtggttaccaagaagaggaggaggaggttgaccttcacctacgcgagccttgggccaagagaaaacgctccaaacgacctcgttttgagtcggaggaagagtacttggctctttgcctcatcatgcttgcacaaagcggtaacaacaacaacacccaattaccgtctt

SEQ ID NO: 36339 - DNA, 240 bp, Glycine max
  unsure (1)..(240): unsure at all n locations; Clone ID: 701110420H1
caaagatggctgctgctacagctaactgcttcttcaatctcancgtggttcactcctcacgacttcgctcgtcgcaaaacccggaaccctaaaattcagaaaccagtcctcccagtccccggcggcggcgaagcanccacctacactngcctcccgctcaagcacgactattcngctccctcccctctctcctctcccgaaatcaagctctccgaaacagccccaccgatcacccgcctc

SEQ ID NO: 36340 - DNA, 260 bp, Glycine max
  Clone ID: 701110422H1
caagaggggaaggcatgaagctgccttcaatttcaatggcggcgccaagaaatacgaggcctgaaatggactcctttccaactggtttaggaagcaaatcgaagccatgcacaaagtttttcagcacctctggctgtccatttggtgaaggatgccacttcctgcattatgttccaggtggattcaaagctgtctctcagctgatcaatgttggtagcaatcctgttattcctcaagttggtagaaaccctgttccacca

SEQ ID NO: 36341 - DNA, 260 bp, Glycine max
  unsure (1)..(260): unsure at all n locations; Clone ID: 701110424H1
gtttgtggcatcaactacattgcaactgatatcaacccacatgcagtgagagtgacccatgagacattggaagcacatggggttggngcnganttgatagtaacagatattgcatccggactagaggaccggctagcagggttggttgatgtnatggttgtgaaccctccttacgtgcctanccctgaagatgangngggtgttgaaggtattacgtcatcttgggctggtggggagaacggccggagtgtaatcaataa

SEQ ID NO: 36342 - DNA, 260 bp, Glycine max
  unsure (1)..(260): unsure at all n locations; Clone ID: 701110425H1
ccacaccttcacacaacacaacatanccacaaaagcgctctctctaatatctagagacaggatttccaacacactcacctctcagagcgcgtgcccttcaaacatgatcatcatcgtcttcttcctaggacctgtttcagattcttcgtagaggagtactagggctgatcactggatctttcaaatttggaatgatttgatggggaatatgacttgcagcttcaacaagactgattcaattgagtgctgtgaagctgaaa

SEQ ID NO: 36343 - DNA, 258 bp, Glycine max
  unsure (1)..(258): unsure at all n locations; Clone ID: 701110426H1
tttgattaggtgtgtgttaatatgggtgctagtttttcgattctggtgtgnggaattgaaaagttcaggttccatatcaagttttgagttcagttcatattctgggggtgtggaatttagagaaaggaattcaactttggggggtgcnaaggggnntactttggtttggtgtgtgttaagtnncnacatgggtgctagtntntcctcacgagnctgtgatggtgatgctaccccttcgaggccaaggcttggggacat

SEQ ID NO: 36344 - DNA, 261 bp, Glycine max
  unsure (1)..(261): unsure at all n locations; Clone ID: 701110427H1
gtttttttctcccatcataaaaaaccgaccctctcctttccctcttcaccaaccaatggctcccccaaaggccgagaagaagcccgcggagaaaaagcccgcagagaaggctccggcggagaagaagcccaaggccgagaagaagatatcgaaggaaggaggaagcgnnnnnnnnnnnnnnnnnnnnnnnnnnagcgtggagacctacaagatttacatcttcaaggtgctgaagcaggttcaccccgacatcggaatctc

SEQ ID NO: 36345 - DNA, 256 bp, Glycine max
  unsure (1)..(256): unsure at all n locations; Clone ID: 701110428H1
ccacattttccgagttttttctattgccttcctcgtttcagagtatattttcttcgtcatcattcagtaaacggaaaatctacatcaaaatcggtgctctgcgagcaaattgaactcgttggggcttaatttcaactgaaaaacatgatgggtaactctaaacttgaatttttccgcaaccctttctcagttttaatctttattggataatgcaagantgttgaagttgataacagattatgcgttatagaagcac

SEQ ID NO: 36346 - DNA, 261 bp, Glycine max
  Clone ID: 701110429H1
caacgaaaccctcttcatcttgttctatctgtgacgagcatcatggcctcaagagcagtgttattgttggctatgtgtgtgcttccggcgatggttgtggccattcgcccagcaaagaaccctttttgcgtgaagggtcgtgtctactgtgacccttgccgtgctggttttgagacctcagctaccacctacattgctggtgctgagattatgttgcaatgcaagagcagggttagcaacgaggttgtgtacacgaagaag

SEQ ID NO: 36347 - DNA, 264 bp, Glycine max
  unsure (1)..(264): unsure at all n locations; Clone ID: 701110431H1
ttcgaatttgcgctgtgtgcaagttcactaggcattcttgaattaaattactatttaaacggagtcagaatgtcttgatctgtcaggatnnttgtttctatatattnagggagtgatttattagtgtgaattgtaagcactaaggttttaaattgtggccgcagttgcaattttgtcgagatcctaatattgcagagaattactgacaaatgcggttgaagttgtggtttcaatgtagtttgganactccaaaaactgacattg

SEQ ID NO: 36348 - DNA, 269 bp, Glycine max
  Clone ID: 701110432H1
cagcgcaaaagctgcaactccgcttctcatattagaattcagacaaagcctcatccttcatagttcagatccattcttgctctgtattttgtttttcttttaaatttttctttaaatttctcaattgatcaaagatcttcagcaaaccggtcaagtttgtgtagtttggccagatgggaggtgggtttagagtgctacacttagttagaccttttctctcgttcctacctgaagttcagactgctgataggaaagtgccatttagagag

SEQ ID NO: 36349 - DNA, 265 bp, Glycine max
  Clone ID: 701110433H1
cctagattcagccacagtttcggaggagaagaaaatagtcgttcgagatggcccgtacgaagcaaactgcttcgtaagtccacaggaggaaaggctcctaggaagcagcttgcaaccaaggctgcacgtaagtctgcaccaactactggtggtgtgaagaagccacatcgttaccgtcctggtaccgttgctcttcgtgagattaggaaataccagaagagtaccgagcttttgatcaggaagctccccttccagaggctggttc

SEQ ID NO: 36350 - DNA, 261 bp, Glycine max
  Clone ID: 701110434H1
ggcagaaagcaagctcatcctagagttttaaaaatggcagcagcctcctccatggctctctcttccccatccttggctggcaaggccgtgaagctgggcccatcagcccccgaagtcgggagggtcagcatgaggaagaccgtcaccaagcaggcctcctccggaagcccatggtacggcccagaccgcgtcaagtacttgggcccattctctggcgagcccccgtcctacctcactggcgagttcccaggtgactacggc

SEQ ID NO: 36351 - DNA, 257 bp, Glycine max
  unsure (1)..(257): unsure at all n locations; Clone ID: 701110436H1
cgtancgtcgcactctgtgttttctgcgccgtctccgatctccgacaatggcgacccaaatgagcaagaagagaaagttcgtagctgatggagtgttcttcgctgaactgaacgaggttctgacaagagagttggccgaggacggttactccggcgtggaagttagggttacgccgatgcgcaccgaaatcataattagagccaccagaacccaagctgttctcggtgagaagggaaggagaataagggaacttacc

SEQ ID NO: 36352 - DNA, 239 bp, Glycine max
  unsure (1)..(239): unsure at all n locations; Clone ID: 701110437H1
cttcccgtatttgacgaagataaacagcctacctattgcaaaancttatgccacnaggacaatcctgttcttgaaagacgatggatctttaaagccacttgctatcgaattaagcaagcctgcaacagtgagtaaagtggtgttgcctgcaacagaaggtgttgagagtacaatttggntgttggccaaggctcatgtcattgtgaatgactctggttatcatcagctcataagccatt
